(19) United States
(12) Patent Application Publication
(10) Pub. No.: US 2006/0236419 A1
(43) Pub. Date: Oct. 19, 2006

(54) Nucleic acid molecules and other molecules associated with plants and uses thereof for plant improvement

(76) Inventors: Thomas J. La Rosa, Fenton, MO (US); David K. Kovalic, University City, MO (US); Yihua Zhou, Ballwin, MO (US); Yongwei Cao, Chesterfield, MO (US)

Correspondence Address: MONSANTO COMPANY, 800 N. LINDBERGH BLVD., ATTENTION: GAIL P. WUELLNER, IP PARALEGAL, (E2NA), ST. LOUIS, MO, 63167, US

(21) Appl. No.: 10/612,783

(22) Filed: Jul. 2, 2003

Related U.S. Application Data
(63) Continuation-in-part of application No. 09/985,678, filed on Nov. 5, 2001, now abandoned.
Application No. 09/985,678 is a continuation of application No. 09/304,517, filed on May 6, 1999, now abandoned.

(51) Int. Cl. A01H 1/00; C12N 15/82; C12N 15/87; C07H 21/04

(52) U.S. Cl. 800/278; 800/284; 800/289; 536/23.6

(57) ABSTRACT

Polynucleotides useful for improvement of plants are provided. In particular, polynucleotide sequences are provided from plant sources. Polypeptides encoded by the polynucleotide sequences are also provided. The disclosed polynucleotides and polypeptides find use in production of transgenic plants to produce plants having improved properties.

[0001] This application claims the benefit of U.S. application 60/067,000 filed on Nov. 24, 1997; Ser. No. 09/199,129 filed on Nov. 24, 1998; 60/069,472 filed on Dec. 9, 1997; Ser. No. 09/210,297 filed on Dec. 8, 1998; 60/066,873 filed on Nov. 25, 1997; Ser. No. 09/198,779 filed on Nov. 24, 1998; 60/083,388 filed on Apr. 29, 1998; 60/080,844 filed on Apr. 7, 1998; Ser. No. 09/283,466 filed on Apr. 2, 1999; 60/083,389 filed on Apr. 29, 1998; 60/085,245 filed on May 13, 1998; 60/072,888 filed on Jan. 27, 1998; Ser. No. 09/237,183 filed on Jan. 26, 1999; 60/072,027 filed on Jan. 21, 1998; Ser. No. 09/233,218 filed on Jan. 20, 1999; 60/076,912 filed on Mar. 6, 1998; Ser. No. 09/262,979 filed on Mar. 4, 1999; Ser. No. 09/987,899 filed on Nov. 16, 2001; 60/078,031 filed on Mar. 16, 1998; Ser. No. 09/267,199 filed on Mar. 12, 1999; 60/087,973 filed on Jun. 4, 1998; 60/071,064 filed on Jan. 9, 1998; Ser. No. 09/227,586 filed on Jan. 8, 1999; 60/085,429 filed on May 8, 1998; 60/076,709 filed on Mar. 4, 1998; Ser. No. 09/252,974 filed on Feb. 19, 1999; Ser. No. 09/955,216 filed on Sep. 19, 2001; 60/084,684 filed on May 8, 1998; Ser. No. 09/304,517 filed on May 6, 1999; Ser. No. 09/371,146 filed on Aug. 9, 1999; Ser. No. 09/654,617 filed on Sep. 5, 2000; Ser. No. 09/684,01 6 filed on Oct. 10, 2000; Ser. No. 09/985,678 filed on Nov. 5, 2001; 60/087,631 filed on Jun. 2, 1998; 60/091,035 filed on Jun. 29, 1998; 60/085,533 filed on May 15, 1998; 60/071,479 filed on Jan. 13, 1998; Ser. No. 09/229,413 filed on Jan. 12, 1999; 60/179,730 filed on Feb. 2, 2000; Ser. No. 09/733,089 filed on Dec. 11, 2000; Ser. No. 09/733,370 filed on Feb. 1, 2001; Ser. No. 09/826,019 filed on Apr. 5, 2001; Ser. No. 09/816,660 filed on Mar. 26, 2001; Ser. No. 09/922,293 filed on Aug. 6, 2001; Ser. No. 10/155,881 filed on May 22, 2002; 60/074,201 filed on Feb. 10, 1998; Ser. No. 09/244,000 filed on Feb. 8, 1999; Ser. No. 09/978,703 filed on Oct. 18, 2001; 60/074,282 filed on Feb. 10, 1998; 60/074,280 filed on Feb. 10, 1998; 60/075,462 filed on Feb. 19, 1998; 60/077,231 filed on Mar. 9, 1998; Ser. No. 09/263,191 filed on Mar. 5, 1999; Ser. No. 09/975,254 filed on Oct. 12, 2001; 60/074,281 filed on Feb. 10, 1998; 60/074,566 filed on Feb. 12, 1998; 60/074,567 filed on Feb. 12, 1998; 60/074,565 filed on Feb. 12, 1998; 60/074,789 filed on Feb. 19, 1998; 60/075,459 filed on Feb. 19, 1998; 60/075,461 filed on Feb. 19, 1998; 60/075,464 filed on Feb. 19, 1998; 60/075,460 filed on Feb. 19, 1998; 60/075,463 filed on Feb. 19, 1998; 60/077,229 filed on Mar. 9, 1998; 60/078,368 filed on Mar. 18, 1998; 60/077,230 filed on Mar. 9, 1998; 60/083,386 filed on Apr. 29, 1998; 60/083,387 filed on Apr. 29, 1998; 60/086,608 filed on May 22, 1998; 60/087,972 filed on Jun. 4, 1998; Ser. No. 09/621,816 filed on Jul. 21, 2000; Ser. No. 10/319762 filed on Dec. 16, 2002; 60/086,594 filed on May 22, 1998; 60/087,422 filed on Jun. 1, 1998; 60/083,390 filed on Apr. 29, 1998; Ser. No. 09/300,482 filed on Apr. 28, 1999; 60/085,057 filed on May 8, 1998; 60/085,224 filed on May 13, 1998; Ser. No. 09/306,349 filed on May 10, 1999; 60/085,223 filed on May 13, 1998; 60/083,067 filed on Apr. 27, 1998; 60/085,222 filed on May 13, 1998; 60/088,441 filed on Jun. 8, 1998; 60/089,789 filed on Jun. 18, 1998; 60/086,339 filed on May 21, 1998; 60/086,188 filed on May 21, 1998; 60/086,183 filed on May 21, 1998; 60/086,1 87 filed on May 21, 1998; 60/086,185 filed on May 21, 1998; 60/089,793 filed on Jun. 18, 1998; 60/086,1 84 filed on May 21, 1998; 60/089,810 filed on Jun. 18, 1998; 60/089,814 filed on Jun. 18, 1998; 60/086,186 filed on May 21, 1998; 60/089,524 filed on Jun. 16, 1998; Ser. No. 09/333,535 filed on Jun. 14, 1999; 60/085,940 filed on May 19, 1998; 60/089,627 filed on Jun. 16, 1998; 60/087,762 filed on Jun. 2, 1998; 60/091,247 filed on Jun. 30, 1998; 60/090,856 filed on Jun. 26, 1998; 60/090,170 filed on Jun. 22, 1998; 60/091,405 filed on Jun. 30, 1998; 60/092,036 filed on Jul. 8, 1998; 60/090,928 filed on Jun. 26, 1998; 60/099,667 filed on Sep. 9, 1998; Ser. No. 09/391,630 filed on Sep. 8, 1999; 60/099,668 filed on Sep. 9, 1998; 60/099,670 filed on Sep. 9, 1998; 60/099,697 filed on Sep. 9, 1998; 60/144,084 filed on Jul. 16, 1999; Ser. No. 09/615,606 filed on Jul. 13, 2000; 60/109,018 filed on Nov. 18, 1998; 60/100,674 filed on Sep. 16, 1998; Ser. No. 09/206,040 filed on Dec. 4, 1998; 60/100,673 filed on Sep. 16, 1998; 60/101,131 filed on Sep. 21, 1998; 60/101,132 filed on Sep. 21, 1998; 60/101,130 filed on Sep. 21, 1998; 60/100,672 filed on Sep. 16, 1998; 60/101,343 filed on Sep. 22, 1998; 60/101,344 filed on Sep. 22, 1998; Ser. No. 09/394,745 filed on Sep. 15, 1999; 60/104,126 filed on Oct. 13, 1998; 60/101,508 filed on Sep. 22, 1998; 60/132,860 filed on May 7, 1999; Ser. No. 09/565,386 filed on May 4, 2000; 60/101,347 filed on Sep. 22, 1998; 60/104,128 filed on Oct. 13, 1998; 60/130,180 filed on Apr. 20, 1999; Ser. No. 09/553,094 filed on Apr. 18, 2000; 60/104,127 filed on Oct. 13, 1998; 60/104,124 filed on Oct. 13, 1998; 60/104,119 filed on Oct. 13, 1998; 60/104,121 filed on Oct. 13, 1998; 60/101,708 filed on Sep. 25, 1998; 60/104,122 filed on Oct. 13, 1998; 60/104,123 filed on Oct. 13, 1998; 60/101,707 filed on Sep. 25, 1998; 60/101,709 filed on Sep. 25, 1998; 60/100,963 filed on Sep. 17, 1998; 60/108,996 filed on Nov. 18, 1998; 60/111,981 filed on Dec. 11, 1998; Ser. No. 09/440,687 filed on Nov. 16, 1999; 60/111,033 filed on Dec. 4, 1998; 60/110,108 filed on Nov. 25, 1998; 60/110,109 filed on Nov. 25, 1998; 60/111,742 filed on Dec. 10, 1998; 60/141,129 filed on Jun. 28, 1999; 60/141,132 filed on Jun. 28, 1999; 60/112,807 filed on Dec. 18, 1998; 60/141,139 filed on Jun. 28, 1999; 60/112,229 filed on Dec. 14, 1998; 60/141,136 filed on Jun. 28, 1999; 60/112,221 filed on Dec. 14, 1998; 60/130,178 filed on Apr. 20, 1999; 60/141,135 filed on Jun. 28, 1999; 60/112,808 filed on Dec. 18, 1998; 60/113,224 filed on Dec. 22, 1998; 60/130,177 filed on Apr. 20, 1999; 60/130,179 filed on Apr. 20, 1999; 60/130,181 filed on Apr. 20, 1999; 60/141,128 filed on Jun. 28, 1999; 60/141,134 filed on Jun. 28, 1999; 60/130,464 filed on Apr. 22, 1999; Ser. No. 09/552,086 filed on Apr. 19, 2000; 60/125,818 filed on Mar. 23, 1999; Ser. No. 09/531,113 filed on Mar. 22, 2000; 60/125,817 filed on Mar. 23, 1999; 60/130,174 filed on Apr. 20, 1999; 60/125,816 filed on Mar. 23, 1999; 60/162,747 filed on Oct. 28, 1999; Ser. No. 09/692,257 filed on Oct. 19, 2000; 60/133,691 filed on May 10, 1999; 60/133,692 filed on May 10, 1999; 60/133,690 filed on May 10, 1999; Ser. No. 09/565,240 filed on May 8, 2000; Ser. No. 09/754,853 filed on Jan. 5, 2001; 60/141,137 filed on Jun. 28, 1999; 60/145,485 filed on Jul. 23, 1999; 60/145,148 filed on Jul. 22, 1999; Ser. No. 09/619,643 filed on Jul. 19, 2000; 60/145,147 filed on Jul. 22, 1999; 60/145,146 filed on Jul. 22, 1999; 60/146,907 filed on Aug. 2, 1999; 60/146,904 filed on Aug. 2, 1999; 60/154,375 filed on Sep. 17, 1999; Ser. No. 09/663,423 filed on Sep. 15, 2000; 60/156,951 filed on Sep. 30, 1999; Ser. No. 09/669,817 filed on Sep. 26, 2000; 60/161,619 filed on Oct. 26, 1 999; Ser. No. 09/696,664 filed on Oct. 25, 2000; 60/197,872 filed on Apr. 19, 2000; Ser. No. 09/837,604 filed on Apr. 18, 2001; 60/202,214 filed on May 8, 2000; Ser. No. 09/849,526 filed on May 7, 2001; 60/211,750 filed on Jun. 15, 2000; Ser. No. 09/874,708 filed on Jun. 5, 2001; 60/209,830 filed on Jun. 6, 2000; Ser. No. 09/873,402 filed on Jun. 5, 2001; 60/208,063 filed on May 31, 2000; Ser. No. 09/865,419 filed on May 29, 2001; 60/207,458 filed on May 30, 2000; Ser. No. 09/865,439 filed on May 29, 2001; 60/228,466 filed on Aug. 29, 2000; Ser. No. 09/938,294 filed on Aug. 24, 2001; 60/396,665 filed on Jul. 18, 2002; 60/312,544 filed on Aug. 15, 2001; 60/324,109 filed on Sep. 21, 2001; Ser. No. 10/219,999 filed on Aug. 15, 2002, all of which are hereby incorporated by reference herein in their entirety.

### INCORPORATION OF SEQUENCE LISTING

[0002] Two copies of the sequence listing (Seq. Listing Copy 1 and Seq. Listing Copy 2) and a computer-readable form of the sequence listing, all on CD-ROMs, each containing the file named pa_{—}00591.rpt, which is 13,817,100 bytes (measured in MS-DOS) and was created on Jun. 30, 2003, are herein incorporated by reference.

### INCORPORATION OF TABLE

[0003] Two copies of Table 1 (Table 1 Copy 1 and Table 1 Copy 2) all on CD-ROMs, each containing the file named pa_{—}00591.txt, which is 5,639,445 bytes (measured in MS-DOS) and was created on Jul. 1, 2003, are herein incorporated by reference.

### FIELD OF THE INVENTION

[0004] Disclosed herein are inventions in the field of plant biochemistry and genetics. More specifically polynucleotides for use in plant improvement are provided, in particular, sequences from Zea mays, Oryza sativa, and Glycine max and the polypeptides encoded by such cDNAs are disclosed. Methods of using the polynucleotides for production of transgenic plants with improved biological characteristics are disclosed.

### BACKGROUND OF THE INVENTION

[0005] The ability to develop transgenic plants with improved traits depends in part on the identification of genes that are useful for production of transformed plants for expression of novel polypeptides. In this regard, the discovery of the polynucleotide sequences of such genes, and the polypeptide encoding regions of genes, is needed. Molecules comprising such polynucleotides may be used, for example, in DNA constructs useful for imparting unique genetic properties into transgenic plants.

### SUMMARY OF THE INVENTION

[0006] This invention provides isolated and purified polynucleotides comprising DNA sequences and the polypeptides encoded by such molecules from Zea mays, Oryza sativa, and Glycine max. Polynucleotide sequences of the present invention are provided in the attached Sequence Listing as SEQ ID NO: 1-3549. Polypeptides of the present invention are provided as SEQ ID NO: 3550-7098. Preferred subsets of the polynucleotides and polypeptides of this invention are useful for improvement of one or more important properties in plants.

[0007] The present invention also provides fragments of the polynucleotides of the present invention for use, for example as probes or molecular markers. Such fragments comprise at least 15 consecutive nucleotides in a sequence selected from the group consisting of SEQ ID NO: 1-3549 and complements thereof. Polynucleotide fragments of the present invention are useful as primers for PCR amplification and in hybridization assays such as transcription profiling assays or marker assays, e.g. high throughput assays where the oligonucleotides are provided in high-density arrays on a substrate. The present invention also provides homologs of the polynucleotide and polypeptides of the present invention.

[0008] This invention also provides DNA constructs comprising polynucleotides provided herein. Of particular interest are recombinant DNA constructs, wherein said constructs comprise a polynucleotide selected from the group consisting of:
[0009] (a) a polynucleotide comprising a nucleic acid sequence selected from the group consisting of SEQ ID NO: 1-3549;
[0010] (b) a polynucleotide encoding a polypeptide having an amino acid sequence selected from the group consisting of SEQ ID NO: 3550-7098;
[0011] (c) a polynucleotide comprising a nucleic acid sequence complementary to a nucleic acid sequence selected from the group consisting of SEQ ID NO: 1-3549;
[0012] (d) a polynucleotide having at least 70% sequence identity to a polynucleotide of (a), (b) or (c);
[0013] (e) a polynucleotide encoding a polypeptide having at least 80% sequence identity to a polypeptide having an amino acid sequence selected from the group consisting of SEQ ID NO: 3550-7098;
[0014] (f) a polynucleotide comprising a promoter functional in a plant cell, operably joined to a coding sequence for a polypeptide having at least 80% sequence identity to a polypeptide having an amino acid sequence selected from the group consisting of SEQ ID NO: 3550-7098, wherein said encoded polypeptide is a functional homolog of said polypeptide having an amino acid sequence selected from the group consisting of SEQ ID NO: 3550-7098; and
[0015] (g) a polynucleotide comprising a promoter functional in a plant cell, operably joined to a coding sequence for a polypeptide having an amino acid sequence selected from the group consisting of SEQ ID NO: 3550-7098, wherein transcription of said coding sequence produces an RNA molecule having sufficient complementarity to a polynucleotide encoding said polypeptide to result in decreased expression of said polypeptide when said construct is expressed in a plant cell.

[0016] Such constructs are useful for production of transgenic plants having at least one improved property as the result of expression of a polypeptide of this invention. Improved properties of interest include yield, disease resistance, growth rate, stress tolerance and others as set forth in more detail herein.

[0017] The present invention also provides a method of modifying plant protein activity by inserting into cells of said plant an antisense construct comprising a: promoter which functions in plant cells, a polynucleotide comprising a polypeptide coding sequence operably linked to said promoter, wherein said protein coding sequence is oriented such that transcription from said promoter produces an RNA molecule having sufficient complementarity to a polynueleotide encoding said polypeptide to result in decreased expression of said polypeptide when said construct is expressed in a plant cell.

[0018] This invention also provides a transformed organism, particularly a transformed plant, preferably a transformed crop plant, comprising a recombinant DNA construct of the present invention.

### DETAILED DESCRIPTION OF THE INVENTION

[0019] The present invention provides polynucleotides, or nucleic acid molecules, representing is DNA sequences and the polypeptides encoded by such polynucleotides from Zea mays, Oryza sativa, and Glycine max. The polynucleotides and polypeptides of the present invention find a number of uses, for example in recombinant DNA constructs, in physical arrays of molecules, and for use as plant breeding markers. In addition, the nucleotide and amino acid sequences of the polynucleotides and polypeptides find use in computer based storage and analysis systems.

[0020] Depending on the intended use, the polynucleotides of the present invention may be present in the form of DNA, such as cDNA or genomic DNA, or as RNA, for example mRNA. The polynucleotides of the present invention may be single or double stranded and may represent the coding, or sense strand of a gene, or the non-coding, antisense, strand.

[0021] The polynucleotides of the present invention find particular use in generation of transgene plants to provide for increased or decreased expression of the polypeptides encoded by the cDNA polynucleotides provided herein. As a result of such biotechnological applications, plants, particularly crop plants, having improved properties are obtained. Crop plants of interest in the present invention include, but are not limited to soy, cotton, canola, maize, wheat, sunflower, sorghum, alfalfa, barley, millet, rice, tobacco, fruit and vegetable crops, and turf grass. Of particular interest are uses of the disclosed polynucleotides to provide plants having improved yield resulting from improved utilization of key biochemical compounds, such as nitrogen, phosphorous and carbohydrate, or resulting from improved responses to environmental stresses, such as cold, heat, drought, salt, and attack by pests or pathogens. Polynucleotides of the present invention may also be used to provide plants having improved growth and development, and ultimately increased yield, as the result of modified expression of plant growth regulators or modification of cell cycle or photosynthesis pathways. Other traits of interest that may be modified in plants using polynucleotides of the present invention include flavonoid content, seed oil and protein quantity and quality, herbicide tolerance, and rate of homologous recombination.

[0022] The term “isolated” is used herein in reference to purified polynucleotide or polypeptide molecules. As used herein, “purified” refers to a polynucleotide or polypeptide molecule separated from substantially all other molecules normally associated with it in its native state. More preferably, a substantially purified molecule is the predominant species present in a preparation. A substantially purified molecule may be greater than 60% free, preferably 75% free, more preferably 90% free, and most preferably 95% free from the other molecules (exclusive of solvent) present in the natural mixture. The term “isolated” is also used herein in reference to polynucleotide molecules that are separated from nucleic acids which normally flank the polynucleotide in nature. Thus, polynucleotides fused to regulatory or coding sequences with which they are not normally associated, for example as the result of recombinant techniques, are considered isolated herein. Such molecules are considered isolated even when present, for example in the chromosome of a host cell, or in a nucleic acid solution. The terms “isolated” and “purified” as used herein are not intended to encompass molecules present in their native state.

[0023] As used herein a “transgenic” organism is one whose genome has been altered by the incorporation of foreign genetic material or additional copies of native genetic material, e.g. by transformation or recombination.

[0024] It is understood that the molecules of the invention may be labeled with reagents that facilitate detection of the molecule. As used herein, a label can be any reagent that facilitates detection, including fluorescent labels, chemical labels, or modified bases, including nucleotides with radioactive elements, e.g. ³²P, ³³P, ³⁵S or ¹²⁵I, such as ³²P deoxycytidine-5′-triphosphate (³²PdCTP).

[0025] Polynucleotides of the present invention are capable of specifically hybridizing to other polynuelcotides under certain circumstances. As used herein, two polynucleotides are said to be capable of specifically hybridizing to one another if the two molecules are capable of forming an anti-parallel, double-stranded nucleic acid structure. A nucleic acid molecule is said to be the “complement” of another nucleic acid molecule if the molecules exhibit complete complementarity. As used herein, molecules are said to exhibit “complete complementarity” when every nucleotide in each of the molecules is complementary to the corresponding nucleotide of the other. Two molecules are said to be “minimally complementary” if they can hybridize to one another with sufficient stability to permit them to remain annealed to one another under at least conventional “low-stringency” conditions. Similarly, the molecules are said to be “complementary” if they can hybridize to one another with sufficient stability to permit them to remain annealed to one another under conventional “high-stringency” conditions. Conventional stringency conditions are known to those skilled in the art and can be found, for example in Molecular Cloning: A Laboratory Manual, 3^{rd} edition Volumes 1, 2, and 3. J. F. Sambrook, D. W. Russell, and N. Irwin, Cold Spring Harbor Laboratory Press, 2000.

[0026] Departures from complete complementarity are therefore permissible, as long as such departures do not completely preclude the capacity of the molecules to form a double-stranded structure. Thus, in order for a nucleic acid molecule to serve as a primer or probe it need only be sufficiently complementary in sequence to be able to form a stable double-stranded structure under the particular solvent and salt concentrations employed. Appropriate stringency conditions which promote DNA hybridization are, for example, 6.0×sodium chloride/sodium citrate (SSC) at about 45° C., followed by a wash of 2.0×SSC at 50° C. Such conditions are known to those skilled in the art and can be found, for example in Current Protocols in Molecular Biology, John Wiley & Sons, N.Y. (1989). Salt concentration and temperature in the wash step can be adjusted to alter hybridization stringency. For example, conditions may vary from low stringency of about 2.0×SSC at 40° C. to moderately stringent conditions of about 2.0×SSC at 50° C. to high stringency conditions of about 0.2×SSC at 50° C.

[0027] As used herein “sequence identity” refers to the extent to which two optimally aligned polynueleotide or peptide sequences are invariant throughout a window of alignment of components, e.g. nucleotides or amino acids. An “identity fraction” for aligned segments of a test sequence and a reference sequence is the number of identical components which are shared by the two aligned sequences divided by the total number of components in the reference sequence segment, i.e. the entire reference sequence or a smaller defined part of the reference sequence. “Percent identity” is the identity fraction times 100. Comparison of sequences to determine percent identity can be accomplished by a number of well-known methods, including for example by using mathematical algorithms, such as those in the BLAST suite of sequence analysis programs.

[0028] Polynuelcotides—This invention provides polynucleotides comprising regions that encode polypeptides. The encoded polypeptides may be the complete protein encoded by the gene represented by the polynucleotide, or may be fragments of the encoded protein. Preferably, polynucleotides provided herein encode polypeptides constituting a substantial portion of the complete protein, and more preferentially, constituting a sufficient portion of the complete protein to provide the relevant biological activity.

[0029] Of particular interest are polynucleotides of the present invention that encode polypeptides involved in one or more important biological functions in plants. Such polynucleotides may be expressed in transgenic plants to produce plants having improved phenotypic properties and/or improved response to stressful environmental conditions. See, for example, Table 1 for a list of improved plant properties and responses and the SEQ ID NO: 1-3549 representing the polynucleotides that may be expressed in transgenic plants to impart such improvements.

[0030] Polynucleotides of the present invention are generally used to impart such biological properties by providing for enhanced protein activity in a transgenic organism, preferably a transgenic plant, although in some cases, improved properties are obtained by providing for reduced protein activity in a transgenic plant. Reduced protein activity and enhanced protein activity are measured by reference to a wild type cell or organism and can be determined by direct or indirect measurement. Direct measurement of protein activity might include an analytical assay for the protein, per se, or enzymatic product of protein activity. Indirect assay might include measurement of a property affected by the protein. Enhanced protein activity can be achieved in a number of ways, for example by overproduction of mRNA encoding the protein or by gene shuffling. One skilled in the are will know methods to achieve overproduction of mRNA, for example by providing increased copies of the native gene or by introducing a construct having a heterologous promoter linked to the gene into a target cell or organism. Reduced protein activity can be achieved by a variety of mechanisms including antisense, mutation or knockout. Antisense RNA will reduce the level of expressed protein resulting in reduced protein activity as compared to wild type activity levels. A mutation in the gene encoding a protein may reduce the level of expressed protein and/or interfere with the function of expressed protein to cause reduced protein activity.

[0031] The polynucleotides of this invention represent cDNA sequences from Zea mays, Oryza sativa, and Glycine max. Nucleic acid sequences of the polynucleotides of the present invention are provided herein as SEQ ID NO: 1-3549 where SEQ ID NO: 1-491 represent sequences derived from Glycine max, SEQ ID NO: 492-3025 represent sequences derived from Zea mays, and SEQ ID NO: 3026-3549 represent sequences derived from Oryza sativa.

[0032] A subset of the nucleic molecules of this invention includes fragments of the disclosed polynucleotides consisting of oligonucleotides of at least 15, preferably at least 16 or 17, more preferably at least 18 or 19, and even more preferably at least 20 or more, consecutive nucleotides. Such oligonucleotides are fragments of the larger molecules having a sequence selected from the group of polynucleotide sequences consisting of SEQ ID NO: 1-3549, and find use, for example as probes and primers for detection of the polynucleotides of the present invention.

[0033] Also of interest in the present invention are variants of the polynucleotides provided herein. Such variants may be naturally occurring, including homologous polynucleotides from the same or a different species, or may be non-natural variants, for example polynucleotides synthesized using chemical synthesis methods, or generated using recombinant DNA techniques. With respect to nucleotide sequences, degeneracy of the genetic code provides the possibility to substitute at least one base of the protein encoding sequence of a gene with a different base without causing the amino acid sequence of the polypeptide produced from the gene to be changed. Hence, the DNA of the present invention may also have any base sequence that has been changed from SEQ ID NO: 1-3549 by substitution in accordance with degeneracy of the genetic code. References describing codon usage include: Carels et al., J. Mol. Evol. 46: 45 (1998) and Fennoy et al., Nucl. Acids Res. 21(23): 5294 (1993).

[0034] Polynucleotides of the present invention that are variants of the polynucleotides provided herein will generally demonstrate significant identity with the polynucleotides provided herein. Of particular interest are polynucleotide homologs having at least about 60% sequence identity, at least about 70% sequence identity, at least about 80% sequence identity, at least about 85% sequence identity, and more preferably at least about 90%, 95% or even greater, such as 98% or 99% sequence identity with polynucleotide sequences described herein.

[0035] Protein and Polypeptide Molecules—This invention also provides polypeptides encoded by polynucleotides of the present invention. Amino acid sequences of the polypeptides of the present invention are provided herein as SEQ ID NO: 3550-7098 where SEQ ID NO: 3550-4040 represent sequences derived from Glycine max, SEQ ID NO: 4041-6574 represent sequences derived from Zea mays, and SEQ ID NO: 6575-7098 represent sequences derived from Oryza sativa.

[0036] As used herein, the term “polypeptide” means an unbranched chain of amino acid residues that are covalently linked by an amide linkage between the carboxyl group of one amino acid and the amino group of another. The term polypeptide can encompass whole proteins (i.e. a functional protein encoded by a particular gene), as well as fragments of proteins. Of particular interest are polypeptides of the present invention which represent whole proteins or a sufficient portion of the entire protein to impart the relevant biological activity of the protein. The term “protein” also includes molecules consisting of one or more polypeptide chains. Thus, a polypeptide of the present invention may also constitute an entire gene product, but only a portion of a functional oligomeric protein having multiple polypeptide chains.

[0037] Of particular interest in the present invention are polypeptides involved in one or more important biological properties in plants. Such polypeptides may be produced in transgenic plants to provide plants having improved phenotypic properties and/or improved response to stressful environmental conditions. In some cases, decreased expression of such polypeptides may be desired, such decreased expression being obtained by use of the polynucleotide sequences provided herein, for example in antisense or cosuppression methods. See, Table 1 for a list of improved plant properties and responses and SEQ ID NO: 3550-7098 for the polypeptides whose expression may be altered in transgenic plants to impart such improvements. A summary of such improved properties and polypeptides of interest for increased or decreased expression is provided below.

[0038] Yield/Nitrogen: Yield improvement by improved nitrogen flow, sensing, uptake, storage and/or transport. Polypeptides useful for imparting such properties include those involved in aspartate and glutamate biosynthesis, polypeptides involved in aspartate and glutamate transport, polypeptides associated with the TOR (Target of Rapamycin) pathway, nitrate transporters, ammonium transporters, chlorate transporters and polypeptides involved in tetrapyrrole biosynthesis.

[0039] Yield/Carbohydrate: Yield improvement by effects on carbohydrate metabolism, for example by increased sucrose production and/or transport. Polypeptides useful for improved yield by effects on carbohydrate metabolism include polypeptides involved in sucrose or starch metabolism, carbon assimilation or carbohydrate transport, including, for example sucrose transporters or glucose/hexose transporters, enzymes involved in glycolysis/gluconeogenesis, the pentose phosphate cycle, or raffinose biosynthesis, and polypeptides involved in glucose signaling, such as SNF1 complex proteins.

[0040] Yield/Photosynthesis: Yield improvement resulting from increased photosynthesis. Polypeptides useful for increasing the rate of photosynthesis include phytochrome, photosystem I and II proteins, electron carriers, ATP synthase, NADII dehydrogenase and cytochrome oxidase.

[0041] Yield/Phosphorus: Yield improvement resulting from increased phosphorus uptake, transport or utilization. Polypeptides useful for improving yield in this manner include phosphatases and phosphate transporters.

[0042] Yield/Stress tolerance: Yield improvement resulting from improved plant growth and development by helping plants to tolerate stressful growth conditions. Polypeptides useful for improved stress tolerance under a variety of stress conditions include polypeptides involved in gene regulation, such as serine/threonine-protein kinases, MAP kinases, MAP kinase kinases, and MAP kinase kinase kinases; polypeptides that act as receptors for signal transduction and regulation, such as receptor protein kinases; intracellular signaling proteins, such as protein phosphatases, GTP binding proteins, and phospholipid signaling proteins; polypeptides involved in arginine biosynthesis; polypeptides involved in ATP metabolism, including for example ATPase, adenylate transporters, and polypeptides involved in ATP synthesis and transport; polypeptides involved in glycine betaine, jasmonic acid, flavonoid or steroid biosynthesis; and hemoglobin. Enhanced or reduced activity of such polypeptides in transgenic plants will provide changes in the ability of a plant to respond to a variety of environmental stresses, such as chemical stress, drought stress and pest stress.

[0043] Cold tolerance: Polypeptides of interest for improving plant tolerance to cold or freezing temperatures include polypeptides involved in biosynthesis of trehalose or raffinose, polypeptides encoded by cold induced genes, fatty acyl desaturases and other polypeptides involved in glycerolipid or membrane lipid biosynthesis, which find use in modification of membrane fatty acid composition, alternative oxidase, calcium-dependent protein kinases, LEA proteins and uncoupling protein.

[0044] Heat tolerance: Polypeptides of interest for improving plant tolerance to heat include polypeptides involved in biosynthesis of trehalose, polypeptides involved in glycerolipid biosynthesis or membrane lipid metabolism (for altering membrane fatty acid composition), heat shock proteins and mitochondrial NDK.

[0045] Osmotic tolerance: Polypeptides of interest for improving plant tolerance to extreme osmotic conditions include polypeptides involved in proline biosynthesis.

[0046] Drought tolerance: Polypeptides of interest for improving plant tolerance to drought conditions include aquaporins, polypeptides involved in biosynthesis of trehalose or wax, LEA proteins and invertase.

[0047] Pathogen or pest tolerance: Polypeptides of interest for improving plant tolerance to effects of plant pests or pathogens include proteases, polypeptides involved in anthocyanin biosynthesis, polypeptides involved in cell wall metabolism, including cellulases, glucosidases, pectin methylesterase, pectinase, polygalacturonase, chitinase, chitosanase, and cellulose synthase, and polypeptides involved in biosynthesis of terpenoids or indole for production of bioactive metabolites to provide defense against herbivorous insects.

[0048] Cell cycle modification: Polypeptides encoding cell cycle enzymes and regulators of the cell cycle pathway are useful for manipulating growth rate in plants to provide early vigor and accelerated maturation leading to improved yield. Improvements in quality traits, such as seed oil content, may also be obtained by expression of cell cycle enzymes and cell cycle regulators. Polypeptides of interest for modification of cell cycle pathway include cyclins and EIF5alpha pathway proteins, polypeptides involved in polyamine metabolism, polypeptides which act as regulators of the cell cycle pathway, including cyclin-dependent kinases (CDKs), CDK-activating kinases, CDK-inhibitors, Rb and Rb-binding proteins, and transcription factors that activate genes involved in cell proliferation and division, such as the E2F family of transcription factors, proteins involved in degradation of cyclins, such as cullins, and plant homologs of tumor suppressor polypeptides.

[0049] Seed protein yield/content: Polypeptides useful for providing increased seed protein quantity and/or quality include polypeptides involved in the metabolism of amino acids in plants, particularly polypeptides involved in biosynthesis of methionine/cysteine and lysine, amino acid transporters, amino acid efflux carriers, seed storage proteins, proteases, and polypeptides involved in phytic acid metabolism.

[0050] Seed oil yield/content: Polypeptides useful for providing increased seed oil quantity and/or quality include polypeptides involved in fatty acid and glycerolipid biosynthesis, beta-oxidation enzymes, enzymes involved in biosynthesis of nutritional compounds, such as carotenoids and tocopherols, and polypeptides that increase embryo size or number or thickness of aleurone.

[0051] Disease response in plants: Polypeptides useful for imparting improved disease responses to plants include polypeptides encoded by cercosporin induced genes, antifungal proteins and proteins encoded by R-genes or SAR genes. Expression of such polypeptides in transgenic plants will provide an increase in disease resistance ability of plants.

[0052] Galactomannanan biosynthesis: Polypeptides involved in production of galactomannans are of interest for providing plants having increased and/or modified reserve polysaccharides for use in food, pharmaceutical, cosmetic, paper and paint industries.

[0053] Flavonoid/isoflavonoid metabolism in plants: Polypeptides of interest for modification of flavonoid/isoflavonoid metabolism in plants include cinnamate-4-hydroxylase, chalcone synthase and flavonol synthase. Enhanced or reduced activity of such polypeptides in transgenic plants will provide changes in the quantity and/or speed of flavonoid metabolism in plants and may improve disease resistance by enhancing synthesis of protective secondary metabolites or improving signaling pathways governing disease resistance.

[0054] Plant growth regulators: Polypeptides involved in production of substances that regulate the growth of various plant tissues are of interest in the present invention and may be used to provide transgenic plants having altered morphologies and improved plant growth and development profiles leading to improvements in yield and stress response. Of particular interest are polypeptides involved in the biosynthesis of plant growth hormones, such as gibberellins, cytokinins, auxins, ethylene and abscisic acid, and other proteins involved in the activity and/or transport of such polypeptides, including for example, cytokinin oxidase, cytokinin/purine permeases, F-box proteins, G-proteins and phytosulfokines.

[0055] Herbicide tolerance: Polypeptides of interest for producing plants having tolerance to plant herbicides include polypeptides involved in the shikimate pathway, which are of interest for providing glyphosate tolerant plants. Such polypeptides include polypeptides involved in biosynthesis of chorismate, phenylalanine, tyrosine and tryptophan.

[0056] Transcription factors in plants: Transcription factors play a key role in plant growth and development by controlling the expression of one or more genes in temporal, spatial and physiological specific patterns. Enhanced or reduced activity of such polypeptides in transgenic plants will provide significant changes in gene transcription patterns and provide a variety of beneficial effects in plant growth, development and response to environmental conditions. Transcription factors of interest include, but are not limited to myb transcription factors, including helix-turn-helix proteins, homeodomain transcription factors, leucine zipper transcription factors, MADS transcription factors, transcription factors having AP2 domains, zinc finger transcription factors, CCAAT binding transcription factors, ethylene responsive transcription factors, transcription initiation factors and UV damaged DNA binding proteins.

[0057] Homologous recombination: Increasing the rate of homologous recombination in plants is useful for accelerating the introgression of transgenes into breeding varieties by backerossing, and to enhance the conventional breeding process by allowing rare recombinants between closely linked genes in phase repulsion to be identified more easily. Polypeptides useful for expression in plants to provide increased homologous recombination include polypeptides involved in mitosis and/or meiosis, including for example, resolvases and polypeptide members of the RAD52 epistasis group.

[0058] Lignin biosynthesis: Polypeptides involved in lignin biosynthesis are of interest for increasing plants' resistance to lodging and for increasing the usefulness of plant materials as biofuels.

[0059] The function of polypeptides of the present invention is determined by comparison of the amino acid sequence of the novel polypeptides to amino acid sequences of known polypeptides. A variety of homology based search algorithms are available to compare a query sequence to a protein database, including for example, BLAST, FASTA, and Smith-Waterman. In the present application, BLASTX and BLASTP algorithms are used to provide protein function information. A number of values are examined in order to assess the confidence of the function assignment. Useful measurements include “E-value” (also shown as “hit_p”), “percent identity”, “percent query coverage”, and “percent hit coverage”.

[0060] In BLAST, E-value, or expectation value, represents the number of different alignments with scores equivalent to or better than the raw alignment score, S, that are expected to occur in a database search by chance. The lower the E value, the more significant the match. Because database size is an element in E-value calculations, E-values obtained by BLASTing against public databases, such as GenBank, have generally increased over time for any given query/entry match. In setting criteria for confidence of polypeptide function prediction, a “high” BLAST match is considered herein as having an E-value for the top BLAST hit provided in Table 1 of less than 1E-30; a medium BLASTX E-value is 1E-30 to 1E-8; and a low BLASTX E-value is greater than 1E-8. The top BLAST hit and corresponding E values are provided in columns six and seven of Table 1.

[0061] Percent identity refers to the percentage of identically matched amino acid residues that exist along the length of that portion of the sequences which is aligned by the BLAST algorithm. In setting criteria for confidence of polypeptide function prediction, a “high” BLAST match is considered herein as having percent identity for the top BLAST hit provided in Table 1 of at least 70%; a medium percent identity value is 35% to 70%; and a low percent identity is less than 35%.

[0062] Of particular interest in protein function assignment in the present invention is the use of combinations of E-values, percent identity, query coverage and hit coverage. Query coverage refers to the percent of the query sequence that is represented in the BLAST alignment. Bit coverage refers to the percent of the database entry that is represented in the BLAST alignment. In the present invention, function of a query polypeptide is inferred from function of a protein homolog where either (1) hit_p<1e-30 or % identity>35% AND query_coverage>50% AND hit_coverage>50%, or (2) hit_p<1e-8 AND query_coverage>70% AND hit_coverage>70%.

[0063] A further aspect of the invention comprises functional homologs which differ in one or more amino acids from those of a polypeptide provided herein as the result of one or more conservative amino acid substitutions. It is well known in the art that one or more amino acids in a native sequence can be substituted with at least one other amino acid, the charge and polarity of which are similar to that of the native amino acid, resulting in a silent change. For instance, valine is a conservative substitute for alanine and threonine is a conservative substitute for serine. Conservative substitutions for an amino acid within the native polypeptide sequence can be selected from other members of the class to which the naturally occurring amino acid belongs. Amino acids can be divided into the following four groups: (1) acidic amino acids, (2) basic amino acids, (3) neutral polar amino acids, and (4) neutral nonpolar amino acids. Representative amino acids within these various groups include, but are not limited to: (1) acidic (negatively charged) amino acids such as aspartic acid and glutamic acid; (2) basic (positively charged) amino acids such as arginine, histidine, and lysine; (3) neutral polar amino acids such as glycine, scrine, threonine, cysteine, tyrosine, asparagine, and glutamine; and (4) neutral nonpolar (hydrophobic) amino acids such as alanine, leucine, isoleucine, valine, proline, phenylalanine, tryptophan, and methionine. Conserved substitutcs for an amino acid within a native amino acid sequence can be selected from other members of the group to which the naturally occurring amino acid belongs. For example, a group of amino acids having aliphatic side chains is glycine, alanine, valine, leucine, and isoleucine; a group of amino acids having aliphatic-hydroxyl side chains is serine and threonine; a group of amino acids having amide-containing side chains is asparagine and glutamine; a group of amino acids having aromatic side chains is phenylalanine, tyrosine, and tryptophan; a group of amino acids having basic side chains is lysine, arginine, and histidine; and a group of amino acids having sulfur-containing side chains is cystic and methioninc. Naturally conservative amino acids substitution groups are: valine-leucine, valine-isoleucine, phenylalanine-tyrosine, lysine-arginine, alanine-valine, aspartic acid-glutamic acid, and asparagine-glutamine. A further aspect of the invention comprises polypeptides which differ in one or more amino acids from those of a soy protein sequence as the result of deletion or insertion of one or more amino acids in a native sequence.

[0064] Also of interest in the present invention are functional homologs of the polypeptides provided herein which have the same function as a polypeptide provided herein, but with increased or decreased activity or altered specificity. Such variations in protein activity may exist naturally in polypeptides encoded by related genes, for example in a related polypeptide encodes by a different allele or in a different species, or can be achieved by mutagenesis. Naturally occurring variant polypeptides may be obtained by well known nucleic acid or protein screening methods using DNA or antibody probes, for example by screening libraries for genes encoding related polypeptides, or in the case of expression libraries, by screening directly for variant polypeptides. Screening methods for obtaining a modified protein or enzymatic activity of interest by mutagenesis are disclosed in U.S. Pat. No. 5,939,250. An alternative approach to the generation of variants uses random recombination techniques such as “DNA shuffling” as disclosed in U.S. Pat. Nos. 5,605,793; 5,811,238; 5,830,721 and 5,837,458; and International Applications WO 98/31837 and WO 99/65927, all of which are incorporated herein by reference. An alternative method of molecular evolution involves a staggered extension process (StEP) for in vitro mutagenesis and recombination of nucleic acid molecule sequences, as disclosed in U.S. Pat. No. 5,965,408 and International Application WO 98/42832, both Of which are incorporated herein by reference.

[0065] Polypeptides of the present invention that are variants of the polypeptides provided herein will generally demonstrate significant identity with the polypeptides provided herein. Of particular interest are polypeptides having at least about 35% sequence identity, at least about 50% sequence identity, at least about 60% sequence identity, at least about 70% sequence identity, at least about 80% sequence identity, and more preferably at least about 85%, 90%, 95% or even greater, sequence identity with polypeptide sequences described herein. Of particular interest in the present invention are polypeptides having amino acid sequences provided herein (reference polypeptides) and functional homologs of such reference polypeptides, wherein such functional homologs comprises at least 50 consecutive amino acids having at least 90% identity to a 50 amino acid polypeptide fragment of said reference polypeptide.

[0066] Recombinant DNA Consiructs—The present invention also encompasses the use of polynucleotides of the present invention in recombinant constructs, i.e. constructs comprising polynucleotides that are constructed or modified outside of cells and that join nucleic acids that are not found joined in nature. Using methods known to those of ordinary skill in the art, polypeptide encoding sequences of this invention can be inserted into recombinant DNA constructs that can be introduced into a host cell of choice for expression of the encoded protein, or to provide for reduction of expression of the encoded protein, for example by antisense or cosuppression methods. Potential host cells include both prokaryotic and eukaryotic cells. Of particular interest in the present invention is the use of the polynucleotides of the present invention for preparation of constructs for use in plant transformation.

[0067] In plant transformation, exogenous genetic material is transferred into a plant cell. By “exogenous” it is meant that a nucleic acid molecule, for example a recombinant DNA construct comprising a polynucleotide of the present invention, is produced outside the organism, e.g. plant, into which it is introduced. An exogenous nucleic acid molecule can have a naturally occurring or non-naturally occurring nucleotide sequence. One skilled in the art recognizes that an exogenous nucleic acid molecule can be derived from the same species into which it is introduced or from a different species. Such exogenous genetic material may be transferred into either monocot or dicot plants including, but not limited to, soy, cotton, canola, maize, teosinte, wheat, rice and Arabidopsis plants. Transformed plant cells comprising such exogenous genetic material may be regenerated to produce whole transformed plants.

[0068] Exogenous genetic material may be transferred into a plant cell by the use of a DNA vector or construct designed for such a purpose. A construct can comprise a number of sequence elements, including promoters, encoding regions, and selectable markers. Vectors are available which have been designed to replicate in both E. coli and A. lumefaciens and have all of the features required for transferring large inserts of DNA into plant chromosomes. Design of such vectors is generally within the skill of the art.

[0069] A construct will generally include a plant promoter to direct transcription of the protein-encoding region or the antisense sequence of choice. Numerous promoters, which are active in plant cells, have been described in the literature. These include the nopaline synthase (NOS) promoter and octopine synthase (OCS) promoters carried on tumor-inducing plasmids of Agrobacterium tumefaciens or caulimovirus promoters such as the Cauliflower Mosaic Virus (CaMV) 19S or 35S promoter (U.S. Pat. No. 5,352,605), and the Figwort Mosaic Virus (FMV) 35S-promoter (U.S. Pat. No. 5,378,619). These promoters and numerous others have been used to create recombinant vectors for expression in plants. Any promoter known or found to cause transcription of DNA in plant cells can be used in the present invention. Other useful promoters are described, for example, in U.S. Pat. Nos. 5,378,619; 5,391,725; 5,428,147; 5,447,858; 5,608,144; 5,614,399; 5,633,441; and 5,633,435, all of which are incorporated herein by reference.

[0070] In addition, promoter enhancers, such as the CaMV 35S enhancer or a tissue specific enhancer, may be used to enhance gene transcription levels. Enhancers often are found 5′ to the start of transcription in a promoter that functions in eukaryotic cells, but can often be inserted in the forward or reverse orientation 5′ or 3′ to the coding sequence. In some instances, these 5′ enhancing elements are introns. Deemed to be particularly useful as enhancers are the 5′ introns of the rice actin 1 and rice actin 2 genes. Examples of other enhancers which could be used in accordance with the invention include elements from octopine synthase genes, the maize alcohol dehydrogenase gene intron 1, elements from the maize shrunken 1 gene, the sucrose synthase intron, the TMV omega element, and promoters from non-plant eukaryotes.

[0071] DNA constructs can also contain one or more 5′ non-translated leader sequences which serve to enhance polypeptide production from the resulting mRNA transcripts. Such sequences may be derived from the promoter selected to express the gene or can be specifically modified to increase translation of the mRNA. Such regions may also be obtained from viral RNAs, from suitable eukaryotic genes, or from a synthetic gene sequence. For a review of optimizing expression of transgenes, see Koziel et al. (1996) Plant Mol. Biol. 32:393-405).

[0072] Constructs and vectors may also include, with the coding region of interest, a nucleic acid sequence that acts, in whole or in part, to terminate transcription of that region. One type of 3′ untranslated sequence which may be used is a 3′ UTR from the nopaline synthase gene (nos 3′) of Agrobacterium tumefaciens. Other 3′ termination regions of interest include those from a gene encoding the small subunit of a ribulose-1,5-bisphosphate carboxylase-oxygenase (rbcS), and more specifically, from a rice rbcS gene (U.S. Pat. No. 6,426,446), the 3′ UTR for the T7 transcript of Agrobacterium tumefaciens, the 3′ end of the protease inhibitor I or II genes from potato or tomato, and the 3′ region isolated from Cauliflower Mosaic Virus. Alternatively, one also could use a gamma coixin, oleosin 3 or other 3′ UTRs from the genus Coix (PCT Publication WO 99/58659).

[0073] Constructs and vectors may also include a selectable marker. Selectable markers may be used to select for plants or plant cells that contain the exogenous genetic material. Useful selectable marker genes include those conferring resistance to antibiotics such as kanamycin (nptII), hygromycin B (aph IV) and gentamycin (aac3 and aacC4) or resistance to herbicides such as glufosinate (bar or pat) and glyphosate (EPSPS). Examples of such selectable markers are illustrated in U.S. Pat. Nos. 5,550,318; 5,633,435; 5,780,708 and 6,118,047, all of which are incorporated herein by reference.

[0074] Constructs and vectors may also include a screenable marker. Screenable markers may be used to monitor transformation. Exemplary screenable markers include genes expressing a colored or fluorescent protein such as a luciferase or green fluorescent protein (GFP), a β-glucuronidase or uidA gene (GUS) which encodes an enzyme for which various chromogenic substrates are known or an R-locus gene, which encodes a product that regulates the production of anthocyanin pigments (red color) in plant tissues. Other possible selectable and/or screenable marker genes will be apparent to those of skill in the art.

[0075] Constructs and vectors may also include a transit peptide for targeting of a gene target to a plant organelle, particularly to a chloroplast, leucoplast or other plastid organelle (U.S. Pat. No. 5,188,642).

[0076] For use in Agrobacterium mediated transformation methods, constructs of the present invention will also include T-DNA border regions flanking the DNA to be inserted into the plant genome to provide for transfer of the DNA into the plant host chromosome as discussed in more detail below. An exemplary plasmid that finds use in such transformation methods is pMON18365, a T-DNA vector that can be used to clone exogenous genes and transfer them into plants using Agrobacterium-mediated transformation. See US Patent Application 20030024014, herein incorporated by reference. This vector contains the left border and right border sequences necessary for Agrobacterium transformation. The plasmid also has origins of replication for maintaining the plasmid in both E. coli and Agrobacterium lumefaciens strains.

[0077] A candidate gene is prepared for insertion into the T-DNA vector, for example using well-known gene cloning techniques such as PCR. Restriction sites may be introduced onto each end of the gene to facilitate cloning. For example, candidate genes may be amplified by PCR techniques using a set of primers. Both the amplified DNA and the cloning vector are cut with the same restriction enzymes, for example, NotI and PstI. The resulting fragments are gel-purified, ligated together, and transformed into E. coli. Plasmid DNA containing the vector with inserted gene may be isolated from E. coli cells selected for spectinomycin resistance, and the presence of the desired insert verified by digestion with the appropriate restriction enzymes. Undigested plasmid may then be transformed into Agrobacterium lumefaciens using techniques well known to those in the art, and transformed Agrobacterium cells containing the vector of interest selected based on spectinomycin resistance. These and other similar constructs useful for plant transformation may be readily prepared by one skilled in the art.

[0078] Transformation Methods and Transgenic Plants—Methods and compositions for transforming bacteria and other microorganisms are known in the art. See for example Molecular Cloning: A Laboratory Manual, 3^{rd} edition Volumes 1, 2, and 3. J. F. Sambrook, D. W. Russell, and N. Irwin, Cold Spring Harbor Laboratory Press, 2000.

[0079] Technology for introduction of DNA into cells is well known to those of skill in the art. Methods and materials for transforming plants by introducing a transgenic DNA construct into a plant genome in the practice of this invention can include any of the well-known and demonstrated methods including electroporation as illustrated in U.S. Pat. No. 5,384,253, microprojectile bombardment as illustrated in U.S. Pat. Nos. 5,015,580; 5,550,318; 5,538,880; 6,160,208; 6,399,861 and 6,403,865, Agrobacterium-mediated transformation as illustrated in U.S. Pat. Nos. 5,635,055; 5,824,877; 5,591,616; 5,981,840 and 6,384,301, and protoplast transformation as illustrated in U.S. Pat. No. 5,508,184, all of which are incorporated herein by reference.

[0080] Any of the polynucleotides of the present invention may be introduced into a plant cell in a permanent or transient manner in combination with other genetic elements such as vectors, promoters enhancers etc. Further any of the polynucleotides of the present invention may be introduced into a plant cell in a manner that allows for production of the polypeptide or fragment thereof encoded by the polynucleotide in the plant cell, or in a manner that provides for decreased expression of an endogenous gene and concomitant decreased production of protein.

[0081] It is also to be understood that two different transgenic plants can also be mated to produce offspring that contain two independently segregating added, exogenous genes. Selfing of appropriate progeny can produce plants that are homozygous for both added, exogenous genes that encode a polypeptide of interest. Back-crossing to a parental plant and out-crossing with a non-transgenic plant are also contemplated, as is vegetative propagation.

[0082] Expression of the polynucleotides of the present invention and the concomitant production of polypeptides encoded by the polynucleotides is of interest for production of transgenic plants having improved properties, particularly, improved properties which result in crop plant yield improvement. Expression of polypeptides of the present invention in plant cells may be evaluated by specifically identifying the protein products of the introduced genes or evaluating the phenotypic changes brought about by their expression. It is noted that when the polypeptide being produced in a transgenic plant is native to the target plant species, quantitative analyses comparing the transformed plant to wild type plants may be required to demonstrate increased expression of the polypeptide of this invention.

[0083] Assays for the production and identification of specific proteins make use of various physical-chemical, structural, functional, or other properties of the proteins. Unique physical-chemical or structural properties allow the proteins to be separated and identified by electrophoretic procedures, such as native or denaturing gel electrophoresis or isoelectric focusing, or by chromatographic techniques such as ion exchange or gel exclusion chromatography. The unique structures of individual proteins offer opportunities for use of specific antibodies to detect their presence in formats such as an ELISA assay. Combinations of approaches may be employed with even greater specificity such as western blotting in which antibodies are used to locate individual gene products that have been separated by electrophoretic techniques. Additional techniques may be employed to absolutely confirm the identity of the product of interest such as evaluation by amino acid sequencing following purification. Although these are among the most commonly employed, other procedures may be additionally used.

[0084] Assay procedures may also be used to identify the expression of proteins by their functionality, particularly where the expressed protein is an enzyme capable of catalyzing chemical reactions involving specific substrates and products. These reactions may be measured, for example in plant extracts, by providing and quantifying the loss of substrates or the generation of products of the reactions by physical and/or chemical procedures.

[0085] In many cases, the expression of a gene product is determined by evaluating the phenotypic results of its expression. Such evaluations may be simply as visual observations, or may involve assays. Such assays may take many forms including but not limited to analyzing changes in the chemical composition, morphology, or physiological properties of the plant. Chemical composition may be altered by expression of genes encoding enzymes or storage proteins which change amino acid composition and may be detected by amino acid analysis, or by enzymes which change starch quantity which may be analyzed by near infrared reflectance spectrometry. Morphological changes may include greater stature or thicker stalks.

[0086] Plants with decreased expression of a gene of interest can also be achieved through the use of polynucleotides of the present invention, for example by expression of antisense nucleic acids, or by identification of plants transformed with sense expression constructs that exhibit cosuppression effects.

[0087] Antisense approaches are a way of preventing or reducing gene function by targeting the genetic material as disclosed in U.S. Pat. Nos. 4,801,540; 5,107,065; 5,759,829; 5,910,444; 6,184,439; and 6,198,026, all of which are incorporated herein by reference. The objective of the antisense approach is to use a sequence complementary to the target gene to block its expression and create a mutant cell line or organism in which the level of a single chosen protein is selectively reduced or abolished. Antisense techniques have several advantages over other ‘reverse genetic’ approaches. The site of inactivation and its developmental effect can be manipulated by the choice of promoter for antisense genes or by the timing of external application or microinjection. Antisense can manipulate its specificity by selecting either unique regions of the target gene or regions where it shares homology to other related genes.

[0088] The principle of regulation by antisense RNA is that RNA that is complementary to the target mRNA is introduced into cells, resulting in specific RNA:RNA duplexes being formed by base pairing between the antisense substrate and the target. Under one embodiment, the process involves the introduction and expression of an antisense gene sequence. Such a sequence is one in which part or all of the normal gene sequences are placed under a promoter in inverted orientation so that the ‘wrong’ or complementary strand is transcribed into a noncoding antisense RNA that hybridizes with the target mRNA and interferes with its expression. An antisense vector is constructed by standard procedures and introduced into cells by transformation, transfection, electroporation, microinjection, infection, etc. The type of transformation and choice of vector will determine whether expression is transient or stable. The promoter used for the antisense gene may influence the level, timing, tissue, specificity, or inducibility of the antisense inhibition.

[0089] As used herein “gene suppression” means any of the well-known methods for suppressing expression of protein from a gene including sense suppression, anti-sense suppression and RNAi suppression. In suppressing genes to provide plants with a desirable phenotype, anti-sense and RNAi gene suppression methods are preferred. More particularly, for a description of anti-sense regulation of gene expression in plant cells see U.S. Pat. No. 5,107,065 and for a description of RNAi gene suppression in plants by transcription of a dsRNA see U.S. Pat. No. 6,506,559, U.S. Patent Application Publication No. 2002/0168707 A1, and U.S. patent application Ser. No. 09/423,143 (see WO 98/53083), Ser. No. 09/127,735 (see WO 99/53050) and Ser. No. 09/084,942 (see WO 99/61631), all of which are incorporated herein by reference. Suppression of an gene by RNAi can be achieved using a recombinant DNA construct having a promoter operably linked to a DNA element comprising a sense and anti-sense element of a segment of genomic DNA of the gene, e.g., a segment of at least about 23 nucleotides, more preferably about 50 to 200 nucleotides where the sense and anti-sense DNA components can be directly linked or joined by an intron or artificial DNA segment that can form a loop when the transcribed RNA hybridizes to form a hairpin structure. For example, genomic DNA from a polymorphic locus of SEQ ID NO: 1-3549 can be used in a recombinant construct for suppression of a cognate gene by RNAi suppression.

[0090] Insertion mutations created by transposable elements may also prevent gene function. For example, in many dicot plants, transformation with the T-DNA of Agrobacterium may be readily achieved and large numbers of transformants can be rapidly obtained. Also, some species have lines with active transposable elements that can efficiently be used for the generation of large numbers of insertion mutations, while some other species lack such options. Mutant plants produced by Agrobacterium or transposon mutagenesis and having altered expression of a polypeptide of interest can be identified using the polynucleotides of the present invention. For example, a large population of mutated plants may be screened with polynulcleotides encoding the polypeptide of interest to detect mutated plants having an insertion in the gene encoding the polypeptide of interest.

[0091] Polynucleotides of the present invention may be used in site-directed mutagenesis. Site-directed mutagenesis may be utilized to modify nucleic acid sequences, particularly as it is a technique that allows one or more of the amino acids encoded by a nucleic acid molecule to be altered (e.g., a threonine to be replaced by a methionine). Three basic methods for site-directed mutagenesis are often employed. These are cassette mutagenesis, primer extension, and methods based upon PCR.

[0092] In addition to the above discussed procedures, practitioners are familiar with the standard resource materials which describe specific conditions and procedures for the construction, manipulation and isolation of macromolecules (e.g., DNA molecules, plasmids, etc.), generation of recombinant organisms and the screening and isolating of clones.

[0093] Arrays—The polynucleotide or polypeptide molecules of this invention may also be used to prepare arrays of target molecules arranged on a surface of a substrate. The target molecules are preferably known molecules, e.g. polynucleotides (including oligonucleotides) or polypeptides, which are capable of binding to specific probes, such as complementary nucleic acids or specific antibodies. The target molecules are preferably immobilized, e.g. by covalent or non-covalent bonding, to the surface in small amounts of substantially purified and isolated molecules in a grid pattern. By immobilized is meant that the target molecules maintain their position relative to the solid support under hybridization and washing conditions. Target molecules are deposited in small footprint, isolated quantities of “spotted elements” of preferably single-stranded polynucleotide preferably arranged in rectangular grids in a density of about 30 to 100 or more, e.g. up to about 1000, spotted elements per square centimeter. In addition in preferred embodiments arrays comprise at least about 100 or more, e.g. at least about 1000 to 5000, distinct target polynucleotides per unit substrate. Where detection of transcription for a large number of genes is desired, the economics of arrays favors a high density design criteria provided that the target molecules are sufficiently separated so that the intensity of the indicia of a binding event associated with highly expressed probe molecules does not overwhelm and mask the indicia of neighboring binding events. For high-density microarrays each spotted element may contain up to about 10⁷ or more copies of the target molecule, e.g. single stranded cDNA, on glass substrates or nylon substrates.

[0094] Arrays of this invention can be prepared with molecules from a single species, preferably a plant species, or with molecules from other species, particularly other plant species. Arrays with target molecules from a single species can be used with probe molecules from the same species or a different species due to the ability of cross species homologous genes to hybridize. It is generally preferred for high stringency hybridization that the target and probe molecules are from the same species.

[0095] In preferred aspects of this invention the organism of interest is a plant and the target molecules are polynucleotides or oligonucleotides with nucleic acid sequences having at least 80 percent sequence identity to a corresponding sequence of the same length in a polynucleotide having a sequence selected from the group consisting of SEQ ID NO: 1-3549 or complements thereof. In other preferred aspects of the invention at least 10% of the target molecules on an array have at least 15, more preferably at least 20, consecutive nucleotides of sequence having at least 80%, more preferably up to 100%, identity with a corresponding sequence of the same length in a polynucleotide having a sequence selected from the group consisting of SEQ ID NO: 1-3549 or complements or fragments thereof.

[0096] Such arrays are useful in a variety of applications, including gene discovery, genomic research, molecular breeding and bioactive compound screening. One important use of arrays is in the analysis of differential gene transcription, e.g. transcription profiling where the production of mRNA in different cells, normally a cell of interest and a control, is compared and discrepancies in gene expression arc identified. In such assays, the presence of discrepancies indicates a difference in gene expression levels in the cells being compared. Such information is useful for the identification of the types of genes expressed in a particular cell or tissue type in a known environment. Such applications generally involve the following steps: (a) preparation of probe, e.g. attaching a label to a plurality of expressed molecules; (b) contact of probe with the array under conditions sufficient for probe to bind with corresponding target, e.g. by hybridization or specific binding; (c) removal of unbound, probe from the array; and (d) detection of bound probe.

[0097] A probe may be prepared with RNA extracted from a given cell line or tissue. The probe may be produced by reverse transcription of mRNA or total RNA and labeled with radioactive or fluorescent labeling. A probe is typically a mixture containing many different sequences in various amounts, corresponding to the numbers of copies of the original mRNA species extracted from the sample.

[0098] The initial RNA sample for probe preparation will typically be derived from a physiological source. The physiological source may be selected from a variety of organisms, with physiological sources of interest including single celled organisms such as yeast and multicellular organisms, including plants and animals, particularly plants, where the physiological sources from multicellular organisms may be derived from particular organs or tissues of the multicellular organism, or from isolated cells derived from an organ, or tissue of the organism. The physiological sources may also be multicellular organisms at different developmental stages (e.g., 10-day-old seedlings), or organisms grown under different environmental conditions (e.g., drought-stressed plants) or treated with chemicals.

[0099] In preparing the RNA probe, the physiological source may be subjected to a number of different processing steps, where such processing steps might include tissue homogenation, cell isolation and cytoplasmic extraction, nucleic acid extraction and the like, where such processing steps are known to the those of skill in the art. Methods of isolating RNA from cells, tissues, organs or whole organisms are known to those of skill in the art.

[0100] Computer Based Systems and Methods—The sequence of the molecules of this invention can be provided in a variety of media to facilitate use thereof. Such media can also provide a subset thereof in a form that allows a skilled artisan to examine the sequences. In a preferred embodiment, 20, preferably 50, more preferably 100, even more preferably 200 or more of the polynucleotide and/or the polypeptide sequences of the present invention can be recorded on computer readable media. As used herein, “computer readable media” refers to any medium that can be read and accessed directly by a computer. Such media include, but are not limited to: magnetic storage media, such as floppy discs, hard disc, storage medium, and magnetic tape: optical storage media such as CD-ROM; electrical storage media such as RAM and ROM; and hybrids of these categories such as magnetic/optical storage media. A skilled artisan can readily appreciate how any of the presently known computer readable media can be used to create a manufacture comprising a computer readable medium having recorded thereon a nucleotide sequence of the present invention.

[0101] As used herein, “recorded” refers to a process for storing information on computer readable media. A skilled artisan can readily adopt any of the presently known methods for recording information on computer readable media to generate media comprising the nucleotide sequence information of the present invention. A variety of data storage structures are available to a skilled artisan for creating a computer readable medium having recorded thereon a nucleotide sequence of the present invention. The choice of the data storage structure will generally be based on the means chosen to access the stored information. In addition, a variety of data processor programs and formats can be used to store the nucleotide sequence information of the present invention on computer readable media. The sequence information can be represented in a word processing text file, formatted in commercially-available software such as WordPerfect and Microsoft Word, or represented in the form of an ASCII file, stored in a database application, such as DB2, Sybase, Oracle, or the like. A skilled artisan can readily adapt any number of data processor structuring formats (e.g., text file or database) in order to obtain a computer readable medium having recorded thereon the nucleotide sequence information of the present invention.

[0102] By providing one or more of polynucleotide or polypeptide sequences of the present invention in a computer readable medium, a skilled artisan can routinely access the sequence information for a variety of purposes. The examples which follow demonstrate how software which implements the BLAST and BLAZE search algorithms on a Sybase system can be used to identify open reading frames (ORFs) within the genome that contain homology to ORFs or polypeptides from other organisms. Such ORFs are polypeptide encoding fragments within the sequences of the present invention and are useful in producing commercially important polypeptides such as enzymes used in amino acid biosynthesis, metabolism, transcription, translation, RNA processing, nucleic acid and a protein degradation, protein modification, and DNA replication, restriction, modification, recombination, and repair.

[0103] The present invention further provides systems, particularly computer-based systems, which contain the sequence information described herein. Such systems are designed to identify commercially important fragments of the nucleic acid molecule of the present invention. As used herein, “a computer-based system” refers to the hardware, software, and memory used to analyze the sequence information of the present invention. A skilled artisan can readily appreciate that any one of the currently available computer-based systems are suitable for use in the present invention.

[0104] As indicated above, the computer-based systems of the present invention comprise a database having stored therein a nucleotide sequence of the present invention and the necessary hardware and software for supporting and implementing a homology search. As used herein, “database” refers to memory system that can store searchable nucleotide sequence information. As used herein “query sequence” is a nucleic acid sequence, or an amino acid sequence, or a nucleic acid sequence corresponding to an amino acid sequence, or an amino acid sequence corresponding to a nucleic acid sequence, that is used to query a collection of nucleic acid or amino acid sequences. As used herein, “homology search” refers to one or more programs which are implemented on the computer-based system to compare a query sequence, i.e., gene or peptide or a conserved region (motif, with the sequence information stored within the database. Homology searches are used to identify segments and/or regions of the sequence of the present invention that match a particular query sequence. A variety of known searching algorithms are incorporated into commercially available software for conducting homology searches of databases and computer readable media comprising sequences of molecules of the present invention.

[0105] Commonly preferred sequence length of a query sequence is from about 10 to 100 or more amino acids or from about 20 to 300 or more nucleotide residues. There are a variety of motifs known in the art. Protein motifs include, but are not limited to, enzymatic active sites and signal sequences. An amino acid query is converted to all of the nucleic acid sequences that encode that amino acid sequence by a software program, such as TBLASTN, which is then used to search the database. Nucleic acid query sequences that are motifs include, but are not limited to, promoter sequences, cis elements, hairpin structures and inducible expression elements (protein binding sequences).

[0106] Thus, the present invention further provides an input device for receiving a query sequence, a memory for storing sequences (the query sequences of the present invention and sequences identified using a homology search as described above) and an output device for outputting the identified homologous sequences. A variety of structural formats for the input and output presentations can be used to input and output information in the computer-based systems of the present invention. A preferred format for an output presentation ranks fragments of the sequence of the present invention by varying degrees of homology to the query sequence. Such presentation provides a skilled artisan with a ranking of sequences that contain various amounts of the query sequence and identifies the degree of homology contained in the identified fragment.

[0107] Having now generally described the invention, the same will be more readily understood through reference to the following examples which are provided by way of illustration, and are not intended to be limiting of the present invention, unless specified.

### EXAMPLE 1

[0108] A cDNA library is generated from Zea mays, Oryza sativa, or Glycine max tissue. Tissue is harvested and immediately frozen in liquid nitrogen. The harvested tissue is stored at −80° C. until preparation of total RNA. The total RNA is purified using Trizol reagent from Invitrogen Corporation (Invitrogen Corporation, Carlsbad, Calif., U.S.A.), essentially as recommended by the manufacturer. Poly A+ RNA (mRNA) is purified using magnetic oligo dT beads essentially as recommended by the manufacturer (Dynabeads, Dynal Biotech, Oslow, Norway).

[0109] Construction of plant cDNA libraries is well known in the art and a number of cloning strategies exist. A number of cDNA library construction kits are commercially available. cDNA libraries are prepared using the Superscript™ Plasmid System for cDNA synthesis and Plasmid Cloning (Invitrogen Corporation, Carlsbad, Calif., U.S.A.), as described in the Superscript II cDNA library synthesis protocol. The cDNA libraries are quality controlled for a good insert:vector ratio.

[0110] The cDNA libraries are plated on LB agar containing the appropriate antibiotics for selection and incubated at 37° for a sufficient time to allow the growth of individual colonies. Single colonies are individually placed in each well of a 96-well microtiter plates containing LB liquid including the selective antibiotics. The plates are incubated overnight at approximately 37° C. with gentle shaking to promote growth of the cultures. The plasmid DNA is isolated from each clone using Qiaprep plasmid isolation kits, using the conditions recommended by the manufacturer (Qiagen Inc., Valencia, Calif. U.S.A.).

[0111] The template plasmid DNA clones are used for subsequent sequencing. Sequences of polynucleotides may be obtained by a number of sequencing techniques known in the art, including fluorescence-based sequencing methodologies. These methods have the detection, automation, and instrumentation capability necessary for the analysis of large volumes of sequence data. With these types of automated systems, fluorescent dye-labeled sequence reaction products are detected and data entered directly into the computer, producing a chromatogram that is subsequently viewed, stored, and analyzed using the corresponding software programs. These methods are known to those of skill in the art and have been described and reviewed.

### EXAMPLE 2

[0112] The open reading frame in each polynucleotide sequence is identified by a combination of predictive and homology based methods. The longest open reading frame (ORF) is determined, and the top BLAST match is identified by BLASTX against NCBI. The top BLAST hit is then compared to the predicted ORF, with the BLAST hit given precedence in the case of discrepancies.

[0113] Functions of polypeptides encoded by the polynucleotide sequences of the present invention are determined using a hierarchical classification tool, termed FunCAT, for Functional Categories Annotation Tool. Most categories collected in FunCAT are classified by function, although other criteria are used, for example, cellular localization or temporal process. The assignment of a functional category to a query sequence is based on BLASTX sequence search results, which compare two protein sequences. FunCAT assigns categories by iteratively scanning through all blast hits, starting with the most significant match, and reporting the first category assignment for each FunCAT source classification scheme. In the present invention, function of a query polypeptide is inferred from the function of a protein homolog where either (1) hit_p<1e-30 or % identity>35% AND query_coverage>50% AND hit_coverage>50%, or (2) hit_p<1e-8 AND query coverage>70% AND hit_coverage>70%.

[0114] Functional assignments from five public classification schemes, GO_BP, GO_CC, GO_MF, KFGG, and EC, and one internal Monsanto classification scheme, POI, are provided in Table 1. The column under the heading “CAT_TYPE” indicates the source of the classification. GO_BP=Gene Ontology Consortium—biological process; GO_CC=Gene Ontology Consortium—cellular component; GO_MF=Gene Ontology Consortium—molecular function; KEGG—KEGG functional hierarchy; EC=Enzyme Classification from ENZYME data bank release 25.0; POI=Pathways of Interest. The column under the heading “CAT_DESC” provides the name of the subcategory into which the query sequence was classified. The column under the heading “PRODUCT_HIT_DESC provides a description of the BLAST hit to the query sequences that led to the specific classification. The column under the heading “HIT_E” provides the e-value for the BLAST hit. It is noted that the e-value in the HIT_E column may differ from the e-value based on the top BLAST hit provided in the E_VALUE column since these calculations were done on different days, and database size is an element in E-value calculations. E-values obtained by BLASTing against.public databases, such as GenBank, will generally increase over time for any given query/entry match.

[0115] Sequences useful for producing transgenic plants having improved biological properties are identified from their FunCAT annotations and are also provided in Table 1. A biological property of particular interest is plant yield. Plant yield may be improved by alteration of a variety of plant pathways, including those involving nitrogen, carbohydrate, or phosphorus utilization and/or uptake. Plant yield may also be improved by alteration of a plant's photosynthetic capacity or by improving a plant's ability to tolerate a variety of environmental stresses, including cold, heat, drought and osmotic stresses. Other biological properties of interest that may be improved using sequences of the present invention include pathogen or pest tolerance, herbicide tolerance, disease resistance, growth rate (for example by modification of cell cycle, by expression of transcription factors, or expression of growth regulators), seed oil and/or protein yield and quality, rate and control of recombination, and lignin content.

[0116] Polynucleotide sequences are provided herein as SEQ ID NO: 1-3549, and the translated polypeptide sequences for these polynucleotide sequences are provided as SEQ ID NO: 3550-7098. Descriptions of each of these polynucleotide and polypeptide sequences are provided in Table 1.

Table 1 Column Descriptions

[0117] SEQ_NUM provides the SEQ ID NO for the listed polynucleotide sequences.
[0118] CONTIG_ID provides an arbitrary sequence name taken from the name of the clone from which the cDNA sequence was obtained.
[0119] PROTEIN_NUM provides the SEQ ID NO for the translated polypeptide sequence
[0120] NCBI_GI provides the GenBank ID number for the top BLAST hit for the sequence. The top BLAST hit is indicated by the National Center for Biotechnology Information GenBank Identifier number.
[0121] NCBI_GI_DESCRIPTION refers to the description of the GenBank top BLAST hit for the sequence.
[0122] E_VALUE provides the expectation value for the top BLAST match.
[0123] MATCH_LENGTH provides the length of the sequence which is aligned in the top BLAST match
[0124] TOP_HIT_PCT_IDENT refers to the percentage of identically matched nucleotides (or residues) that exist along the length of that portion of the sequences which is aligned in the top BLAST match.
[0125] CAT_TYPE indicates the classification scheme used to classify the sequence. GO_BP—Gene Ontology Consortium—biological process; GO_CC=Gene Ontology Consortium cellular component; GO_MF=Gene Ontology Consortium—molecular function; KEGG=KEGG functional hierarchy (KEGG=Kyoto Encyclopedia of Genes and Genomes); EC=Enzyme Classification from ENZYME data bank release 25.0; POI=Pathways of Interest.
[0126] CAT_DESC provides the classification scheme subcategory to which the query sequence was assigned.
[0127] PRODUCT_CAT_DESC provides the FunCAT annotation category to which the query sequence was assigned.
[0128] PRODUCT_HIT_DESC provides the description of the BLAST hit which resulted in assignment of the sequence to the function category provided in the cat_desc column.
[0129] HIT_E provides the E value for the BLAST hit in the hit-desc column.
[0130] PCT_IDENT refers to the percentage of identically matched nucleotides (or residues) that exist along the length of that portion of the sequences which is aligned in the BLAST match provided in hit_desc.
[0131] QRY_RANGE lists the range of the query sequence aligned with the hit.
[0132] HIT_RANGE lists the range of the hit sequence aligned with the query.
[0133] QRY_CVRG provides the percent of query sequence length that matches to the hit (NCBI) sequence in the BLAST match (% qry cvrg=(match length/query total length)×100).
[0134] HIT_CVRG provides the percent of hit sequence length that matches to the query sequence in the match generated using BLAST (% hit cvrg (match length/hit total length)×100).

[0135] All publications and patent applications cited herein are incorporated by reference in their entirely to the same extent as if each individual publication or patent application was specifically and individually indicated to be incorporated by reference.

[0136] Although the foregoing invention has been described in some detail by way of illustration and example for purposes of clarity of understanding, it will be obvious that certain changes and modifications may be practiced within the scope of the appended claims.

The application's sequence listing, which the Patent Office published only in electronic form, follows.

SEQUENCE LISTING (7098 sequences)

SEQ ID NO: 1 - DNA, 442 bp, Glycine max
  Clone ID: PAT_MRT3847_100307C.1
cttgatttcgtacttgacaaagtctgctggaacaggcattggtattgagtttcgagagtcaggtttgaatattaatgctaaaaatgagcagctagtaaaagaaggcatggtctttaatgtgtcccttgggtttcagaacgttcaaagagaaagttccaagtctaagaacaagcacttctccttgttgcttgctgacacagttatcataaacaaagataaaactgaagttgtgacctctatgagctcaaaggctctaaaagatgttgcatattctttcaatgaggatgaggaagaggaaaatcccagggctaaagctgacaccaatggtgctgagcccttgatgtctaagacaactctaaggtcagacaatcatgagatgtcaaaggaggaacttcgaaggcagcaccaggccgaacttgctcgtcagaaaaatgaagaaact

SEQ ID NO: 2 - DNA, 1620 bp, Glycine max
  Clone ID: PAT_MRT3847_100511C.1
cccacgcgtccgagcaaattgggcgttctcatggctccactgcttgtcgagttgtgagtatttggccacacggaaagatcaggctttgctttgctttgtgtgagatctgaagaagagaggtatggcaaaaagggtcttcttgtacaaggatttggttccttttggggccatggtgaccatggaatgcctcaacgtagccttgaatactctgttcaaagcagctaccttgagagggatgagttaccatgtctttgttgtttatgcttatgctgttgctgctattgttctcattcctggaccctttatctcccaaaggtgcagatcaagagtgcttcctccgctcagtttccccctactacgcaaaattggtcttctcgggctaatagggtgtgcttctcagatcgtgggatacacaggcatcagtttcagttcccccactctctcctcggcgataagcaacttggtgcccgcttttacttttttgcttgccatcattttcaggatggaaaaggtgattgtaagaaatacaacttgtcaagccaaggtattgggtaccatagtatcaataactggagcattcgtagtgaccttctacaaaggaccaccaatcatcattgttcatacaccttccttgtcacttcatcaaccaattaacactctgaattcggtagatcgaagttgggcaattggtggccttctactgacagcagagtatattctggttccattatggtacattgtacaggtgcaaatcatgaaggtgtaccccaatgaactaactgtgatcttcttttacaatttatgtgtaagcatcatggctgcaattgtagctatatttacagagacaaatgcaggagcttggaaaataggactagatacagcattggcttcaatagtttgctctggaatttttggttcatttgtgaacaacgcagttcacacatgggtactacgtataaagggtcctgtctatgtggcaatgttcaagccactctcaattgccatagctgttgccttgggagtcatgttcctgggtgatacactccaccttggaagtctagtgggagccacagtaatatcgatcggattttatacagtaatgtggggaaaagcaaccgaagagaatgtggacgaagatgtccctggccagcaatcaccaccaaccacagagaatgttcctctcttgcaaagctataaaactgatacagctgaaaagaaaatgcatggaagtgtataaatgacaaacaaaactgttgataaatcttaacattattgaaattacacgaatagcaaagcaaatacatggttttgttttcgcccaagctaaccctgtaacgccaatagcaattagcaaagtaggtacccacgcctttagagtgtagaggacatcatatgtaagaaatagttcaagggttcaactgatctcctttcgccaaggaacataaacgaatctttatacaaattagggagcaacctatctacaagtttgtgtacgaacactcacagatgaaaacggagcaacttcgttatctgtcttcccttttcctgtctcttgtaacaagtcatccatattatgatttatagaagctgcgtgattctttaacattaaaaatattatga

SEQ ID NO: 3 - DNA, 582 bp, Glycine max
  Clone ID: PAT_MRT3847_101219C.1
gagtgttttgttaagagagaaaaaatgaagagtatggaaaatgatgacaatgctgaccttaataatcaaaacaattggttgggtttctcactctctcctcaaatgcataatataggagtttcttcacactcacaaccttcctctgctgctgaagtggttcctacaagcttttaccaccacactgctccacttagtagctatggtttctactatggacttgaagctgaaaatgttggattgtattcagctttgccaatcatgcccctcaaatctgatggctctctctatggattggaaactttaagcaggtcacaagcacaagcaatggctactacttcaacaccaaaactggagaacttcttaggtggggaagccatggggacccctcatcactacgaatgtagtgccacagaaacaatgcctctgagcttagacagtgttttttacatccaaccctcacgccgtgacccaaataataaccaaacctaccaaaaccatgttcaacacattagcaccaaccaacaacaacaacagcaagagcttcaagcatattactctaccttgagaaaccatgatatgata

SEQ ID NO: 4 - DNA, 228 bp, Glycine max
  Clone ID: PAT_MRT3847_101254C.1
tccagatcttgcaaaaaaaaaaaaaacacaatggcagggagcgctcccactccacgcgaagagttcgtgtacatggcgaagctggcggagcaggccgagcgctacgaggagatggtggagttcatggagaaggactacgcctacgcctagagctaggagctgaccgtggaagagcgcatcctcctctgcgtaaactacttgaacgccttcagggctcgtagcgccttc

SEQ ID NO: 5 - DNA, 608 bp, Glycine max
  Clone ID: PAT_MRT3847_101657C.1
gatcacatttaaaatcaaaacaacaaattttcagactcaacaagcttcgaaccaaatcttattgagaaaatgtctggtcgtggaaagggtggaaagggtttgggaaagggaagtgccaagaggcacaggaaggttcttcgtgacaacatccagggcatcacgaaacctgcgattcgtaggttagcgagaagaggtggcgtgaagagaaccagtggtttgatctacgaggaaaccaaaggagttctgaagatattcttgaagaacgtgattcccgatgctgtgacctacactgagcacgctaggaggaaacctgttactgctatggatgtcgtttatgctcccaaaagacagggaaggaccctctatggctttggaggctaaagaatagaatctttaggtttaatgactgtgttgcaggataaaacattggttcttttgaatttgcgtgaagtttagtttaggttttggtttgttctgtaacatacgaagctatgtttgctcagaaaatgtaaaacttcaattgaaccctaaatgaaggagtgttgttttcgtggccccaaaaaaaaaaaaaaaaaaaaaaaaaaaaagcggccgctctagaggatcca

SEQ ID NO: 6 - DNA, 889 bp, Glycine max
  Clone ID: PAT_MRT3847_101658C.1
cttccagcgccctgaggctgcgacagctactgccaaggtggacccggaggagcagcgcaggcgtgaattattcgcgacccagtacctgaccggcgctagaaaacggcgacgagagacaggatgtggaattcaaaccaaaatcccaaatcctcaaattcgattcgtaccaaattttcttcacaaaatgtctggtcgtggaaaaggtggcaagggtttgggaaagggaggtgccaagaggcacagaaaggttcttcgtgacaacattcaaggtatcacgaaacctgcgattcgtaggttagcgagaagaggtggcgtgaagaggatcagtggtttgatctacgaggaaaccagaggagttctgaagatattcttggagaacgtgattcgcgatgctgtgacctacaccgagcacgctaggaggaagacggtgactgccatggatgtggtttatgctctcaagaggcagggaaggaccctctatggtttcggaggctgaatggattgattcttagtattattaaattatgttgcaggatataatattatgcctgttcttctgaaattcggtgtgatgtttagtttagattcgttctgtaacatatgaatcttcaaaggttctgttcggcacagaaaatgtactactttaattgaaattaaaatgaaggagcagcgttttcgtggtgccttatacatttttttccacggttatgaagattttttcgctgtggttcttaggttattgcattgtgtggattaatttgggggtaatcgaaaactgtgtttaggttctgtttttaatgtagtttttgattgtaaaggagtgatatgttacgcattaagtaactgacaaattttcaattggaaatgctaggatattagttggaattgt

SEQ ID NO: 7 - DNA, 645 bp, Glycine max
  unsure (1)..(645): unsure at all n locations
  Clone ID: PAT_MRT3847_101659C.1
gcttcgaggcncgggccgggtcgcggaaaaatcgcaaatcctcaaattcgatttcctaccaatttctctcgagaaaatgtctggtcgtggaaaaggtggcaagggtttgggcaagggaggcgccaagaggcacaggaaagttcttcgcgataacattcagggtatcacgaaacctgcgttcggtaggttagcgagaagaggtggtgtgaagagaatcagtggtttgatctacgaggaaaccaggggggttctgaagattttcttggagaacgtgattcgagatgctgtgacctacaccgagcacgctaggaggaagacggtgactgccatggatgtggtttatgcgctcaagaggcagggaaggaccctctacggttttggaggctaaagaatttaacccttcttttctgggttgcaggataagacattggttcttttgaatttgcgtggtgttttagtttaggtttgttatgtatcatacgaatctctggtttgcatagaaaatatttcatttgaaatttaaatggagtatcgtttctgttaggcatattatttcggctaaattagtttttttttcttctattctattttattatttaggtgtaatttgtttttttttatgttttgagattcaaatgatgattt

SEQ ID NO: 8 - DNA, 667 bp, Glycine max
  Clone ID: PAT_MRT3847_101660C.1
cggctgcgagaagacgacagaagggtacggctgcgagaagacgacagaagggtacggctgcgagaagacgacagaaggggatccaaattcaagttcgcaccaaattttcctcccaaaatgtcaggccgtggaaaaggtgggaagggtttgggaaagggaggagctaagaggcacagaaaggttcttcgtgacaacattcaaggaatcacgaaacctgcgattcgtaggttagcgagaagaggtggcgtgaagaggatcagtggtttgatttacgaggaaaccagaggagttctgaagatattcttggagaacgtgattcgcgatgctgtaacctacactgagcacgctaggaggaaaactgttactgctatggatgtcgtttatgctctcaagagacagggaaggaccctctatggctttggaggctaaagaatagaatctttaggtttaatgactgtgttgcaggataaaacattggttcttttgaatttgcgtgaagtttagtttaggttttggtttgttctgtaacatacgaagctatgtttgctcagaaaatgtaaaacttcaattgaaatctaaatgaaggagtgttgttttcgtggcgcatattttctcacgatgatttgttctattcattgttaatatgtcgtcaaggtttttgcatttg

SEQ ID NO: 9 - DNA, 996 bp, Glycine max
  unsure (1)..(996): unsure at all n locations
  Clone ID: PAT_MRT3847_101661C.1
ccacgcgtccgtacggctgcgagaagacgacagaaggggatcccatttgaaatcaaaatcaaaaacaccaaatcctctaattcaagtttgcaccaagttttcctgagaaaatgtctggtcgtggaaagggtggaaagggtttgggaaagggaggtgccaagaggcacaggaaggttcttcgcgacaacattcagggcattacgaaacctgcgattcgtaggttagcgagaagaggtggcgtgaagaggatcagtggtttgatctacgaggaaaccagaggggttctgaagatattcttggagaacgtgattcgcgatgctgtgacttataccgagcacgctaggaggaagacggttactgccatggatgttgtttatgctctcaagagacagggaaggaccctctatggctttggaggctaaagagttgtttttcttgttgtcccatgtgctcattttcttggatgctgaagatgtttaggttcattttgtaacataggatgcttgttcagtttaattttggatgtaaaatgttgaactatgattgaaattatatggactaattttttgttggtggaagtatagcttggaatggcctcacattgtttgtttgatattaggaaaatattgcagtgaattatgaaatgttttgacatggaaaaaaaaaaaaaaaaagggcggccgcccgcgatctagtgaaattaccagttactatactctctctttctgaaacaatttgcccaattgtttgagatgttcaatatgagatttgtatctcaagattgggtggtttcatgtgcactaatacttctggtgtcatgcacaacatactcatcagcttctttggggaaacctgagaacaacatanaaacatctgtttttaaatcacccaagattgagctaggtccagggttagtttcaacaaattttattttgatgttgactttccaagaggccatattgcactcaagagtttcaatgctgaattgggtgatga

SEQ ID NO: 10 - DNA, 584 bp, Glycine max
  Clone ID: PAT_MRT3847_101662C.1
tcttttgcgagaagacgacagaaggatacggctgcgtgaagacgcccacgcgtgcgcccaattcaaacagaaaacctaatttctcaaatttgatttcgcaccaaattttcctcactaaaatgtctggtcgtggaaagggtggcaagggtttgggaaagggaggtgccaagaggcacaggaaggttctgcgcgataacattcaaggaatcacgaaacctgcgattcgtaggttagcgagaagaggtggcgtgaaaaggatcagtggtttgatctacgaggaaaccagaggagttctgaagatattcttggagaacgtgattcgtgatgctgtgacctacactgagcacgctaggaggaagacagtgactgctatggacgtggtttatgctcttaagaggcagggaaggaccctctacggttttggaggctgaacaattctttttttggctgtgctcctatgtgcttgttctcttggatgctggtgatgtttaggttcatcctgtaacataggcttattcagctctagatgtaaaacgttgaaccgtaattggaattatatgaattagtacttttttgttggtggc

SEQ ID NO: 11 - DNA, 621 bp, Glycine max
  Clone ID: PAT_MRT3847_101663C.1
ccgggaattcaaaccaaaatcccaaatcctcaaattcgatttgtaccaaattttcttcacaaaatgtctggtcgtgggaaaggtggcaagggtttgggaaagggaggtgccaagaggcacagaaaagttcttcgtgataacattcaaggtatcacgaaacctgcgattcgtaggttagcgagaagaggtggcgtgaagaggatcagtggtttgatctatgaggaaaccagaggagttctgaagattttcttggagaacgtgattcgagatgctgtgacctacactgagcacgctaggaggaagacggtgactgccatggatgtggtttatgcgctcaagaggcagggaaggaccctctatggtttcggaggctgaatgattgattcttagtattattaaattatgttgcaggatataatattatgcctgttcttctgaaattcggtgtgatgtttagtttaaattcgttctgtaacatatgaatctttaaaggttctgttcggacagaaaatgtactactttaattgaaattaaaatgaaggagcagcgttttcgtggtgcattttatagcttaagctttttttctcttatgaaattgaagctcctgttgactttttctta

SEQ ID NO: 12 - DNA, 240 bp, Glycine max
  Clone ID: PAT_MRT3847_101916C.1
ccacagtccattgctgtggctccctctagtactactactactactactaattatggctatgaatatggtggccatttgcaagatcaagcttactacactcaacaacaaaccactaatgctacattgcttcctcagcaccaatccatgaccccagctgcagctgctgcagcactatcagatgctccaaaacagtatcctgcacacaacattcagcagtcaaatacagcatcacaaccagta

SEQ ID NO: 13 - DNA, 1158 bp, Glycine max
  unsure (1)..(1158): unsure at all n locations
  Clone ID: PAT_MRT3847_102149C.1
cgtgctagggaaaaaagccttgactaatagtccataccataattttcctctttcctctgtgcctcgcttcttcttgaatccatgcgcatgagtttgaagaattgtgttagcggtgaggtgagatatttcaatatttgataattgatagtatatatatggggaggggaagagtggatttgaagaggatcgagaacaagatcaataggcaagtgacgttctcaaagagaaggtctggtttgctgaagaaagcgcgcgagatctctgtgctgtgcgatgctgatgtggctctcatcgtcttctccaccaaaggcaagcttttggactactccaaccaaccttgtacggaaagaattcttgaacggtatgagaggtattcgtatgcggagaggcaacttgttggagatgatcaaccaccaaatgaaaactgggttatagaacatgaaaagctcaaggctagggtggaggtactacagagaaatcaaaggaattttatgggagaagatctggacagcttaaatcttagaggacttcagagtttggagcaacaacttgattccgctctcaaacacattagatcacgaaagaaccaagccatgaatgaatctatttctgagcttcagaaaaaggataggtcactccgtgaacacaacaacttgctctccaagaagataaaggaaaaagagaaggagctgaccccacaagagcaagaaggactgcaaaataacatggatgtgacctctgtccttgtaactcaaccaccggagtccctgacaattggaggcttcccagaagccaaatgtaatgaagaaactccaacctcatgtcgacctaaaaccattcttcccccttggatgcctcttcctacaaatgaatagaagcctattcttgttaaatacgaataccacttgtacaaaggctagctatatacatcatcaggggcatttgatggtgactataccacctggattgtaatctctgtgtgacgtttctgactgcattttaatgcagctgcaaggtatattaaatgtactacatataaatataaatgatactgatataaaattgagtttgaaaaaaggttgaagttttgacttanaaaaaaaaaaaaaaaaaaaaaaaaaaaaaaaaaaaaaaaaaaaaaaaaaaaaaaaaaaaaaa

SEQ ID NO: 14 - DNA, 1147 bp, Glycine max
  Clone ID: PAT_MRT3847_102150C.1
cccacgcgtccgatgtaatacatgctaaaaaaagccttgacttcatagtccttaccctaatattcctctttcctcttcttcttcttctttctttcttccgccactgccgcagagcgtagaaggaaatcaaacagcagagagagggtaaagcatacgtgggttaaatccatgcgcatgagtcggaagaatttgtgttagcggtgaggagatatattgagaattaatatttgatagtgtatatatggggaggggaagagtggagtttaaaaggatcgagaacaagatcaataggcaagtgacgttctcaaagagaaggtctggtttgctgaagaaagcgcgcgagatctctgtgctgtgcgatgctgatgtggcttttatcgcattctacaccaaaggcaagcttttggactactccaaccaaccttgttctgaaagaattcttgaaccgtgtgagagggattcctatgccgagagggaacttgttggagatgatcaaccaccaaatgaaaactgggttatagaacatgaaaagctcaggctagggtggaggtactacagcagaaatcaaaggaatttgatgggagaagatctggacagattaaatcttacaggacttcagaggtgggagcaccaacttgattccgctctcaaacacattagatcacgaaagaaccaagccatgaatgaatctatttctgagcttcagaaaaaggataggacactccgtgaacacaacagcttgctctccaagaagataaaggaaaaagagaaggagctgaccccacaagagcaagaaggactgcaaaataacatggatgtgagctctgtccttgtaactcaaccactggagtccctgactattggaggctccccagaagtcaaatctaataaagaaactcccccctcatgtcgacctaaaaccattcttccccctttgatgcctcttcctacaaatgaatagaagcctattcttgttaaatacgaataccccttgcacaaaggctagctatatacatcatcagaggcatttgccggtgactatcccacctggattgtatttaatgctgctaggtatattaaatgatctacatataaaatgatactgatataaaattgagtttgaataaaggttgaagttttgacttaa

SEQ ID NO: 15 - DNA, 962 bp, Glycine max
  Clone ID: PAT_MRT3847_102634C.1
ccacgcgtccgcagtcatcatcaccaaagataagacagaaattgtgactgctacgagctcaaaagctctgaaggatgtagcatattctttcaatgaggatgaggaagaggaaaggccaagcacaaaaccagatgccaagaaagctgagccctttatgtctaagacaactcttaggtcagacaatcatgaagtttcaaaggaggagcttcgcaggcagcatcaggcagaacttgctcgtcagaaaaatgaagaaactgcgaggcgtcttgctggtggtggaagtgaaacaggagagtcccgttcctctgcgaggacttcagcagaactcatggcctacaagaacataaatgaccttccccctcccagagagatgatgattcagattgatcagaagaatgaagcagttctcttgcctataaatggaagcatggtaccttttcatgtggctttcattcgaactgtttccagccagcaggacaccaaccgcaattgctatgtcagaattatttttaatgttcctgggactcctttcagtcctcatgatgcaaactcaatgaagttccctggatctatatatttgaaggaggcgtcattccgctccaaggattcaaggcacataagtgaggttgtgcagtccattaaaacactcaggcgtcaagttgtagcaagggagtctgagagagctgagagggcaaccttggttactcaagagaaactgcaacttgctaataatagatttaagccaatacgattgtccgacctttggatccgtcctgcttttggtgggcgtggaaggaagatacctggtacacttgaggctcatgtgaatggatttcgttattctaccactaggcaagatgagcgtgtagacataatgtttcccaacattaagcatgcatttttccaacccgctgagaatgaaatgatcactctcctacacttgcatctggacaaccatatta

SEQ ID NO: 16 - DNA, 1929 bp, Glycine max
  Clone ID: PAT_MRT3847_103232C.1
agcacattgaagcagattgtcatttcttatgtatagggaaaccacttgcttcagcatggcttaaggaaccttgtgttgaaggaagttgcctcgtgggtttggaggaagagcttgaacaactcaggggtggaggcaacgacggttggcatggagccgaaggagagagagaataagaggccaagatcttggatagtaattaacctcactcaaactcgggatcacagaaaccaacaacagctcttgcactgaggtttcacgatgttgctggaacttgcacttggtttgtgtgtgttagcttggtttctgcacttgcgtcccacaccaagtgcaaaatcaaaagcacttcgccacctcccaaaccctccaagcccaaagcctcgtcctcccttcattgggcaccttcacctcttaaaagataaacttctccactatgcactcatcgatctctccaaaaagcatggccccttattctctctctccttcggtaccatggcaaccgtcgggggctccacccctgagttgttcaagctcttcctccaaacccacgagggaacttccttcaacacaaggttccaaacctctgccataagacgcctcacttacgacaactctgtggccatggttccattcggaccttactggaagttcgtgaggaagctcatcatgaacgaccttctcaacgccaccaccgacaacaagctcaggcctttgaggacccaacagatccgcaagttccttagggttatggcccaaagcgcagaggcccagaagccccttgacgtcaccgaggagcttctcaaatggaccaacagcaccatctccatgatgatgctcggcgaggctgagatgatcagagacatcgctcgcgaggttcttaagatcttcggcgaatacagcctcactgacttcatctggcctttgaagtatctcaaggttggaaagtatgagaagaggattgatgacatcttgaacaagttcgaccctgtcgttgaaagggtcatcaagaagcgccgtgagatcgtcagaaggagaaagaacggagaagttgttgagggcgaggccagcggcgtcttcctcgacactttgcttgaattcgctgaggacgagaccatggagatcaaaattaccaaggagcaaatcaagggccttgttgtcgactttttctctgcagggacagattccacagcggtggcaacagagtgggcattggcagagctcgtgaggaggtctacagctgttgtgggcaaagatagactcgttgacgaagttgacactcaaaaccttccttacattagggccattgtgaaggagacattccgaatgcacccaccactcccagtggtcaaaagaaagtgcacagaagagtgtgagattaatgggtatgtgatcccagagggagcattggttcttttcaatgtttggcaagtaggaagggaccccaaatactgggacagaccatcagaattccgtcccgagaggttcttagaaactggtgctgaaggggaagcagggcctcttgatcttaggggccagcatttccaactcctcccatttgggtctgggaggagaatgtgccctggcgtcaatttggctacttcaggaatggcaacacttcttgcatctcttatccaatgctttgacctgcaagtgctgggccctcaaggacaaatattgaaaggtgatgatcccaaagttagcatggaagagagagctggcctcacagttccaagggcacatagtctcgtttgtgttccacttgcaaggatcggcgttgcatctaaactcctttcttaattaagataatcatcatatacaatagtagtgtcttgccatcgcagttgctttttatgtattcataatcatcatttcaataaggtgtgactggtacttaatcaagtaattaaggttacataaaaaaaaaaaaaaaaa

SEQ ID NO: 17 - DNA, 2049 bp, Glycine max
  Clone ID: PAT_MRT3847_103233C.1
gataaaaagggtggtaggcccacaagaattgaattgaatacaacaacaaaattccccataagtagagtatggtggagtagatgcttataaattggaatcttagaaggttgtttcctcaggccaagagcttggaaaattagcctcacaaaagcaaagatcaaacaaaccaaggacgagaacacgatgttgcttgaacttgcacttggtttattggttttggctctgtttctgcacttgcgtcccacacccactgcaaaatcaaaagcacttcgccatctcccaaacccaccaagcccaaagcctcgtcttcccttcataggacaccttcatctcttaaaagacaaacttctccactacgcactcatcgacctctccaaaaaacatggtcccttattctctctctactttggctccatgccaaccgttgttgcctccacaccagaattgttcaagctcttcctccaaacgcacgaggcaacttccttcaacacaaggttccaaacctcagccataagacgcctcacctatgatagctcagtggccatggttcccttcggaccttactggaagttcgtgaggaagctcatcatgaacgaccttctcaacgccaccactgtaaacaagttgaggcctttgaggacccaacagatccgcaagttccttagggttatggcccaaggcgcagaggcacagaagccccttgacttgaccgaggagcttctgaaatggaccaacagcaccatctccatgatgatgctcggcgaggctgaggagatcagagacatcgctcgcgaggttcttaagatctttggcgaatacagcctcactgacttcatctggccattgaagcatctcaaggttggaaagtatgagaagaggatcgacgacatcttgaacaagttcgaccctgtcgttgaaagggtcatcaagaagcgccgtgagatcgtgaggaggagaaagaacggagaggttgttgagggtgaggtcagcggggttttccttgacactttgcttgaattcgctgaggatgagaccatggagatcaaaatcaccaaggaccacatcaagggtcttgttgtcgactttttctcggcaggaacagactccacagcggtggcaacagagtgggcattggcagaactcatcaacaatcctaaggtgttggaaaaggctcgtgaggaggtctacagtgttgtgggaaaggacagacttgtggacgaagttgacactcaaaaccttccttacattagagcaatcgtgaaggagacattccgcatgcacccgccactcccagtggtcaaaagaaagtgcacagaagagtgtgagattaatggatatgtgatcccagagggagcattgattctcttcaatgtatggcaagtaggaagagaccccaaatactgggacagaccatcggagttccgtcctgagaggttcctagagacaggggctgaaggggaagcagggcctcttgatcttaggggacaacattttcaacttctcccatttgggtctgggaggagaatgtgccctggagtcaatctggctacttcgggaatggcaacacttcttgcatctcttattcagtgcttcgacttgcaagtgctgggtccacaaggacagatattgaagggtggtgacgccaaagttagcatggaagagagagccggcctcactgttccaagggcacatagtcttgtctgtgttccacttgcaaggatcggcgttgcatctaaactcctttcttaattaagatcatcgtcatcatcatcatatgtaatatttactttttgtgtgttgataatcatcatttcaataaggtctcattcatctactttttatgaagtatataagcccttccatgcacattgtatcatctcccatttgtcttcgtttgctacctaaggcaatctttttttttttttgaatcacatcatctactataaactatcaatccttatattaattttgagttgccacatcatttatcccaatttcaatatttcattttcaatttaaaggggggggggggggggggggggggggagg

SEQ ID NO: 18 - DNA, 1889 bp, Glycine max
  Clone ID: PAT_MRT3847_103235C.1
cccgtacagagtcgtccactatgtggctataaaatggaagcattgaaggttgtttcctcaggccaagatcttggatagtaattaacctcactcaaactcgggatcacagaaaccaacaacagttcttgcactgaggtttcacgatgttgctggaacttgcacttggtttgtttgtgttagctttgtttctgcacttgcgtcccacaccaagtgcaaaatcaaaagcacttcgccacctcccaaaccctccaagcccaaagcctcgtcttcccttcattggccaccttcacctcttaaaagataaacttctccactatgcactcatcgatctctccaaaaagcatggccccttattctctctctccttcggctccatgccaaccgtcgttgcctccacccctgagttgttcaagctcttcctccaaacccacgaggcaacttccttcaacacaaggttccaaacctctgccataagacgcctcacttacgacaactctgtggccatggttccattcggaccttactggaagttcgtgaggaagctcatcatgaacgaccttctcaacgccaccaccgtcaacaagctcaggcctttgaggacccaacagatccgcaagttccttagggttatggcccaaagcgcagaggcccagaagccccttgacgtcaccgaggagcttctcaaatggaccaacagcaccatctccatgatgatgctcggcgaggctgaggagatcagagacatcgctcgcgaggttcttaagatcttcggcgaatacagcctcactgacttcatctggcctttgaagtatctcaaggttggaaagtatgagaagaggattgatgacatcttgaacaagttcgaccctgtcgttgaaagggtcatcaagaagcgccgtgagatcgtcagaaggagaaagaacggagaagttgttgagggcgaggccagcggcgtcttcctcgacactttgcttgaattcgctgaggacgagaccatggagatcaaaattaccaaggagcaaatcaagggccttgttgtcgactttttctctgcagggacagattccacagcggtggcaacagagtgggcattggcagagctcatcaacaatcccagggtgttgcaaaaggctcgtgaggaggtctacagtgttgtgggcaaagatagactcgttgacgaagttgacactcaaaaccttccttacattagggccattgtgaaggagacattccgaatgcacccaccactcccagtggtcaaaagaaagtgcacagaagagtgtgagattaatgggtatgtgatcccagagggagcattggttcttttcaatgtttggcaagtaggaagggaccccaaatactgggacagaccatcagaattccgtcccgagaggttcttagaaactggtgctgaaggggaagcagggcctcttgatcttaggggccagcatttccaactcctcccatttgggtctgggaggagaatgtgccctggtgtcaatttggctacttcaggaatggcaacacttcttgcatctcttatccaatgctttgacctgcaagtgctgggccctcaaggacaaatattgaaaggtgatgatgccaaagttagcatggaagagagagctggcctcacagttccaagggcacatagtctcgtttgtgttccacttgcaaggatcggcgttgcatctaaactcctttcttaattaagataatcatcatatacaatagtagtgtcttgccatcgcagttgctttttatgtattcataatcatcatttcaataaggtgtgactggtacttaatcaagtaattaaggttacatacatgcacatgtatcatctcccatttgtctttgtttcgtacgtaagacaatttttttttccc

SEQ ID NO: 19 - DNA, 2621 bp, Glycine max
  Clone ID: PAT_MRT3847_103671C.1
ctcttcatagatcaactctgccgcggttcgaggtaccggttgaaggcggtttgaaaattgccaaattctctctctctctctcagcttccactcaatttagccaacttttcagatattttcactgctcaacttaagactaagcatgagcagcagcagcagcagcagcagattgtttgagaatgggtgaagtgccggctgtgatgcaggcgacgcagggggaacagagcaacaatgcctccgctgttcattgggagcgctttctgcctcggatggtgcttcgggtcttgcttgtcgaagctgatgattctactcgacagatcattgctgcacttctccgtaaatgcggttacaaagttgttgcattttgtgatggcttaaaggcatgggagacattgaagaacaaagcatttgacttagatctcatattaacagaagtggatttgccatcaatatctggattttcacttcttactttaatcatggagcatgacatttgcaaaaacattcctgtcataatgatgtcttctcatgattcagtaagcatggtgtttaaatgcatgttaaaaggtgcagctgattttcttataaaacctgttcgcaagaatgagctaagaaacttgtggcagcatgtatggagaaggcacgccataagcaggcctcctcaaaatttaacactgccggagattgaacttggttttgctgcagaaaaccatgctgcaagcaatgactctagtggttctgtggcttctacaccaaaagatgatgaatgcagtgagaaaacaagtgaggctcatagcacttgcccatcgccatttttggaagctgagagtacctacatggaaaatatgcaggatatattgcagctgaagagctcttcaaatttgagcaatattgacacagtgaagcatgaaaactctaccaaatgtgaaagggagtcagataagcataatgatgaagctggagagaaatcactgtttatattggaagatgcaaggtgcaacaaaacttttaaaccaacaggtttaaggctaggtcaaagctatgagtgccatgaaacgagaaatcaagatgaagttctaagaatagagttgataaaatccaatcctgaaattaatacagatattcatagatgcagtgatgaactggtagatccttctactggcgccattgacttgattgctacattcaagaatcttccaaagagcactgatgaaaaatgtagtttcagtagtggtaacactgccaagtttgattttgatacacaattggaactttctttaagaagagattttcctggaagctcatgtaaagctgcattcaaggaaaggcaaatattgaaccattcaaatgcttctgccttttctaggtatagtaatagtaagttgttgcagcccctttttccaacaccatcaactatctctgctaaattaaccaatgccagtcagaattctcatgaatcccttaaattatcaaaaaatacatctacttctcatcaatatagtgaaaaaagtcaaaatcaggaggagaaaatcatcacttcagtcattggtcagtctggacaagttgatccaaaattaccaaacagtcaacttggattgtttcctgctacaggggttacttctgatcacaagtctaaaggaaatggaaatgtcttcccttctaagctttatgcaaaatcaggtgtccatcccatatcgactccaaaatcagtgtgccagaaagagagttctccatttcccacaagcacttcctcccagtccaatcctcaaagtcacaactcagaacgtcatcactggttggaagatgcaacccatgcttctgatcaaaatgtaaatgatcaaagcaatttggaatgtgagacacatgactctcctgctgctagtcagagtgctggtcctagttttttccatgacacagcaaatcataatagtagtggtgtatacagaagtgatggaaatgctacttcagctaaggtagccaaggagagccatgaaatttttattgatagtggtcaacgcagttatgatggattcatagggacagattctcatcgcactagccaacgagaagcagctctaacaaagtttcgactgaagcggaaagacagatgctatgagaaaaaggtgcgatatcaaagccggaagagattggcagagcagcgccctcgcgtgaaagggcaatttgttcgccaagtacacgatgatcatccagtagcagatgtgggtggtggttcctgaaattgttttgttaccatcatcattgaattacagtctgacttccaaaactgatttgcctctcttgacaaggattaactgtaggatctagtttgtctggtgaaattatgtttcttcttagcattgttagtattttcttctggtttgttatattggctgtctcttagaatgtaggattgtaattatttagtaggattgatttgaagttttgattttacctagagtatttgttttcttgattgaatactaatatagggctatcgttgtataggcagtatgcgtctgtcttgaaagattcaaataccttttatatatatatatatatatctcggcaagcatctctggtttgcaatcattaaacaaaaaaaaaaaaaaaaaaaagggcga

SEQ ID NO: 20 - DNA, 2785 bp, Glycine max
  Clone ID: PAT_MRT3847_103672C.1
actcaattcagccaacttttcagatattttcactgctcaacttaagactaagcatgagccgcaacttgtttgaaaatgggtctagtggcggctgacaagggttcgatgcagacccaagaggaacagagcgacaatgcctccgctgttcagtgggaacgctttctgcctcggatggtgcttcgggtcttgcttgtcgaagctgatgattctactcgacagatcatttctgcacttctccataaatgcagttacaaagttgtcgcattttgtgacggcttaaaggcatgggagacattgaagaacaaaccatctgacatagatctcatattaacagaagtggatttgccatcaatatctggattctcacttcttactttaatcatggagcatgacatttgcaaaaacattcccgtcataatgatgtcttctcatgattccgttagcatggtactcaaatgcatgtttaaaggtgcagctgattttcttataaaacctgttcgcaggaatgagctaagaaacttgtggcagcatgtatggagaaggcacgccataagcaggcctcctcaaaattttacactaccagagattgaaattggttttgctgcagaaaaccatgctgcaagcaatgactctagtggttctgtggcttctacagcaaaaaatggtgaatgcagcgagaaaacaagtgaggctcaagatatatcgcagctgaagaggtcttcaaatttgagcaatattgacacggtgaagcatgaaaattctaccaaatgtgaaagggaatcagataagcataatgatgaagctggagagaaatcactgtttgtatcagaagattcaaggtgcaacaaaacttttaaaccaacaggtttaaggctaggtcaaggctatgaatgctgtgaaacgagaaatcaagatgtagttctaaaaatagagttgatcaaatccaatcctgaaattaatacagatattcatggatgcagtgatgaactggtagatccttatactggggccattgacttgattgctacattcaagaatcttccaaagagcactgatgaaaaatgtagtttcagtagtggtaacactgccaagtttgattttgatacacaattggaactttctttaagaagaagagattttcctggaagctcatgtaaagctgcatctgaggaaaggcaattattgaaccattcaaatgcttctgccttttctaggtatagtagtagtaagttgttgcagcccctttttccaacaccatcaactatctctgctaaattaacaaattccagtctgagttctcatgaatcccataaattctcagaaaatgcatctacttctcatcaatatggtggaaaaaatcaaaatcaggagaaaattatcactccagtcattggtcagtctggacaagttgatccaaaattaccaaacagtcaacttggatattttcctgctacaggggttacttctgatcacaagtctacaggaaatggaaatgtcttcccttctatgctttatgcagaatcaggtgtccatcccatatggactccaaaatcagtgtgccagaaagaaagttctccatttcccacaatcacttcatcccagtccaatcctcaaagtcacaactcagaatgtcatctctggtcggaagattcaacccatgcttctgataaaaatttaaatgatcaaattaatttggattgtgagacacatgactctcctgatgctagtcagagtgctggtactagttttttccacgacacagcaaatcataatagtagcggtgtatacagaagcatgggctgcagaagtgatggaaatgctacttcagctaaggtagccaaggagagccatggaagttttattgatagtggtcactgcagttatgatggattcatagggacagattctcatcgcacaagccaccgagaagcagctctgacaaagtttcgactgaagcggaaagacagatgctatgagaaaaaggtgcgatatcaaagccggaagagattggcagagcagcgcccccgggtgaaagggcagtttgttcgccaagtacaagatgatcatccagtagcagatgtgggtggtggttcctgaaattgttttgtttcaagttaccttcatcattgaattacagtctgacttccaaatctgatttgcctttctcgacaaggattaactgtagggtctagtttgtctggtgaaattatgtttcctcttagcgttgttagtattttcttctggcttgttatattggctgtttcttagaatgtaggattgtaagtattttgtaggtttgttttgaagttttgattttacctcgtgtatatgctttcttgattgaatactaatatagggctactatcgttatataggcagtatgcttgtgtcttgaaagattgaatttttatttttttttatctcggcaagcatctctggtttgcaagcaaaactgatttgcctctcttgccaaggattacctggaggatatagtttgtctggccaaattatgtttaataaaggcattgttagcattttcatgtggtttgtacaccgcgctgtctcttagaatgtaggattgtatttgtcactaggattgatttgaagttttggttcaacccagagaatttgttttcttgataaaatactaatatgggggtaatcgccgcatagacagtatgggtatgtcttccaagcttcaaaaaccatttatataaaaaaaaaaaaatcacaacaagcaaaaaaaaaaaaaaagggcgacggccggccaccggctagtagctcg

SEQ ID NO: 21 - DNA, 1068 bp, Glycine max
  Clone ID: PAT_MRT3847_104342C.1
tgtgggaatacgtgttgaaatcgttttgcggtccttaatggtgcatgaaaaataaagcaaatcgcaaagccagagaagaataaaaagcctttctcccgggaccaatcaagttcattgtagcgagcagaaaccaacaccaaaccttaaaattattttgcccctctgcttctctctctgtctttctcagaagacaactcaaaaaaaccatggacgtgggtcagatgcagagacagtggatcgactacaccaaatccctcttccttgagggcttcctggatggtcagtttctgcaacttcagcagcttcaagatgagaacaaccctgactttgtggtcgaagttgtctctctcttctttgaagattctgaaaggcttctcaaagatctcacctttgccctagatcagaatggtgttgacttcaaaaaagttgatgctcatgtgcaccagttaaagggtagcagttcaagcataggcgcgcaaagggtgaaaaatgcctgcattgctttccgcaacttctgtgaggagcagaacacagatgcgtgcctcagatgtctgcaacaagtgaaacaagagtactgcattgtcaagaataagcttgaaacaatgttcaggcttgagcaacagattgtggcagctggtggatcaatccctacggaactgagtttcattgggtgactgagagggtttgtagagatgcttgtattatgatcctctttgttaaagattatcctttatcttattaagtccatggtgaatgtatgggtttttataaaatagaagttttccatccaatgtacctttttcttcaccaaaaagctcttcataatttgtaatcttttgcatgctttaatgaaggatgatagcaccattaattgaactttcctcttttatctctcttccaaacaaggaagcagaactgagtttcagtggatgatgggtgggtttgtagaaatgcttgtaaaaaaaaaaacttctttgttaaagattatcctttatcttatttagtccatggtgaatgtatgggtttttatgaagatagaagttttccatccaatgtacctttttcttc

SEQ ID NO: 22 - DNA, 832 bp, Glycine max
  Clone ID: PAT_MRT3847_104343C.1
ctcgagccgattcggctcgaggttgttttgtgtgacagacaacagaggaacactcccaaacaaaccatggacgtgggtcagatgcagagacagtggatcgactacaccaaatccctcttcctcgagggcttcctggatggtcagtttctgcaacttcagcagcttcaggatgagaacaaccctgactttgtggtcgaagttgtctctctcttctttgaagattctgaaaggcttctcaaagatctcacctttgccctagatcagaatggtgttgacttcaaaaaagttgatgctcatgtgcaccagttaaagggtagcagttcaagcataggcgcgcaaagggtgaaaaatgcctgcattgctttccgcaacttctgtgaggagcagaacacagatgcgtgcctcagatgtctgcaacaagtgaaacaagagtactgcatagtcaagaataagcttgaaacaatgttcaggcttgagcaacagattgtggcagctggtggatcaatcccttgggtgactgagagggtttattatgatcctcgtttgttaaagattatcctttatcttattaagtccatggtgaatgtatgggtttttataaagatagaagttttccatccaatgtacctttttcttcaccaaaaagctctccacgcgtccgatttgtaatctcttgcatgctttaatgaaggatgatagcaccattaattgaactttcctcttttatctctcttccaaacaaggaagaaaattagtggtgacaacacaatacaatcctttcaacaccaaatagtctaaatgaacatctgaattatgaataccttagttggat

SEQ ID NO: 23 - DNA, 1286 bp, Glycine max
  Clone ID: PAT_MRT3847_104344C.1
ccggaattaccgcgtctacccacgcgtccgcggaacagtgggcgaacgcgtggggaaaaataatttgcttctctctctgtctttctcacaagacaacagaggaacactcccaaacaaaccatggacgtgggtcagatgcagagacagtggatcgactacaccaaatccctcttcctcgagggcttcctggatggtcagtttctgcaacttcagcagcttcaggatgagaacaaccctgactttgtggtcgaagttgtctctctcttctttgaagattctgaaaggcttctcaaagatctcacctttgccctagatcagaatggcgttgacttcaaaaaagttgatgctcatgtgcaccagttaaagggtagcagttcaagcataggtgcacaaagggtgaaaaatgcctgcattgctttccgcaacttctgtgaggagcagaacacagatgcgtgcgtcagatgtctgcaacaagtgaaacaagagtactgccttgtcaagaataagcttgaaacaatgttcaggcttgagcaacagattgtggcagctggtgggtcaatccctacggaactgagtttcagtggatgatgggtgggtttgtagagatgcttgtattatgatcctcttctttgttaaagattatcctttatcttattaagtccatggtgaatgtatgggtttttataaagatagaagttttccatccaatgtacctttttcttcaccaaaaagctcttcataatttgtaatctcttgcatgctttaatgaaggatgatagcaccattaattgaaaaaaaaaaaaaaaaaaaaaaaaaaaaaaaaaaacaaaaaaaaaaaaaaaaaaaaaaaaaaaaaaaaaaaaaaaaaaaaaaaaaaaaaaaaaaaaaaaaaaaaaaaaaaaaaaaaaaaaaaaaaaaaaggggggggccgttttaaaggacccaattttattaccccgggcttgcaaaaaaaaaaatttttttaagggggcccctaaataaaaaaaagggcccccgttttaaaaaccggggagggggaaaaaccttggggttcccaaatttaaatgctttggggaaattcccctttttcccaagggggaaaaaaacgaaaaaggccccaaccaatgcccctttccaaaaattgcccatacttaaaggggaaaaggaaccccctttttctgggacatttaatccgggggggtgggggggttaccccaagagggacccttccctttgtaagggcccttaaacccccggcttttggttttttcccttccttttaaccc

SEQ ID NO: 24 - DNA, 1973 bp, Glycine max
  Clone ID: PAT_MRT3847_104458C.1
gaaaagggacaaactccgcagcacgacctttactaaaagatgagaagaaaatcaaatctgttttggtactatagtaaaagttgaagttggggaagtataaagtgaagtgtggtgttatttcgaactgaacatcagcctccacagcactactggtatatatggattcgctgcttcttcgatctttccctaatattaataacgcctcttctctcaccaccactggttcttatttgccaaatgcttaatggcacaatatgaaaatccaaaaataatatacttttttgagcttcgatggtcatatttgccaaacactacatagcattatagagaaattccaaacactgggatgcaaatttctccaggactaaatctttcgcgtttattttgagaagtgagcattggtgatggtagtctcaatcagttgaatctcttgtgtctttctcaagataatttgcctgagctcaacatttgatgccctaagttcttatttgccaaatgcttcatggcacaataggaaaatccaaaaagaatataattttttgaggtttcggtggccaagtttgaaccaccattacaaaagcattgaaggagcgtgtacatgtaaaaaatgtaatataaaatttgttgtgaaagcgacctctgaaaaatcttttgagtctgaacctcaagcttttgatccaaaaagcattttggactctgtcaagaattccttggatgctttctacaggttttccagacctcacacagttattggcacagcattaagcataatttctgtgtcccttcttgctgttgagaaaatatcagatatatctccattattttttactggtgtgttggaggctgtggttgctgccctgtttatgaatatttatattgttggtttgaatcaattgtctgatgttgaaatagacaagataaacaagccgtatcttccattagcatctggggaatattcctttgaaactggtgtcactattgttgcatctttttcaattctgagtttttggcttggctgggttgtaggttcatggccattattttgggccctttttgtaagctttgtgctaggaactgcttattcaatcaatgtgcctctgttgagatggaagaggtttgcagtgcttgcagcgatgtgcattctagctgttcgggcagtaatagttcaacttgcatttttccttcacatccagactcatgtatacaagaggccacctgtcttttcaagatcattgatttttgctactgcattcatgagcttcttctctgtagttatagcactgtttaaggatatacctgacattgaaggagataaagtatttggcatccaatctttttcagtgcgtttaggtcagaagccggtattctggacttgtgttatccttcttgaaatagcttatggagtcgccctcctggtgggagctgcatctccttgtctttggagcaaaattgtcacgggtctgggacacgctgttctggcttcaattctctggtttcatgccaaatctgtagatttgaaaagcaaagcttcgataacatccttctatatgtttatttggaagctattttatgcagaatacttactcattccttttgttagatgaggatgcagcggcaatattgacttgagaattagttttgtttaaatggtgctgcctttgtcacaggccggcttggagtcgctacattagttttaagtttttaattgctaatttaaatgaagatatatttcttttgggatgaaattttgtttactgctttgttttcagtggtttctccaatgattttttcaaacaattactattttaaaaaaaaaaaacactaacaaactaatggttcaagcatcattattacttctaagataatttcatttttaacagattatgtgttttgagaaaacaatactagatacaataactttgaatatttataatatggactttatataggagaattattatgtaatcagtgat

SEQ ID NO: 25 - DNA, 492 bp, Glycine max
  Clone ID: PAT_MRT3847_104508C.1
gggaaagaggaggagatgacaggctcagcagatccattggtgatatcattcggtgagatgctcatcgactttgttcctgacacatctggtgtctccttggctgagtcttgtgccttcatcaaagcccctggaggtgcccctgccaatgttgcttgtgccatatccaaactgggcggcaatgctgccttcgtcggcaagatgggagatgatgagtttggaaggatgctagttgacattttgagaaaaaatggggtgaacacagatggtgtttgctttgatacggaggcaagaactgcattggcttttgtgacattgaggaaggatggagagagggagttcatgttctatagaaaccccagtgcagatatgttgctgaaagagtctgaattgaatatgggtttgattaagcaggctaaggtatttcactatggatctattagcctgatatcagagccatgcagatcagctcacttggctgccatgaaagttgct

SEQ ID NO: 26 - DNA, 594 bp, Glycine max
  Clone ID: PAT_MRT3847_10478C.1
ctcgaggattgaagccgtggtcattgccaccggcgttcataccttctttgggaaagctgctcaccttgttgataccactaatcaagttgggcactttcaaaaggtgttgactgcaattggaaacttctgcatatgttcaattgctgtggggatggttattgagattattgttatgtatcccattcaagatcgagaatatcgccctggaatcgataaccttcttgtgcttcttattggtggaattccaattgccatgcccactgtcctctcagtgactatggccattggttctcacaggctatcacagcagggggctatcacaaagagaatgacagctattgaagagatggcaggcatggatgtgctttgcagtgataagactgggaccctaacactaaataagcttactgttgacaaaaatcttatagaggtttttgcaaaaggagtggatgcggatactgttgttttgatggcagctcaagcttcaagacttgagaatcaagatgcaatagacactgccatagttggaatgttggctgatcccaaagaggctcggcttggtatccaagaagtacattttcttcctttcaatcc

SEQ ID NO: 27 - DNA, 1636 bp, Glycine max
  Clone ID: PAT_MRT3847_105008C.1
ccacgcgtccgcaactacacttcagatctggcaccatcaccccaaacctaaaaaacaaaacatcatcgtactatttcccatttggcggcgcggcgatggtggaggcgcagacatggacgacgcggcgaatgagcaaccctcggctggacaccagcacgacggaccaagtactggacattccccccacacccccgggggagctccgcaacagcttcggatcgaaccctaacaacctctccccgaccctgttaactgctctcatcatttcatcttggtacctctcgaacatcggagttcttctcttaaacaagtacctcctcagcttctacggctaccgcttccctatcttcctcacaatgctccacatgctatcatgcgccgcttattcctacgcctccatcaacttccttgaactcgttcctctccagcacatccactccaagaagcagttcctcaagatcttcgctctcagcgccatcttctgcttctccgtcgtctgcggcaacacctccctccgctacctccccgtctccttcaaccaggccatcggcgcaacgaccccgttcttcacagcgattttcgcgtttttgatcacatgcaagaaggagaccggggaggtttacctcgccctgttgccggtggtgttcggtatcgtcgtggcgagcaacagtgaacccctttttcatttgtttgggtttttggtctgtgtcggttccaccgctggtcgcgctttgaagtctgtggttcaggggattttgttgacttctgaagcggagaagcttcactccatgaacttgcttctctacatggcacccttggcggcgatgattttgttgccgttcacgctctacattgaaggaaatgtgctggctttgactattgagaaggcgaaaggtgacccctttattgtgttcttgctgcttgggaatgccaccgtggcttatttggtgaacttgacgaatttcttggtgacgaagcacacgagtgctttgacgctgcaggtgttggggaatgccaaggcggcggtggcggcggtggtttcggttttgatcttcaggaatccggtgacggttatgggaatggccgggttcggaatcaccataatgggggtggtgctttacagtgaggccaagaagaggtccaaagttacgactcattgattcattcgcacgcacgccgttttggtttcttttttggcttttatcataacaccttattcttcgggtatttttctttctttctttgtttttattgatattgcacaatttagtttgatttaattttatcattatatttccgtggaattgggtcgaattaattacagcaattggactgtataggaaggaaggaaggagaagcagaaaatggggtgggagtgggagggattattattacttggtgttgttgttgggtttctgttggccgttgtgtaagcttatatatgaaacgctctatgccctttggcaacatacataaaaacgttcaaagaacgaaaaaccttatgtgtatttggctagggaggaaaattctccctccctgcattttgttgatcacatcatcatccatttttttttggcttttttgtcatttggtgttttgttagctttaattttgattcgtttgtgaggttcgagct

SEQ ID NO: 28 - DNA, 3861 bp, Glycine max
  Clone ID: PAT_MRT3847_105313C.1
ggcgtgataccatttaatttgacagcgattaattatttatagttaagtgtggagtgcagtgcaggtcaaggcctgagattcggtcgcacccggggtgcccccccatatccccggcccaccacgcttgacagagaactggtgacccacattggttggggtggcctctttctttgcttcttcttcccaattgattgaagcaaatccatctatcggagtctgcatgattgctttagcattttttaaaaaaattcttctgcaatctgcttaagaattcaagtgaatatctgaggagatttctttttgtagttttaagtatataatccttttatcaatctctacaatactttggttagagagtttttctctctttttttcttttgttttctagtaaaaccaaaaaaatccacatgtttgtgtttgttaaggaattaggaaaacacacaaacatgataacacaagccaacaaaacaacaattaaaacacacccagagagagagaggtacagagtgacacaacacactttaaggctttgctttaactactgagctactacagaagtggccatccttttttttttttttttcttttcatttgtagttttgtaccttcctttcttttttgtttcttctcccttaccatttttttctctcgtctctcaagcataataggttaggtgattgattctgttttcttcatagcaggatttttcactaatcttttttcttcttcctttgttgcctttgaaattattctctagtccttctggccaaaccaaaccatattacaaattgatgtctaatttgtacaatcagatttccttaccttcaccccaaggagccaattcaccaaacataaacatgagaggcaattttgatgttgatagtcagtacttaacggagctgctagcagaaactgcgacgacagaagcttggacctttcatgcaagttctacccttatgtaccagactccttaatcaagagattttaagggttaccggaaagaatgaattattgcagaaccaaggatttagtgactttgatagaatgcgattcataaatctgagtcatatggcttctccaaactcaacaccaaacttcactggctggaacagcctgtcacatgaactggtgtgcagggactaaacatggattggcaaacttcaccagttgttccaagttctcccattgtgaagaagatattgcgcttggatattcctaaggatagctatccaaattttaattttgttggccggcttcttggccctaggggcaattcactgaagcgagtgggagctactacaggttgccgtgtatttatcagagggaaaggttcaattaaagacttagacaaggaagaaatgctacgaggaaggcctggctatgagcacctgaatgatccacttcacattataattgaagctgaactacctgccaatgttgttgatgtaagattgatgcaagcacaagaaatcatacaagagctacttaaacccatggatgagtcacaggatcttccacaaaaggcaacaactaagagaacttgctatgctgaattccaattttagagaagatagccctcaactcagtggtagtccctctacattcaactccaattaaatgaagcgggccaaaactgaccaatagctgtgtctacattgagaatcgtagtgatgtcagtttccagtaattaaatttcaaaggggttactcttaggtactaaaatagagactgtatttatcctgagggaaattgaggcggttctttacttgttgggttgttctgatcttctctcatagcaatcaaatcacactcccatcttttttttttttaagtgtggagtgctgtgcagatcaaggcccttttacttgttcgtccggttgttcccatcttctctctcgtaccaatcaaatcacacttttgtgttgtgttgggaaaccctaaaccccgttttcggtgagatcgagatcgatcgaacatggatgaggagtacgatgtgatcgtgttgggcacgggtctcaaggagtgcattctcagcggtcttctctccgtcgatggcctcaaggttctgcatatggataggaacgactattacggaggagaatccacttcgctcaatcttattcagctttggaagagattcaggggagatgacaagcctcctccacatttgggcgctagcagggactacaacatcgatatgaaccccaagtttattatggctaatggcaatttggtgcgggttctcatacataccgatgttactaagtatctctatttcaaagctgtggatgggagctatgtgtttaataaaggaaaggttcataaggtgcctgcaaacgacatggaggccttgaagtccccacttatggggctatttgaaaaacgccgggcacgcaagtttttcatttatgtgcaaaactacaacgagagcgatcccaagacccacgaggggatggacttgacaagagtgactactaaagagttgatagcaaaatacggccttgatgataacactatagacttcattggtcatgctttggcgcttcatagcgatgatcgctacttggctgagccagcactggacaccgtgaagagaatgaagttatatgcagagtctcttgcacgctttcaaggagggtcaccttacatatatcctttgtatggtttaggagagcttccccaggcatttgcacggcttagtgctgtttatggtggaacatatatgttgaataagcctgagtgcaaggtagaatttgatgaggaaggaaaggttgttggtgttacatctgaaggggaaactgcaaagtgtaaaaaagttgtttgtgatccatcatatttgcctggcaaggtgaggaaggttggtagggttgcaagggcgatagccatcatgagccacccaatccccagcactgatgattcccattcagtgcaaattattttaccacagaaacagttgggtcggaagtcagacatgtacctattttgttgttcgtatactcacaatgttgctccaaagggaaaatttattgcatttgtatcaactgaggcagagacagatcagccggcaattgaactgaaacctggaattgaccttctaggacctgttgatgagatattttttgatatctatgacagatatgaaccagtcaacgaacccactttggacaactgctttatatcaacaagttatgatgctactactcactttgagtcgactgtggatgacgttctcaacatgtatacattgataactggaaaggttattgacctcagtgtggatcttagtgctgctagtgctgcagaagagtaaagaaaactcggtgatgatctgttgctgatgggttccgtgatgatggacttgacaacgaatgttattaacgttttataataaatattttctttttttaaaacaagatttgtgtggctggggaactttttcccgtccagaagctctgttgtgtgttcacatacattgccttctgcagtggttttagtttggtaatgtagtgttattttcatattgttaaatgttaattgcacgtctctccaaccatttcatacccctggcaatttgtgtttggatacttttatctttcattagttgaaactcatgtgggttgtattaatcttcattttaattcaaaaataaaaaaaattataaaaaaaaagggaaaaaaaacgggagggggggcagatattcattgcccccatcaattgtatcaatagacttgtaaaactaggagaatttcattattattatattttgaccgattgattagtatatatatttgtagtgtctgctgggacttacaaactgattattgttggttattactgaatggaaaaaagtgtttgatgtgt

SEQ ID NO: 29 - DNA, 1182 bp, Glycine max
  Clone ID: PAT_MRT3847_105406C.1
cggcaccagggctgagtagaaaattgcaatccctgggtttggaaatggcagcggcaggttgtcagaagcttctggaattgagcacgaagatcgtcgctgttggcagaaactacgctgctcatgccaaagaactaggcaacgccgttcccaaggagccggtgttgtttctgaaaccgacgtcgtcttacttgagtaacggcggaaccattcaaatcccacacaacgagggctctctgcatcacgaggttgagctcgctgtggtcatctccaagaaagcccgtgacgtctccgaatcctctgccatggattacgtcgccggttatgcactggctctggatatgactgctagggaccttcaagctgctgctaagtctgcaggtcttccatggagtttggcaaaaggccaggacactttcacccctattagctctattttgccaaagactacagtgccgaatcccgatgatctagaattatggttaaaggttgacgaggaaattcggcaaaagggctcaaccaaggacatgatatttaagatcccatttctgattagctacgtaagctctgtcatgacattgtttgaaggagatgtcatactaactggtactcccccgggtgttggccctgtgaaagagggtcaaacaattactgctggtattacaggccttgtggacgtacagtttaatgttgaaaaaagagcaaggcctgttctttcttgataactcctcgagggtacttcagttatacatcaaatatcttgccaaaaggaaacttgtggacacaataaaaattcagttatatggacttcagagtctatacgatatttaacagtttttttttaatggtcattgaatcagtaccatacacttgccaaaaggaaaacattggacttaattaaaattcagttatatggacttgagagtctacgatatttaacagtttatttttttgtaatggtcgtcgaatccgtactatagatcttttggagtgctattttagacttttgtcatgaaaatgattatgatgatgggcgactttctatttatggtggatgtgcttttttatactgtggacaataaggattataatggagcgcatatggattccttttaaaaaaaaaaaaaaaaaaaaaaaaaaacaaaaaaaaaaaaaaaaaaaaaaaaaaaaaaaaaaaaaaaaaaa

SEQ ID NO: 30 - DNA, 2929 bp, Glycine max
  Clone ID: PAT_MRT3847_105522C.1
cgtcgaatgcttctggcacaggcactgtggcggtggcagcggctgcagctgccgctgccccaacgatgagcttcagctatccaaatatgcctggcaatgaaactccgtacttggccattttgcagaataatgcttactcatttccaataccagcacatgttggtggtccacctggctaccgtggaaccccccatgcccaggcttttccattcttcaatggctccttctattcttctcaaatgctgcatccttcacagattcagcagcagcaacttcctgctcagtcacagcagcagagccaacagggccatcaaaatgcaagtatgtctagtggatcatccacctctcagaagcagcatgctcaaaaccaacaacaaaagcctaataataatgctactgggtccaatgggggtggaagcttgcaaggctttcctgtcaccaaaaacccaccatcactgccactgcagttgcaacagcaacagccgcagcagaggcagaatcatcacccttctcatccagctcgccaggttgagtctgagatgggtggtgaagacagtccatctactgctgatagtcgcctcgctcgcgctaccatgaatatttatggccaaaattttgcaatgcctatgcagtcgcctaactttgctttgatgacacctgcctcaattagtgcagcaggctctaacggaggtcacggtgaaaagaaacaaccccagcagcaccctggtccaaatgatgccgtacgtggaaaaagcaagcaaactggagtaggtcacggccaacgaagatagagatgatttggattcctcaattttggatgggaaatcgaccagaccaagaacattgatgtgcctgaattgtgtttagttatttgtttgtaccctggtgtttataaatctgacaaggttgatcctgaagtctaatcaaaattcgattggttttttcagaaggatgtggtggggaaaaaaagatggaggaaaggaagggaaagaaccatcttttcttcttttggggatgtaatggagtttacctacatgttctttctcctcatcttttctttttagttattttattttgtcttctagggctacttgggcagcagtaacctggttctgcttcttctcgggcttctacttctgttatgcctgctggcatcagcactaatccagccagttctcagcaacaaatgcagcgaaatcagcagcagcagcaaattcttcagcatcagaagcagaatcaatttgcagctgcagctgccgccgctgctcgcaacaagaccccatcaacaagcaatggcagtgtttactctgataacctcccctctacatcttcaatggctaataagtttcccagtgccgtatccgcatttcctcaaagccttgtacagagcagtaacaccgttgctcagtcacctcagtggaagaactctgtaagggcaacgaccacttcacagtcgcccccatccatggcttcaacaacaccgccctcatcagtcaaaaaccttccacagcagcaggctcgttcccagcaacctcacacccaaatatctttcgcgacaaatccaaaatcatcagcagcacaagtgcaaccttcaagttcgacccagtccccatctcccccagtcatggttggctcaccaacgacttcatcaatgtcgaaaaatactggtagcccaaggacaacatcagcttcaacaaccaacaataagataagccaaagttcttccttatcctctcagcaagccaagaactcttctgctgtgccggcccgtaaatcgtctcctgttggcagcaggaatgtgccatcaatactcaatgttcctcagctaactccctcttccagcactgggagtaaatctcaattgccacagaagcagcagccgcagcagcaaataccaaagcaagcattacaacaggcccagcttttgttctctagtccttacgtgcatccgcaatccaacagtaccacatccaccaccacagttccaagtggttattaccttcaacatcaacaacggcgtggccctgagcagatgcagcgaccgggctcttcccctgccgtaaacaatgtgaaaggcagcagtgccttacctacacagggtcttttgcatcctgcacaggttgctgcaatgcaaccctctgggagccaccctcagtttgttcctactggcttttcttatgcttcttatcatgttcattctgtgccctcagttcaagtgaagccagcggagcagaaacaacctgcgggtgagtagaatgatataatatcctttatttgctgcacccctgtgcttgcggttatcaaagaagaaaggtatatagcttgagtgaagcatgtgaattggcatgggattttgaagtgcaagatggggtccctctcaaatggtgggggtaaaatgtcatgttgttatgttgatgatggaatgccgtatgtggaaaaagcaagcaagctggatggagtaggtcacggccaacgaagatagagatgatttggattcctcaattttggaagagaaatcgaccagaccattgatgtgcctgaattgtgtttactaatttgtttgtacccttgtgtttataatctgacaaagttgatcctgaagtctaaacaaattcgattggtttttttagaaggatgtggtgggaaaaaaaaggataaagaaaagatggaggaaaggaagggaaagaaccaccttttcttcttttggggatgtaaaagagtttacctacatgttctttctcctctcatttcttttctcttttatttattttgtcttctagggctactagagcggtaaacaaacatctttttgacaaagtctatgtggctaatcatatattatagtaaccctcaatttttacgtgtcttctagggctactagagcagtaaacaaacatctttttgacaaaaaaaaaaaaaaaaaaactcg

SEQ ID NO: 31 - DNA, 1510 bp, Glycine max
  Clone ID: PAT_MRT3847_105727C.1
ccaacttcaatccacgatgggtacactctcactcttcttgcagcatctctctccattaccttcataactcaatctcccattattattagagatgacggttgaaaaggaagatttgggtttgagtctaagcttgagcttccctcagaaccccccaactcatcttcatctcaatctcgtttcctcttctccttccagccacaaccctcagaaaccctcttggaacgaccctttcacttcttcagctggatcatcattccttcgaggaatcgatgtgaaccgtttaccttctgtggttgattgcgaagaggaagcaggtgtttcatctccaaacagcacggtttctagcgtcagtggaaagcgtagcgagagggaagaagccaatggtgaagaaaacgacacagacagagcttgttccagaggcatcatcagcgacgaagaagatgctgaaacctctagaaagaaacttagactctccaaagaccaatcaattatcctcgaagagagcttcaaagaacacaacactctcaaccccaaacaaaagttggcgctggcgaaacagctgggtcttcgagcgagacaagtggaggtgtggatccagaacagaagggcaaggaccaagctgaagcgaacggaagttgactgtgagtttttgaaaaggtgctgcgagaatctgaccgtggagaacaggaggttgcagaaggaagtgcaagagcttagagcactgaaactttccccgcagttctacatgcacatgaccccacccaccactctcaccatgtgcccctcgtgtgagcgtgtcgcggttcccccctcctccgccgttgatcctgccatgcgtcaccatcacgtgcctcctacacaacctcgggccttccccattggcccatgggccaccgctgccgccactatcccgcacaggcccttcgatgccctccgtcgcagatcttgactcgtcgaaacaaaatgacaaaatttgaaaaaaagaaaacggttgtaatagtaggaagccatgaattatgtgttcaaagtgtggtctaagatatggtggttaggaaaactgattttgtgggtctctaatgttttgtactagtttgacccttcgtctttgttttgggtttcggagcatgacctggtttagttagttagaggtttttttagtttgtaatacttactgcgttactctcatttctcatgattaaatcggagattctgtaaagttcagtagtcttaataaatattatatattacatataggttactctcgtaagtaaagattaaacccaaaaatataaataaagtttaatggtcttaatcccccgtttccccttttgcggtcttgtgtgaccccccctaattgcccgtattttacaaacgacgcgattggaaaacccttgggtttcccaaattaattggcttggcagcaaatcccctttttcccagttggggaaaaagaaaaaaggcccggccggatcgcctttccaacaatttgcgaaccctgaatggaaaatgg

SEQ ID NO: 32 - DNA, 315 bp, Glycine max
  Clone ID: PAT_MRT3847_106565C.1
gggaacatgaatttgttccttaccaactagacctattttggtataaaaaaaacattttttttttttaaataaaagtaaaacagaggggaaaaaatgaaaatttgattttaattcccctagatttaggggcttttacttcattttttccatttggaataagggggcaaaacgagcttgagagtaacagatcccccgtaaaaagaaggggaacccccagggctgttgggccttaaacaaacaagatccccatttttccttggctttataagaatttgaccaaaaaatgaaattgggtttttgaaatctttatcaatg

SEQ ID NO: 33 - DNA, 950 bp, Glycine max
  Clone ID: PAT_MRT3847_10661C.1
ccacgcgtccggactagttctagatcgcacatattattgagaccaactagcaacatagaaagcacaatagtgtaccaacaatggcagccaaaatattttgcttccttatgctccttggtctttctgcaagtgctgctaccgcaaccattttcccacaatgctcacaagctcctatagcttcccttcttcccccatacctctcaccagcggtgtcttcagtatgtgaaaacccaattcttcaaccctacaggatccaacaggcaatcgcagcaggcatcttacctttatcacccttgttcctccaacaatcatcagccctattacagcagttacctttggtgcatttattggcacaaaacatcaaggcacaacaactacaacaacttgtgctagcaaaccttgctgcctactctcagcaacagcagtttcttccattcaaccaactagctgcattgaactctgcttcttatttgcaacaacaacaactaccattcagccagctacctgctgcctacccccagcaatttcttccattcaaccaactggcagcattgaactctcctgcttatttacagcagcaacaactactaccattcagccagctagctggtgtgagccctgctaccttcttgacacaaccacagttgttgccgttctaccagcacgctgcgcctaacgctggcaccctcttacaactgcaacaattgctgccattcaaccaacttgctttgacaaacccaacagcattctaccaacaacccatcattggtggtgccctcttttagatttcttatgagttatagttcaataataaagttttttgtctgatgtttgtggcttcccagaaataagaaagtacatttctagattcttaccaacagcccatcattggtggtgccctcttttagatttcttatgagttatagttcaataataaagttttttgtctg

SEQ ID NO: 34 - DNA, 309 bp, Glycine max
  Clone ID: PAT_MRT3847_106796C.1
aatacggtacacatttttacacgacatgtttcgtgagctgcaaaatgagaaataaacttacactttaggctcaccgttggagggataaaaaaatgatatgcaaaaaccaaaggtagcctttatgttactgcatatttcaaacctcaagtctaagttttcccttccaaacgaattctctaacaaccttgctctacaccttgattgctgattgctccaaccctatttcgcttggcctacatggaacatctttcgtagggtttaaaacctgttccatgagtcataagctattcttgtacaagccatatggtt

SEQ ID NO: 35 - DNA, 2057 bp, Glycine max
  Clone ID: PAT_MRT3847_106878C.1
agtgatttgatttgcatcaatatggatcactaaccttgctggtggctggtgcatacaatagtatttgtaccaaacctcttttttcttttgggcacgtgtattgttttttatttatgaacccaactccatccatcattgttgggacgaactcaacaagctagatcagtagtatatatcatcaaattcaatagtctcttctccatttaatagatggttgaaaaatcttccagaaccaaccttggccaccatcaagattttggcatggaggcttactccatagatggtgtttcttcacaaagtgagtccaaattctacgatgatgatggtcatgttaaacgaacagggaacgtttggactacaagctcgcacataataacagcagtggtgggttctggggtgctgtctttggcatgggccatggctcaaatgggttgggttgctgggcctgtagttatgatcttcttcagtgctgttacgttgtatacgatgtagtttctggctgattgctgtcgtcacgttgttaccgttacgcggaagagaaactatactttcatggatgcagttcaatccattctaggcgggtattatgatacgttttgtggggtagatcagtactctgttctttacggaaccgctgtaggatacacaattgcagcttctattagcatgatggcgataaaaatccagattttcatgaaatctggtggctctccatagttgcagcaatcatgtctttagtctatcccacaatggggctccataatccaaattttattttctcaaattccagattttcataaaacaggctcgctctccatagttgcagcaatcatgtcttttgtctattccacaattgggctcgctcttggcattgctaaagttgcagaaatgggtactttcaagggtagtctcacaggagtaaggattggaactgtgaccgaggccacaaaagtatggggggttttccaaggtcttggtgacatagccttcgcctattcatattctcaaattctcattgaaattcaggacaccataaaatctccaccatcggaagcaaagacaatgaagaagtctgctaagataagtattggagtaaccacaacattttatatgctttgtggcttcatgggctatgctgcttttggagattcagctcctgggaacctgctcacaggatttggtttttttaacccatattggctcatagatattgctaatgctgctatcgtaattcaccttgtgggagcataccaagtttatgcccacccatttagattagtttggagaacagtgtttgttatcataaccacttttgtagcaatgttgattccattcttcaatgacgttttgggacttcttggagcactggggttttggcctttaagtgtttttctcccagtgcagatgagtatcaaacaaaagaggaccccaaggtggagtggtagatggattggtatgcaaatcttaagtgttgtttgtttcatagtatcagttgcggctgctgttggctcagttgccagtatcgtgcttgacctacagaaatacaaaccgtttcatgtaaaatattaaactccatccaccctctcctagcaaaggctgtagactgagttgccaggatcttgcttgacgtacagtattacgaaccgtttcatgtagactattaaaccccatccacgccctccctagcaaagggtaaaaactgatgtgggcaatgatggttgtttgtatatcttttgtttagatctgagattggagccgaaggtattccaaaaaacagaaaccatgggactaatctcctgaaaaagtaaagtattaattaagggacaatatctttaccttacaggtgctgctctatgcacataatcattgatcaaacccctatcatcacatggttaaagaacccaaactatttgtcacttgtgacacaccttatgattgtttgtatatcttttatttcatgagcaatgttatttcagtgccacccttattacaatcttcaagcattgaattgaaattaaaaaaaaaaaaaaaaaaaaaaaaaaaaaaaaaaaaaaaaa

SEQ ID NO: 36 - DNA, 1268 bp, Glycine max
  Clone ID: PAT_MRT3847_106879C.1
tttggttggcaagtgtgttcaaaatttgaccaaactcactctcactccccaaattaaactagcagcagcagcaacaacaacaacaacaacaaaccttctctttaatttgggttccacaatcaaaaccaatcttagccaccatcaagactttggcatggagccttactccattgatggtgtttcttcacaaactaactccaaattctacgatgatgatggccatgttaaacgaacagggaccgtttggacaacaagctcgcacataataacagcagtggtgggttctggggtgctgtctttggcatgggccatggctcaaatgggttgggttgctgggcctgcagttatgatcttcttcagtgttgttacgttgtatacgacgtcgcttctggctgattgttatcgctgtggtgaccctgttaccgggaagagaaactatactttcatggatgcagttctatccattctcggtgggtattatgatgcattttgtggggtagttcagtactcaaatctttacggaaccgccgtaggatacacaattgcagcttctattagcatgatggcaataaaaaggtccaactgtttccattcttcaggcggaaaaagtccatgtcaggtttcaagcaacccatacatgatcggttttggcataatccaaattttattttctcaaattccagattttcatgaaacatggtggctctccatagttgcagcaatcatgtcttttgtctattccacaattgggctcgctcttggcattgccaaagttgcagaaatgggtactttcaagggtagtctcacaggagtaaggattggaactgtgaccgaggccacaaaagtatggggggttttccaaggtcttggtgacatagccttcgcctattcatattctcaaattctcattgaaattcaggacaccataaaatctccaccatcggaagcaaagacaatgaagaagtctgctaagataagtattggagtaaccacaacattttatatgctttgtggtttcatgggctatgctgcttttggagattcagcacctgggaacctgctcacaggatttggtttttttaacccatattggctcatagatattgctaatgctgctatcgtaattcaccttgtgggagcataccaagtttatgcccagcccctctttgcctttgtcgagaaatgggcttcaaaaagatggcctgaagttgagacggaatataaaattccaattccttgtttttcaccctacaatctaagcccattta

SEQ ID NO: 37 - DNA, 179 bp, Glycine max
  Clone ID: PAT_MRT3847_106982C.1
gttcgctcggagttccgctcgagggaccaacaccgtgcacaccggtactggtcccagaagtggaacacacgggcggcaccggttctggaggccatggtgccactggttatggaccaactggtggcactggctatgggagtggaactgggtatggagtcaccactgggggtgcgctcact

SEQ ID NO: 38 - DNA, 753 bp, Glycine max
  Clone ID: PAT_MRT3847_107885C.1
ctagagctcgagccgctcgagccgcgcaaccttatatgtgctgaccctaactttgccatcagcatctgcagtctattgggcatttggggaccagcttctcacccattccaatgccctctcattgctcccaaagactggtttcagagataccgctgtcatcctcatgctcattcatcagttcataacttttggatttgcttgcactcctttatacttcgtgtgggagaaattcattggggtgcatgagaccaagagtttgttcaaaagggctttggctagacttcctgttgtgattccaatatggttcctggcaatcatattccctttctttggtcctattaactcaactgttggatctctccttgtcagcttcactgtttacatcattcctgctttggctcacatggttacctttgcttcagcaccggctagagagaatgctggggagagaccctaatcaaagctaggaggtttttaaatattgtactccatgaacgtgtttgtggcggtatgggtttggggcgtaggatttgggttccggcgctggcctacctccatctgccgcctccccctttttcttttatttctcttttttttttatcatatcatataacttattacgactatttttctttctctctctttgtatagattagcataatgtctccatgaacaatttttcttttcttttttgttcatttttattttgtttcttaacagaatgctgtggagagaccaccatcaaagttagga

SEQ ID NO: 39 - DNA, 1047 bp, Glycine max
  Clone ID: PAT_MRT3847_107992C.1
tgcgggggtggcgggtcctggtgtgggcggcgagggtttggggctcggcggtgcccgctggcccaggaaggtgccccgtgacggcagcgaggccacgacacaaccggccattccgcgtctgcgagcgaagatgtcgggtcgtggaaagggaggcaagggtttgggaaagggaggagccaagaggcacaggaaggtgcttcgtgacaacatccagggtattccgaaagaaacagtcagaatcagaatcagaagaagcgagcaaagatgtcgggtcgtggaaagggaggcaagggtttgggtaagggaggagccaagaggcacaggaaggtgctccgcgataacatccagggaatcacaaaacccgccattcgccgtttggctcgcagaggcggcgtcaagagaatcagtggcctcatctatgaagaaacccgcggcgtccttaagatcttcctcgagaacgttattcgcgacgctgttacctacaccgagcatgctaggaggaagactgttaccgctatggatgttgtttatgctctcaagaggcagggcaggactctctatggtttcggtggttaaattttagggttttgatgggcttagcagctggttatttttgtaaatggtcgtttgtttgggagtatttgattttgtgcttttttgttttttagcctttcttgttaggtgtattgttatttttgcttcaattgaaatggaacaaagagtgttttgtttctggaattctcttcttgttgaaggtgtacactgattacccgctagttaattgcgactttggagataaaagcggggttaatttttgtggctgcaccatgcagtgcaaatataccctcgtgtttagtttgcagcttttgtgatcgttattgcgtctgttcttaccgtgctcaaagggtagccagaggttaaaaggaacaagttgattcctaggtcgcggattagattgaaattaaatttctgctgttggtctagcttgcaattgattatatgtaagtgtaaatttttatattattagtgtgtaattttgtttaaaaa

SEQ ID NO: 40 - DNA, 167 bp, Glycine max
  unsure (1)..(167): unsure at all n locations
  Clone ID: PAT_MRT3847_108009C.1
anacatctcaagaagctcagtaacgtatctagattatatcttgntcatttcctgntnccgtaagggatactggggntggtaataantctagtccttnggtgatgatgggtctggacatagatacaccatatccctggaaacgacctggcatgccatggaagatcttg

SEQ ID NO: 41 - DNA, 709 bp, Glycine max
  unsure (1)..(709): unsure at all n locations
  Clone ID: PAT_MRT3847_108585C.1
ccgctcgagcggcgggcgggnnaatncngnnnnaaaannccatcaagcagagatgagatcgagctcgtgcggcgctgctccgtcagcggccgcatccttataattctgaatcagaagaagcgagcgaagatgtcgggtcgtggaaagggaggcaagggtttgggaaagggaggagccaagaggcacaggaaggtgcttcgtgacaacatccagggtatcaccaaacccgcaattcggcgtttggctcgcagaggtggtgttaagagaatcagtggtctcatctacgaggagacacgtggcgtcctcaagatcttcctcgagaacgttattcgcgacgctgttacctacaccgagcacgctagaagaaagaccgttaccgctatggatgttgtttatgctctcaagaggcagggcaggactctctacggtttcggtggttaatttctagggtttccatcggcgtagcagctgcttattggttattgttgtaaatggttgctttttaggcttcttgttatatttgcttcaattgtaatggaacaaagagtattttgtttctggtatttgaatcttaatggttgaagttctcttaattgtcatggttactctgattatctgctagttaattgcgacttaagaaaaaatttgtgttaatttttgtagctgtaccctttacatagcaaatataccttttgtttaattttgcagt

SEQ ID NO: 42 - DNA, 1134 bp, Glycine max
  Clone ID: PAT_MRT3847_108680C.1
cggctcgaggagaaagggcttttttgagtaataggattattatcagtgaaaagagttcccttttttctctgtaaataaaagggttgttgttattattattattgcctagtgtttgttttcagatctgtgtcgtattattaagcagaacaagcaagggtgcaaagtgggggtgttttttttcgctggatgagtggtagctgacactcacttatggcgtctgaaacggcgtcgtcggcggatgaagaaaccgttgttgttgtttcggctgctgcgggtgcaggaggaactgataagagaggcaagcaccggattcttgccgaactgaagcgtctcgaccaagaatccaagtttcttcaggaagaattggaagagcttgagaaaacagaaaatgtgtcgaccatatgcacagaattgctacaaaacatagacactaggcctgatccattactcccagaagtccatggacccgtaaatctcttatgggatagatggtttgaagggcctcaagatccacaggcatgtagatgttggatactttgatttgaagctgtgtcaattgccttgcgttgcaaataggatgccacatataactgcattaaagtgactctggagctgaagaaaatgtttgatgacatgttataccacgcacactaattctataatggatccttgcttttattacattagattctgttccgaatactgtttatgtgtaatcacattcatatactgcattcaactgagaagtatcattatttgtgcttgtaatcccaatccaactgttaatgcacctgaccttggtggactttcatgtgtgcacgagacgttagagacattttagcatcattcagccttgaaggtggtgtggcttttggaaaggcctttacaatgcaatggtttgacgagtcatcaactagtcctgaatgataacgagattttttgggcagagacctcttggggttgggagagcaaagaaagctcataatcccttgtttgagtcatttcacaattaaatgttatgataagattttgtaatcatgttacttctaagcctttttaagttttggtgttttatttaacaagccattactttttgcgtgccaataaagaaaataaagaaataaagaaaagaaa

SEQ ID NO: 43 - DNA, 137 bp, Glycine max
  Clone ID: PAT_MRT3847_108684C.1
gtgtagtcggctggggtgaggcgatgtgcgttgccagatacagttttgtcttgttgactctacgtatctgattatcatttgtaagcgatttgctcaagttatgtgtcgttgatgaataacttgcgttcctcagaaaa

SEQ ID NO: 44 - DNA, 1684 bp, Glycine max
  Clone ID: PAT_MRT3847_109156C.1
caatatgcaaatgagatgatcaaagtctaacttttcccatgcgtaaattattctctaggtctgatactatttgcaaatctttatataagtttttcttcttttatgttttatgatgtgagtgtgatatcggaattagaagaaccggcgtcatttcatttccaccaaacaccaaagaaagaggtgaagtcaaatggtccttagttctgggagtgttgatgcttgagtcttgacggaacgaacggaaaaggggatctcaatggacaacaccaagccccttatcgaactggaactcgacgatgatggcagaatcagaagaaccgggaatgtgtggactgctagcatacacattataacagtggttgtaggggcaggggtgctgtctttggcatgggttatggcacaactaggatggttagctggcatagccagtatcattaccttttcagctgtctccattttcacttacaatcttgtagctgattgttacagatatccagaccctgtcactggcaagagaaattatacttatatgcaggctgtcaaggcttacttaggtggaacaatgcatgtgttttgtggattggttcaatataccaagctcgctgggatcacagtggggtacacaataacttcctccacaagcttggtagcaataaggaaagcaatttgcatccacaaaacaggagatgcagcttcttgcaagtttttgaataatcccttcatgatcggttttgggatcttgcaacttttcttgtcccaaattccaaacttccatgagcttacatggctctcaactgctgcctgtatcacctcttttggttatgtattcattggcagtgggctgtgtctcttggtcgtcctctcaggaaaaggagcagcaaccagcataaccggaaccaaactacctgcagaggataaacttctgagggttttcactggattgggaaacatagctcttgcatgcacttacgctactgttatttatgatataatggacacattaaagtcccatccatcagaaaataaacaaatgaaaagggctaacgtgctaggggtcacagcaatggcaatattgttcttgctatgcagtggccttggctatgctgcttttggtgataacacacctgggaacatcttgactggatttaccgaacccttctggttggttgcactggggaacggattcatcgtaatccacatgattggagcatatcaggttcgatcattctttcactgaaacataattaagttactcatttttaattttgttcttgtaaaatatttttgtatttaatttgtaatttactgaaatatacgcttttaatccgtatcattatatttctgttcttgaataatgacttgatataacgagaccgtgttacttgtcccaaaaaaaaaaaaaaagggcgctatatcttgaaataggtgcaagcatctcctggccaaattcagatttcattaacatggaatatcgattcattgtgggcgggttaatggaccgtttcaacttgtttatatgagtttggctgacgactttttgtaatagtggccagaattcttgcgatggcaatgccgttttttagtgacgttccttcccttcatggagcaattgggtatgggcatctagttgacattaggcccatagaactgcacattgctcaaaatagcattatgaaacgatcat

SEQ ID NO: 45 - DNA, 320 bp, Glycine max
  Clone ID: PAT_MRT3847_109315C.1
ccacgcgtccgcggacgcgtgggcacggcgacaagaaggacgagccgtggtggcccgtgctggacacccgcgacagcctggtggagacgctgaccaccatcatgtgggtcacctccggccaccactcggccgtcaacttcgggcagtaccacttcgccggctacttccccaaccggccgaccaccatccggaagaacatgccggtggaggagggcgggccgggcgaggagatggagaagttcctcaagcagccggagacgacgctgctggacatgctgcccacgcagatgcaggccatcaaggtcatgacgacgctggac

SEQ ID NO: 46 - DNA, 1792 bp, Glycine max
  Clone ID: PAT_MRT3847_110258C.1
cccgcgtccggtgtgagtgtgatggagatggatcctccaccgaagagctggagcatccacacccgatccgagatcatcgcaaaatacgaggtcatggagcgggtcgggtcgggagcctacgccgacgtctaccgtggccgtcgcctctccgacggcctcaccgtggccctcaaggaaatccacgactaccagtccgccttccgagaaatcgacgcgttgcagctcctcgagggctccccaaacgtcgtggttttgcacgagtacttctggcgcgaagacgaggacgccgtcctcgtccttgagttcctcagaaccgacttggccaccgtcatcgccgacaccgccaaggccaaccagcccctccccgccggcgagctcaagtgctggatgatccagattctctccggcctcgacgcctgtcaccgccacatggtcctccaccgagatttgaagccctctaatctcttaatttccgaacacggcctcctcaagatcgctgattttggacaggcaagaattctcatggagcctggtattgatgcttctaataatcatgaagaatattctagagttttagatgacattgacaataaggatactattactagcacccacgatgggaatgcaacatgcaacacaagtgacgtagatagggaagaggaagaacttggttgttttacgtcatgcgttgggactcgttggtttagggctcctgagttgctttatggatcaagaaactatggtttagaggttgatttgtggtccttgggatgtatctttgcagagcttttaacgctgcaacctttgtttcctggaactgctgatattgaccagcttagtagaatcattggtgttttgggtaaccttgatgagaatgcttgggctgcttgttctaaacttcctgattatgggataatctcctttagcaaggtggagaaccctgctggtcttgaagcttgtttgcccaatcggtcccctgatgaagtggctctggtgaaaaaactggtttgttatgatcctgccaagagggccacggcgatggagctgcttcatgacaagtactttagtgatgagcctcttcctgttctggtttctgagctgcgagttcctctgaccagaaaagagcaagatggggattcccctggtgggtggggtgatatcaacgatatggattccgattccgattcccagtttgatgagtttggccctctgaatatcacaaggactggtactggtttctccatacagtttccttgaagaattcaaggtacattgtattcttggaactgcctttttgccttttctgtcgtgttgctcaactgttactatttgctggaaattcttcggtgagaatattgataagaaaaatccctttttttttttctgatttgtcattcacttgtgaacaaagggataaattattcaaaagtaattagaatgattgtgtgtttacatgacattcatagttgaccatgacactcacagttgatagtttatataatacatggacttgtatccttccaaattcacacatataatgatagcacgtactatagttatttttgtgttaaaaaaattttttcacacattgctcatggggtagcttgtgcatcacatggtggtcatgggtacccacctgaggcttacccaccaccacctgggtcatacgctccacaacaaggatatcctccagctgggtatcctgcacaacaagggtatcctccagctgggtaccctgcacatcaaggctatcctcctgctggttacccccccagctggttatcctggttca

SEQ ID NO: 47 - DNA, 342 bp, Glycine max
  unsure (1)..(342): unsure at all n locations
  Clone ID: PAT_MRT3847_110470C.1
cacacaatgacnacaagtacntccttacaatcaaaancanccaataactancngcattnancaaaagcactacgatgatcagggtcgcnaggttgacgantatggcaacgttgagaagcataccgacgantacggcaaccctgttgcatgctgctagtgtcacctatgtagccnccagnactgctgctggtggttacagtgatgtcattaatnatcaacatgataccaccaatgcctacggcgggggtactggtagacagcattctagtggtggctacgatggtgacactantnaacagcatggnactactggtggctataatgatgacaccaatagtcatc

SEQ ID NO: 48 - DNA, 1364 bp, Glycine max
  Clone ID: PAT_MRT3847_110893C.1
gaacttctcttcaaacactcttctatattcctagtactttgaagagatattgaaataaacaacaatggccaattccatgagctttttcctgcttctttcttttctagcttttgctcccttgtgcctctgtcactataaccaagagggttacctctaccctcagttttatgactattcatgcccacaagctcaacatattgtcaagtctgtccttgctaagtatgttgcagagcaacctcgattggcggcttcgattctcaggcttcatttccatgattgttttgtcaagggttgtgatgcttcgttgttgttagatagcagtgaaagcatcaacagtgagaagggatcaaatcccaaccgtaattcagctagaggatttgaagtcattgatgcaattaaagccgaactagagagacaatgcccttctactgtgtcttgtgctgacatcttgactctagctgcaagagattcagttgttcttactggtggaccaaactgggaagtacctttaggcagaagggactcactaggtgcaagcataagtggctccaacaacaacatcccagccccaaacaacacattccagacaattctaactaaattcaagcttcagggacttgaccttgttgatctagttgctctatcaggggggcacactataggaaatgccaggtgcaccaccttcaggcaaagactctacaaccaaagtggcaatggcgagccagattccactcttgaccaatactatgcttctacattgcgtacaaggtgtccaagctctgggggtgaccagaatctgttcttcctagactatgccaccccatataaatttgacaacagctacttcaagaacctgttggcctacaagggtctcttgagttcagaccaagtcctcttcacaatgaaccaagaatctgctgaactagtgaagttgtatgctgaaagaaacgacattttctttgaacatttcgccaagtccatgatcaagatgggaaacatatctcctctgacgaattcaaggggagagatcagagagaactgcaggaggattaacgcttgaagaagcaacaatcattgccatattaatatatcatacaccaagtcatgtgaccacattttatttatgtttcttttgtttgtgcccaaaataataaaagctgagttcatcatgaagccattgccacttgcccgggtgtccagtggaggcgtttaggctttaggtaacacttttgtgtgtgtcatgaaatttgtgtattcccatttatttataaagaagtgattatttgttagtactcttctgtttgagaagcaaaatcaaacttccacattataataaaaccaaccagtgtgacttttttgtatcg

SEQ ID NO: 49 - DNA, 281 bp, Glycine max
  unsure (1)..(281): unsure at all n locations
  Clone ID: PAT_MRT3847_111031C.1
cncacgactangacaangncttccttncaantcaaaaccaacaagaacgatggcaagtnatcanaagcacnacgctgatcaaggtacgcaaggttgcacgnntatagcaacgttgagaagcaaancgacgnntacggcaaccctntncatgctgctagtgtcacctatgtatccaccagaactgctgctggtggtacagtgatgacattaataagcaacntgangccacnaatncctacngcntagacactggtagacggcattctagtggnggctacnat

SEQ ID NO: 50 - DNA, 340 bp, Glycine max
  Clone ID: PAT_MRT3847_111790C.1
ggctgcctccaaggatcgcgagaactgcagctgcatcgccaagctcgccgaacatgccgagcgatacgaagagatggtggaatcactgaagaacgaggcgaatctcgacgttgaactgactgaggaggagcggaatttactttctgttgggtacaagaatgtgattggtgctcggagagcatcctggaagatcctgtcttccatccggcaactggaataaacaaaagggaacgagtagaatgcaaagcgcattaaggataacacgcattaggtgaaattggagcttacaaacatctgtaatgatgaaatgactgtgattgatgagcacctgatggcttcg

SEQ ID NO: 51 - DNA, 1654 bp, Glycine max
  unsure (1)..(1654): unsure at all n locations
  Clone ID: PAT_MRT3847_111906C.1
gcntacggctgcgagagacgacagaaggggagggaaacacttacatttacntcntctcaangagacgagggggactcaaatttggaaccanaacatgcaagaccctgtgttggtctactcgacaaaccccttggggttattaagggtctctttctaatgaaggttttggataaaaaattggagcagatggggttgaatcaattaggccataaagatgttcctgagccaacatcaacatgaagtgctaatgcagtggctggccttagcacttcangtgtggcttttactgcattgatgcgagctgcaattaataaagttagggggggtgcggttcaggaaggagcgaaagggaaatcagaaaatggcacagtcctcctcgatcgtcgttactctgaggcagcacttgtttaaaaggaacctcacctctctcactctgcctcactctccttctcttccttccttctccttctctctgagaacaacaccccacactcctctctctctctccgcttccttctcttctcacacctccatggcccacacttcccttccctccgccgatgccggcatggacgctgtccagcgccgtctcatgttcgaagacgaatgcattttggtggatgagaatgaccgtgtggttggtcatgattcaaaatacaattgtcacttgatggaaaagattgaagctgagaatttgctgcatagagctttcagtgtattcctgttcaactcaaagtatgagttgcttcttcagcaacgatctgcaacaaaggtaactttccctcttgtgtggacaaacacctgttgtagccatcctctgtaccgtgaatctgagcttattgatgagaatgcccttggagtaagaaacgcagctcagaggaagcttttggatgagcttggtattgttgccgaagatgtaccagttgataagttcacccccttgggtcgcattctttacaaggcaccttctgatggcaaatggggagagcatgaactggactatctgcttttcattgtccgggatgttaatgtgaaccccaatcctgatgaagtggctgatatcaaatatgtgaaccgtgatcagttgaaggagctgttgaggaaagctgatgcaggtgaggaaggtctgaagctatcaccttggttcagactagttgtggacaatttcttattcaaatggtgggaccatcttgagcaaggaactcttggggaggccactgacatgaagaccattcacaagttgacataagtaagttcagaggagcttcctgcatccctgtaatgaagggtggctgcattccgaccaaataagaacgaaattggacctattttgagaagaattttcggagcagtgacttataggatgttgttggtctttttgttattcgatgatagctagaacaataaacgtctgagtgtttaaattagaagaattttttgttgttgcaaatttcggattttgggatgcaggcaagtttatcggaataagaatacaagatgttagtgatttgaatcaaaagatgttagagattggaatcaaggatagtttgtcagtttgtctccttaccacatgatcagtgtatatcccgtgatcacgtgtggaggtacagaaatatagatccagattaccgtccaaagcaattaggattaaaaa

SEQ ID NO: 52 - DNA, 144 bp, Glycine max
  Clone ID: PAT_MRT3847_111927C.1
cttactatcgagactaaatacccttctattaactaaacactggaactaataggcgtacaatatttctgtatactgagctgtattatactttggtttaatcatatgcattacttcatgctgtgtaaaattgttatccgcatataa

SEQ ID NO: 53 - DNA, 2412 bp, Glycine max
  Clone ID: PAT_MRT3847_112250C.1
ggtggctacgaagactgagtcaaataaagttgcagggaatgccattttatatgaatgtgttcaaacaataatgagcattgaagataatggtggcttacgtgtacttgccattaatatcctgggaagattcttgtcaaaccgtgacaacaatatcaggtgaattgcttactggatatgcaagtgtttgtgtgtgtgtgagtgagtgagagcaagagagagtcttgaatgaatgacaacaatgtctataaaatcattagcataatgatctggtggatgtattctctcctataattctgtgattgatggatgagatatgtggcattaaacatgctaatgaaggctgtaactgctgatgctcaggcagtacagaggcaccgtgcaaccattatagaatgtgtgaaggattcagatgcttcgattcggaaaagagcccttgaacttgtttatgttttggtgaatgagactaatgtgaagcccttggcaaaagagcttatagattatctggaagtcagtgatcttgatttcagaggggaccttactgccaaaatttgctccattgtagcaaagtattccccagagaagatctggtatattgatcagatgctcaaggttctgtctgaggctggaaactttgtaaaagatgaagtatggtatgccttagttgttgtgataagcaatgcttctgagcttcatggatatacagtaagagcattatacagagcatttcaaacgtcagctgaacaggagactctagttcgagttacagtgtggtgcattggggagtatggtgacatgttagtcaataatgttggaatgctagacatagaagatccaataacagtgactgagtccgatgcagttgatgtcatagagattgctataaaacgccatgcatcagatcttaccacaaaagcgatggctttggttgcactattaaagctctcttcacgtttcccttcatgttcagagaggatcaaagaaattattgttcagttcaaagggagctttgtgctagaattgcagcagagggctattgaattcagttcgattatttcaaagcatcaaaatattaggtctacacttgtagaaaggatgccagttttggatgaggcaacttacattggtaggagggctgggtctctgccaggcgcagcttcaactccaactgcaccttcatttaatcttccaaatggagtagccaaacctgtggctcctcttgtagatctacttgatctaagttcagatgatgctcctgctccgagctcttctggtggaggagatattcttcaggaccttcttggtgttgatctgtcaccagcatcacaacaatctgttgctggccaagcttcaaaaagtggcaacgatgttcttttggatcttctgtctatcggatcaccttctgctgaaagcagctcatctacagtagacatcttatcctccaattcgagtaacaaagcaccagtttcttcatcattggatggtctctcatctctttcactttctacaaaaacaacttcaaatgctgctcctatgatggatttattggatggatttgcccccatcccgccaacagaaaacaatggaccggtttatccatctgtaactgcatttgagagcagctccttgaggttgacattcaatttctcaaaacaaccaggaaacccacaaacaacagttatccaggctacttttatgaatttgtcctccaatacatatacagattttgttttccaggcagcagttcctaagtttcttcagttgcacttagatccagctagcagcaatactcttcccgcaaatgggtccataacccaaagtttgaaaattactaatagccaacatgggaagaaatctcttgtcatgcgtataaggattgcatacaagataaatggcaaggatacactggaggaaggacaagttaataattttcctcgtggtttatgaagcccaatcaatgatcaggggtcagtaaggtgatgcacaaaacccttcgttttccccggcactctatagttattggtgcggttttcatgtttcattccttcaattgaggaaggtatggttcgagaatctggaccactttttggcttaaatttgaagtcgatttggtggcttcacatcgttgttttacctttttcttttacttaggtgatttatgtacattagtacaacatattcctgtatgaaaatgccatagtcaaattttgcctctcaaggcgctgagagttgtgtcatgttgagtacttgaggtgctttcttgctattttttcggaggtagttgctcggtcttgctgtctaaagttatagtgttgttgaatgcaatttggtatcttttagacgattggtatatttgatttttatgtaacttttccccctcaagattaatgaaaatgtaatctcaaaattatatca

SEQ ID NO: 54 - DNA, 2763 bp, Glycine max
  Clone ID: PAT_MRT3847_112527C.1
ggaaacaaaagagaaataaattataatcaagtattccaaaaaataatcatgatcaaaacgagttggattggctagcaatatgtaaacaacttgtgcttttatatattggttatagggcctttaaaccaacggcgaccactgattaaccagtaagaaactacaagaataagcaaacatccaacggcaacaggggtgtagttaagtgtcttaatggttattgggtaggaaacaggcaaggagaagagtacagaaatggtcagcacccaaagaacagcaacccaacccacaacgacaccataacggcccaagttgaaaggcccactgacaaagtgtttccgtgccaaggtcacccttaagaatatagggaaggcataagcaatatagaggccaattgttgctatggacaccatggcctcaaatgctactatgcttccaagagatgtcagtgccatgcaaaatgatatgaaaacggaaagccaaactgcatatatagggacctcctgcttgttaactttgtgccacaatgatgacaatggcatgcaaccatctctatttggtgcagaagccatatttgaattcctgttaacataactcataccacagaaaaatatgacaacagcaacaattacttagttaattatgtctccagatccatggactgatcttttcttgaatgcttggaaaatacttgagcaattgcatacccaccagcatcattatcttcactcaaaaggtaaaggatgtcagtgactgcaaaggtaatgcctagtatctaaccccatccaacaacaatggatatcccgacagagctgataattccttttggaccattcctatcagcatccttggtatcatctgtcatatgagctgatgcatcaaatccagttagggtatactgactcattagaagtcccaagagaaatatgtagggtttgctgttgattccttccccattttctgtattgaaatgagtgaaaacaaacttggcactagccctttccgttgcaacagatggaatgacaatcataagcacaaaaacacctataacattccaaatagctgccagctgtcctaagaatgataacaatgagataggaaggctgtttattataccgtgtaggaacaaaattcccccatggaaagcaataactacatatttagatgcctcatatccaccaccatttttgccaccagtactaaggagaataataacctgaatcagttgtgcaagtgaataatctacacttgttgtcactgcccactggccaacaatattgaaccagccagtaatccaggaagcaaagggtgcccatctgggcccagcaagcttggcactccaataataaagcccaccagaagttggataagatgaacaaatctcagccattgagaatgcaacgagcatggtgaaagcagaagctaaaaaccacccatacaccagcgaaacagggccgccataattcaacccagtgttgtaaagagtggtcactccagtcaacaccgatataatagaaaacgaaaacgcaaaattcgaaataaccgaaagatcacgcttgagttcttgtttgtaaccgagttctttgagacgggcgtggccggaatcaagtggggcgtggccatttgcgaccacatgagaagggagtattttgtcagagcccatgaagatggaggaaaaatgtcccttttcatcactttgtcccttttcatacattcacatattcattttgccacaccttaaaaccaagcacccggccatatttcaatttttgttttggttagttgtcatgaagagagaaagagaggttgatagcttaaccatggcgaattgtttgatgttgctttctcgtggaagtgaatttgaggccacctactcaagcacttctatgagcaatcgtgtctttgagtgcaagacatgtaataggcaattcccttcatttcaagcacttggtggccacagggctagccacaaaaagcctaggttgatggcaggagatatcgaaggccaattgcttcatgattcacccccaaagcctaagactcatgagtgttccatttgtgggttggagtttgctatagggcaagccttgggaggtcacatgaggaggcacagagcggcgaatttgaatggaaacgtgcacaattctacggctacgagtagtagtagtgggggtagcagttttgattcatcgccaaagaagaaagctgacaacaagagagttttggttttggatttgaatctgacaccctttgagaatgatttggagtttttgaagattggaaagccaactacttttgttgattatttgtattgattgatctgttgagtactgttaattaaacttaggaaggtatagtttatgtatcatagatagatgaatgttttgtttttttttaatctatcgtctataatatttgtttatcattctgtctgaaaaattgctcatttcttgggcaaaattagaacttcatcatgatattctgagtcactgaaaaaaatatttgcaacagaacacaaaccaagccattttcaatccgctacgagagggaaaaaatacaaatggccatgatcaagctaagaacctagaattggaaattaatgatagaccaaaaaaagacacaaaatgaaggaaggaattcaattaagcgagaaagagagaacctaatgaaaaatgacgcttgagttcttgtttgttaccaagttcaagaagacgggcatcaaaatttgtaattgcaaccacatgtaatgggggtgcggacgcgtgg

SEQ ID NO: 55 - DNA, 1837 bp, Glycine max
  Clone ID: PAT_MRT3847_112528C.1
cgaggcttagttgagcctataaataaccccacacacttgtccggcctcctaagactcgctacatcttctttccaaatcccaactactactcacactcactgcagatctcaatccatggctaccattgttagcatcaaggcccgccagatctttgacagtcgtggcaatccaaccgtcgaggtggatttgacatgctccgatggtacttttgctagagctgctgttccaagtggtgcatccactgggatttatgaggcccttgaattgagagatggaggatctgactaccttggaaagggtgtatcaaaggctgttgacaatgtgaacaccattattgcccctgctttggttggcaaggacccaactcagcagactgctattgacaacttaatggttcaacaacttgatggaactgttaacgaatggggttggtgcaagcaaaagcttggagcaaatgccatattggcagtgtctcttgcagtctgcaaagctggtgctgctgtcctgaaagttcctctttacaagcatattgcaaatattgcgggtaacaaaaagttggttttgcctgttcctgctttcaatgtcattaatggtggatcacatgctggaaacaaacttgctatgcaggagtttatggttcttcccgtgggagcttcctctttcaaggaagccatgaagatgggtgtagaagtatatcacaatttgaagtctgtgattaagaagaaatatggtcaagatgcagtaaatgttggtgacgaaggtggctttgcccctaacatccaggaaaacaaggaaggtttggaattgctgaaaactgccattgccaaagctggttacacaggcaaagttgtcattggaatggatgttgcagcttctgaattctacaaggaagataaaacatacgatttgaacttcaaggaagataacaatgatggctcacagaagatctctggagatgctttgaaagatctatacaagtcatttgtgacagagtatccaattgtttcaattgaggatccttttgaccaggatgactgggagcactatgctaagcttactgctgaggttggaaccaatgtacaaattgttggtgatgatctcttggttaccaaccccaagagggttcagaaggcaattgatacaaaagcatgcaatgctcttctccttaaggtcaaccaaattggttctgtgactgagagtattgaagctgtcaggatgtccaaaaaagctggatggggtgtcatggcgagtcacagaagtggagagactgaggataccttcattgctgacctttctgttggtttggcaacgggtcaaattaagactggagctccatgcaggtcagagcgtcttgctaaatataaccagctcttgagaattgaggaggagcttggtgcggaagcagtgtatgctggagctaacttccgtacccctgttgagccctactaaagttttcaagtggaaaaaacctggagatccccacgagtttgagcaatgagatttggatgcgcggttttagttgtgatcaataagtcgatagttagaacaatagtcttggtataaggaccttgccaataattttttagttctgattcacagagctaagacagttccgtcttagactttaaaagttttgatatttagctttaatacttgaagtttacttccaattttatggggtatccccaaaacatttcatactctttgctatgttaacttttttccccttgatccgtgatattcccaatactacgattttaagacttgcgaccaattttatttgtctcaaaagttatttatattgtctttctaaatgaaagatgaacactgcccggat

SEQ ID NO: 56 - DNA, 304 bp, Glycine max
  Clone ID: PAT_MRT3847_113563C.1
tcgggctcttgctctctcatccagatctttcaacagagagagagacacagtggcagcgggcgctcgcactccacgcgaagagttcgcgtacatggcgaagctggcggagcaggccgagcgctacgaggagatggtggagttcatggagaaggtctccgactgcgccgagagcgaggagctgaccgtggaggagcgcaacctgctcttggtcgcctacaagaacgtaatcggcgctcgccgcgcttcctgacgcattatctgctgcattgagcagaaggaggagagccgcggcatcgaggaccac

SEQ ID NO: 57 - DNA, 402 bp, Glycine max
  Clone ID: PAT_MRT3847_114189C.1
ccagaacgaacaaaaatggagaattcgacccaagaatcccacttccgatccgaaaactccgtgagctacgaatccccctacccaatctacggcatgtcgttctccccttcccacccccaccgcctggccctcggcagcttcattgaagaatacaccaaccgcgttgacatcctctccttccaccccgacaccctctccctcacccccaacccttctcgctcctttgaccacccttaccctcccaccaaactcatgttccacccccgcaaacccccctcctcctcctccgacctcctcgccacctccggcgactacctccgcctctgggaggtccgcgacaacttcggggaggccgtctcccttttcaacaacagcaagaccagcgagttctgagccccctta

SEQ ID NO: 58 - DNA, 260 bp, Glycine max
  Clone ID: PAT_MRT3847_114269C.1
tctcgagccgattcggctcgagggcttttgatgaagctattgctacattggatacactggacgaggagtcatacaaggatacgcactttgatcatgcaactccttcgtgataacctcacactttggacctctgacatgcaggacgatggagcagatgaaattaaagaagcagcaccgaaaccggatgacagtaaaaatattttactgctaattagaattgaactcctcctcaaaatctttttgaagggagaagtgtttgt

SEQ ID NO: 59 - DNA, 852 bp, Glycine max
  unsure (1)..(852): unsure at all n locations
  Clone ID: PAT_MRT3847_114296C.1
actatcttgagattcatctcttttgggctggaaaaggtacttgttgcataccaactcaaggtacttatgggcccttaattcaagcaatccatgctatcccagatttcatacctactgttagtaacaaacctccaagtagtaacaacaataatatcggtctaataattcggctcgagcttggagttggagttgtaagcgttttatcaatttttgcaattttctgtatcattcggagaagaagacgtcgtgatgatgaaaaagagcttctaggaattgatactaagccctacactttcagctattctgagttaaagaatgctacaaatgattttaatcttgaaaataagcttggagagggaggttttggacctgtttataaggggacacttaatgatggaagagtcattgctgtgaaacaactatctgtgggatcccatcaaggaaagagccaattcataactgagattgctactatatcagctgtgcaacatcgtaatctggtcaaattatatggatgttgcattgaggggagtaaaagactgcttgtctatgaatatctagaaaataagagtcttgatcaagcattgtttggaaaatgtttaaccctcaattggtccacacgctatgatatatgcttgggtgttgctagaggtttaacttatttacatgaagagtcacgtcttcgcattgtacaccgtgatgtgaaagccagtaatattttgcttgattacgagcttattccgaaaatatctgactttggtttggccaaattatatgatgataaaaagacccatataagtaccggtgtggcggngacaattggatatcttgcaccggagtatgccatgcgtg

SEQ ID NO: 60 - DNA, 527 bp, Glycine max
  Clone ID: PAT_MRT3847_11449C.1
cccacgcgtccgtacggcgagaagacgacagaagggattcataagtgtgacagaaatggaggatttaaaggaaaaggtcaatgaaggggaaccaacgcaaattaagtatagaggagtacgtaggagaccatggggaaaatttgctgcagaaattagagattcagctagacatggtgctcgtgtgtggctcgggacatttaacactgctgaggaggccgcaagagcttatgatcgtgctgcctttgagatgagaggtgctacggccattctcaacttcccagatgaacaccctccttgcaatgtgacttctcttagcaagaagtcctcatcatctaacactgagattggtaaacaagttgtggtatttgagtgcttggatgacaaattgttagaggaactccttgattgcgatggggaaaaccatcaatgaaaacttggattattaggaagataaggttcaactttttaatcctaaattggtatgtagtgcctgtgtacaattaaatacagtaaagttgcttagtgac

SEQ ID NO: 61 - DNA, 419 bp, Glycine max
  Clone ID: PAT_MRT3847_114734C.1
gtagggtgctcctcattagatggacgcaatttattggagtcttccaaaattgctcttgataaaggaaagcttgaggatgctgtgaattatggaacaaaggcattagctaagatgatggctgtttgtggaccctttcatcaaaatactgcaagtgcatatagtcttctagctgtggttctctaccacactggagattttaaccaggccaccatctatcagcaaaaggccttggatataaatgagagggagctagggcttgaccaccctgacactatgaaaagctatggggatctttccgtcttttattatcgtctgcaacacattgagttggctctgaactatgttaatcgtgctctattccttctacattttacatgtgggctgtctcatccaaacacagcagctacttatataaatgt

SEQ ID NO: 62 - DNA, 238 bp, Glycine max
  Clone ID: PAT_MRT3847_115437C.1
cttcgacgatgacgccgagtatgatgccaccgataatgatgccaagtatgataccaccgacgatgatgcagagcatggtgtcatcaatgataatgccaaacatgatgacagtgccacaatgttactctgattccatctcgcacattatacaacaacaacaattaccattcatgttcagccggacactcgtggcgatctcacccatgtttttacagcagccctttgttggtgctgcatt

SEQ ID NO: 63 - DNA, 196 bp, Glycine max
  Clone ID: PAT_MRT3847_115982C.1
tttcacgacaacccgaccgcggcgtcgcgcccctacgacaaggaccgcgacggattcgtcatgggcgagggcgccggcgtcgtcgtgctcgaggagctcgagcacgccaaggcccgcggtgcgcgcatctacgccgaggtggccggttacggcctgtccggcgacgcctaccacatcaccgcgccgtccgaggacg

SEQ ID NO: 64 - DNA, 956 bp, Glycine max
  Clone ID: PAT_MRT3847_116452C.1
tacggctgccggtccgcgacagcccggggacacaatcaatcccattattaaagggataagccttcaaccttgcaacacaacactacaacctaaggtctgcactacgagaatgtctcagggaagaggcagtgcatctttacctattgtggtcactgtggtttcactactgtgccttttggttcttttggaacgtgctgatgcagcaacttacaccgttggaggacctgggggatggaccttcaacactaatgcttggcccaaaggaaaaagattcagagctggtgatatcctaatcttcaattatgattcaacgacccacaatgtggttgctgtggacagaagtggatacaacagctgcaaaacgccagggggtgctaaagtgttcagttcagggaaggaccaaatcaaactagcaagagggcagaactacttcatatgcaactaccctggtcactgcgaatctgggatgaaagttgccattaatgcagtgtgatggtgcttaatacttcttgagttgaagtgaaaattaagttaatggtcaattagctagcattagtaaatgttagtgtgtgctcatgtatgtactttttttatatgaagctgttatatatatttattaatcactatagttttgtgaagcaaagtgggagtgagctggcttggtagatcaattgttcctatgtttggtatgtgttgtgtagtgggagtataaaaatggtccattagtcacgggctcttcttattagacattggatctacatattttgaagttattgaaagtctcagagccaattatctgtatctgtgtgtcggtgtcacagtgtatggttctattactgattttgtttgcttcaataaattaaatttcctacggtatgatgaattttcctgtgagaaggcaaattgcaggcaaagtaccaatatgcaacaagaggaagggatgtaaaggggtagca

SEQ ID NO: 65 - DNA, 531 bp, Glycine max
  unsure (1)..(531): unsure at all n locations
  Clone ID: PAT_MRT3847_116633C.1
ccacgcgtccggctcggtcgactactggctagcttgtttcagtcgtccgatctgatctacagaaaaagcaggggcagggcagctagccatgattcagatgaacatgaagcagcctctcgtgctgcccgcgcaccggggcaatgtcatcggctcgcgcctggcgtcgtcgccctctccggtggcggcggcggcggcggcggccagcaggcggaggggcgtcgtgtcctccccccgctcccggctccagcgccacatgcggctgccgaggatcagctgcagcgccaccgaggaggccagcggcgccgtgtcggccgtcaccgtggagaagatgctgacggtgacggcctcggtgcaggcggcgccggccatcggtcagatgtacttncagcgcgccctcgacgacgccggcgacttcttcggcaagacgctgctgatggaactcgtcagctccgaggtcgacgcanagacgggtctggagaagccgccggtgacggcgttcgctcacaagacgctgcgggagggccactacga

SEQ ID NO: 66 - DNA, 1978 bp, Glycine max
  Clone ID: PAT_MRT3847_116966C.1
gctctctctctctctctgccttttaccctaaaaagggtgttcgtttccttcataaggccctcttctgcggcactcttttcagcccagcattgaaacagagagaaacagagactgagagaaacaaaactgattgcgtggctctatagtggttttgttcttatttccacaaattgtcatttcttccttttaacaagttcgtaaaagaaactcactcacctacacatacagacagaccccatcaataatctgaacataaagtttcgttttttgtgaagattttggaggaagagggtggtggttgagtttaattcaaggtcttgcaatggcacccagttttgactttgcttctagcctcctttgcacagaggacagcaccgttttcgacgagagtcataataatgggggtacgatgatgacggcgatgggggtgtacgaggacacgaggagtcctaggaggcgccactttgacgaagaaccagatgagttgccattgctaagtgatgagagcttggtgatgatggtggaaaaagagtgccaacactggtctggtctgcgttacttgaataagtttcaaactggggatttggacttcggtgccagaatggaggccattgattggattcacaaggtccgatcgcattttggatttggtcctctctgtggatatctatctataaattacttggaccgattcctctttgcatatgaattaccgaagggaagagtttggacaatgcaattgttggctgtggcgtgtttatctctagcagccaaattagatgagacagaagttccactctctcttgatttgcaggtgggtgaatcgaagtttttatttgaggctaaaaccatacagagaatggagcttcttgtactaagcacattgaagtggagaatgcaagcaattactcctttcaccttccttgattactttctttgtaagatcaacgatgatcaaagtccattaaggtcttcaattatgcgatccatccaacttatatcgagcactgcaagagggattgacttcttggaatttaaaccatcagagattgcagcagcagtggctatgtatgtcatgggggaaacccaaacagttgacactgggaaagcaatttctgttctgattcaacacgtagaaaaggagagactattgaagtgtgttcaaatgatccaagagttatcatgcaacagtggctctgccaaggattcaagtgcttctgtcacttgcttaccccagagcccaattggtgtgttggatgctttgtgcttcaactacaaaagtgatgacacaaatgctagttcatgtgttaattcttcacacaatagtcctgttgccaaaaggaggaagttaaacaaaacctgtggagctgagcaattgtagtgatgttggagtgggaattttacaatcatccataggatgcttttccaaaaaaatgggcatcatgtgtgttttatggaaggtgctcccctcaaagcaataccaaaatgaggcaggaagacatagctagaaatcttttatttttttaatttctcaaaaagaaaaaagaaaaaaagaccttagtgtaaaaaatacaaaaaactatattaaggtgaggtggatcatgagtggaagatgggtgatcaagcgaacagtgcaatacattgcattctattggcatgaagtgagtaatcaccagctgttaaatattttagatctattaacagcagctagagaacaaaggatctgaagaagagggataaggattattagagtattgtatgtgtaggtaaagttgggggggagtttttcatttgttcaattttttacttttaaaatgggagagagaaaaatagactgaagaaaaaaaagagatagctatatatatgcgggaaatattttatttatgttattatttttattctgttagttatttttacttaatcagattttactctctttttcttaaaaaaaataaagtactgttggtgttgtgtcatg

SEQ ID NO: 67 - DNA, 520 bp, Glycine max
  Clone ID: PAT_MRT3847_117245C.1
ccacgcgtccgcccacgcgtccgcccacgcgtccggaaaaaggagaggcccgcgactgtagtgggattgtgggaagatgcctcgggatggcgcgcaggcggcgccgccaccggagcgcggcgagatggacgaggtggtagaggcggacccggatacggaggcggaggatcaggaggagaggtgggcgaggctgctgccggagctgctctccgacgtggtgcggcgcgtcgaggcgtccggcggcgagcggtggccggcgcggaaggacgtcgtctcctgcgcctgcgtgtgccgccggtggcgggaggccgccgtctccgtcgtgcgtccgccggcggagtccggcaagatcaccttcccctcctcgctcaagcaggtcgattgcatggcttcccttatatggcgtcatcagcggttttgatacgtaccggccattcagatatttaggatatagtttgagaagttttctggccaattcagtgtcgtagtgttttttatttgacatctgtgtacctaaatc

SEQ ID NO: 68 - DNA, 1069 bp, Glycine max
  Clone ID: PAT_MRT3847_117585C.1
cggacgtcggctcgagctcgtccggtctatcacctaatctaagtcatcgtgtggtggtggttttggtcggtggcaaagagagaagaaacaaagcctgttcttcttaccatgtcggatcatcttccgcgcgaagtgctaaccgaaatcctctcccggttaccggtcagatccctactgagattccggtcaacgtccaagtcatggaagtccttaatcgacagccagcacttgaactggcttcatctgactagatccctgaccttagcctccaacacgagcctcatcctccgtgtggactccgatctataccagaccaatttcccaaccctagaccctcccgtatcccttaaccaccctctcatgtgctacagcaacagcataaccctcctcggttcctgcaacggccttctctgtatatccaacgtcgccgacgacatcgccttttggaacccctccctccgccaacaccgtattcttccttacctccctgtcccccgccgccgtcaccccgacacgacgctctttgccgcccgcgtctgcggcttcggcttcgaccataaaactcgcgactacaagctcgtccgcatctcttatttcgtcgaccttcatgaccgctccttcgactcccaactcaagctctacacgctccgcgccaacgcctggaagacacttcccagcttgccctacgcgctctgctgcgcccgtaccatgggcgtcttcgtcggaaactcccttcactgggtcgtcacgcgcaaactcgaacccgaccaacccgatctcatcatcgccttcgatctcacccacgacatcttccgcgagctcccgcttcctgacaccggaggtgtcgacggcgggttcgagatcgacctggcgctgttaggaggctccctctgcatgaccgtgaactttcacaaaacgagaatcgacgtttgggtgatgagggagtataaccgtagagacagttggtgtaaggtgttcacgctcgatgagtcgcgtgagatgagatcgtggaaatgcgtgaggccgctgggctactcgagcgatgggaacaaggttctgttggaacacg

SEQ ID NO: 69 - DNA, 139 bp, Glycine max
  unsure (1)..(139): unsure at all n locations
  Clone ID: PAT_MRT3847_117614C.1
ctcatggttcagnagccattagcnatttcccttgtctctctccatgcttaantgccaagcataannatcatnnacccatntcgtatcngaccaatggcttcnctcactgtcncaanccattgtgttacnnactttgttt

SEQ ID NO: 70 - DNA, 369 bp, Glycine max
  Clone ID: PAT_MRT3847_117866C.1
cttcaatcaatcccctcaatcatcgtctctcgctctcagcaatggccggacgtggcaaggcgggcggctccgcagcggcgaagaaggcgacctcgaggagcagcaaggccggtctccagttcccggtcggccgtatcgcccgcttcctcaaggccggcaagtacgccgagagggtcggcgccggcgctccggtctatctcgccgccgtcctggagtatctcgcagccgaggttttggagttggctgggaatgcggcgagggataacaagaagactaggattgtaccgaggcatattcagcttgctgtgaggaatgatgaggagctttcgaagttgctggggatggtgactattgctaatggtggggtga

SEQ ID NO: 71 - DNA, 165 bp, Glycine max
  unsure (1)..(165): unsure at all n locations
  Clone ID: PAT_MRT3847_118323C.1
agcgaaactgaatcagatantgcggcacggaaactaggaantagagcaatggcanangatctggtgctggatactgcaatcanagactgggtgctgatcccnctctctgtggttatggttctcattggggtgtccgtnattntntttctaagcttatgccctntt

SEQ ID NO: 72 - DNA, 323 bp, Glycine max
  Clone ID: PAT_MRT3847_118387C.1
gacaaatataatcggacagtatttggggcaaatgaaggcattattccatccggaggggttataaaggtttgccctctataggagattacatattaccacccccttgtgaatgtgatcaaaggctccaaaatgagctacataattgcaggggttgcaaacttacaattcatcggtacatacttgtgtggctctggattaggccagctaatatcgccaacatacaaacctaactggctcaaagacccttaaatattttcagggtccaacccatatgcttttcttgttggaacttattgttggacacacacttaaccacccccttt

SEQ ID NO: 73 - DNA, 268 bp, Glycine max
  unsure (1)..(268): unsure at all n locations
  Clone ID: PAT_MRT3847_118549C.1
cagancnactataagcacttncgtacaatcagnngnaacnnncactatggcaagtnatcanaagcactacgatgatcagggtcgcaangttgacgagtatggnaacgttgctgangnanaccgangantacggcaaccctgttcatgctgctagtgtcacctatgtagncaccagaantgctgctggtggttacngngatgacattaatnagcaacatgataccannnntgccnccggcgnagacactggtagacagcattctagtgg

SEQ ID NO: 74 - DNA, 427 bp, Glycine max
  Clone ID: PAT_MRT3847_118762C.1
gacgaagctcgaaaggggctcgagaaatcatgtacgttacgaggacgagaatagtagatacctttgcattggaagtgtagagaaggtgttatgtttgattgcgcgttgggttgaagaccccaactcagaggcatacaaacttcatttagcccgaatccctgattacttttggctggctgaagatggcttgaagattcagagttttgggtgccagatgtgggatgcagcatttgctattcaagcaatacttgcttgtaatgtgagtgaagaatacgggcctacacttcggaaagcacactccttcgtgaaggcttcgcaggtccgtgaaaacccatctggtgatttcaaagcaatgtacacacacatatccaaaggatcgtggacattctcaatgcatgatcacggttggcaagtctccgactgcacg

SEQ ID NO: 75 - DNA, 2126 bp, Glycine max
  Clone ID: PAT_MRT3847_119165C.1
ccggggtcgacccacgcgtccgtacgctccgtttattcttatataaggggaaacgattctccgtttattcaaaaacgaaaaacacatctctctgattaatacgcactctcgctgtgagtttgaatttagttgggagactcgaaataatgtcgtcgacgacgcagaatcgtcgttcgtcgtttactccctcgacggcgtcgtctttggcgaaagcgaaacgacatccatcgtcggtgtcgtcgtcgtcgtcggggaaggcgaaggtggtttctactcagaacttggctgtgaagagagcgcctctcgccaacctcactaatcaaaggaacgcgccttattcttcttcttcttcttctttggtgcaaggttcaaataaagttgccaagaccaagaaagaggctcctgcaagaaccagcgtctcaaaatcaacaatttctgggaacaaatcttcccagttaaaatctgttaactcaagctccgttgttattccaaaggctaattctttatcacaaaagaaggatgctgctcccacagttgccacatttgccgtgcctgttcgtagcggcattgatgtttctcctagtaaatcagatggaaggttcgtttctatggatgagacaacatcttcatgtgattctatcaagagtccggatgaagttgaatatctggataacagggatgtttcagatgttgattcaattcagaaaaagataataagcaatttgaacatttctgataccacagagcccgaaggaaacgtatgtagtagggaaataattgttgagttggaagaaagagtggacaagattgtcaatatcgataacatttactctgatacgcagctttgtgcaacctatgtttgtgacatctacaaacacctacgtgaatccgaggaaaagaaaaggccttccactgacttcatggacacaattcagaaggacataaatgttagcatgcgcgctatattggttgactggcttgttgaggtggctgaggagtatcgtcttgtacctgaaacattgtatttgacagtgaactacttagatcggtatctttcagggaatgctatgaataggcaaaggttacaactacttggtgtttcatgcatgatgattgcctctaaatatgaggagatttgtgctcctcaggtggaagaattttgttatataaccgacaatacttacttaaaagaagaggttttgcaaatggaatctgctgtcttgaattatcttaagttcgaaatgacagctccaacagttaaatgtttcttaagacgatttgttcgtgcagctgctcatgatgtccaggagatcccttcacttcaactggagtacctaaccaactttattgccgaattatctctcttggagtacagtatgttgagttatcctccatcactgatagctgcttctgtaattttccttgccagatttatacttttcccttcaaagaaaccatggaattctacattgcagcattacacgctctaccggccttctgacttgtgtgcatgtgtaaaagatctccatcgtctttgttgcagcagccatgattctaatttacctgcaatcagagataaatacagtcagcataagtacaaatgtgtagccaagaagcacatccctccttcaatacctcaagaagttttccagagttgaacaaagtaaattcatgttgacaatccaattattggatgcacaggccaaggaaattcatgtctctcaatgatgcaaggaccatttcctgttagatgcatagttggaacttggaagatgatgcagatggagatgtgctgatggagctagtgtttttttccatggctagcataaaatagatgtcataaaaattctatatgacaaatttcgtcctcttgtatacacagcacttcaaatgcttaatcatttacaggaatgagaatattaatctcctctgattctgagtgtatacattgcaggcattttttttatatattcaaagtatgctcagttgcacatcaaaaaaaaaaaaaaaaaaaaaaaaaaaaaagcggggtctcccgagtagcccctctccccgctccccgctttccactcggttccttcttattattaaaatgaataaaaaacaaactaagcatgtgttagtat

SEQ ID NO: 76 - DNA, 367 bp, Glycine max
  Clone ID: PAT_MRT3847_119722C.1
tgaagagaaaaatcttaaaattccaattacatataataaaaacttcaacgtacttaataaaatatgcaatttggaaaacacttgataatggaaggacaaactaataacggcccagcgcatccacaatcataacaaacatgaatgccttacatctcagtgccaaagagatattatctaccaacaccttatgccttccaaaagatatggaggagaagttcaattctaattagcaagaaaatatttttactggacatactgaatcggtgcgtgtactttaaatttatctgctccatcatcctgcatgtaagaggtccaaagggcgaggttttcacaaaggatagcactctgatcatgcaactccttacgg

SEQ ID NO: 77 - DNA, 569 bp, Glycine max
  Clone ID: PAT_MRT3847_12032C.1
gaagatgcagcacggagatgacatcgttaaacttaaccctgttgacgtccgttaatccagatgatttccgttgccctatttctctcgagttgatgacggatccggtcactgtgtcaacaggtcaaacctacgaccgagcctctattcagaaatggctcaaagccgggaacacaaaatgtcccaaaacaggggaaaaactaacaaacacggacttagttcccaacacaacgctcaagagactcatccaacagttctgcgccgacaacggcatttccgtcgctaactcctgtaaccgtaaaaccaacaccgtctcagcaggtagtcccgcggcggcacacgcgattcagttcctcgcgtggttcctcacgcgcaggctagcattcggaacccaagaccagaagcacaaagccgcgcaggagattcgctttctcgccagaaccagcattttcaatagggcgtgtttgattgaaatgggaacagtgcctcctctgattgaacttttagcctctgcatcgaacgataataaatccacgcaagagactacaatctctgctctactgaagctctct

SEQ ID NO: 78 - DNA, 1512 bp, Glycine max
  unsure (1)..(1512): unsure at all n locations
  Clone ID: PAT_MRT3847_120799C.1
actccgcaatgctgatttccattctctcttagtgtcagtcttattcctcccgaacccgaaattcagtccttaaatgataaataatatcccagttgtttctgctaaacttgggggagtaggaaaacatggccactttcgagcaattttggagcagaaaaacgttactaggtcttgctttgggacagtttctttctctcctcatcacttccactggtttcacctcttctctattggctaaaaaaggaattaatgcaccaacttctcagtcgtttctaaactatgtgttcttggcaattgtctatgggattattgttctatacagaagggaagcactcaaggcaaaatggtattattacatacttcttggattggttgatgttgaagcaaattttcttgttgtgaaggcatatcaatatacatcactaacaagtgtgatgctgcttgactgctggtccatcccatgtgtcatgctttttacatggattttcttaaaaacaaaatatggattcaaaaaggtcactggtgtagttgtttgcattgctggccttgtcctggttgtattttcagatgtccatgcaggcgaccgggcagggggaagcaaccctagtataggggacattcttgttattgctggtgctacattgtatgctgtcagtaacgtcagcgaggagtttctagtgaaaaatgctgatagagttgagttgatggcaatgttgggactctttggtggcattattagtgccattcaaataagcatacttgagcgcaatgagctcaaatctattcactggtcagctggggcagttcttccttttgttggatttgcggtggctatgtttatgttttactctttagtccctgtcctacttaagatcaatggttccactatgttaaatctgtctctattgacctctgacatgtgggctgtcttaattcgcatttttgcttaccatgagaaggttgattggatgtactatgtggcctttggtgctgttgttgttggtctcattatctactctggtggtgacggagatgagaatcaagaccctcatcatgttgctgaagatgctagccaaagacaacatgatgaagaagctacttcaggtaaatcataatataacagcagccaggctggaagctcaaaacactaagcacgcctgaagaggtgcttgaaaggtaaaaccatgacagagtctcctccaaagatgaagattttacttccattcaatttgtgtagatggaattttgagtgttttggacggttttttgaaagttggtactagatttttagtgaacatagtttgctaaatatgatatttaattatttttgaagaaaatctataagaaagattttcggagataataagtaacagccgtttattttttcgtatgaaatttgggatgttcgattaaaaattgttgcactttcttctaatatagttactgttgagatgttcatcgaggattttctaaaatggaattattnctagattaatcctgctgtttctagca

SEQ ID NO: 79 - DNA, 487 bp, Glycine max
  Clone ID: PAT_MRT3847_120904C.1
gctgccatgaatgactgctcatgctggattgtttgaggtaggttctcccaagaaaggagacactgtatacgatacacctgcctctggtgctgttggtcaacttcttggccaatacgctaagtcgactgggcgaaatgttgttggaagtgctggaaggaaagagaaggtggatctgctgaagaataaatgatgattagatgaatctgataactacaaagaagaaccagacctcaataccccttccaaaaggtactttccagaaggcattgaccttaactctgagaatgttgcgggcaaaacacttgatgcagtactcccaaacatgaaatttcatggacgaatacctgtctgcggattgatctctcaggacaatcttactcagtctgacggtgtcacaaatatggcaaatctcatatgtaagcgggtctatatggacggtttaattgcaactgatctctatcatctatatcctatattcttgaagcta

SEQ ID NO: 80 - DNA, 681 bp, Glycine max
  Clone ID: PAT_MRT3847_121346C.1
gtccggacttcccgggtcgacccacgcgtccgcaaggctcctgtgtctggtggggctcttggtggaggacggatggttgaaagactcactcaagtgttgcagtattggacactgctgctggtgtttggtgtgatataaaatctgttgttacgagttcaagaactggtagatacagtgctgatgcagcaggaggagatgctgcagttgagttgactcggcgttgtaggcacgcagcagctgctgttggtgacctaatttttatttatggtggtttacgtgggggagtcttgctagatgacctacttgttgctgaagatcttgctgctgctgagacaacagctgctgcttcacatgctgctgctgctgcagctgcatctgcatctaatgtacaagcaggacgcttacctggacgatatggatttgctgatgatagaacgagggaaacgatgcctgaggcagctgctgatggttctgttgttttaggaaatccagttgcgccaccaatgaatggtgacatttatactgatatcagcactgaaaatgccatgcttcagggacctcggcgaactgctaaaggtgtggagtatctggttgaagcatcagctgcagaagctgaagctatcagtgcagcactggctgctgccaaggcacggcaggagacgggagaagttgaattgcctg

SEQ ID NO: 81 - DNA, 481 bp, Glycine max
  Clone ID: PAT_MRT3847_121950C.1
tggaaacagcgaggactagagaaggagcaatagccaaagacaccactgaaactgaactcaccaaaatccctctcctccgggcaactgttgaaacactgcatccctcttccaaggaagaggatgattttatgattagaagattcctgcgtgctcgtgatttagatgtagagaaggcttcggcaatgttcctcaagtacttgaaatggagacatgaatttgttccaaatggttctgtatcagtgtctgatgttcctatcgaacttgcacaggataaggtgttcatgcaaggacgcgacaagataggtcgacctatacttattgtctttggtagaaggcattttcagaacaaagatggtctagatgaattcaaacggtttgttgtttatgttcttgataaagtatgtgcgagtatgccacctgggcaagaaaagtttgttggtatagcagaactgaagggatggggatactcaaacagtgacgt

SEQ ID NO: 82 - DNA, 1270 bp, Glycine max
  Clone ID: PAT_MRT3847_121951C.1
ggggaagaaacatttaatttgggttgataatagtttatgttaagatatcactactgctatatatatgttgccatagccaagttagccttataaagggaaactcacttgccttatttttggttttgagattgagctaaaggccaactcaaccatcgaatttgttggtgattgaaagagaaggaagaagaagcaggaaatggaagcagtgagagctggtcgagaaggagcaataggtctaggtcaaggtgatggcgtagccaaggacagcactgagactgaactcaccaaaatccgtctcctcagggcaattgttgaaacccgtgatccctcttccaaggaagaggatgattttatgattagaagattcctgcgtgctcgtgatttagatgtagagaaggcttcggcaatgctcctcaagtacttgaaatggagaaattcatttgttccaaatggctctgtatctgtgtcagatgttcctaacgaacttgcacaagataaggtgttcatgcaaggacacgacaagataggtcgacctatacttatggtcttcggtggaagacattttcagaacaaggatggtcttgatgaattcaagcgatttgttgtttatgttcttgataaagtatgtgcaagtatgccacctgggcaagaaaagtttgtcggtatagcagaacttaagggatggggatactcaaacagtgacgtgcgtggatatcttagtgctctatccattttgcaggattactacccagagagattggggaagttgtttattgtgaacgcaccatacatctttatgaaagtgtggcaaattgtttacccattcattgacaacaaaaccaagaaaaagatagtatttgtggagaaaaataaggtgaaatcaacactgctagaagagatggaggaaagtcaggtcccagagatattcggtggctcactgccattagtcccaattcaagatagctaattaattaagtaaccgctgacagaataaggagaggcgggcctaaaaataaatattgttatttcttatttatgtgtttctatgccgttttctttttacccaattactttacactgttgtatcagctatcaatattcagtagtaaatgagtacgatttttttttcctaaaaaaaaaaaaaaaaaggaaaaaaaaagaaaaaaaaaaaaaaaaaaaaaaaaaaaaaaaaaaaaaaaaaaaaaaaaaaaaaaaaagaaaaaccccaaaaaaaagagaaagaaaaaaaaaaaaaaaaaaaaaaaaaaaa

SEQ ID NO: 83 - DNA, 1566 bp, Glycine max
  Clone ID: PAT_MRT3847_12197C.1
ggtggcggacgcgtccgacggctgcgagaaacgacagaaggatacggctgcgagaagacgacagaagggtacgcgccagagaagaggacaagagggaaagagtgaactgagcgatagatgggactgcctaaccggctcccacgcccttgatggtcttctaagagaagttcgatccgtggggcgaggtaagagagggagtagagtaatatcgcttacagtaagaggtgagaaagagagacaaatcggcagaagcaaggaggcagagaccgagagagcaactgcacgcactgtaactcctaacttcccagatcgtcttcttcctcttttctctccggtgattgttggaactcagagagcttctttgatggaacagtacgagaaggttgagaagataggcgaaggaacatacggcgtcgtttacaagggtcgcgaccgcgtcaccaacgagaccatcgcgttgaagaagattcgcctcgagcaggaggatgagggggttcccagcaccgccattcgcgagatttctctcttgaaagaaatgcagcacaggaacattgttaggttgcaggatgtagtgcacgatgagaagagtttgtatctggtttttgagtaccttgacttagatctaaagaagcacatggattcatctccagaatttgcaaaagatccacgacaagtaaaaatgttcctgtaccaaattctctgtggcattgcatactgtcattcacatagagttcttcatcgagacttaaaaccacagaatttgttgatagatcgcagcactaatgcactgaaacttgcagattttggattggccagggcttttggaattcctgttaggacatttacacatgaggtggtaacactgtggtacagagctccggaaattttgcttggatcccgtcagtattctaccccagttgatatttggtcagtgggatgcatatttgcagagatggtaaatcaacgaccacttttccctggggactctgagattgatgaattgtttaaaatattcagaatcatgggtacaccaaatgaagatacatggcctggagtgacatcattgcctgattttaaatcagccttccccaaatggcagcctaaggacctgaaaattgtggttccaaatcttaagccagctggtcttgatcttctttctagcatgctttacttggatcccagcaaaagaattactgctaggagcgctcttgagcatgaatacttcaaagacattaaatttgtaccctgatttcttatcttcaaggctgaggtgtcttattagtatgtgtagcatttatgggttttgactcaaacgcgtgttgtccttgcttttttcttcaatgcttttggaccgaatcatatttcatttatttgttcttacatttttatttagtatgtgtgatcttgttacctatttacccgtttaatgtattagtctcgatgcaatgcaactagcaaatttcagtttgcttgacttgtttgtacttaatgctgaatgttgcttagcccggggcctgtaaaattggctactgttcctgtctgtaaactgcttttatctgctttccc

SEQ ID NO: 84 - DNA, 1820 bp, Glycine max
  Clone ID: PAT_MRT3847_122017C.1
cgcggcctgacctggaagcttcggtttctctctctctctctttctctttctcttagggttttcactttcaccaatttctccttctcttccgatctacgcccaaaggtatcacctcgcgtgcattcgttcctaatcctttcaaactctccgttctcccatctttaacttgtttaagctgctacgtttaattgaattcgccgtttccaaattgtcttttcatttctttcttttgttctgcaattagacattgctagggttctggagtactggattagctcattaaggattgagtactccatctatcttctgtcttcatggataaagacaaatctctaggtttgccacctccgtctggacgttattctggttactcgtccaccggaagtgttttcaacgtgaaatctgaaccgtccccgtcgtcgtcaaccacgttgtatccgccattggctccgggaactaccagttccgagtctagccattttggacatggattgtccacggattctagtggttttagtcatgatattagcagaatgcctgataatcccccgagaaatagaggtcataggcgtgctcattcggagattctcactttaccggatgatattagtttcgacagtgaccttggtgttgttggaggtggtgatggtccttccttctccgatgatgccgaggaggacttgctgtccatgtaccttgatatggataagttcaattcatcgtcggcaacgtccacgtttcagcatagtcaatccatggacgggtcaaccaccatcaagcctgagtcgccggcaggggcacccacctcttctaccgagaatgttgttattggggcaatagaaaggcccagagttgctcaccagcatatgattgccatcgacggtgcaaacaggatatggcctgagatgctggttgctgcgtcagaagacatgtctgcggctgattccaaaaaagcaatgtcagctgccaagcttgctgaacttgccttgattgaccccaaacgtgcaaaaaggatatgggcaaataggcagtctgctgcaaggtcaaaagagagaaagatgcgatacattgctgagcttgaaaggaaggtgcaaacattgcaaacggaagcaacatctttgtctgcacaattaactctcttgcagagagatacaaatggcttaaattctgagaacaatgaactgaagctgcggttgcaaaccatggagcaacaagttcacttgcaagatgcattaaacgatgcattaaaagaggaaattcagcatttgaaaatattgactgggcaagctatgccacctaatggaggacctatgatgaactttgcttcttttggaggggggcagcaattctatcccaataatcatgccatgcacacccttttagctgcacaacagtttcaacagcttcaaattcaccctcaaaagcagcagcagcatcagtttcagcagcttcagcaacagcagcgggaacagcaccaacaatcaattgacttgaaaatgagagaagctacacctactccatgccccaaagacaatgcctcatcagatgtaaatccttctggggccaaggactgttgagagttgagactgctcattgtcttctctatttgctttatagattttcctttgtcttgtgtcctagtgtgtttagcctttgttatattttttcattcttaaacagtacaaatggtcctagttagagattgagtataatacatttgcatctttgttattatgtaatactaaacttcttttgatactctgtagtcaattgctatggatatacaggggtaggttcatgtgtttagtctatgctatagc

SEQ ID NO: 85 - DNA, 913 bp, Glycine max
  Clone ID: PAT_MRT3847_122018C.1
agcatagtcaatccatggacgggtcaaccaccatcaagcctgagttgctggtctcgggttcggaagacatgtcggcggctgattccaaaaaagcaatatcagctgccaagcttgctgagcttgccttgattgaccccaaacgtgcaaaaaggatatgggcaaataggcagtctgctgcgaggtcaaaagagagaaagatgcgatacattgctgagcttgaaaggaaggtgcaaacattgcaaacagaagcaacatctttgtctgcacaattaactctcttgcagagagatacaaatggcttaaattctgagaacagtgaactgaagctgcggttgcaaaccatggagcaacaagttcacttgcaagatgcattaaacgatgcattaaaagaggaaattcagcatttgaaaatattgactgggcaagttatggcacctaatggaggacctatgatgaagcttgcttcttttggaggggggcagcaattctatcccaataatcatgtcatgcacactcttttagctgcacaacagtttcaacagctacaaattcaccctcaaaagcagcagcagcaacaacatcagcatcagtttcagcagtttcagcagcaacatcagcatcagcatcagcagcaccaacaatcaagtgacttgaaaatgagagaaacttcacctactccatgccccaaagacaatacttcgtcagatgtaaatccttctggagccaaggattgttgagagttgagactgctcattgtcttctctatttgcttcgtagattttcctttgtcttgtgtcttagtgtgtttagcctttgttatattttttcattcttaaacagtacaaatggtcctagttagagattgagaataatacatttgcatctttggtattgtgtaatattaaagttgttt

SEQ ID NO: 86 - DNA, 1944 bp, Glycine max
  Clone ID: PAT_MRT3847_122890C.1
aatcgcaaattttcttccccaaatcgtagatctacggtaaaattctccttccatcgctgcttccttttccttttcgcggattcccaaatctacatattcctcttcctgcacccccgtttgtgttccccgattcgcttctcgccttttgcacgtgcgaattagggtttcaattcgcgtttgccatttcatgaggccagatctagttgtattgcatgcattggtttaactggagtagtgtggtaagatgggaggtggatttagagtgcttcatttagttaggccgtttctatcgtttcttcctgaagttcaaactgctgacaggaaagtgccatttagagagaaggtcatatacactgtgatctctcttttcattttcctggtttgtagtcagctccctctatatgggatacactcaacaacaggtgctgatccattctattggatgcgagttattctcgcttcaaatcgtggaactgtcatggagcttggaatcactcccattgtgacttctgggctagtaatgcaacttctggctgggtcaaagatcattgaagtggacaacaatgtacgagaggatcgagccctgttaaacggggcacagaagctacttggtattttgatagctgttggtgaggcagttgcctatgttctttcggggatgtatggcagtgtggggcaacttggagtagggaatgccatcctcatcatcatccagctatgttttgcgggtataattgtgatatgtctagatgagcttcttcaaaaaggatatggtctggggtctggaatatccctattcattgcaaccaatatctgtgaaaacattatatggaaggcatttagtccaaccaccatcaacagtggacgtggagctgaatttgaaggtgctgttattgctctgttccatttgttgataactagaacagacaaggtccgtgctcttcgtgaggcattttaccggcagaatcttcccaatgtgacaaatttgcttgctactgtcttgatcttcctaattgtgatatacttccaaggtttccgtgtggtcttgcctgtaagatcaaagaatgctcgtggacagcagggttcatatccaatcaaattgttttatacctccaacatgcccatcattcttcagtctgcccttgtttccaatctctacttcatctcccagctgctccaccgtaagtacagcggaaacttcttcgtagatctattgggaaaatggaaggaatctgaatatggaggtggtcagtctgttcctgttggtggcattgcatactatatcactgcaccatccagcttagctgatatggcagccaatcctttccatgctctgttctatcttgtgtttatgctttcagcctgtgccttgttctctaaaacatggattgaagtctctggttcatctgctaaagatgttgccaagcagcttaaggaacaacaaatggtaatgcctggacaccgcgagtcaaacttgcagaaagagctgaaccgatacattcccacggccgcagcatttggaggcatctgtatcggtgctctgacagtgttggcagacttcatgggggccatcggttcaggaaccggaatattgcttgcagtaacaatcatctatcagtactttgagacatttgagaaggagagagctagtgagcttggcttcttcggtttctaagttctgccaagcaaataatgttggttggtgactccaacgagctctcccacaccccttgtttgagggatcgttatacttgtaggtcgtttaacatcgtaagggaggacataactagtttgttgtcaagatttacttttctttttttccctttcaactgaggaagtatcaagtagtacatcgttgttaacatttttgggtttcctctgaaatatacttgtgtttatcattaaattcaatctatacgtaagtctgacaccaaggtttaaaaa

SEQ ID NO: 87 - DNA, 370 bp, Glycine max
  Clone ID: PAT_MRT3847_123247C.1
ggctagaaaacatttttttaattttctaaaccgctttataagggaaatttcgggggctttatgaaaataggcggttcaaaaccccgtcctaggggagggacaaactaaaatagcccagtccctccccaattcataacgaaaaacatgaaggcccaaaatctcagtacccccgagattagcattcaacaccttttccctttgaaaaccttccccaggggaagttcaatccctaattaaaagtaggggatgtttaattttgtcccccgccccctttgggggcggcttttttaatttcatttgccccatcttcctgcatgtcagaggcccagagggtaaggttatcacaaaaaagttgcatgatcaaagggct

SEQ ID NO: 88 - DNA, 618 bp, Glycine max
  Clone ID: PAT_MRT3847_123814C.1
cttgtccctatttaaatagctatctagaaagtcctctctatgttccatttcatctcccatactcaaactcactctttctaagttttttctatctctttctctctctctgtctgccatggttctctccaaaaccacctccgaatccgacgtctctgtccactcaaccttcgcttctcgatatgtcagaacttcgcttcccaggtttaagatgccggaggagtcgataccaaaggaggcagcgtatcaaataataaacgatgagttgatgttggatgggaacccaaggttgaacttggcatcatttgtgacaacctggatggagccagagtgtgataaactcatcatggctgccattaataagaactatgttgacatggacgagtatcctgtcaccactgagttacagaatcgatgtgttaacatgatagctcatcttttcaatgcaccactagaagagactgaaactgcagttggtgttggcacggttggctcatcagaggccataatgttggctgggttggcattcaaaaggagatggcagaatagaaggaaactggaagggaagccttatgacaatcccaacattgtcactggtgccaatgttcaggtttgctggga

SEQ ID NO: 89 - DNA, 1171 bp, Glycine max
  Clone ID: PAT_MRT3847_124335C.1
gatattcaaaacacaacacagattccagtacatgacgtatgattagaggttttgtattttagcataacattgactattgttagctattggctccatgtgaaatgcgaatcaaatttgtttgaagctctgcatttgatttaaggggatccaagagcacccatcatctcacaatgatagccgttgaaaatgacaatgcaaatttctaaaatactaaaataatttattgaccaatcaaaacaagttgatcatagatggtccaaaactcaagtggccaccactttgttcacacaatccaacaataaaaatggccattttgctttaagaaattctcatgctgggttgaaatccattagcagtgaatcctccatcaactgaaacaatctgtccagtgatgtaggatgctgctggcaggcaaaggaaagtcaccaaggatgaaacttcatgtgtttctgccatccgctttatcggcgttcgagatattatctcactaacaagctgtttgttcgcaagcaaaggttccacaagtgaagttatggtataccagggtgcaacaccgttgctccttatattgtcttttgcccattcacaagcaaaatatttggtaagctgatcaatagcagctttagttgctgcgtaaatggctccagaacctacgcttgtctgacttgcaacagaggaaatggacacaatacttccatttccagatgctttaagaagaggatatgcaagttggcacaaatggtatgtggagtccaagttagttgccatcaattttgaatattcttcggctgtatactcaattgtcggcttcctcacatttgttccaacattgtttacaagtatgttgagcttgccgttgaaagcagaggccacttgttgaatgaggttctctctatggggtggagaagacgcatcacaaaccaacccagaaaccgaaaatcccttctctttccactccttcaagcatgcattcagctcttcttcattcctcgaacaagtgtacactgtggcaccaaactccgctagttcctccaccacagcgtgcccaattccacgcgttcctccagtaacgagagcagtggttcccttaagggaccatctagagcctctgctactgccttcagggttcgccattgttgtttgcttttggttttctggtgtccggcttcct

SEQ ID NO: 90 - DNA, 1038 bp, Glycine max
  unsure (1)..(1038): unsure at all n locations
  Clone ID: PAT_MRT3847_124426C.1
ngaccttcccccactcatcaaacatttgatttgtatatggcaaaagacagtttcatacaactattgcactaaaacacaaaccaaatcaagacaaaaccagattctgagatcgcttcttctgtgaaaaaaaatcgtcttggcactgattcttttcagtttccaatgaactgagagtgaaaagcagggaattaatcagtttcatccagtgattgggttttggcaatcagatcaaaaaccatgagagaagaaggttcaggatatgacagcaccccttttttggatacccaatatgcagaatgtcacgtcgaaagaactggtacagtgtggactgcagtggcacacatagtgacaggagtgatagggtcaggagtgttgtctttggcatggagcattgcacagcttggatggattggagggccactcactattgttttctttgctgccatcactctcctctcttctttccttcttagcaacacatatcgttctccagaccctgaacttggccctcataggagctcctcataccttgatgctgttaatttgcataagggggaagggaatagtcgcttctgtgctgtttttgtgaacgtaagcttatatggttttggaattgcttatgtcattactgctgctatcagcatgagagcaatccaaaaatcaaactgttcccaagacaatggaaatgaagtaacatgtggatttggggatggatatttcatgcttatttttggggctatgcaagttcttctctcgcagatacccaacttccataatattcaatggttgtcaattcttgcagcaattatgtcctttgcttatgctttcataggaatggggctttctgtcgggcaagtcacagaaaatggacatgctgagggtagtattgaaggaatccctacttccagtggaattgaaaagttatggctggttgctcaagcacttgatgacatagcattctcctatccattctcagtaattcttattgaaatacgagatactttgaagtgccctccaccagaagacgtagccatgaag

SEQ ID NO: 91 - DNA, 2136 bp, Glycine max
  unsure (1)..(2136): unsure at all n locations
  Clone ID: PAT_MRT3847_124570C.1
tcgctcgtccatacgacctaatccaattcagaccacgaaaaaaccaactacatcagctcatggcaacccccaaccccaccagattctcccttgccatggagagaaccgggcaatgggttttctccccagaaatccccaccgatgttattgttgcagttggacaaaccaatttttctctccacaagtttattctggcggcgaagagtaactacgtcagaaaagtgataatggaatcagaggagagtgacctaacaagaatagagatttccgacatacctggaggatcagaagcttttgagaaagcggcgaagttctgttacggcgttaacttcgagatcacggttcacaacgtggcggcgctgcactgcgccgctgtgttcctccagatgaccgacgagtattgcgacggaaacctcgccggaaggacggaggattttctctctcaggtcggcctctccacgctccacagcgccgtcgcggttctcaaatcctgccaaaagatcctccccttcgccgccgaggtcaacgtcgttgaccgctgcgttgaggtcatcagctgcaaggcttgcaacgaggcgaatttcccaagccagtcgccgccgaactggtggacggaggagctcgccgtgctcgacgtggattcctttgcaaaggtgatcaccgcgatgaagcagcgtggcgcaaagtacttgaccgtcgccggagcgttgattacgtacaccgaacgcgcgctgagggagctcgtcagggatcagaccggcggcggaaaaggaatccggtcaccggaatccggagactccgattcggagtcgaaaagaagcgaacagcgcgagcttctgcaggctatcgttcctctctttccgacggagaaagccgcgtttccgatcaacttcctctgctgcctcttgcggtgtgcgatctacctccgcgcgtcgagcgcgtgcaagcgcgagctggagaagcgcgtgacggagattctcgagcacgtgaccgtcgacgacctcctcgtgctcacgttctcctacgacggcgagaggctcttggatctggacagcgtgaggagaattatctccggttttgtggagagggagaagggcacgacggtgttcaacgccggcgtcaacttcaacgaggacttctccgccgcgatgcagcgcgtggccaaaaccgtcgactcgtacctcgctgagatcgccgcgtacgccgaactctccatctcgaaattcaacggcatcgccatcctcattcccaaaggcgcgagaaaatccgacgacgatctataccgcgccgtcgatatctacctcaaggtgcacccgaacctggacgagatagagaaggagaaagtgtgcagtgtattggacacgttaaaactgtcctacgaggcgcgtgtgcacgcgtcgaagaacaagcgtttgccgctacagatcgtgcttcacgcgctgtactacgaccaactacaaataaggagcggtacggcggcggacaagcaagctgtggtggcggcggcggagaaaaaacagctgcaagctgacgtgtccttggtgagggagaacgaggagctgcggtcggagctgatgaagatgaaaatgttcatttccgatttgcagaagaatgttcacggaacgtcgtcgtctgggagggagaatattgggcccactaaaaagcccacgttcttctcgtccatgtccaagaaactgagcaagttgaacccgttcaagaatgggtctaaggacacgtcacacatcgacgatgcccctgtggacttgaccaagcccagaaagagaaggttctccatttcctagatttgctttccttagtcaattccaagctttgtcaaaaagaattttaaattttttgaagtaattacgttttctctcttgattgttaatttttttcatgaaagtgtcaatttgtaattaagaaaaaagtgagacgtgattggatttcttaaattagatttgttcatatctgtatgttaagatgtatttgatctggatatataggaacatcctagtttcaatatgaattaatgagaattataataaaaatgctttgagtcgtgcttaaaaaaaaaaaaaaaaaaaaaaaaaaaaaaaaaaaaaaaaaaaaaaannaaaaanaaaaannaaaaaaaaa

SEQ ID NO: 92 - DNA, 930 bp, Glycine max
  Clone ID: PAT_MRT3847_124754C.1
ggctatctaaggttccggagggtgtagacaacaacaggggcaatgtttacattggcagtacaagcccgacaaatgttgcaagagcttactatgagcaatttcaaagagatttctctctttttctcaagtgtcgtgcagaggaattagttaaaggaggtcgtatggttctaacatttttgggaagaagaagcgatgatccctctagcaaagatggtggctacgtttgggagcttatggctactgctcttaacgatatggtcttgcagggaatcataaaagaagagcagttagatacttttaacattcctctatacactccatctccttctgaagtgaaattggaagttcttaaagaaggttcatttgccagcaatcgtctagaggtgtctgaagtgaattggaatgcttttgatgactggaacgctcttgaatttgaatctgaaaggtctgatacacttagtgatggcggatacaatgtggcacagtgcatgagggctgtggcagaaccaatgcttgttagccactttggtgaagctatcattgaagaggtttttagccgctaccaacaaatcttgactgatcgtatgtccaaggagcaaactaagttcatcaatgtcaccgtattattgactagaaaagcataagcaagaagtttgcatctatatagggtttctcaaaatgggattgttgtagtcatagtttaaaaatccggctcgactaggcttgtcggatcgagatctgatgacataacccgtctgatttgattattggaccggttatgtatttggtccagaataatccggtccaacccgcccgatttggagtaaattcggtgattctgtctgatatttccatttcgcctaaaaaagaatacaaaaaaaatgttaaaaaaatttaagacttaaaaaaaaaaaaaaaaaaactgagact

SEQ ID NO: 93 - DNA, 2482 bp, Glycine max
  Clone ID: PAT_MRT3847_124919C.1
ccacacgtccgacgtgggaggaaggaaagagcatacgtgttgcgttagtgtttagtgttatatctccgcagtggatcaaatcaaacaaacacttccatccatcaccctttctctctgcttagggttttgatcgcatcggatcttcactctcttctccgatctcaaaatgcccgccgtttatggagctcgcttgaccaccttcgaagactccgagaaggagagtgaatacggttacgttcgcaaggtatcaggaccagtcgtcgttgcagatggcatggctggggctgctatgtatgaactcgtgcgtgttggtcatgataatctcattggtgaaattattcgtctcgaagggaattctgctaccatccaagtttatgaggaaactgctggcttgatggttaatgatccggtgttacggactcacaagcctttatccgtggagttgggacctggaatactggggaatattttcgatggaattcagaggcctttgaaaactattgctaaacgatctggtgatgtctatattcctcgtggtgtctctgttccagcactcgacaaagatacactttgggaatttcaacctaagaaaattggtgaaggcgaccttttaactggtggagatttatatgctactgtttttgagaacagtctaatgcaacaccatattgcacttcctcctgataacatgggaaagattacctacattgcaccacctggccaatattccataaaggatactgtattggaacttgagtttcaaggtgtcaaaaagaaattcaccatgcttcagacttggcccgtacgtacaccaaggcctgttgcatcaaaacttgcagctgatactcctcttcttactggtcagcgtgttcttgatgcccttttcccctcagttcttggcgggacttgtgccatacctggagcttttggttgtggtaaaactgtcattagtcaggctctttctaagtattccaattctgatgccgttgtatatgtcggctgtggggaacgtggaaatgaaatggcagaggttctaatggactttccccaacttacaatgacattacctgatggtcgtgaagaatctgtcatgaagcgcacaacactagtggctaacacttcaaacatgccagtggctgctcgtgaagcttcaatttatacaggaatcacattagctgagtatttcagagatatgggttataatgtcagtatgatggcagattctacatctagatgggcagaagcattgcgtgaaatctctggacgactggcagaaatgcctgcagatagtggatatcctgcataccttgctgcacgtttagcctcgttctatgaacgtgctgggaaggtaaaatgtcttggaggccctgaacgtacaggtagcgtaactattgttggtgctgtttcgccacctggaggagatttctcagatcctgtgacatctgcaaccctgagcatagttcaggttttctggggtttggacaaaaagcttgctcagaggaagcactttccttctgtaaactggcttatttcttattcaaaatactcaacggcacttgaaaccttttatgagcaatttgatccagattttatcaacattaggacaaaggctcgtgaagttctgcaaagggaagatgacctgaatgaaattgttcagcttgtgggcaaggatgctttagctgaaggagataagatcaccttagaaactgcaaagcttttgagagaggattatcttgctcaaaatgcctttacaccatatgacaaattctgccccttctacaagtctgtttggatgatgcgcaacattatccatttctacaatttggcaaatcaggcagtagagaggggagctggttcagatggtcagaagatatcttacacccttatcaagcatcgtatgggagatctgttctaccgattagtgtctcagaaatttgaggatccagcagaaggggaagctgctttggttgctaaatttcagaagttacatgaggacctgactaatggtttccgcaaccttgaggacgaaacccgatgattgatgatttaggtatggtagtttgctcaaatattgtgttatttccaattgtaagaggcagtctagcatcgcagggttacaacgtcccgagtgttcttatatttgactgtttgattcattcatatcacatttatttcctttcttggtgctggtttggcttttgatctagtctcatgtgtagctataatcatgtgtttcagtcatcctcagtttgtttattgaaaataagaaacgaaacttgctctttcaatatgtatttaggagaataaagttattttagaacatgaagtgcctgcggcaatcggattccggattcatataggtggaatttttggtggaagtggattatcttgaatcctgtatttcatagatggacttcttgtagcaaagagtatttaattatttattcaaaatatgttatacatgttaaaaaaaaaaaaaata

SEQ ID NO: 94 - DNA, 257 bp, Glycine max
  Clone ID: PAT_MRT3847_125358C.1
acgcaattcgacgcgagcacaagcactccgatgatcagggtcgcaaggttgacaagtatgacaacattacgaaacaagctaacgaatacggcaaccctattcatcctgctagtgtcacctcatgtaccccaccaaaccacctactggtagttacagtgatgacattaataagcaacatgataccaccaatgcctacgacgtagacactcgtaaacagcattctagtggtagctacgatggtgacactaataaacatc

SEQ ID NO: 95 - DNA, 142 bp, Glycine max
  Clone ID: PAT_MRT3847_125661C.1
ggtcatcctgtttgcgggctgcttatttaatttcatctgctccatcatcctgcatttcagaggtccaaagggtgagggtataacaaaggaggtgcatgatcagaagggtatcctttgttgactcctttcccagtgtatccaa

SEQ ID NO: 96 - DNA, 1637 bp, Glycine max
  Clone ID: PAT_MRT3847_125727C.1
tttgatttagccttttcttttctcttttggttgtcatggtggttatttcacctcctcttagatctgaagagtttcataagggtttttgctttgcccatcattgattctcttgagttttgtaaaagaaagcctcttttagattcctttgatcataagaagctcctatcctctgcattcctctctgagggtatctctctctctttgaacttagagagagagagagagagttgaatttagaagtatcgtttttgctatgtgcaattgttagagagatcaatgaataggggaattgaagtgctctctccagcctcctatctccaaaactccaattggttgttccaggaaagcaaggaagcaagatggactgcagaagagaacaaactgtttgaaaatgccttggcttactatgataaggacaccccagatagatggatgagggtggcagccatgattccagggaaaactgttggtgatgtgatcaaacagtacagagagcttgaggaagatgtgagtgtcattgaagcaggtttgatcccagttcctggctatactactgccagttctttcacattggagtgggttaacaatcaaggctatgatgagttcaagcagttctgtaatgttggtgcgaaaaggggtgcatccacgaggccaactgagcaggaaaggaagaaaggagtgccatggactgaagaggagcacaggcaatttctgctgggtctcaagaagtatggtaaaggggattggagaaacatctctaggaactttgtgaccacaaggacaccaactcaggttgcaagtcatgctcagaagtacttcatcaggcagcttacaggagggaaggataagagaagatccagtatccatgacatcacaatggttaatctccaagaaacaaaatctccttcatcagacactaccaaaccctcttctccacttcagaatcaggcattgtctagcatggttaaggaggaatatgagtggaaattgccatgtgagggcatgcccattgttttcaattccacaagtggaaacatgttcatgtcagcaccactgcatggcatttcttcatatgaatctagaccacaggagcaaaatttacttagacaatctccatggatgccagttttcaccttgtgatgctattttgcaaatgcaattgatgcgacatcggtgatctatacaagtggtgcagggattagagttttgaagttagatggaaggtttgtgtgagctagcatccgatgttcatcttcctatataggcagccaggagttatctgcagatcgccctgaggaagaggagctatctcttgcctttttaaaagatgcttcaaataaatatattcagttccaagtatacataaagaattaaataaaggcatcaatcatgttgatgtactagtggtgtaatataaaacaatttggactgttaatttttataaccctatattaggagtgtatttcaagccataaagttatgattataccagaaagattttccaagtgtggtgaggagttggacagagctttggtcctcatgtaaaaatgtgatcataaagcatttgatatgaaacataatgtcttggaagcatttgttccacaacatggtggacattaagatccaagctgaaagtc

SEQ ID NO: 97 - DNA, 915 bp, Glycine max
  Clone ID: PAT_MRT3847_126514C.1
ggcttcgctctcgtcaagtttcaggccttccttagtagcagagaccaacttctttccctcaaattccttaagctgaccaacagcatactcgtcaatagcatcaaccatgtagagaacctcgaaccccttcttcttaagcttttcaaggaaaggggaattctcaacagctttcttgctttcaccagtaatgtagtagatgtcattctgcccttccttcatcctggtaacatagtccttgaggctggtcatctcatcaccactcttggtggagtgatacctgagcaattcagcaagttttgtcttgttctgagaatcctcatgaataccaagtttcagattcttagagaaggcttcataaaacttgttatagtcttccttgttctcagcaatttcaaagaacatctcaatgcacttcttgaccaagttcttcctgatgactttcaggatcttgttctgctgcagcatttctctagaaatgttgagaggaagatcctcagagtcaacaatgcccttgacaaagctcagccactctgggatcagctcctcacagttgtccatgatgaagacacggcgcacatagagcttgatgttgttcggcttcttcctggtgtcaaagaggtcaaagggggccctcttcggcacaaacaggacagccttgaactcaagctgaccctcaacagagaagtgcttcacggcgagatgctcctcccagtcgttggtcaagctcttgtagaaagcagcatactcttccttggtaatatcctcaggcttcctcatccagataggcttctgcttgttaaccaattgccactcatgagaaacctccttgatcttcttcttcttcttttccttttcttccttctcatcaacatcctcaaccttgccctcctcgtccttcttatctcggacgcgtgg

SEQ ID NO: 98 - DNA, 1959 bp, Glycine max
  Clone ID: PAT_MRT3847_126516C.1
cggttgcgtgggcggacgcgtgggcttctgtccgctgcgactctctttccttccctctttttccgaatctgaatcgaaatggcttcggagactgagacgtttgcttttcaggccgagatcaaccagctcctcagtctaatcatcaacaccttctacagcaacaaggagatctttcttcgtgagctcatcagcaatgcctctgatgctttggacaagattcgatttgagagtcttacagacaagagcaagcttgatgctcagccagagttgttcattcacattattcctgacaagaccaacaacacattgtctatcattgacagtggtattggcatgactaaggccgatttggtgaataacctcggtactattgcaaggtctgggaccaaggaattcatggaagccctggctgctggtgctgatgtgagcatgattggacagtttggtgttggtttctactcggcttatcttgtagctgacaaggttattgttaccacaaagcacaatgatgatgagcagtatgtctgggagtcccatgctggtggctcatttactgtgacaagggatacatctggtgagaaccttggtaggggaacaaagataactttgtttctcaaggaagatcaacttgagtatcttgaggaacgccgtctgaaggatttgataaagaagcattctgaattcattagctatccaatttctctttggattgagaagaccactgaaaaggagatttctgatgatgaggacgaggaagagaagaaggatgaggagggtaaagttgaagatgtggatgaagataaggagaaggaggagaagaaaaagaagaccattaaggaggtatctcatgagtggtcattggtgaacaagcagaagcctatttggatgaggaaacctgaagagatcacaaaagaagaatatgctgctttctacaagagtcttaccaatgattgggaagagcatttggctgttaagcacttttctgttgagggtcagctggagtttaaggctgtcctctttatccccaagagggcaccttttgatctttttgacactaagaagaagcctaacaacatcaaactgtatgtccgccgtgttttcatcatggacaactgtgaggagttgatgccagaatatcttagctttgttaagggtattgtggattctgaggatcttcctctcaacatttctagagaaatgctgcagcagaacaagatcctgaaagtcatcaggaagaacttggtcaagaagtgcattgagatgttctttgaaattgctgagaacaaggaagactataacaagttttatgaagccttctctaagaatctgaaacttggtattcatgaggattctcagaacaagacaaaacttgctgaattgctcaggtatcactccaccaagagtggtgatgagatgaccagcctcaaggactatgttaccaggatgaaggaagggcagaatgacatctactacattactggtgaaagcaagaaagctgttgagaattcccctttccttgaaaagcttaagaagaaggggttcgaggttctctacatggttgatgctattgacgagtatgctgttggtcagcttaaggaatttgagggaaagaagttggtctctgctactaaggaaggcctgaaacttgacgagagcgaagacgaaaagaaaaagaaggaagaattgaaggagaaatttgagggtctctgccatgtgatcaaggatgtgttgggtgacaaggtggagaaagttgtggtgtctgatcgtgttgtggattctccttgctgtctcgtgactggtgaatatgggtggacagccaacatggaaaggattatgaaagcacaggcattgagggacagcagcatggctggatacatgtcgagccagaagaccatggagattaaccctgagaaccccatcatggatgacctgatgaagcgagctgatgctgacaagaaa

SEQ ID NO: 99 - DNA, 2076 bp, Glycine max
  Clone ID: PAT_MRT3847_126518C.1
ccacgcgtccgccttttcgttctgttttggcttcttcgctgcaactctctaccttccctctttttccgaatctgaatagaaatggcttcggagactgagacgttcgcttttcaggccgagatcaaccagctcctcagtctaataatcaacaccttctacagcaacaaggagatctttcttcgtgagctcatcagcaatgcctctgacgctttggacaagattcgatttgagagtcttacagacaagagcaagcttgatgctcagccagagttgttcattcacattattcctgacaagaccaacaacacattgtctatcattgacagtggtattggcatgactaaggctgatttggtgaataacctcggtactattgcaaggtctgggaccaaggaattcatggaagccctggctgctggtgctgacgtgagcatgattgggcagttcggtgttggtttctactcggcttatcttgtagctgataaggttattgttaccacaaagcacaatgatgatgaacagtatgtctgggagtcccatgccggtggctcatttactgtgacaagagatacatctggtgagaaccttggtaggggaacaaagataactttgtttcttaaggaagatcaacttgagtatcttgaggaacgccgtctgaaggatttgataaagaagcattctgaattcattagctatccaatttctctctggattgagaagactactgaaaaggagatttctgatgatgaggatgaggaagagaagaaggatgaggagggtaaagttgaagatgtggatgaagataaggagaaggaggagaagaaaaagaagaccattaaggaggtatctcacgagtggtcattggtgaacaagcagaagcctatttggatgaggaaacctgaagagattacgaaagaagaatatgctgctttctacaagagtcttaccaatgattgggaagagcatttggctgttaagcacttttctgttgagggtcagctggagtttaaggctgtcctctttatccccaagagggcaccttttgatctctttgacaccaggaagaagcctaacaacatcaaactgtatgtccgccgtgtcttcatcatggacaactgtgaggagttgatgcctgaatatcttagctttgttaagggtattgtggattctgaggatcttcctctcaacatttctagagaaatgctgcagcagaacaagatcctgaaagtcatcaggaagaacttggtcaagaagtgcattgagatgttctttgaaattgctgaaaacaaggaagactataacaagttttatgaagccttctctaagaacctgaaacttggtattcatgaggattctcagaacaagacaaagctagctgaattgctcaggtatcactccactaagagtggtgatgagatgaccagcctcaaggactatgttaccaggatgaaggaaggacagaatgacatctactacattactggtgaaagcaagaaagctgtcgagaattcccccttccttgaaaagcttaagaagaagggatacgaggttctctacatggttgatgctattgatgagtatgctgttggccagcttaaggaatttgagggaaagaagttggtctctgctaccaaggaaggcctaaaacttgatgagagcgaagacgagaagaaaaagcaggaagaactaaaggataaatttgagggtctttgccatgtgatcaaggatgtgttgggtgacaaggtggagaaagttgtggtgtctgatcgtgttgtggattctccttgctgtctggtgacaggtgaatatgggtggacagccaacatggaaaggattatgaaagcacaggcattgagggacagcagcatggctggatacatgtcaagcaagaagacgatggagattaaccctgagaaccccatcatggaggagctgaggaagcgagcagatgctgataagaatgacaagtctgtgaaggatctcgtgctcttgctctttgagactgctcttctaacttctgggttcagccttgatgatcccaacactttcggctacaggattcacaggatgctgaag

SEQ ID NO: 100 - DNA, 2186 bp, Glycine max
  Clone ID: PAT_MRT3847_126530C.1
tccgcgcgagcacccccccggtccctcattcttcccacgcaacaaaacttcccttgttcctgctcctcgaacccttgagagcgagaaaccacgtttctctcttgaggttaattattattattattgagtattgagcatggaggcgccatctctcaccaaacccaacgacccaacaaaaccttccaacacttccagcacccttagtctggagggggggccgggcgaagcgagcccactccgaaaaatgtttgcggtggcgtccatcgccgccggcatacagttcgggtgggctctgcagctgtctctcttaaccccctacgttcagctcttaggagtcccccacgcggcggcctccttcatctggctctgtgggcccatctcggggctggtggtgcagcccattgtgggctactacagcgaccactgcacctctcgcttcggccgaaggcgccccttcatcctcggaggcgccttagccgtcgccatcgccgtgttcctcatcggctacgcggccgacataggacactccgctggcgacgacataactaaaaaaacccgaccccgtgcagttggggtcttcgtcataggattctggatcctagacgtggccaacaacatgctccagggaccctgccgcgcctttttagctgacctcgctgccggcgaccagcaaaaaacgagaatcgccaacggtttcttctcgttcttcatggccgtcggcaacgtgcttgggtatgctgcagggtcctacagcggtctccacaagatcttccccttcacggagaccaaggcctgtgacgtcttctgcgcaaacttaaaaagctgtttctttttctcgatcctactgcttctctttttagcaactgttgctctgctctacgttaaggacaagcaagttgaagcaattcctctggatgatgccactcaaccctcttgtttctttcagcttttcggtgctctgaaagagctcaagagaccgatgtggatgctgatgctggtgacagctgtgaactgggtggggtggtttccttacttttttttcgacaccgattggatggggcgcgaggtgtacggtggtcaagtgggggaggacgcgtacgccaatggagtgcgcgttgggtcgctagggctgatggtaaacgccgtcgttttgggcttcatgtcgctggcggtggagccgttggggaagatggttgggggagtgaagaggctgtgggcgattgtgaactttattctggcaattgggttcggaatgacggtggtgatcaccaaggtggcggagcaccagcgcaagatgaatcccgccgccgtgggtcacccctccgaaggggtggtggttgggtccatggttttctttggggttcttggagttccccttgcgattactttcagtgtcccttttgctctagcatcaatatactgcagcgcttcaggagcaggacaaggtttatctttgggagttctcaatcttgcaattgtggtaccacagatggtggtgtctgcattaagtggtccttgggattccttgtttggtggtggcaacttgccggctttcatggtgggtgctgcggcagccgcgttgagcgccataatggcgattgtcttgctgccaactccaaagccagctgatgaggccaaggcttcaagcatgatggcagggggctttcactagttaatggagttttgcatgtttcagttttgtcccctgctttaatagaaagaaaaaaaaaaacagtaataaaagaggaaaaattggatagtctcttttgatttgaagctggtgtgtaattatgtaatagacccaccaagtgctacatttgtaaccttttgtagcacccactgaacatagtaattgcagagtttggtgtgattgtacataattgcagtggttggaacttcttggaagacccttcctcttatataattttagtctgtttcagtgttcagaggaatgtggtgattaaggatgagtcttagtttaagactttacatcaattaatgataataagggaaatgctactttttacaaagatcaaaaaagtaattaaggaagagtcttagttttaagactttatatcaattaacgttgcttagcgtattgctacttttccctcctttacttatctgtttctttacatgtaaaaagtattatgagaaagtgttataaaaataatatttctcatttg

SEQ ID NO: 101 - DNA, 2491 bp, Glycine max
  Clone ID: PAT_MRT3847_127203C.1
gccgtgagggagagcgcttagggatttgtgagtgccttggtaactcgcgctcgcccgcgtgcgtcctttcttcttcttcttcttcttcctgtcttcacctaaccaaatgggcgcctccaccacctgatccacctctgtttcttcttcctttcatccgttcatacgggggttagatgatggagtcctgtgattgtatagatacgcagtatccgccggatgaacttcttgtgaagtatcagtatatctcggatgtgctaattgctcttgcgtatttttcgattccggtggagctcatctattttgttcagaagtctgctttctttccgtatagatgggtgcttatgcagtttggtgcctttattgttctctgtggagcaactcatttcataaacctgtggacattctctccgcactctaagtctgttgctgttgtcatgacgattgccaaagtttcgtgtgctattgtgtcatgtgcgacggcactgatgcttgtacacattattcccgatctgttgagtgtcaagaggcgcgaatcgatcctcaagaacaaggctgaagagcttgacagagagatgggacttattcttactcaggaagagacgggaagacatgttagaatgttgactcatgaaattaggagcacacttgacaggcatacaattttaaagactactcttgtggagctggggaggactttgggcttggaggagtgtgcattatggatgccttcgagaagtggtctgaatctgcaactttcccatactttaacctatcatgtgcaagttgggtctacggtgcaaacaaacaatcctattgtcaatgaagttttcaacagccctcaagctatgcggataccacccacctgtccattggccaggatcagacctcttgtgggaagatatgtgccccctgaagttgttgctgttcgggtgccgcttttgaatctgtcaaattttcaaattaacgattggcctgatatttcagcaaaaagctatgcaatcatggttctcatcctccctactgacagtgttagaaaatggcgagaccatgagttggaacttgttgatgttgttgcagatcaggtagcagttgccctttcacatgctgctattttggaggagtctatgcgtgcccgtgatcaattcatggagcagaatgttgctttagatttagcccggcgagaggcagagatggcaattcatgctcgcaatgattttcttgctgtcatgaatcatgaaatgaggacaccaatgcatgcaattatagcattgtcatcacttctcttggagactgaactgacgccagagcaaagggttatgatagagacagtgttgaagagtagtaatgttttggcaacactcattaatgatgttctagatctttctcgacttgaagatggtagcctcgaattagaaatgggaaaattcaacctccatggagttttgggagagattgttgaactgataaaaccaatagcatccgtgaaaaagttacctatcaccttaattctgtctcctgatctgcctactcatgccattggtgatgaaaagcggcttacacaaactcttttgaatgtcgtgggtaatgctgtcaaattcactaaggagggctatgtttctgtaagagtatcagttgcaaaaccagaatcttcacaggattggcgacctccagagttttatccagcatctagtgatggccatttctacattcgagtccaggttaaggactctggatgtgggattctcccacaagatattccgcatctctttaccaagtttgcccagtctcggagtggaccagctcgacctagcagtggtgcaggtcttgggcttgccatttgtaaaagatttgtaaacctcatgggaggccacatatggattgagagtgagggccttgacaaaggaagcacagctacatttatagtcaaacttgggatttgtggcaatccagatccatccgatcatcaagctgcaaacagaagccaagcatatagtggaagtggtggcctcgctagatttaaacccttcatcacagatgaaaacgacactggtttttctactagacgcaatcaaagaagtttctaatatccaagacaccaaaattgcatacctctcaatcacagtcgacaagatggagtaaacctcctactttcattttgcatgtgctaaattgtataatttgcagtttgcggctgtagaataggattactatgtcaggcatatttctaacaaacaggttttatgcgaactcctgttgtattaactagaatacaatacaacaaaacaaagttgagagacgatctgttacttaatttgacttgtagtatatattgtcagtggcttttgccgtttagcgttcataaaaatgacagtattggcatgaatcagttgtcatccctccccatgttccgtgattcgttagatttggtgtctgtcgtttgtgctaaacttaaactgttttgtgaaagaaacataggataagtggacggatc

SEQ ID NO: 102 - DNA, 660 bp, Glycine max
  Clone ID: PAT_MRT3847_127234C.1
gtatgctgatatgcactattcaaataggagcattagctatgtttgttaatgtcactttatggtacgtggagtgtcttaggtgacttacccacagaacatagaacgagtgaagtacgtagagataaaattatagaacaagaatgaaggtagcacaggtactgcacatgaacggcggcgttggacacgcaagctatgcaaacaactcccttcttcagcaaaaggtgatttgtttgacaaagcccataagagaggaagccataacaagcctctattgcaacaccgtccccagaagcttggcggttgcagatttgggttgctcttctggaccaaacactttgcttgttgtgtctgaattcatcaaaattgtggagaagctttgtcgggagctaaaccataaatctccagaatacaaggtctttctgaatgatcttcctgggaatgacttcaacaacatcttcaagtcccttgatagcttcaaaaagaagttgtgtgatgaaatggaaagtgggattggtccatgctacttctctggggttcctggttctttctatggcagggttttcccaaatcaaagtcttcattttgtccattcctcttatagccttcactggctatctaaggttcccgagggtgtagacaacaacagggcaatgttacatt

SEQ ID NO: 103 - DNA, 270 bp, Glycine max
  unsure (1)..(270): unsure at all n locations
  Clone ID: PAT_MRT3847_127507C.1
agcgaatccctctctctctttctctttctctctcatccagatcttgcaaaaaaaaaaaaacacaatggnagcgagngctccnantcnangcgaaganttcgtgtacatggcgaantggcggannaggccgagcgcnacgnggagatggtgganttcatgganaaggtctcngcctccgccgagagcgaggagntgaccgtggaggagngcaacntcctctcngtggcctacangaacgnaatcggcgtncgcngcgcctcctggcgataa

SEQ ID NO: 104 - DNA, 1754 bp, Glycine max
  Clone ID: PAT_MRT3847_127582C.1
ggcttcctttttctttctttggttcctttccccagccaggtctttcttggaaaagaaaaagtctttgggtttgtgcagtagttgagttgaggaagtgatggaagcagtttacaggttgaaacctctttccgggacatgacgaagagggttcatcttgttagggaggtcacaacgttaattctgccattgcagcaaatcgttaccttgtccatggcaatctcgggtcgttgtgcaggtaccttcatgctccaactacttccccttgcttcctcgtcattatcatcatctgtaatttcgtattagcgtacactacacacactcctcttcctagctgccttcacagcaaaatactggttgaaacctcttttgccttgtctagaggaggaagtggttagagttgggaacgctactacttctgagatgcgtgttggatcaacggctaattgttgttacctgcagctggaagctcctcaacagaataatgtaaccgagtcatcatcagatatgtcagatcggatgatcaagatccagatcgcaaatcaccctctttatccagatttactctctgcatatatagaatgccaaaaggttggagcaccgccggaactggcatgccttcttgaagaaataggccgagaaagccaccgcatgaatgctcgccgtgagattgtggagggtcctgaacttgaccacttcatggaaacattctgcgaagttcttcatagatacaaggaggagttgtccaggcccttcaatgaagcgacgttatttttgggtgacatggaatcacaactcagcaacctttgtaatggaacactaacaaagtcatcggataacaacaaccgctccgatgaggtagctagtggggcatcagaagaggaattaagttgtggggagatggaagcatttgaagatcatgtatcttcttctgtaacttgcccaagtgatcaaaggcttaaagaaatgctccttcgcaaatacagcggccattttagcggtttgagaaaggaatttctaaaacgaagaaaaaagggtaagctaccaaaggatgcaaggatagcactcatggactggtggaacacccattatagatggccttatcctacggaagaggagaaagtgaagttgtcagaaattactggactggatcaaaagcagatcaataattggttcatcaatcagagaaaacgtcattggaaaccaactgatgacatgcgatctgccgttatggacggcataagaggacctatgttgttttaattctggaaagtggtcctcaacgatctgattctgaacttggaatctttgcaattgcaggagtaatgtatatgtattgcattccctgttatacatgatatactaaattttggagtctgaactgatgattgccaggtgcgtttggctaatatacttatcaaatttgtagctatggtagtgtaatgcgtcattgtagtgaagcattgtcgaatcttttattactttttgcggtaatgtcatcatgaagaaagaaaagaatggatttttctggaggtagcagtcatttctctgaagttgtacccaaaaattattaatgagcaatgtatgtgcattgcattcctgttacacgtgatatatatactaaattttagagactgaactgttgtttagctaatatacttgtcaaagttgtagttatagtagtgtaatgcgccattgttatgcagtattcctgaatctttgattatattataacaatgtcgtgctgaagaaaaata

SEQ ID NO: 105 - DNA, 1248 bp, Glycine max
  Clone ID: PAT_MRT3847_127587C.1
gagaattagatatacatattttatttatttgcttaggatattgtcctaaaacttacttgcttggaccccagtagttgagttgaggaagtgatggaagcagtttacaggttgaaacctcttttggatgtggttagagttgggaacgctaccacttctgagatgcgtcttgactcaacggctaattgttacctgcagctagaagctcctcaacctcaagagaataataatgtaaccgactcatcatcagatatgtcggatcggataatcaagatccagatcgccaatcaccctctttatccagatttactctctgcatatattgaatgccaaaaggttggagcaccgccagaactggcatgccttcttgaagaaataggccgagaaagccaccgcatgaatgctcgccgtgagataggggagggccctgaacttgaccacttcatggaaacattctgccaagttcttcatagatacaaggaggagttgtccaggcccttcaacgaagcgactttgtttttgggtgacatggaatcacaactcagcaacctttgtaatgaaacactaacaaagtcatcggataacaacaaccgctccgacgaggtagctagtggggcatcagaagaggaattaagttgtggggagatggaagcatttgaagataatgtatcttcagtaacttgtccaagtgatcaaaggcttaaagagatgctccttcgcaaatacagtggccattttagcggtttgagaaaggaatttctgaaacgaagaaaaaagggtaagctaccaaaggatgcaaggatggcactcatgggctggtggaacacccatcatagatggccttatcctacggaggaggagaaagtgaagttatcagaaattactggtctggatcaaaagcagatcaataattggttcatcaatcagagaaaacggcattggaaacctaccgaggacatgcgatttgccgtcatggacggattaagaggcggcggtggcggcggcataggagggcctatgttgttttagctctggaagtgctcctcaacgatctgaacttgtacccttcgtaattgcaggagcaatgtatgtgcattgcattcctgttacacgtgatatatatactaaattttagagactgaactgttgtttagctaatatacttgtcaaagttgtagttatagtagtgtaatgcgccattgttatgcagtattcctgaatctttgattatattataacaatgtcgtgctg

SEQ ID NO: 106 - DNA, 397 bp, Glycine max
  Clone ID: PAT_MRT3847_127714C.1
ccacgcgtccgggaggctagcggcgagaagaagcaccaccacctcttcggctgaccgtagtaccggccggcgcgcgaccgagctagctagctccggcgcacacaaccacacacctgtttaattctgtactgcatgcgtgtgtaatttgatggttcacaataatgagtccctctccggaccttggtagctgcttgcttgtggtgagtgagagtgtgagactgagggagaagaggtggtgggcgtggggctacgtcgagagaggcgtgttcctgtactcgcttcgttttctctgcatgcgtgtataattgtgttcaataataagtgagagcggtgtgatgtgtggctccaaaaaaaaaaaaaaaaaaaaaaaaaataaaagggcggccgctctagagga

SEQ ID NO: 107 - DNA, 2125 bp, Glycine max
  unsure (1)..(2125): unsure at all n locations
  Clone ID: PAT_MRT3847_127767C.1
ctccctcgtaaccaaaagccatttccaactcaaaaaacatggctccttttcctcttatgtgcttcgttattttgctcctatcctccactgtttcagtcacagccaccgccacccaaacaaccttaacagtgggaaaactcgaccaagttccacacataatgtgcaaggagtgcgagcttccacccccaccccctaaagagtgtcctccgccgccgataccactagcacctccaccaccgttaccaccatcaccttcaccaccgttaccaccatcacctccaccaccgttaccaccatcaccttccgcaaccttaccggcacctataccgctaactcactcactccccaaactcattcaagtcgctaatcctagttccttcaactcctcgctggcaacaacagcagtactaccattagccgcgtttttcaaaagtgattttcgagaattagcgatgggaattgaaagaggaggcttcaagggattcaggagcgcctggagcgtgccgcccaagccgtgcgattcctgcaagctggcctcggcggcgcttttctgccgccccgattccgcgtttctctgcatcgcctgcgattccaacattcactgctcgaacaaactcgcgtcgcgccacgagcgcgtgtggatgtgtgaggtgtgcgagcaggcacccgctgctgtcacgtgcaaggccgacgccgccgccctctgcgtcacgtgtgactccgacatccactccgcgaaccccctcgcgcaacgccacgagcgcgtccccgtggaacctttctttgactccgctgagtccatagtgaaagcctctgctgccgccaccttcgggttcattgtcccatccgacgacggcggcgcctccgacgctttcgcccccgatgactccgacgccgccgcgtggctcatcccgaaccctaatttcgggtccaagctcatggacgcccccgaaatcaagtccaaggagatattcttctctgaaatggaccccttcctcgattttgattactcaaactccttccaaaaccacaacagcgccggaaacgacagcgtcgttccagttcaaaaaccctctctcgcccctcccctaatcaataatcaccaccaccaccaatcagaaacttgcttcgacgtcgatttttgtcgctcgaagctctcctcctttaactacccttccaattctcttagccaaagcgtttcgtcgtcgtcgcttgatgttggagtggtgccggacgggaacacggtgtcagacatgtcgtattcttttggtcggaacagttcggattcgagtgggattgttgttgtgtcaggaaatagtgtggggcaaggtgcgacgcagttgtgtggaatggatcgggaagcgagggtactgcgatacagagagaaaaggaagaaccgaaaattcgagaagacaattcgatacgcatcgcgaaaagcatatgcggaaacccggcccaggataaaaggccgcttcgccaaacgaacagaaattgactcggatgtggagcgtctctatagccctggccctgcggtgctcatgctggacactccatacggcgtcgtaccatcgttttagttaatttcaaaatgaagaaacgatggagtgcatgaatcttagaataatgattagcgattctgtgggattgttaggggaaaaaggtgaagaatcgaatcggtacgaacgtgattcttagctggagcgcgatgggggaagattattgtgaagatttgtctcgatcgaccagaaaagcccgtttactttttataaaaaaaaaaacaacgtgcttttttaaggggtctactgtttaatattctcactgccttgcctgcttctgtctttcttagtattaaagtgtcttttttttgctcagctatatcacggatctctttccccattcctattggctgtcctccccaactatatatatatatcacttttttaattcattaccatcatcatttaacacttcacttttttattatatactcctcatcaaaattccaaggtcacaccaagccaattttcggtctatgattccctaatattcatttaagaaatacttgtgctttatttactcttttatgttaacatttcaattactgttgagcattnnnantccaaga

SEQ ID NO: 108 - DNA, 608 bp, Glycine max
  Clone ID: PAT_MRT3847_128170C.1
gaagatgaacaccatcaaactttatgtcaggagggtgttcatcatggacaactgtgaggagctcattcccgagtacgcttggatttgtgaagggtgttgtcgactccgatgacttgccgctcaacatttctcgtgagctgctgcagcagaacaagatcctgaaggtgatcaggaagaatcttgtgaagaagtgcattgagatgttcaatgaaattgcggagaacaaggaagactacaacaagttctatgatgctttttcgaagaatttgaagttgggtatccacgaggatagccagaacaggtccaagttggctgatttgctcagataccactcgacaaagagtggagacgaattgacaagcttgaaggactatgttacacggatgaaggagggtcagaaggacatttactacatcacaggagagagcaagaaggcagtggagaactctcccttcttggagagactcaagaagaagggctatgaagttcttttcatggtggatgcaattgatgagtatgcagttgggcaactcaaggaatacgatggcaagaaattggtttcagctacaaaggaagggttgaagctggatgatgagactgaggaggag

SEQ ID NO: 109 - DNA, 259 bp, Glycine max
  Clone ID: PAT_MRT3847_128189C.1
gagactttgggtggtatctttaccaggttgattaaccgcaacaccacaattcctactaaaaagagtcaggtgttttcaacagcagctgacaatcagactcaggttggtatcaaggtgctacaaggtgagagggagatggctgtagacaacaaatcgcttggagaatttgagcttgttggcattcctcctgccccaagaggcatgcctcagattgaagtcacatttgatatagatgccaatgggattgttactgtctctg

SEQ ID NO: 110 - DNA, 1280 bp, Glycine max
  Clone ID: PAT_MRT3847_12866C.1
ctcgagccgctcgagccgctcgagcggctcgagagctccttatacaccaccagctgatggtgtacagagtcaacttgtctgttctgggtgtagaaaccttctagtgtttccagttggagccacctccgtgtgctgtgctgtttgcaatgctgtcacagcagtgccacctcctgctaaatcacaaatactggtgtgtgacaggcacagaaatggctataggctacctaccgcccccaagaccgggccggactgacccacgcgtccgctcccctttagtttcattcacaaggggaagaagcaattcatttgactcttactttatcatctgctttaccatttgatttgctggcaccctcttcttcacgggagctgaaaaaaatgggagaaagtgctttgttctctgtgtagagtttggcagagaaagataacaacattttttagccctttataatgccagttccacttgccccatacccaacaccaccagctccatatacaccaccagctaatggtgtacagagtcaacttgtctgttctgggtgcagaaaccttctagtgtttccagttggagccacctccgtgtgctgtgctgtttgcaatgctgtcacagcagtgccacctcctggcacagaaatggcccagttagtatgtggaggttgccatactttactcatgtacatccggggcgcgacaagtgtgcaatgttcatgttgtcacactgtcaatctagctttggaagcaaatcaggtggcacatgtcaactgtgggaactgcaggatgctactggcgtaccaatatggagcaagatccgtgaaatgtgcagtttgcaattttgtaacatcagttggggccacagcaagcaccactgagcagaagttcagcacctaaaacatacaaaatagcaaggtcattatagactctacaaccttggttttgagttacatatcgcccttaaggaataaagaggttatcagattggagaggaaactcgtttcacgtgtatagagttatttttttgccttgcgtgattgtattaaattatatttttgttagattgggtgtatgaaaaaactatttatgataagttttctgtttctgatgagtgttttgaaaaatcccatcgttagattttgggtgtaaagtttattttcagctgtagataatttgtactatattaggaataatagatgcacaataagaaagtaattgacataaccctcacaatcactaaataagtggttgagaagtatttggaatgggtttaaagccgagaaaatctc

SEQ ID NO: 111 - DNA, 361 bp, Glycine max
  Clone ID: PAT_MRT3847_128763C.1
gatcagtggcttccctcactgtcgcaaaccattgtgttcgcacgttgcatcgcactcactctctcacctaagcatcatcccatcacctcccacttccttccgcgccatcaaagtcacaattttttgggctcagtctatcgcactcatccctgtccatacttcccgcttcctcttcttcactcatgtgcgccattttcgccatcgtgcctaaaggttcagagccaccgaattttacgctaatcgcatagaacgggaagagtgttagcctcgccaacttcagcagtacaccagtctgtgtgtatttctaccctgctgatgagacccctggctgttccatacaggcttgcgctttcagggattc

SEQ ID NO: 112 - DNA, 272 bp, Glycine max
  unsure (1)..(272): unsure at all n locations
  Clone ID: PAT_MRT3847_129210C.1
cgacgantncggcaaccctgttcatgctgctngtgtcaccnatgtngccaccagaactgctgctggtggttncagtgatgacattnatangcaacatgntaccaccaatgcctacggcgtagacactggtagacngcnttctagtggtggctacgatggtgacactaangnncntcntggaactnctggtggctntnntgatgacnccnntagacatcntggaactaccggtgtctatggtatngacaccgataggcaacancgtgggacta

SEQ ID NO: 113 - DNA, 612 bp, Glycine max
  Clone ID: PAT_MRT3847_129723C.1
cttgcagacagtaaatttgaggagttcggaaattttggatcatccacacactcagatttgtaatgaaggtcgtcagaatgcattatcagagatcttggagatattgacagtggtatgtgaaactcacaatttacctctggcccagacatggattccctgtaagcatcgaagtgttttggcccaaggtggtggtgtaaagaaaagttgttctagttttgatggtagatgcatggggaaagtttgcatgtctacaactgacatagcattttatattatagatgctcatttatggggttttcgtgaggcctgtgttgagcatcacttacaacaaggtcaaggggttgctgggagggcttttttgtcccacggcatgtgcttctgttcaaacattacccaattctacaaaactgattaccccttagttcattatgctctcatgtttgggttaacaacctgttttgcaatatgtttacgaagctctcatacaggaaatgatgattatgtattagagttttttctgcctcctagaataacacacattcatgaacaaaagactttgttgggatccatattggcaataatgacacagcatttccagagtcttcatattaa

SEQ ID NO: 114 - DNA, 638 bp, Glycine max
  Clone ID: PAT_MRT3847_1298C.1
agatcccaaccaaaccagttcaagaggtcattgctgaaatgcctaatggaggagtagatcgtgctttgaatgcacaggaagcatccaagcatcaatctcggcatttgaatgcactcatgatggttggggtactgctgtccttgttagtgtgccaaagaaggatgcagaattcaaaactcatcctatgaagttcatggaagggagaactcttaagggtaccttctatggtcactatagaccccgcactgacattcctggtgttgtggagaagtacctcaacaaggagctggagctggacaaatttatcactcactctgtcccattctcagagatcaacactgcatttgatcttatgctgaaaggggagggaataaggtgcctcatctgcatggaagagtaaatcaatgatgttctctgctgaacagtgtttgcgtgtaatgtgaaaagagaattgaataaatttggcatgtaattcggttattggattcatgctacatgagtgtgtaaagaggtaatgggggtgatgactttcttggtcattgtcgtggctttgtgatttctattgcaaatgttgtcttgtaactttgttgtattttcagcaatatatgatatatgatatctatcttaatttctatctt

SEQ ID NO: 115 - DNA, 1483 bp, Glycine max
  Clone ID: PAT_MRT3847_1301C.1
gatcatctcatatttctcatcaagttactatctataattaattaaattcctcgtggaatattgaagaagccatgtctacagctgggcaggtcatcaagtgcagagctgcggtggcatgggaagcagggaagccactgtcaatagaaaccatagaagtggcaccaccccagaaaggtgaagtgcgtttgaggatcctcttcaactccctttgccgtagtgatgtttattggtgggatgctaaggaccagactcctctgtttcctcgtatcttaggccacgaagcttcagggattgtggagagcgtgggcgagggtgtgacacatctgaaaccaggtgaccatgcactcccaatattcactggggagtgtggtgaatgcacttattgtaagtctgaagagagcaacctgtgtgagctactcaggatcaacactgacaggggtgttatgctgagtgatggaaaaacaaggttctccaaaaatggccaacccatttaccacttcgttggaacctccactttcagtgaatacactgttctccatgaaggatgtgtagccaagattaaccctaatgccccacttgacaaagttgctattgtcagctgtggattctgcacaggttttggggctactgtgaatgttgcaaaaccaaagcctaataatactgttgctgtctttggcttaggagctgttggtcttgctgcctgtgaaggggcaagggtttctggtgcatctagaatcatcggggttgatttacttcccaatcgatttgaacaagccaaaaaatttggggtcactgattttgtaaacccgaaagatcacaacaaaccagtccaagaggtcattgctgaaatgactaatggaggagtagatcgtgctattgaatgcactggaagcatccaagcttcaatctcagcatttgaatgcactcatgatggttggggtactgctgtccttgttggtgtgccaaagaaggatgttgaattcaaaactaatcctatgaagttcatggaagggagaactcttaagggtaccttctatggtcactacagaccccgcactgacattcctggtgttgtggagaagtacctcaacaaggagttggaactagacaaatttatcactcactctgtgccattctcaaagatcaacactgcatttgatcttatgctgaaaggggagggcataaggtgcctcatctgcatggaagagtaaatcaatgatgaatgatgttccctgctgtgagaacaatgtttctgtgttatgtgaaaagagaattgaataaatttggcatgcaattcggttgttggattcatgctatatgagtgtgtaaagaggtaacggggggtgatgactttcttggtcattgtcgtggctttgtgacttctattgcaaatgttgtcttgtaactttgttgtattttcggcaatatatctatatgatatctatctttctatcttttttttgtgaaaaaaaaaaaaaaaaaa

SEQ ID NO: 116 - DNA, 1278 bp, Glycine max
  Clone ID: PAT_MRT3847_13029C.1
taattcccggggcggccaccgcgaaacaattaacacacacaaacagaggctacgtacgatcaaattaattaagatggcggaagtgaggaacaaacaagtggttctgagggactatgtgagtggttttcctaaggaatccgacatgaacatagttgaaggaaccacaatattgaagcttccacaaggttccaatgatgtgcttctaaaaaatctctacctttcctgtgacccttacatgagaatgctcatgaccaaggtggaaggcctcgacgtgtttggcacctatacacctggctctccattaacagggtatggagtgtccaaagtcctagaatctggacacccagattacaagaaaggtgatttagtgtggggatctacaaaatgggaagaattcagcttggtgtccccaactcaaatacttttcaaaattgagcacaccgatgttccgctttcatattatactggtattcttggtatgccgggaatgactgcatatgcaggtttctttgaagtaggctctcccaagaaaggagagaatgtttttgtttcagctgcctctggtgctgttggtcaacttgttggccaatttgctaaattgactgattgttatgtggttggaagtgctggaagtaaagagaaggtggatcttttgaagaataaattaggatttgatgaagcctttaactacaaagaagagtcagacctcaatgcaactttgaaaaggtactttccagaaggcattgacatatactttgagaatgttgggggcaagacacttgatgcagtactcccaaacatgaaatttcatggccgcatacctgtctgtggaatgatctcgcagtacaatcttactcagttcgatggtgtaacaaatttggcaaatctcatatttaagcgggttaaaatggaaggttttattgcaactgatttctatcatttatatccaaaattcttggagtttgtcctgcctcatatcagaaaagggaaggttgtgtatgtggaagacattgctgagggccttgagaagggccctgcagccttggttggcctctataccggtcgcaatgttggtaaacaagtggttgttgttactcacgagtaaaattatataaatatattgttattctctaagctttaattccgaattttcaattttctgttggatattgaaccttgcttttatggtttatgcagtcattcttctattttgttgatagaaattactacattagtgacattttgtgataaataaaacctctaatatatgctatcaac

SEQ ID NO: 117 - DNA, 126 bp, Glycine max
  Clone ID: PAT_MRT3847_130881C.1
gctaactcttcttgcagtatctctctacatcaccttcataactgagtctcccagttttactagagattacggttgaaaaggcagatttgggtttgagactaaaattgagcttacctaagaaacccc

SEQ ID NO: 118 - DNA, 2170 bp, Glycine max
  Clone ID: PAT_MRT3847_131458C.1
agattgttgaatcatcacatggctgtgacaaaagagaaagaggatgttcggaacactgggaagagattgaaatgcatgaggaatgaagaagaagaagtttatgaagaagaagagagtgagcttcctttaaagccaggatttttcttctacccaacaacacccacttcctttgttgtatctgatgctcttgaacccgattttcccatcatatatgtcaacaaggtctttgaaatctccactggatatcgtgctgacgaggccctcggtcgcaattgtcggttcttacagtatagagatcctcgagctcagaggaggcaccctttggtggatcctgttgttgtgtctgagattagaagatgcctcgaggaaggtgttgagttccaaggtgaacttctgaatttcagaaaggatggtactcctttggtgaacagactgagacttgcgccaattcatgacgatgatggaactgtgacacatgtgataggtatccaactcttttctgaggcaaatatagatctgaaccgtgtctcatatccagtcttcaaagagacttgcaatcaagattttgataagactggtaaatataatcctaagagtggacaatcattgtacagtcagcaccaagagatgtgtggcattcttcagctttctgatgaagtcttggctcacaacattttgtcacgcttgacaccgagggatgttgcatccattgggtctgtatgcaggaggatccgtcaattaacaaagaacgagcatgtcaggaagatggtatgtcaaaatgcgtggggcaaagaagtgacgggcacattggaactgatgaccaagaagttaggatggggtcgtctgactcgggaacttaccactcttgaagctgtttgttggagaaaactgacagttggaggtgcagtggagccttcacgctgcaatttcagtgcttgtgctgcaggaaaccgacttgtattgtttggaggtgaaggagtggatatgcaacctatggatgacacttttgttctaaatcttgatgctaaaaatccagaatggcgcagggttagtgtgaaatcatcccctcccggaaggtggggccacacgctctcatgcttaaatggttcttggttggtggtttttggtgggtgtggtaggcagggattgctcaatgatgtgtttgtgcttgatttggatgctcaacagccaacatggagggaggtttgtggtggaacaccaccacttcctagatcatggcatagctcttgcacaattgaagggtccaaattggttgtctccggcgggtgcacagatgctggggtacttcttagtgacacatatttactggacctcacaacagataatccaacatggagagaaattccaacttcatgggctcctccttctcggttggggcactcactctcagtctatgggaggactaagattctaatgtttggaggacttgccaagagtggacacttgcggctacgatcaggcgaggcttatacaattgacttagaagatgaacaaccacaatggaggcaactagaatatagcgcattcacagggttagcgagtcaaagtgctgttgttcctcctcctaggctggatcatgttgctgtcagcatgccttgtgggaggatcattatatttggaggttccattgctggtcttcactcaccatctcagctctttctgttggacccctctgaagaaaaaccatcctggaggatcctcaatgttcctgggcaaccgccgaaatttgcttggggtcatagcacttgtgtggttggagggacaagggtgttggtgttgggtggacacactggggaggaatggatactgaatgagttgcatgagttatgcttggcaagtcgacaggactctgacctgtgaagtgcataaaaccagaccctcttctctcaagacaagattttggttgcaaaaaggttttgggtggctttcctttagcagtttggtttttgtatatgagccactattacatgattgttatatgaaatgacgtgtgtattaccagtgtttttgaatgatatatgatgtcatctggctcctctgtacatcatagagttcttggctgttgtatcatccctcctttttcttttacaattagttttgttaataattaattcatttattattatttttttatattaaaaaaaaaaaa

SEQ ID NO: 119 - DNA, 2515 bp, Glycine max
  unsure (1)..(2515): unsure at all n locations
  Clone ID: PAT_MRT3847_131774C.1
gggaatcgagcagaagcatgcactatgatcaaccctctgggcttaatgatgttcaaaatcatgacttgtacaggccagtacacagtagatccatgggcaatatgtcaaccgagttcccagcctgcacatctgggcgtcagaaccaagggtatttggtggatgagttcccacacattgatatcataaatgacctgcttgatgatgaacaaggtattgggaagacggccaaggcaagttcagcattccagtctctgaataatggaccacagttgctgaatcgacagtcacttttcctggggatctgngtgcagatgatgatttgggatcttcaaccagttcttgcaggtttgagcgatcacaaagttaccatcatgaccatagattccaaggagggtatgacttgtctggtgggcattatgattcactgagggattatattcaaccgatgagtagtgtgcctggcgtcaatgggcaggttgatgggttgattcgaaaccaatggcangtggccggttccgatgtgttccaagcctagtttctttccagcgatgacaaagattgttggcacacttggcccaaagtcacgatcggttgacgtgatttcccaatgtcttgaggcaggaatgtctgtggcaaggtttgatttttcatggggtgatcctgaataccaccaagagacgttggaaaatttaagggctgctatcaaaagtaccaagaaactttgtgcggttatgctagataccgtgggtccagaactacaagttgtcaacaaaactgagcacccaatttcccttcaggctgacacattggttgtcttaactcctgatcagaacaaagaagctacttcaaatcttttacctgtaaattttagtggactttcaaaggctgtgaagaatggtgatactatttttattggtcaatacctgtttactggaagtgaaacaacctcagtgtggctagaggtcagcgaagtgaatggtgatgatgtcacttgtgtcataaaaaattctgctactcttgctgggtcactgtatactttacatgtctctcaaattcatatcgaccttcccactcttgacaataaggataaggaggtaataagcacttggggtgctcaaaacaatatagacttcctttcattatcatacaccaggcacgctgaagatgttcgccatgctcgtgagtttctctctaaactaggtaacctcaaacagacccagatatttgcaaagattgaaaacatagaggggttgacacattttgatgagatattgcgagaagcggatggtatcatcctctcacgtggaaatttggggatagatcttccacccgagaaggtgtttttatttcaaaaagcagctatttacaaatgtaacatggctgggaaacctgctgttgtcacacgtgttgtggatactatgaccgataacctaagacctactcgtgctgaagcaactgatgttgccaatgcagtgttggatggcagtgatgcaattgttcttggggcagaaactttgcgggggttataccctgtagagactatttccactgttggaaaaatttgtgctgaggcagagaaagtttataatcaagatttgtatttcaagaaggctgtcaaatttgttggagagccgatgactcatttggaatcaatagcttcctctgcggtacgggcagccatcaaggttaaggcttctgttattatttgctttacttcatctggcagggctgcaaggttgattgctaagtaccgtccaaccatgcctgtgatatccgttgtcattcctcaactaaagacaaatcaacttcgatggactttcactggagcttttgaggcaaggcaatcacttattgtgagaggtcttttccctatgcttgcagatccacgacatccagctgagtctaaaagtgcaacaaatgaatcaattttgaaggttgctttagaccatggcaaggcttttggtatcataaaggcacatgatcgagttgttgtatgccagaaagttggtgactcctcagttgtgaagattattgagcttgacgaatagaacttgattcattttcaagtttgcgttataatatgtcttctttgtattagtattttctgttgtatgctttaataataaaaacacttcaaaataatgtgtatcacattggaagaaatgcttttggggaatggatatcattcattgccagcatgccaactgttgtttataatataacaccattgaatccttttatcaatacataagcaagaaaatttcctattactatcaagattactcaaatatggcatgtggtgtcaatggttatactgtattcaggccttcgaatggtccgtagagggaaaagatgacaaaggttgcccacaaattagtggtcatcaaccaatgtaataatgtatttgaggaaattgttgggtctctttagattggagtgaggttgtatccccttgataggaaaacattttgtaaagagtgtttccgattaatttggttgcagtttttcataaaaa

SEQ ID NO: 120 - DNA, 253 bp, Glycine max
  Clone ID: PAT_MRT3847_131964C.1
cctctctctctttctctttctctctcatccagatcttgcaaaaagcaaaagacccaatggcatcgagcgcgcccactccaggcgaagagttcgtgtacatggcgacctgtcgaaacaggccagtcgctacgcggagatggtggagttcttggagacggtctccgcctccgccgaaaccgaggacctgaccgtggagaagcgaaacttcctctccgtcgcctaaaagaacgtaatcgctgctctctgcgcctcc

SEQ ID NO: 121 - DNA, 1241 bp, Glycine max
  Clone ID: PAT_MRT3847_13199C.1
agacgacagagaaagacacttgattagctgaggaggaagagagaaaaaccatggcaataacactcaacaatggcttcaagatgcctatcattggattgggcgtgtggcgcatggaaggaaacgaaatcagggacctaattctcaattccatcaaaattggttatcgccattttgattgtgctgctgactacaaaaacgaagcagaagttggagatgcgcttaaggaggcttttgatagtggccttgtgaagagagaggatctcttcattaccaccaagctttggaattctgatcaaggccacgttcttgaggcgtgtaaagacagtctcaagaagcttcagttaacgtatctagatttatatcttgttcactttcctgttgccgtaaggcatactggggttggtaatacttctagtcctttgggtgatgatggggtcctggacatagataccaccatatccctggaaacgacctggcatgcaatggaagatcttgtttcatcgggcttggttcgcagcatagggatcagcaactatgatatctttctgaccagagattgtttagcatattccaagataaagcctgctgtaaatcagattgaaactcatccatacttccagcgtgattctctagtcaaattttgtcagaagcatgggatttgtgtcactgcacacactccactaggaggtgctgcagcaaatgctgaatggtttggaacagtttcatgtttggatgaccaagttctcaaaggtctggctgaaaaatacaaaaagactgccgcccagatcagccttcgctggggaattcaaaggaacactgtggtcattcctaaatcgtcaaaactggagaggttgaaagagaactttcaggttttcgattttgagttgtctaaagaggacatggagctcattggaagtatagatagaaaatatcgaaccaatcaaccagctgtgttttggggcatagatttgtatgcgtgagaatgcccttcctaagtctgtatcatggctgtttgaccttgtgttaagattcagatttggtataagctgatctttcaggctccttagtagctcagtttatttgataatgtaaactttctttgttgatggttgaaaaatcatcttctcatcccatatccaatctcgtggactaaataagagagacttctgaatgttgttgcttaaaaaaaaaatccatttgtttaaaaaaaaaaaaaaaaaaaaaaaaaaaaaaaaaaaaac

SEQ ID NO: 122 - DNA, 1744 bp, Glycine max
  Clone ID: PAT_MRT3847_132102C.1
aactcaactcttcctaaacctaaacacacacacttacactttgcattccaaattccacaactttcactttctacaacactatttaccccattttctctaaatccaaacaggccccaaaagaaagagagggaaaattctcttccatggcctcttcacgccctgccaatgtgggaatccttgccatggacatctacttccctcccacctgcgtcacccaggatgctttggagggtcatgatggggtgagcaaagggaaatatactattgggcttggacaggattgcatggccttctgctctgaggttgaagatgttatctcaatgagcttgacggtagttacttcacttcttgaaaaatttaatgttgatccaaagcaaattggacatttggcggttgggagtgaaactgttattgacaaaagcaaatcaattaagaccttcctgatgcaagtttttgaggcaagtggtaatactgacattgaaggtgttgattcaactaatgcatgctatggaggaacggctgctttgttcaactgtgtgaattgggtggagagtagctcatgggatggacgttatggacttgttgtttgtacagacactgcggtatatgctgaaggacctgctcgtcccactggaggagctgctgcaattgccatgcttgtagggccagatgctcctattgcttttgaaagcaaactcagaggcagtcacatgtctcatgcatatgatttttacaagccaaaccttgctagcgaatatccaattgttgatggaaaactctcacagacctgttatctcatggcacttgattcctgttaccggctttactgtgagaaatttgaaaaattggaggggaggcctttttcaatgtcagattctgattattttgtgtttcattctccatataacaagcttgtgcagaaaagttttggccgactatacttcaatgacttcttgagaaatgccagttttgttgatgaagttgccagggaaacccttgcaccatatgcatccttatctggtgatgagagttatcaaagtcgtgatcttgaaaaggcaaaccagcaagctgcaaaacatctatatgatgcaaaggtgcagcccagcacactaatcccaaagcaagttggtaacatgtacactgcatctctttatgcagcatttgcatctcttcttcacaataagaacagttcgttggtaggtaaacgggtagttatgttttcatatggaagtggtttaacagctacaatgttctccttccagcttcaagagggtcaacatccgtttaacttgtcaaacattgtaacagtgatgaatgtttcggacaagttgaagcagagagttgagattcctcctgaaaagttcgttgaaacattgaagatcatggaacaccgttatgggggtaaggactttgtgacaagcaaggactgtagctacttaactccaggcaccttctatctcaccaatgttgattccatgtacaggagattttatgccaagaaggactaggttattggttagttgatgatcgctgatatattcaaatatggagttaaaatgtattttcttatggttcacctgtatttgatcccataaggttgtgtatcaaaatgtttataagatgtttcatttttttgtggtgatcaggttgtaaccaaaataagaataagtttatttgcgaattggcaattgtttttaaatgcactaataatccaaatatattagtagtttcttcttgagtgcgc

SEQ ID NO: 123 - DNA, 108 bp, Glycine max
  Clone ID: PAT_MRT3847_132766C.1
cttgttgaagccatgtctacaactggtcagggcatcaagtgcagaactgccgttgcattggaagcagggaagccactatcgataggaaccatagaagttgcaccaccc

SEQ ID NO: 124 - DNA, 2145 bp, Glycine max
  Clone ID: PAT_MRT3847_133042C.1
cggaattcccgggtcgacccacgcgtccggtcacaccaaacagagcgcagaaaataaaataggtgaaatgaatatcgatttcaattccgccactgaatttcgaaaccaaaaaaccattccaacgaagaagatgaacctcgaagaagagggttagttacttctgagtgagtgagtgagttagtggttcctctgaggaacggtgaggaccttcaatttctcaagttctcaaccgttcgttttctctttcgttcccctaaccgccgtggatgggacaatctgtttcctccgccgccgtcgctagccgtcgcgagagggaccaaggccaccgctccgtcaactcttccaagaccagattcaccgcctcggtttcgccgatggccggttattcctccggcgccgccgaagaaggcgaaaaccatcgcgtggaggccgttgccgatgaatccaccgactacatctccgatctcccgaacgagtgcctggcttcggtgtttcagtttctcagctccgccgatcggagccgctgttcgctcgtttgccggcggtggctccagatcgaaggacagagccgccacaggctttctctgaacgccgaactggatctgtttccggcgattccgtcgctgttctctcggttcgattcggtgacgaagctcgcgctgaagtgcgaccgcagatccgtgagcatacgcgacgacgcgctcgtgctgatctcgcagcggtgccctaacctcacgcgcctgaagcttcgcgcgtgtcgcgagctcaccgacgcaggaatggaagcgttcgcgaagaactgcaagggattgaagaagctctcgtgtggatcgtgcacgtttggatccaaaggcatgaacgcggtgctcgacaactgcgccgcgctggaggagctctccgtgaagcgcctccgtggaatcgctgacactgcagcggcggagccgatcggtcccggcgtggctgcggcgtcgctgaaaatcgtttgcctgaaggagctctacaacggacagtgtttcggaacgctgattctcggggcgaagaatctgaaaaccttgaagcttttccggtgctccggggattgggaccggctctttcagttaatggcagatcgagtcacgaacatggtcgaagttcacctcgagaggcttcagattagcgacgttggattgcaagcgatcgcgaatttttcgagtttggagattttgcatctcgttaagactcctgaatgttctgatattggacttgttgctattgcagacaggtgcaagcttttgcggaagcttcacattgatggatggaaggcaaatcgaattggcgacgaaggtttgatagctgttgcaaaaggttgccctaatttgcttgaattagtgctaattggggttaaccctactaaggcgagtttggaaatgttggcgtctaattgccagaatctcgagcggttggctttgtgtggaagtgattcggttggtgatcctgagatatcttgcattgctgcaaagtgtgtggctttgaagaaactgtgtattaagagttgtcccgtttccgatcaagggatggaggcattggggaatgggtgtccgaatttggtgaaagtgaaggttaagaagtgtaaaggggttacccctgagggtggtgattggttgaggaggactagagggtcagttgctgttaatttagatactggtgaggcagagcttcaggaagccagtgctagtgatggaggggcacaggacaatggtgtagagttccctcaaatgcctgcccaaatcgctgctgcatcgagcagcactcggtctagttcgtcgaggtttgcgcttatgtctgcgaggatttcagcggctgcattgaggagcactcggtctggttcgtcgaggttagggcttttgcctacgaggatttcagcggctagcacttttaggagatggtctggtggtagcactagtgcacgccatggttagggacagggccaaagcaaaacctgagtctttgaccatttttcattgtttttggttgtcgtatcatttgatttttatatttcttgtacttaaatttgaaatttatgccgtgtgatgtttattgcctttggaattgaagcttcacggttgcaattgacaatcgcatttttttcctttctctactttcata

SEQ ID NO: 125 - DNA, 1566 bp, Glycine max
  Clone ID: PAT_MRT3847_13379C.1
gtatcgagtctagtctctacaatcactccttcctctcatcctctataaagaaagtgcttaatttgtgttgttacttggttcagtttccatggattgggggcttgctatatcttctcatcctaaaccttattcagtcacaactggtggaaatctctggcggagtaaacacaccaccaagaatatttactttgcaagttcttggatatcaaaagcttcacgacacaaaagggaaactcaaatagaacataatgttttgaggttccaacaaccaagtttggatcatcattacaaatgcatcagaggagggtctacatatcaagaatgcaatagaaaatttgttgtgaaggcaatctctaaacaacctcttggttttgaagctcatgcttccaatcctaagaacattttggactctgtcaaaaatgtattgtctgctttctactggttttcctatccatacacaatgattggcataacattatgcgcattttcttcatctcttctcgcggtggaaaaattatcagatatatctttatcatttttaattggcgtgttacagggtgtgctgcctcaattgtttattgaaatttatctttgtggtgtgaatcaactgtatgaccttgaaatagacaagataaacaaaccacatcttccaatggcatctggacaattttcctttaaaaccggtgtcattatttctgcagcatttttagctctgagttttggatttacttggattaccggctcttggccattgatttgtaatcttgtagtaatcgcttcatcgtggacggcttattcaatcgatgtgcccctactgagatggaagagatacccatttgtcgcagcaatgtgcatgatttctacttgggctcttgcattgccaatttcatatttccatcacatgcagaccgttgtgttgaagaggccaattggctttccaagatcattgggttttcttgttgcattcatgaccttctactccttgggtttggcattgtccaaggatatacctgacgttgaaggagataaagagcacggcattgattcttttgcagtacgtctaggtcagaaacgggcattttggatttgcgtttccttttttgaaatggctttcggagttggtatcctggccggagcatcatgctcacacttttggactaaaattttcacgggtatgggaaatgctgttcttgcttcaattctctggtaccaagccaagtccgtagatttgagcgacaaagcttccactggatctttctatatgttcatctggaagctattgtatgcagggttctttctcatggcattaattagatgaggatatcgtggaaggcttaaacaatgttctcgacacatacaccaaaataaaaggaatatatgttttgcatctaagatttattaaataaagccgaatgttggttcttgtatcattaagattttttttttaattgtcgaagactttatgtattcatattcaccttgacttctacggtcaaatttttcataagtggaataaaagcaacttgttatacaagtttttttttttaaaaaaaaaaaaaagcttgt

SEQ ID NO: 126 - DNA, 3318 bp, Glycine max
  Clone ID: PAT_MRT3847_134145C.1
tcggtgttacgtaatagcatgatgcgttttcaggttttgggtagagatctcgctgggggtcctgaccagcaacgtccattgccaacgccgattgcggcaatcggcacgtagccagaccctgtttttgtgggtacgtggatgctggagttggatgctaacactcctcctgcaccaaatagaggccctcctcaagtaccttatgaccgaggtactcttgcttggatatagtttgttgctagtaatgatgtccttattgtttatgccgtgacgactggtgctatagccggaatttccggtggtactaatataacatgatggtgtttacgggttactcaggctggtgatattatgcaagcaattagctgcatggacggtgctttcggttgtcctggatatcatcaccagctgatttggcccattcagcatccaagtccgaggagcaaagcatagttggtagccactgctcaatttgtgcactgtgacaaaagatagtagttgtggggaaggattccgcccacctgttttgaggtccgcccttagggtatatagtgagggtctgggttgtccgtgtggctatctttctcgttattttgttcaatttttgtttacttatttgtcctatggttgggtttttgcgttttgctcacggacattgcatctcactctggtcagcgactaatttttgtgggaccgcatgtaatgctggggcaattttagctttgggtagagcccgcgttgtcgtcactcgtccgatcggtatgttctcatgctcctggtgtgtcaccatctcctagatatcagcatgcagcggtatttgttaatgcaaggctccatgtgtctggtggggcccttggaggaggacggatggttgaagattcatcgagtgttgcagtgttggacactgctgctggtgtttggtgtgataccaaatctgttgttaccagtccaagaacgggtagatacagtgctgatgcagcaggtggagatgctgcagttgagttgacacggcgttgtaggcatgcggctgctgctattggtgacttaatttttatttatggtggtttacgtggtggtgtcttgctggatgacctacttgttgctgaagatcttgctgctgctgaaacaactgctgcttcacatgctgctgcagcagcagcagcatctaatgtacaggccggacggctacctggacggtatggatttattgatgataggacaaggcaaaccatgcctgaaacagatcctgatggttcagtagttttgggaaatccagttgccccccctgtaaatggcgacatgtatactgatatcagcactgaaaatgccttgctcccgggatctaggcgaacgagcaaaggagttgagtatctagttgaagcatcagctgcagaagctgaagctatcagtgccacactggctgctgctaaggcacggcaagtgaacggtgaagttgaattgcctgaccgagaccgtggggctgaggcaacacctagcgggaaacaaatatcttccttgattaagcctgattctgctgggtcaaatagcattcctcctggtggagtgaggctgcatcacagagctgtggttgttgctgcagagactggcggagcattaggtggcatggttagacagctttcaattgaccagtttgagaatgaaggcaggcgggtcagttatgggactcctgaaagtacaacagctgctagaaaattattagaccggcagatgtctatcaatagtgtcccaaaaaaggttgtagctcaccttttaaagcctcgtggctggaaaccaccagttcgtcgacagtttttcttggactgcaatgaaattgcagatctttgtgatagtgcagaacgcatattttcaagtgaaccgagcgtgttacagcttagggctccaattaaaatatttggtgatctacatgggcaatttggagatctcatgcgcctttttgatgagtatggtgcaccatcaactgctggtgacatagcatatattgactatctattcctaggagattatgttgatcggggacaacacagcctggaaactatcacccttctgcttgctctgaaggttgagtatccaaacaatgtacatttaatacgtggaaaccatgaagctgcagatattaatgccctttttggtttccgaattgagtgcattgagaggatgggtgagagagatggaatttggacatggcaccgtataaaccgtctgtttaattggcttcctctggcagccctaattgagaaaaaaattatttgcatgcatgggggtattggtcgttcaataaatcatgtggaacaaattgagaatattcagcgtccaattacgatggaagcaggatcaattgtgcttatggatctattatggtctgatcctacagagaatgacagtgttgaaggactgcgaccaaatgctaggggtccaggattagtcacttttgggcctgatcgagtaatggaattttgcaacaacaatgatcttcagctgattgttcgtgcacatgaatgtgtgatggatggctttgagcgttttgcccaggggcatttgatcacacttttctctgctacaaactactgtggtacggcaaataatgctggggcaatattagttttgggtagagatctcgttgtggttcctaaattgattcatccattaccgcctgcaatttcttcaccagaaacgtcaccggaacgtcatattgaggatacatggatgcaggagttgaatgctaacagaccaccaacaccaactagaggccgtcctcaagtaacaaacgaccgagcatgatgccgtttacagggtattcgagcttacccgctgaaagcttcaaggatcaagcttttatttgtcccggttctcatcgctcaatcatctggcctgtagacgatacaagttcgagaagcaagcaaagttggtagccactgctaggttggttcaattgacaaaagctagaagttgcagtatgggttcctacccacctgttgtaaattgagccctagggtacaaaatcaaggtcatggatgtccgtgtcatggaatgtcagtgctggctatttttctcattattttttacatattttttttactcattgtccctaggttattgttttttttttttcaatttatatttttaaatcaagaggacaagggtttttttttttttcctgtgatggtgagatatataaatcagaaatctttcttgggggtccatgtatcatagggggttgttgtgtagttcccatccatgctctgtacaactaatttttgtgtgaatcaacatattctgacaggaaatgtgaattttgagaat

SEQ ID NO: 127 - DNA, 1788 bp, Glycine max
  Clone ID: PAT_MRT3847_134494C.1
acaagtcgcaaccactctactctcattgaggaaaatatggggctagttgcgagtgggctccgcaaaattgtaggggtgactcgatccgatttggctcgatcttttaatcaaagggtgtggtaacttcatctctttcgtttcgtccttgccttcaccccaaagcctattttcccattttccccttttcatgataacaactccccaagttccttcgtctcttttgtttcgtcctttccttcaccacttttcccttttcattttcaggataacaaaacaacactccttgcaggattaaacttcacttcaattgaactaacctgtctgtgggttttttgtagattgattcaattcaatggcttcagtaatgctcagtggaactgaaaagctcactctcagaaccctaaccggaaacggcttaggtttcactggttcagatttgcacggtaagaattttccaagagtgagttttgttgccaccactagtgctaaagttcccaactttaggagcttagtagtacccaagtgtagtgtctctgcttcgaggccaagctcgcagccaaggttcattcagcacaaaaaagaggcgttttggttctataggtttctctcaattgtgtatgaccatgtcattaaccctggccattggaccgaggacatgagggatgatgcccttgaacccgctgatctcaatgacaggaacatgattgtggtcgatgttggcggcccttggcagcgacaccactcgtttggttcctattcacatgtggatgcaagaatccattctttcccaaaggtcaccccaccagctagctaaggccaagcagtaaggaaccactcaaggaatgcaaaataatcgaaggggatgccgaggatctcccctttcgaaccgattatgccgatagatatgtatccgcaggaagtattgaatactggccggatccacagcgtggcatcaaggaggcttacagggttttgaaacttggagccaaggcatgtctaattggtccggtctaccctacattttggttgtcacgtttctttgcagatgtttggatgcttttccccaaggaggaagagtatattgagtggtttcagaaggcagggtttaaggacgtccaactaaaaaggattggcccaaaatggtaccgtggtgttcgccgacatggcttgattatgggttgttcagtgaccggtgttaaacctgcatctggagattctcctttgcagcttggtccaaaggaagaagatgttgaaaagcccgttaatccttttgtgtttgcactgcgcttcgttttgggtgccttggcagccacatggtttgtgttggttccaatttacatgtggctgaaagatcaagttgttcccaaaggtcagccaatctaagagatattgataattagtaatccttttgatacttatcagtgtcttctccaaagtttcatcaaatgtacgcgcaattaagagaaatttgatcaaatgtcaaatagtttattacgtaattgagtttaaattttctgggtgctttagcaagctatgataatttgggcgggaggggctaatgcaacgtcattttgttctgtccatcagcagtcttagaggtcaattattccaacattgttttatgcaatgattatataaggacgttaatgtttgtttagggtctaacatccctttcttttttccaactgatactaatccaatatgtctgttaatgttaaccttttgaaggataatatattaaggaatataatgctctaataaaatctgagagcctgataatttgacatt

SEQ ID NO: 128 - DNA, 1825 bp, Glycine max
  Clone ID: PAT_MRT3847_134495C.1
ttttaaaaggttaacacaaagggaaatattgcccccaggccgggaatttatttcccctccctatgggggccccccctttttttttttttgttaatttttttttttgttttttttttttttttttttttttttttttttttttttttttttttttttttttttttttttttttttggaaaaaagaaagggatgttaacctctaaacgacattaacatccttatataatcattacataaaacaatgttggaataattgacctcttaagactgctgatggacagaacaaaatgacaagtggacgtgtacaatatggttgcattcgggcttcccgcccaaaattatcatagcttgcaagagcagccagcaaatttgagctcagttacgtaataaactacttgacatttgatcaaatttctcttaattgagagtacatttgatgaaactttgaaaaagatactgataaagtatcaaaaggatcactaactactaatatctcttagattggctgacctttgggaacaacttgatctttgagccacatgtaaattggaaccaacacaaaccatgtggctgccaaggcacccaaaacgaagcgcagtgcaaacacaaaaggattaacggacttttcaacatcttcttcctttggaccaagctgcaaaggagaatctccagatgcaggcttaacaccggtcactgaacaacccataatcaagccatgtcggcgaacaccacggtaccattttgggccaatcctttttagttggacgtccttaaaccctgccttctgaaaccactcaatatactcttcctccttggggaaaagcatccaaacatctgcaaagaaacgtgacaaccaaaatgttgggtagaccggaccaattagacacgctttgcctccaagtttcaaaaccctgtatgcctccttgatgccacgctgtggatccggccagtactcaatacttcctgcggatacatatctatcggcataatcagttcgaaaggggagatcctcggcatccccttcgattattttgcattccttgagtggctccttctgcttggccttggcgagctggtggggtgactggtcaagaatggtgacattcttggcatccacgtgcttgacaataccaagagtggtgaaacccgtgccgccaccaacatccaccacaatcatgttcctgtcattgagatcagcgggttcaagggcatcatctctcaattgtgtatgaccatgtcattaaccctggccattggaccgaggacatgagggatgatgaccatgtcattaaccctggggagaaacctatagaaccaaaacgcctcttttttgtgctgaatgaaccttggctgcgaggttggcctcgaagcagagacactacacttgggtactactaagctcctaaagttgggaactttagcactagtggtggcaacaaaactcactcttggaaaattcttaccgtgcaaatctgaaccagtgaaacctaagccgtttccggttagggttctgagagtgagcttttcagttccactgagcattactgaagccattgaattgaatcaatctacaaaaaacccacagataggttagttcaattgaagtgaagtttaatcctgcaaggagtgttgttttgttatcctgaaaatgaaaagggaaaagtggtgaaggaaaggacgaaacaaaagagacgaaggaaataggcgagtggtgaatgaaaagggaaaagtgttgctttgttatcctgattgaacgccgtggcggttgaattgggtgtcgttcacaaaaatttgcgatttatttctcaccactcgcatattttcc

SEQ ID NO: 129 - DNA, 865 bp, Glycine max
  Clone ID: PAT_MRT3847_135197C.1
ccctcattcactctcttttctccggcagcaccaaaaccacccaacacttgaaatcaatatccattgttaccaaaaaagaaagatcaaaacaccctttacatcattatactcagttccctctttccctatcaaaaccctttcccacaacactactcactctagtagtacaagcaaaaccttctaactttggcttcagcggcacatatatatatatatatagaacatgtataccttgaaccactcttcatatttgtaccatgtttcccctgagctctcctcttccttggactcgtcctcgccggcttccgagggctctcgcggcgtggcattttccgacgaggaggtgcggctggcggtgaggcacccgaagaagcgggccgggcggaagaagttccgggagacgcgccacccggtgtaccggggcgtgaggaggaggaacacggataagtgggtaagtgaggtgagggagcccaacaaaaagaccaggatttggctggggacttttcccacgccggagatggcggcacgggcccacgacgtggcggcaatggccctgaggggccggtatgcctgtctcaacttcgctgactcgacgtggcggttaccaattcccgccactgctaacgcaaaggatatacagaaagcagcagcagaggctgccgaggctttcagaccaagtcagaccttagaaaatacgaatacaaagcaagagtgtgtaaaagtggtgacgacaacaacgatcacagaacaaaaacgaggaatgttttatacggaggaagaagagcaagtgttagatatgcctgagttgcttaggaatatggtgcttatgtccccaacacattgcatagggtatgagtatgaagat

SEQ ID NO: 130 - DNA, 2650 bp, Glycine max
  Clone ID: PAT_MRT3847_135935C.1
ggctcgaggcaaattgcacgaccatggctttctctatctcactctttttattagtcctgcttttttctttccaatcttcttcatcttccctattgtcattgaacaaggggtcctccctctcagtggagaaacacgcagaagacgttattgtctccccaaatcaaatgttctgtgctggcttctttcaagttggtgaaaatgccttctcctttgccatatggttcaacgaccctcacactcacaacaacaaccacaccgtggtttggatggcaaaccgtgaaacacccgttaatggaaggctatcaaagctttccctcttaaacagtggtaacatggtcttggttggtgcaggtcaaatcactacatggtcatcaaacacagcatcagatgctccagtaaagttgcatctccaagatgatggcaatcttgtgttacttgatctccaaggaaccattttgtggcaaagttttgataccccaactgatactctccttcccggtcaattacttaccagatacacacaactagtgtcttcaagaagccagactaaccattctcctggtttctataagatgctatttgatgatgacaacgttcttcgtcttatttatgatggtcctgatgtctcaagcacatattggccaccaccatggctactcagttggcaagctggaaggtttaattacaacagcagcagagttgcagtgttaaattctattggaaatttcacttcatcggataattatgatttttccacggatgatcatggcacggtgatgccaagaagattaaaactggattcagatggaaacgctcgtgtgtacagtagaaatgaggctttaaagaaatggtatgtttcatggcaattcatatttgatgcatgcaccagtcatgggatttgtggtgctaacagcacttgcagttatgatcctaaaaggggacggagatgctcgtgtttaccaggatacagagtgaagaaccatagtgattggtcttacgggtgtgaacccatgtttgatcttacttgcagcagaaatgagtctatctttttggagatacagggcgttgagttatatggttatgatcacaattttgtccaaaacagtacatacataaactgtgtgaatttgtgtttgcaagattgtaactgcaaagggtttcagtacagatatgatggtaaccaaatatttagctgctttacaaagtcacagttgttgaatggaaggcgttcaccaagttttaacggagcaatttacttgaggctgccaatcaccaataacttctccaaggaagaatctgtgagtgcagatgatcatgtttgttctgtgaagcttcgcaaagactatgttagaaagccagaaaatcgtttggtgagattttttctgtggcttgctactgcagttggggctttagaagtgattttctttttcctgatttggggtttcttgatttggaacctcaaaacgtctagtgcagatcagcaaggctaccatcttgcagcggtgggattcagaaaatatagttatttggagttgaagaaggcaacaaaggggttcagccaagagattggaagaggtgcaggagggattgtgtacaaaggcattttatcagatcaaagacatgttgcaattaagagactctatgatgctaagcaaggagaaggagaattccttgctgaagtgagcatcattggaaggctcaaccacatgaatttgattgaaatgtggggatattgtgctgagggaaagcataggttgttggtgtatgagtacatggagaatggttctttggcacaaaatctctcatccaacacacttgattggagtaagagatatagcattgctcttggaacggcaagggttctggcatatcttcatgaagaatgcttggagtggattttgcactgtgacataaagccccagaacatacttcttgatgctagttatcagcccaaggtagcagattttggcctgtccaagctactaaatagaaacaacctcaacaattcaagtttttcaatgatcagaggaaccagagggtatatggcacctgagtgggttctgaacttagcaatcacctcaaaggttgatgtttacagttatggaattgttctattggagatgataactgggaagagcccaacaacaaccggtgttcaaaacattgatggagaagagccatacaatggaaggctggtaacatgggtgagagagaaaaggagtgccacatcttggttagagcacatcattgatcctgcaattaagacaaattatgatgaatgcaagatgaaccttttggctacagttgctttggactgtgtggaggaagacaaagatgtaaggcccaccatgagccatgtggtagaaatgctacaaagccatgaaagtgatcctcgtaatatcatcaatgcttgatggttacatttcttggtcctcataatgctaattaatggtatacctcataatactattatcaactcttgatggctactttcgacgtatcaggtactcaccgcaaggaagtagattttacattttagaatgcttctatatatatactttttttttaattctatatttttgtctttcatgtggtgtttgtaatttgtaaagttgtttaagataaataaatttcccttgtttgaagtctt

SEQ ID NO: 131 - DNA, 716 bp, Glycine max
  Clone ID: PAT_MRT3847_136001C.1
ctgcaattcactctgtacaattcttcgttcgttctctgcagttatatcctttttgagcttcaatggcggacgctgaaaccttcgctttccaggctgagatcaaccagcttctaagtctcatcatcaacacattctacagcaatgcttctgatgctttggataagattcgattcgagagcttaaccgacaagagcaagctcgatgctcagccagagctcttcattcgtcttgtgcctgacaaggataacaagactctttccattattgacagcggcattggaatgaccaaagcagatttggtgaacaacttgggtaccattgcgaggtccgggaccaaggagttcatggaggcgttgcaggccggtgctgatgtcagcatgatagggcagttcggtgtggggttctactctgcttaccttgttgcagagaaggtcattgttaccaccaagcacaatgatgatgaacagtacatttgggagtctcaggctggtggctctttcactgttactagggacactgatggcgagcaactcggaaggggaaccaagatcaccctcttcctcaaggaagatcagttggagtacttggaggagaggagaatcaaggatcttgtgaagaagcactctgaattcattagttatcctatttacctttggactgagaagacaaccgagaaagagatcagcgatgatgaagatgatgaacccaagaggagg

SEQ ID NO: 132 - DNA, 1275 bp, Glycine max
  Clone ID: PAT_MRT3847_136003C.1
aaaaaaagaaaacataatgcagagagaggtagaagaatccagaacccgttgtttgtctcccattcccgttcctatataaagctccttctttcacaaccttcaccaacttcaactctctacaattcgctctgtgcagtttcctcgctctcttttctgcaattttcttttttgttcgttctctgcagttatatcctttttgagcttcaatggcggacgctgaaaccttcgctttccaggctgagatcaaccagcttctaagtctcatcatcaacacattctacagcaacaaggagattttcttgcgtgaactcatcagcaatgcttctgatgctttggataagattcgattcgagagcttaaccgacaagagcaagctcgatgctcagccagagctcttcattcgtcttgtgcctgacaaggataacaagactctttccattattgacagcggcattggaatgaccaaagcagatttggtgaacaacttgggtaccattgcgaggtccgggaccaaggagttcatggaggcgttgcaggccggtgctgatgtcagcatgatagggcagttcggtgtggggttctactctgcttaccttgttgcagagaaggtcattgttaccaccaagcacaatgatgatgaacagtacatttgggagtctcaggctggtggctctttcactgttactagggacactgatggcgagcaactcggaaggggaaccaagatcaccctcttcctcaaggaagatcagttggagtacttggaggagaggagaatcaaggatcttgtgaagaagcactctgaattcattagttatcctatttacctttggactgagaagacaaccgagaaagagatcagcgatgatgaagatgatgaacccaagaaggaggaagaaggagacattgaggatgttgacgaggagaaggagaaggattccaagaaaaagaagaagatcaaggaggtgtctcatgagtggcaactcatcaacaagcagaaaccaatttggctgcgaaagccagaagagatcaccaaggatgaatacgcttctttctacaagagcctcaccaatgactgggaagagcacttggctgtgaagcatttctctgtggagggccagcttgagttcaaggccatcctctttgtcccgaagagggcaccctttgatttgtttgacaccaggaagaagatgaacaacatcaagctttatgtcaggagggtgtttataatggacaattgtgaggagctcattcctgagtaccttggatttgtga

SEQ ID NO: 133 - DNA, 1342 bp, Glycine max
  Clone ID: PAT_MRT3847_136440C.1
cacgcgtccgcttctaccacctacgtcgtttcgcgtgagtaccagcttttcctttgggcaattctcgtcttcggtgattcctatggtttcttcattgaattcgataaagccattgaacatgtcttcagcaaccaagggtgataggaagactgcacttgatgtggcatcatggatgttcaatatagtcacatctgtgggaataatccttgtgaataaagccctcatggctacatatggtttcagctttgctacaacgttaactggtctgcattttgccacaacaaccttgctgacagtctttcttaagtggctgggatatgtccaaacctctcaccttcccttacctgatctcatcaaatttgtcttatttgcaaatttctctattgtcggcatgaacgtgagtttgatgtggaattctgtcggtttctatcagattgctaagctgagtatgattccagtatcttgtttcctggaagttatcttggataatgtgcgatattcaagggacacaaaacttagcatttctctagttctccttggggttgctgtatgtacagtcactgacgtgagtgtcaatgctaagggttttatagctgctgcagtggcagtttggagcacctcactacagcagtattatgtgcattttcttcagaggaagtactctcttggatcgtttaacttgttgggccacactgcaccagtacaggcagcaagtttactactagtaggtccctttttggactattggctgacaaacaaacgagttgacgcctacaactatggtttcacatctactttgttcatcattatctcttgcaccatcgcagtagggacaaacctcagccagttcatctgcattggcaggttcacggctgtatctttccaagtccttggacacatgaagactattctggtactggccttaggattcgttttcttcggaaaagaaggcctcaatttacaagtgattctgggcatgaccattgccatagcgggaatgatatggtatggcaatgcatcttctaagccaggagggaaggaacgtcttagcttacccattaaccataccaccaacaagacacaagagtataatgtactgccagtgtcctctgaaacggatcaggaaatatagaagttgatgtaaataaagtggtgccctctaggacacctcatttggacacttctcctacccgtatggaacacaacatgcttagtcaaatcttcttctctctctctctgcttacttacagggtttgcaaaacagaaagcttgtgttctccgcaatgaaaaatgacttattgtctcagtttttagaaaaatgaaaattaatttctagtccttc

SEQ ID NO: 134 - DNA, 1490 bp, Glycine max
  Clone ID: PAT_MRT3847_136906C.1
acgcgagcttgagcttgggatggagtttacattcatctcaagccatttgtctctcacatcaattcatgcttctcctctcttttgaacacacaacaaaaccagagttaccaacagatccaattctaatcctttgaaattcactaaccccctatttctattctctcttagttccagtttttcactttgctagtgtcttctgcatttgcttccacagttgcttcgccaggaagaaataacaaaaggaaacaccttcttgcttttcctacctgattgtaaagaatctctcttttctcatttgggacatcactgttcactttctgcatcaactcgctgttggattttaatatttatctctgctatcaatattattaaggtctcacttctgggattctgaattctatgccccttggaccaaagtttctgtaaggggattttttgttgtaaagtatggaattcgagacttcatatccaacttgttttatgtcaaattcaagttggttttctcaagaaagccaattcacagaatggacaagagaagagaataagaaatttgaaagtgcccttgccatatatgataaggataccccagacagatggctgagggttgcagccatgctccctggaaaaactgtctatgatgtgatcaaacaatacagagaattggaagaagatgtttgtgaaatagaagcagggaggattccagttcctggatatcctacctcttctttaacattgaagatggttgacaaccaatgttatgatgcatgcagaaagaagcctgcaactctcaggagttctgatcaggagaggaagaaaggggttccttggacagaagaggaacacagacgttttctgatgggacttttaaagtatggtaaaggggattggagaaacatttctcgtaattttgtggtcacaaaaactcccacccaagtggcaagccatgctcaaaagtattacataaggcaaaagctttctggagggaaagacaataaaaggaggcctagtatccatgatatcaccattgttaatcttacatcagatcaagagaagcctcttttactcaatgatgagtctcacatgacttttgagcaacagaagctaactagcatgccaaaagtacaactagaatggattaatcaccacgacaatgggtcacgtatggttgtcaacccaaattatgatatgttcatgtcaccttcatctggcatctcttccaagaccctcaagttgcaagggcaagatttctatgaatgtgcctttcatgagacttatgctaagcttaaaaattcgggtttcaggacaacttctagagacttcaacaaggaagtcagacagttatttaacatgtctatttctttgtatagactcaatctgcatcacaggatgcgccattcaggtattctcagtctcgggcaacgagacaatattcagtattcatgcactctgatcttgttatgaacagcataccggttctactacatagatca

SEQ ID NO: 135 - DNA, 1552 bp, Glycine max
  Clone ID: PAT_MRT3847_136907C.1
ccacgcgtccgcattcatctcaagccatttgtctctcacatcaattcatgcttctcctctcttttgaacacacaacaaaaccagagttaccaacagatccaattctaatcctttgaaattcactaaccccctatttctattctctcttagttccagtttttcactttgctagtgtcttctgcatttgcttccacagttgcttcgccaggaagaaataacaaaaggaaacaccttcttgcttttcctacctgattgtaaagaatctctcttttctcatttgggacatcactgttcactttctgcatcaactcgctgttggattttaatatttatctctgctatcaatattattaaggtctcacttctgggattctgaattctatgccccttggaccaaagtttcgtaagttctttgttgttgtgcatttcttttctttttttttttatccgtgggaatggaagaatgacaggaggtttacaataactcgtgcatccttcttaaccaacttaactagactcccttgacatttctttctagtttctcatttccatttctttagtgtaaggggattttttgttgtaaagtatggaattcgagacttcatatccaacttgttttatgtcaaattcaagttggttttctcaagaaagccactacacagaatggacaagagaagagaataagaaatttgaaagtgcccttgccatatatgataaggataccccagacagatggctgagggttgcagccatgctacctggaaaaactgtctatgatgtcatcaaacaatacagagaattggaagaagatgtttgtgaaatagaagcagggaggattccagttcctggataccctacctcttctttcacattgaagatggttgacaaccaatgttatgatgcatgcagaaagaagcctgcaactctcaggagttctgatcaggagaggaagaaaggggttccttggacagaagaggaacacagacgttttctgatgggacttttaaagtatggtaaaggggattggagaaacatttctcgtaattttgtggtcacaaaaactcccacccaagtggcaagccatgctcaaaagtattacataaggcaaaagctttctggagggaaagacaataaaaggaggcctagtatccatgatatcaccattgttaatcttacatcagatcaagagaagcctcttttactcaatgatgagtctcacatgacttttgagcaacagaagctaactagcatgccaaaagtacaactagaatggattaatcaccacgacaatgggtcacgtatggttgtcaacccaaattatgatatgttcatgtcaccttcatctggcatctcttccaagaccctcaagttgcaagggcaagatttctatgaatgtgcctttcatgagacttatgctaagcttaaaaattcgggtttcaggacaacttctagagacttcaacaaggaagactcaatctgcatcacaggatgcgccattcaggtagccaattcacttgctgatgtggctgactcacatgagcacttgaattga

SEQ ID NO: 136 - DNA, 1816 bp, Glycine max
  Clone ID: PAT_MRT3847_136948C.1
ggctcgaggtcttgtctccggtttgttgcagttgcggttgcggttgcgattgcgatggtgaaatcgaacgagaacggttctggttccgtttcggtgcctcctttcctgaaaaaatgttacgatatggtggaagaccgcaacactgattctatcatccgttggagcgatggcggtgacagctttgtcatctccgacatcactcaattctccgtcacgctccttcccacctatttcaaacacaacaatttctccagtttcatcagacaactcaatatctatggtttcaggaaaattgatacggattcctgggaatttgccaatgaaaactttgttaggggtcaaaagcatttgttgaagaatatacatagaaggaaacatccacacagtgcagatcagcaaaaggcattgccacagcaagacaattgtgatgaaccatcccaagaagcaccaaatcatggcctttggaaagaagttgagaatctaaaacttgataaaaattcgctcacacaggaattggtcaaacttaggcaacatcaggaatctgctgagagtaagttgctgctcctgagtgatcgccttcaaggaatggaaaagcatcagcagcagatgttgtcattcttagtcatggttgtgcaaagccctgggttcatggttcagcttcttcatcctaaggaaaataattggcgtttggctgaatcatggaatagattggatcaagataaacaagatgacaagccagttgcttctgatgggatgataataaagtataaaccacctgtaggtgaaaaactaaagcccgtagttcctctatctcctggtttcgaaaatcaaccagaacctgagctttctgctgatgggctgaaagacttgtgcatcagttctgaattcttgaaagtacttctggatgaaaaattgtctccgttagaaaatcattctccatttctcctaccagatttacctgatgatggttcatgggaacagctttttcttggcagtcctttcctgggaaacattcaagattctaagaatgaaagtgaggggcacaccaacagtggaatggagatggaaccaacaatatctgagactccaaatgaaaattctcgaacttttgaatcgatgatcgtagagatggagaaaactcgagaataagttggagttgtatgcacatggtgggctgtcttcataaaataatatccatcaaatatttttcatatgggctgtctcatactgagctaatggagctttagattctgaaactaacaacatatagggaaggaagtaataatgttcatcagatatttttcagctgagctgtcttcacatattacttcaacactataattatatcatagtattaagtcgcaattattttctctcccatcttccttcagcagttgttagatcctcatctaaaatccttattttggcatcttgatacatggtgtcggagaccaggagtcgtatgttagtgcactagtgcggctacctatatataatggatcaaatatttcttatttggagaactgcaagggaaaacggcaactttattttttgtgccacattaaacagtggcacttgccttcatatatattataaaatttcataaaattcatgcttcgtttgcatattattattgcagaagccagtgctctgataatgctctttcccttttctctcttacttcccgtagtcctcatgcgtctgaactttataattctactgttgtgttttgatatggtggcaaagagattttgttgcaccacaaaaaggttcattataaattaagttggattaaagctaacttcaaaacaaaaaa

SEQ ID NO: 137 - DNA, 2905 bp, Glycine max
  Clone ID: PAT_MRT3847_137166C.1
gtgttatttaaaacagaaatcacatgtatggctggtagcagtaaaggataatattaatgttgaatagcggatttagatgcctacgaaccatgtttttgtcgtgtattcctatttcctagtttcattcagctcactgatttcaattacattgcataggcaattttgtaaatcagaggctaagagacttgtagtaatttgtaaagacgcctctgaattttggtccaccaccacacccttcttctcatctccaccacaccaggtgttgttgcgcttcagaaatggctaccggagctgctgtgccaactacgttttctaccctcaagacatgggattccagtttggggtttgcaaaaaacatagattttgtgagagtttccgatatgaagagcatgaaatcttctgcgaggaaaagggtgtcaattatcaggaactcaaatcctggccaagatattgctgaacttcaacctgcatccccaggaagccctcttttggttcctaggcaaaagtattgtgaatcattgcacaaacccatcaggagaaaaacaagcacagtaatggttggtaacgtggctattggtagcgagcatcctataagaattcagaccatgactacaactgacactaaggatgttgctgggacagttgaacaggtgatgagaatagcagataaaggagctgatattgtacggataacagttcaagggaagaaagaagctgatgcttgttttgagattaaaaacacccttgtgcagaaaaattacaacataccgttggtggctgatattcattttgctccctctgttgctttgcgggtagctgaatgctttgataagattcgtgtaaaccctggaaattttgctgatagacgggctcaatttgaaacattagagtacacagaagaagactatcagaaagaacttgagcatattgaaaaggttttcacaccattggttgagaaatgtaagaaatatgggagagcaatgcgcattgggacaaaccatggaagtctttctgatcgtataatgagctactatggagattcacctaggggaatggtagaatctgcttttgaatttgcaaggatatgccgaaagttggactatcacaattttgttttttctatgaaagcaagcaacccggttatcatggttcaggcataccgcttacttgtggctgaaatgtatgtccaaggctgggattatccattacacttgggtgttactgaagctggagaaggtgaggatgggaggatgaagtctgcaattggcattggaactcttcttcaggatggattgggtgatacaattagggtttctctcacagaaccaccagaagaggagatagatccttgcagaaggttggcaaatcttggaatgagagcttctgaactccagaagggggtggaaccttttgaagaaaagcacagacattattttgacttccagcgccgatctggtcaattgccagtgcaaaaagagggtgaggaggtggattacagaggtgcactgcaccgtgacggttctgttctcatgtcagtctccttggatcagttaaagatgccagaggtcctctacaagtcacttgctgccaaactcattgttggcatgccatttaaggatttggcaacagtagattcaattttattacgggaacttcctccagtagatgatgctgatgctcgactagcactcaagagactgatagatatcagcatgggggttataactcctttgacagagcagctaacaaagccattacccaatgccatggttctagtaaaccttaaggaaatatctaccggagcttataagcttttgccacaaggaacacgcttggttgtgtctgtccgaggtgatgagccttatgaagaactggacattcttaagggtgttgatgctactatgcttctccatgaccttccttatacagaagacagaattagcagagtgcatgcagccagacggttatttgagtacctatctgacaattctctaaacttccctgttattcaccatattcagttcccaaatgggattcacagggatgacttggtaattggtgctggttctgatgctggagcccttctggttgatgggcttggagatggactacttttggaagccccggacaaggattttgaatttattagaaacacttctttcaatttgttgcaaggctgcagaatgagaaatacaaagacagagtatgtctcatgtccatcctgtggcagaacattgtttgatcttcaagaagtaagtgcacaaattcgggagaagacatcacacctccctggtgtttcgattgcaatcatgggatgcattgtaaatggaccaggggagatggctgatgcagactttgggtatgtgggaggcactcccgggaagattgacctctatgttgggaagactgtggtgaagcgtggaattgcaatggagcatgcaaccaatgccttgatcgatctaataaaagagcatggacgatgggtggaccctcctgcagaggagtaaaggcaagagctcaattttgagattggcattcaagtccaatgtaagatgatcattgttatagcctattattgtacacatgtaatataagataacactcaatgcttaagtttgagcctagttttaagttccttttgagaaagatcccaattaaagcttgggcggtgaggaaatcgacagctataacaagtatacagataacagtgtattgctttgccccatcagccatcaataataatgagaatctcttagaatagtgccagttaaaaaaccgggccttattcgcccagcagtatcatttagaattagagggatttaaaataaaacttttcaaatattagggatcaaatgtaaaattcgagtatatattaggaatcaaaaacatatttaagccttatctt

SEQ ID NO: 138 - DNA, 1976 bp, Glycine max
  Clone ID: PAT_MRT3847_137229C.1
ggccggaaccacgcgtccgcctcaatcacccaacacctagtattattattcaatgcctgaaactcccccatcactagaaagaaaaacataacaagtcaccatataaaggagttagagtcattaataggagttagtttgagacttgaaagactgaaaagaaagtgaaagtggtccaacctagttagacaacaaaaaatggcatcggataaggtggtggaaacggtcatagcagggaactacgtggaaatggaaactgaagggaagcccaaggacgtaaaaaccaagctatcaagcttgttgtggcatggaggttctgtttatgatgcttggtttagctgtgcttccaaccaggtggcccaagtgctgcttacgttgccatactcattctcccaactgggaatgctttctggcatacttttccaaatcttctatggtttactcggaagttggacagcttacctcattagcattctctacgttgaatacagaacaagaaaagagagagaaaaagttaacttcagaaaccatgtcatccagtggtttgaagttcttgatggactcctcgggaagcactggagaaacgtgggtttggcctttaactgcacatttcttctgtttggatctgttatacaattgatagcttgtgcaggcaacatatattacataaatgaccacctggacaagaggacttggacttacatcttcggagcttgctgtgccaccactgtctttattccttcctttcacaactacagaatctggtcctttttgggcctccttatgaccacttacactgcttggtatctcacagttgcctctctccttcacggtcagatggaaggagttaagcattcgggtccgaccaaattggttctatattttacgggggccacaaacattctctacacattcgggggacatgctgttactgtggagataatgcacgcgatgtggaagcctcaaaagttcaaggccttatacttactggcaaccctgtatgtgctgacactgacgcttccatcggcagcagcagtgtattgggcatttggagacatgcttctaaatcactccaatgcttttgctctccttccaaaatcacccttccgtgacatggctgtcattttaatgctcatccaccagtttataacattcgggtttgcatgcaccccattatacttcgtgtgggagaaagcaatagggatgcacgagtgcaagagcctatgcaagcgtgcattggtgagattaccagtggtgatccccatatggttcttggccatcatattccccttctttggtcccatcaactccaccgttggctctctccttgtcagcttcaccgtttacatcatccccgccctcgcccacatcttcaccttcagatcaccctcttccagacagaatgcagtggaacaacctcccaaatttgttggaagatgggtgggaacctttattatcaacacttttgtggtggtgtgggtcctagtcgtaggatttggatttggagggtgggccagcatggtgaacttcatacgccagattgacacatttggactcttcacaaagtgttaccaatgccctccaccgcttctaccacctatgccgccgcatcagctcaacgccaccgcgccttccccacttcaccaccctcatcatgcacactaaggattgcactctttaaagttcaaattgagacccatctatgaagcggcaccctaggctctttggtgaaattattaacggtgcaatacatgtcattgttacgttgagaatgataaatttgtaatgtattggccgtgtcataattaaacatataatgtattcttcaattatccttctctttatagccttaaggtagttttgagcactttgtcatggtcagttatcataagaagaaaaaagaaaataaaacgataaggtttatgatgaatttgcacaaagtttgtttggttttagaccaattaattcaacatatttat

SEQ ID NO: 139 - DNA, 1219 bp, Glycine max
  Clone ID: PAT_MRT3847_137321C.1
ggcagttttataggtctgtaaataagactgactacttgactttgcgcaatgggtttatcactgtccacctggctcctggaagtaaatataatttccaaaagtttatcaaaagatcattagaagatgacttcaaggtggttgtgggagtcagtcctatcctctgggcatcagttgtagtttaccttctcatcaatattaatggatggcgtaccacaatttgggcagccttaattcctgttgtcttaattttggctgttggaacaaaacttcaagctatattggcaaagatggctcttgaaatcaccgaaagacatgcagttgtccaaggaatgcctcttgtccagggctcagacaaatacttttggtttggtcaaccacagttagttcttcatgttattcattttgctttgttccagaacgcattccaaataacatatatcttgtggatatggtattcttttggggtgagaaactgtttccgtactgactacaagcttgcagcattaaaagtagctatagggatttcgatgctatgcctctgcagctatatcacccttccattatatgctcttgtaactcagatgggttcaaggatgaaaacagcagtatttgaagagcaaacaaacaaggctctgaagaaatggcacatggatgcgaagaagaagaagaagaagcatgtaggaacagtgacactaggaaagtcgagtgcacgaatcatggatggaagccccattggtaattcttcaacagtgcactcctcctctgttcccacactacaccgtttcaaaactaccggccactcaacccgctcctcatcgaaagagtacgaggatcatgatcatgatcatgaatatgaatccgatgatgttgagttgtttcctgtgtcgtcgcaaacaactagcttcattgtaagagtggaccgtggcgaccaacaacaacaagcagaagaagaacatagacaacatagtgagggagaaaccaacagtagcagtgaaggtgaattctcatttgcaaaacctgaccccgtagaaattagaaccaccacatagcagcatatattcacctctattcttttgcaatatcttcacataaaaaagaagaaaaaaacattttctagatcatggggtatcttgaaacttagagatgaatttttacattcttgatcagcataattcacttgctcctaatggaagcattgccctcacattatataaaaagg

SEQ ID NO: 140 - DNA, 252 bp, Glycine max
  Clone ID: PAT_MRT3847_137585C.1
ctcggttcctgcaacggactcctctgtatatccaacgtcgccgacgacatcgccttttggaacccctccctccgccagcaccgtattcttccctctttgcccctcccccgccgccgcctccaccccgacaccactctcttcgccgcccgcgtctacggcttcggcttcgaccatacaagtcccgactacaagctcgtccgcatctcttacttcgtcgacttgcaggaccgctccttcgactcccaggtcaag

SEQ ID NO: 141 - DNA, 1570 bp, Glycine max
  Clone ID: PAT_MRT3847_138356C.1
aaagggggggttgggctgtgcatccgaaattctgatctgtgagaatgggaaaaggtggatctctgagcgacggcgtggtgaagaagatcgttctctcctacagctacgtggcaatatggatcttcctgagcttcaccgtcatcgtctacaacaagtacatcctggacaagaagatgtacaactggcccttccccatctccctcaccatgatccacatgtccttctgcgccaccctggccctcctcctcgtccgtgtcctccgcctcgtcgagcccgtctccatgtcccgcgacgtctacctctcctccgtcgtccccatcggcgccctctactccctctccctctggctctccaactccgcctacatctacctctccgtctccttcatccagatgctcaaggccctcatgcctgtcgctgtttactccatcggcgtcatgctccgaaaagaatcctacaaaaacgacaccatgcttaatatgctctccatctccctcggcgtcggcgtcgccgcctacggcgaggcccgcttcgacgcctggggcgtcctcctccagctcggcgccgtcgccttcgaggccacccgcctcgtcatgatccaaatcctcctcacctccaaggggatctcgcttaacccaatcacttctctctactacgtcgcgccgtgctgcctcgtgtttctctctattccgtggatctttgttgagtatcctgttttgagagacacttccagcttccacttcgatttcgtcatcggctggaccaactccttctgtgcattcgcgctgaatctggccgtgtttcttcttgttgggaagacgtctgcgttgaccatgaatgtggccggtgttgtgaaggattggttgctgattgcgttttcgtggtcggttattaaggacaccgtgacgccgataaatttgttcggctacgggcttgcgttcctcggcgtggcgtattacaatcactcgaagctgcaggcgctcaaggccaaggaggcgcagaagaagaccgcgcaggcagatgaggaggaagggaggttgctcgaggacagagatgacaacaagaggaacgaacagcagacttaacttttatttatttttaatcgttccctgttttattttacacagattcaagaaaggaaaaaaacaaacaagaggtttggtttggttttcgaggcaaatatggaaatgtcatcgtcctctctgggcatattgccggttcggtattgtttttttagttgctagatcttcttcacgttgccaatgcggtgggtagttaattagtagatatgggtttgagatttgagaacaattatgtgttactagagctagagtctccaatccttttattattattattattattattttcttttatctcattcccgttttcggtggttttgttttatgttatgttattgtaggaactcgatttatggagtttacatgcttcttattaattcatagtacatttcaattctgtgtaatgtgaatttgggatttatcttatagccaagctgtctgacaaatttcacttggcactgtgttccgaattactctgtttcggttgt

SEQ ID NO: 142 - DNA, 2673 bp, Glycine max
  Clone ID: PAT_MRT3847_139152C.1
ctcgagccgattcgtctctagtctttatttatctagcgtgtctgagaattccgtggggtggacgagcgagggtgcgactatgacctgcgacttcgatctccggcaatccgcggcgaggttcgtccagtaaaacggcgccgtatagcgggatctgcgacgctgggcggagtggcaatggagggcgagaacgcgagcaacaaggtgatcgagttgatgaacgagatagccagcatctccgattacaggcctccggtgaagaagcagtactgcaacttggcgcggaggctgaagcttctgatcccgatgttcgaggagattagggacatgaacaaagacgcgcttcccgataacacttccaacgccgtcctcgccttcaaggaagctctcgaatccgctatggaactcctcagattcggaagcgagggcagcaagctttacttggtccttgagcgggacgaaattatgaataaattctacaaggtgacagctcagttggaacagtcgttgggtggtatttcctatgataaacttgatatatcagatgaagttaaagagcaggttgagttggttcttgcccagttcagaagagctaaagggagggttgatgaaccagatgtcaggttgtatgaggatatgttgtctgtttacaacaacagcagtgatgcagctacagatccatctgttctaagtcaattagctgaaaagttgaaattgatgggaatagctgatcttactcaagaatcacttgctttgcatgagatggtggcatcaagtggtggggatccaggggcacgcattgagaaaatgtcaatgttattgaagaagataaaggatttcgtgcaaatagaaaatctagtcaaggatgataatttaggaggaaaaggcattttctcaaaagtctatggacttgggacaaatgaaaagagtcatcaagctcctgttatccctgatgattttcgatgtccgatttccctggaattaatgaaggaccctgtcattgtttcaacgggacagacttatgagcgtacttgtattgagaagtggttgcaagcagggcatggaacctgccccaaaacacagaagactcttactagtactgttctcacgcctaactatgtattgcgaagccttatagcacattggtgtgaagccaatggcatagagccaccaaaacgacctagcgattcacaacctagtaaatcagcatcagcctactctcctgctgagcaaagtaagattgaaagtcttctccaaaagctcacatctgtgagtcctgaagaccagagatcagctgctggcgagatccgccttcttgcaaagcgcaacgcagataaccgcgttgccattgctgaagctggtgcaatacctctccttgttggtcttttgtctgtgcctgactcccgcactcaagaacatgccgtgacagcgctcctgaatctttccatatatgaaaacaacaaaggaagtattgtttcttcaggagcagttccaggtatagttcatgtgctgaagaagggaagcatggaggctcgggaaaatgcagcagcaacacttttcagcctttcagtaatagatgaaaacaaggttacaattggatctttaggagccataccaccactagtgacactgctaagtgagggtaaccaaaggggtaagaaagatgctgcaacagcactcttcaatttgtgcatttatcagggcaacaagggaaaggcagtgagggctggcgttattcccacgctgatgcgactactgactgaacctagcgggggaatggtggatgaagcattagctattttggcaatattggctagccatcctgaagggaaggctactattagagcttcagaggcagtgccggttttagtagagtttattgggaatggctcaccaaggaacaaagagaatgcagctgccgttttagttcacctctgttctggagatcaacaatatcttgcacaggcacaagagctgggggtgatgggtccactgttagaattggctcaaaatggtacagacagaggcaaaagaaaggctggacaattgctagaacgtatgagcaggttagttgagcaacagcaggaagttccaatacaaactgaaactcaagctcagaacgaggatacccaaccacctttgattactaaccccgatgattcctaagatgtcttattatactttgttcattttgtctttttgttctctttaaagtgttgaaagaagcatctgtttggaggaaagggtggaagatcaccttcctactccataagttatttgtttgtttgtgtgatattcagcagagatgtaatgcaaaaaacttgtgaaagtgggcaagaagaaatcgaagcaaatgggcaagcttgaagtggaaaatgtataatttgtaacatgcactgtattctaatcatcctcagattttaatgaagagatgttttgtttattcgtaccgcatcacataatgatagagatgttataaaagtataaagtcattcatttgtctaccgcatcagatgatgttagagatgttataacagtataaagtcaatcatttgtcttttttaaaaaaaaaaaaaaaaaaaaaaaaacctagaaatttatcctttcgaaaatgttagttcgcgccgtcatattagagttattatgatcaagtgatttgaagttgaattcttgtcc

SEQ ID NO: 143 - DNA, 1488 bp, Glycine max
  Clone ID: PAT_MRT3847_139372C.1
tacggaagacgacagaagcttggtgtaagtgttgttcttccgatttggttcaatcaaatcaatgatgttgaggaggaggggttctgtgacctccttctattccaaattcatcgattctcacaatcttaattgtgggcgttcctcttcgaatccccatcgcgtcgccgcttctgcaacttcattcgatatctcttccgcttctgcgtctaaagctacgaccgactttgtgtcgttgacccgccactatggaaggtgctattgggagctctccaaagctcgtctcagcatgcttgtggttgcaacatctgggactgggtttgtcttggggagtggtagtgctgttgatctttcggcactttcttgcacttgcttgggtaccatgatggttgctgcatctgctaactctttgaatcaggtgtttgagatcaataatgatgctaaaatgaagagaacaagtcgcaggccactaccctcaggacgcatcacaatacctcatgcagttggctgggcatcctctgttggattagctggtacggctctactagctacgcagaccaatatgttagctgctgggcttgctgcttccaacctaattctgtatgcatttgtatatacacccttgaagcagattcatcccataaatacatgggtgggagctgttgtcggtgctattccaccacttttgggatgggctgcagcttctaatgatatttcactaaatggaatgattcttccagctgctttgtatttttggcaaataccacattttatggccctagcctatttgtgtcgtgatgactatgctgctggagggtttaagatgtactctcttgctgatgcatctgggcatagaacagcattggtggctttaaggaactctatatatctaatccctttggggttcttggcttatgattggggtttgacttctggatggttttgtcttgagtccgctgcacttacacttgcaataagcgctgcagcattttcattctatagaaaccgtaccaaagaaaaggcaaggagaatgttccatgccagtcttctttacctccctgtgtttatgtctgggcttttgattcaccgtcgttctgaaaacgaacaattcttagaagacaaagcaaagggttttgtgaaatctgcatcctctacggagtcttcagagttggatgatgataacggcgatcaaaatatcaaggccaggcgtccctatcggactgaagcgcgtcctcccgtatcgtatgcctctgttgcaccttttccctttttgcctgctccatcatataacttcccttgatatctgtcagttatacggattttgtatgacttcaacattttctcggccaagttttgtttggttaagttgatatattcattgaaatgatacattctaatttgtctgtttaagccgttaaggttgttttatgtgccacaataaaaattgaagatgcatctgtaatctgaaataaatgagattttgtttctttt

SEQ ID NO: 144 - DNA, 445 bp, Glycine max
  Clone ID: PAT_MRT3847_139958C.1
aattcggctcgagctccgagccgaatcggctcgagtgcgagaagacgacagaagggggaaatactcagaagatgatgcaaaggccgtcatggtacagatactaaatgttgttgcattttgtcatctacagggtgtggtacaccgagatcttaagccggagaattttttgtatgctaaaaaggatgaaagttctgagttgaaagctatagactttgggttatcagattttgtcagaccagatgaaaggcttaatgatattgttggaagtgcatattatgtggcccctgaagctctccatagatcttatagcacagaggctgatgtgtggagtataggtgtgatagcatatattctattatgtggcagtcgtccattttgggctcgaacagagtctggtatttttagggcagttttgaaagctgatccaagctttgatgaaacaccg

SEQ ID NO: 145 - DNA, 1637 bp, Glycine max
  Clone ID: PAT_MRT3847_140022C.1
ctctcaaacaccgaaccccacattattcgggaagagtaagtaggtgtctctcactctcccaccgaatccacattctaaagtaatacgccggagaatgacgtcacactcccactacccacccgacttagacgccgactccgtcacctcctccccacgctccgatcacttccacgacgcgccgccccgcatccgcttcatgtgcagcttcggcggcaagatcctcccccgcccccacgacaaccagctccgctacgtcggcggcgacacccgcatcgtcgccgtcaaccgctccatcactttctccgccctcattctcaaactctccaaactctcaggcatgagcaacataacagccaagtaccagctcccgaacgaggatctggacgcgttgatctcggtcaccacggacgaggacgtggagaacatgatggacgagtacgaccgcgtcgcacacaatcagaacccgcgatcggcgcggctccggctcttcctcttccccgaaggagaagactcccgcgccagcagcatcagctcgctcctaaacggctcagccaagcgcgaaaactggttcctcgacgctttaaacggcggcgtttcgggcctcgaacgaggccgctccgaagcctcttctatggtctctgaagtacccgattacctcttcgggttagacaactccgaagaaataacaaatcaccaacgcgacccgagacccaaacccggacccattattcaagataacgtttccgtttcagatccgggttcgcccgccccggttgtctcgtccccttattgttccacgtcatcagcgccgcccgtgccctctctcccgaaccttccctatgttaaaaccaaacctttaaacttaaatccggttcctgatactgactccaaggaaaatcaaaccgaacctgaaacggaacctcacccgaacctgaacctgaaccaaaacccgaacatgtattcaaataaccctgttgttcactaccctccagaagctgcttattcggcgcattcagtaaacccggttccggtttactatgtttccggtccggttcgaccgggatccgtgccggttcctatgcaaaccccttatcactacgttcaacaatcgtatcatgctgtggtgccacctcaggttcctatcgggtaccatcctttggttccgggttcgggtcaagtatatggagcgggcgtgaggcacatgaccccactgcaaccttacagcccctccaccacggcggtggttcatgacggtttgaaacagcacgtgtatcatgccgtgccaaattcgggtccggttccggttcacccagttattccgatgacgggtttggatgaaccgcagagaggtggagcgtaatttgtgacgggtcggggccccaattcacttaataactgatcccatttttatttagtggatgggtgctgaatttttactaccataccatcatgcaaatggtaatttatgtctatatatatacaagtgccttcactatcttttgttccccttatatgttgaatgcattactagccaaaaatggtaattacataaaattgtttgagcaaatcatttcaggttgtatattaaaaaggaaaaatgttgataaattatatttcgttatcctaccaaaaaaaaa

SEQ ID NO: 146 - DNA, 263 bp, Glycine max
  Clone ID: PAT_MRT3847_140192C.1
ctctctctctttctctttctctctcatccagatcttgcaaaaaaaaaaaaaacccaatggcagcgagcgctcccactccacgcgaagatttcgtgtacatggcgaattggcggagaaggccgagcgctacgaggagatggtggatttcatggagaaggtctccgcctccgccgaaagcgaggagctgaccgtggaggagcgaaacctcctttccgtggcctaaaagaacgtaatgggagctcgccgggcctcctggcgaataa

SEQ ID NO: 147 - DNA, 1559 bp, Glycine max
  Clone ID: PAT_MRT3847_140374C.1
gaaataaatacaaacagtaatcttataccaaaaactaatattgttagttgttttatccacggtgtactaaataaacaggtaagaccgtaagagagatttgaattaaaaaaggcaaaatgtaccaaaaataattaaaaaaggtaaaaaccaaagacttattattatcagcaaaattagaagattaatgattaaattgattgattttcttaaccttcttctcacactctatacaaactctcgtagcatttcggcatccaaactaactctctcatcttctacagcattcttctgcaattcaaatcaaattttcaaaccatggcttcctccaccaacgctcttcctcccaccggcaacggcctcatcgtgagcttcggcgagatgctcatcgatttcgtccccaccgtctccggcgtgtcccttgcggaggctccgggcttcctcaaggcccccggcggcgcccccgccaacgtcgccatcgccgtcgcgaggctcggcggaaaggcggcgttcgtcggaaagctcggcgacgacgagttcgggcacatgctggctggaatcctgaaggagaacgacgtgcgatccgacgggatcaacttcgaccagggcgcgcgcaccgcgctggcgttcgtgaccctacgcgccgacggagagcgtgagttcatgttctacagaaaccccagcgccgacatgctcctcacgcccgaagatctcaatctcgaactcatcagatctgcaaaagtattccattatggatcgataagcttgatcgtggagccatgcagatcagcacacctgaaggcaatggaagttgccagggaagcaggatgcttgctctcttatgacccaaacctgcggctacccttgtggccctccgccgaggaagcacgtcagcaaatactcagcatatgggacaaggctgatgtaatcaaggtcagtgatgtggaactggaattcctaaccggaagtgacaaaattgatgatgcatctgctctctccctgtggcaccccaatttgaagttgctccttgtcactcttggcgaacatggctctagatactataccaagaatttccatggatcagtggaggcttttcatgtcagcacggtcgacacaactggcgctggtgattcctttgttggtgctctattaagcaagattgtcgatgatcaatccgtacttgaagatgaagcaaggttaagggaagtactcaagtttgcaaatgcgtgtggagcaattacaactactaaaaagggagcaattcctgctcttcccacagaggctgatgccctcaacctgatcaaagaggcatagaaatttaatgctagtagcttttggttttctttatatatatgtcttcatccttttcctttcgcgttggacttgcttgctatcaacttcagatggattttgtttcttggttttctttgttttatttacccctcattctgcattaacggtaatatcatatgatttggggttttgccaaatgatttctttcaaattctgagattgagattattggttgaatgaaaatttgagtccttatcaggtcggtccac

SEQ ID NO: 148 - DNA, 1288 bp, Glycine max
  Clone ID: PAT_MRT3847_140375C.1
ggctcgagcttctatctctgcaattcaaacacaaaaaccatggcttccactaatgctcttcctcccaccggcaacggcctcatcgtgagcttcggcgagatgctcatcgacttcgttcccaccgtctccggcgtgtccctcgcggaggctccgggattcctcaaggcccccggcggcgcccccgccaacgttgccatcgccgtcgcgagactcggcggcaaagcggcgttcgtcgggaagctcggcgacgacgagttcgggcacatgctggccggaatcctgaaggagaacgacgtgcgatccgacgggatcaacttcgaaaagggcgcgcgcaccgcgctggcgttcgtgaccctacgcgccgacggggagcgtgagttcatgttctacagaaaccccagtgccgacatgctcctcacgcccgaagatctcaatctcgaactcatcagatccgcaaaagtattccattatggatcgataagcttgatcgtggagccatgcagatcagcacacttgaaggcaatggaagttgccagggaagcagggtgcttgctctcttatgacccaaacttgcggctacccttgtggccctcggccgaggaagcacggcagcaaatacttagcatatgggacaaggctgatgtgatcaaggtcagtgatgtggaactggaattcctaactggaagtgacaaaattgatgatgcatcggctctctccctgtggcatcccaatttaaagttgcttcttgtcactcttggagaacatggttctaggtactataccaagaatttccgtggatcagtggaggcttttcatgtcaacacagttgacacaactggcgctggtgattcctttgttggtgcactattaagcaagattgtcgatgatcaatccatacttgaagatgaagcaaggttaagggaagtactcaagtttacaaatgcgtgtggggcaattacaactactaaaaagggagcaattcctgctcttcccacagaggctgatgccctcaagctgatcaaagaggcatagaaatttagtgcttgtagcttttggttttcattttatatatatcttcatccttttcacttttgtgttggacttgcttgctgtcaacttaagatggattttgtttcttggttttctttgttttatttttaccgtattctgcattaacggtaatatcatatgatttggggttttgcataatgatttctttcaaattttgagattgttggttgagatgaaaaatttagtccttatcaggtcagcccaaaaaaaaaaaaaa

SEQ ID NO: 149 - DNA, 1585 bp, Glycine max
  Clone ID: PAT_MRT3847_140671C.1
ggctcgagaaacaaaacacacaaaccaattttaaataaccaaaaagaaaccacaagtttaaaaataaaaccgcaacaacatgattggtagttgagtacaacgcggcatgttataattggttgcaagatgttaccgaaggtttaatgcgacacgtggaccccattcactggttggaaatccagtttattctccaccctcacgcacgtaatcatatccctggagtcaagttcaagcatcgataggaccaaaaaagtaaaacagagaaaggggagggacatatttgacatttcacaaccgcgttcttttctacggagcctcgaccaagaagaatcgcagtgagaagaagagggggtcagagtgagaaagagaaagagagagagagagagaattcgtaaaccctaatttcggaaagatcggcgatgactgcctccaaggatcgcgagaacttcgtctacatcgccaaactcgccgagcaggccgagcgttacgaagagatggtggaatcaatgaagaacgttgcgaatctcgacgttgaactgacggtggaggagcggaatttgctttctgttgggtacaagaatgtgattggtgctcgcagagcgtcctggaggatcctgtcttccattgagcagaaggaagaaacaaaagggaacgagttgaatgcgaagcggattaaggagtacagacagaaggttgaattggagctatcgaacatctgtaatgatgttatgagagtgattgatgagcaccttatcccttcggctgcagctggtgaatccactgtgttttactataatatgaaaggagattattatcgttatcttgctgaatttaagtcacgcaatgagaagaatgaagctgctgatcagtctatgaaagcatatgagtctgctaccgctgcagcagatgctgatttaccttccacacatgccatccgattgggtctagctttaaatttctctgttttctattatgagatcttgaactcccctgaaagagcctgtcatcttgcgaagcaagcttttgatgaagctatttctgagcttgacaccttgaatgaggagtcatacaaagatagcaccttaatcatgcaacttctcagggacaacctaactttgtggacttctgacatcccagaagatggagaagatgcccagaaagtgaatggcactgccaagcttggtggaggtgaggatgcagagtgagtccgatggatgatggaatcttccataggattcgatgcatgcgtttgggaatgaaacatgagggccgattacttatctgtgtattagctagagatagggattctattgtttcctctttgtttcctgttggattgcccaatacttcccgataggggaaagagatactccatttgtgctatatttatggtatgtttttatttgtgtggtgtctggaaatggcctatttcattcccaatccgtttcctccagtctctgggggatttgattgatgagaattgcttatggtgggtgtatttccttttccaatgaaatgctacaacatttactgcaatgttggagattgattcttcgattgtttaatcttgacttccattctgacc

SEQ ID NO: 150 - DNA, 1979 bp, Glycine max
  Clone ID: PAT_MRT3847_140672C.1
aacatgaaataaatagggtaattttttttaactaagaatagggtcaatataattttattacgttttaaagaatatcaatgcaattaaccattcaaaatatcaacgatcaatagatttgttgcccaaacaaacaacacaaggggcaatgacacaatcatatctaactttgaattaatatataacttaatctaggaaagaaactattaaagaatgaccgcgtaaaatccaaagcacgaatcatcatcaatttatcatcatgcatgtattttcctccttccttcttgttcttggacaataatgttgcctcctcaaccacagcaagctgacttttgtgcaacttcccctgccgttgcctgatctttttggttgtcgattttaattcctgctggctctgccttagagtcagtgtcagcaagcctttgttttatatctcttgcaatagagaagaaaacttcctccacatttagatctgtctttgcacttgtttcaaagaatttgatgccatactcatcggccagtgcttggcccttggaggtaggcacaacccgtttgctttcatccatgtcagctttgttccccaccagtattttgttaacattatctgaagcatgctgctcaatgttacgaatccaattcctgatattgttaaatgaagattcgtctgtaacgtcatagactagcaatatgcccatagcaccacgatagtaagcagttgtaattgttcggaaccgctcctgacctgcagtatcccaaatttggagcttgagagaaagagagagagagagagagagaaactgagagaaattcgcaaaccctaatttcggaaagatcggcgatggctgcctccaaggatcgcgagaacttcgtctacatcgccaagctcgccgaacaggccgagcgatacgaagagatggtggaatcaatgaagaacgttgcgaatctcgacgttgaactgactgtggaggagcggaatttactttctgttgggtacaagaatgtgattggtgctcggagagcatcgtggaggatcctgtcttccattgagcaaaaggaagaaacaaaagggaacgagttgaatgcgaagcggattaaggagtacaggcagaaggttgaattggagctttcaaacatctgtaatgatgttatgacagtgattgatgagcaccttatcccttcggctgcagctggtgaatccactgtgttttactataagatgaaaggagattattatcgttatcttgccgaatttaaggcaggcaatgagaagaaggaagctgctgatcagtctatgaaagcatatgagtctgctaccactgcagcagaggctgatttacctccaacacatcccatccgattgggtctagctttaaatttctcagttttctattacgagatcttgaactctccagaaagagcctgtcatcttgcaaaacaagcttttgatgaagctatttctgagcttgacaccttgaatgaggagtcatacaaagacagcaccttaatcatgcaacttctcagggacaacctaactttgtggacttctgacatcccagaagatggagaagatgcccagaaagtgaatggcactgccaagcttggtggaggtgaggaggcagagtgagtccgattgttgatgggatcttccttaggattcgatgcatgcgtttgggaatgaaacatgagggccgttacttatccgtgtattagctagagatagggttccattgttttctctttgtttcttgttgattgccccatacttcccgataggggaaagagatactccatttgtgctatatttatggtatgtttttatttgtgtggtgtctggaaatggcctatttcattcccaatccttttcctccagtctctgggggatttgattgatgagaattgcttatggtgtatttccttttccaatgaaatgctacaacctttactgcaatgttggagatttattcttcgattgtttgatcttg

SEQ ID NO: 151 - DNA, 1273 bp, Glycine max
  Clone ID: PAT_MRT3847_141088C.1
gctgcgagaagacgacagaaggggaggaacgtgaaaggcatagcagcgttgatttcaccatcgctgtggttttctttttctctattgaggttgtcattgggagcactcaacctaaccattcaagttgtgaaaccacatcgcaagaaaattcacaagcgatggatccgaagctgaaagaggtttctcagctcttcgatcgcttcaaggcttcgtttctccggaacgacttcgataactgttccaatctcctttctcagctaaaggtgttacttacaggtttcagaagcctgccaccgttgtttgcagatacacctaatgcagttcatgaattaacaatagcaagggatatatatgagcatgctgttgtccttagtgtgaaaattgaggatcaagatgctttcgaaagggatttcttccagttgaagccttattatacagatgcctgcaatcgtcttccaccatctcctcaggagtaccctatactgggtctcaacctgttgagactacttgtgcagaataggattgctgagttccatactgagttggaattgctttcatctgctgctcttgagaatccttgcattaagcatgccgtggagttagaacaatcttttatggaaggggcttacaatcgtgtcttgagtgcacggcagacagtgccacatgatacatacgtttatttcatggatcttttggcaaagactgtcagagatgaaatagcaggttgcagtgagaaggcctatgactatctttcaattaaggatgccaagcaaatgttgctgttctcctcagaccaggaactcctggaatatattaaagaggagcatcctgagtgggagattaagaatgatagtgtctttttccaaaaggcaaaagaatctgcaccttgcaaagaaataccctctctgcagctcatcaaccagacacttagttatgctagggagttggagaggattgtctgagtcgaaatgcaatggcggcttttgtgtttccaaaatttttaggtgtctggataatagttactaatattttgaaattgttcatttctgattcaatatggaactataaaattgttcacctctgtattttgatcatttaggtggcagtatggttgcttatattttatttttcttgacttgtgctctggaaaaagaaaaactcttccgtacttatccacctttttatgttgaggattatatgattcatgaagctgtagtctaaatttcaaacccatagaaaggttcatatcaaattatggggatataatttctgg

SEQ ID NO: 152 - DNA, 1220 bp, Glycine max
  Clone ID: PAT_MRT3847_141090C.1
gatcatcgctgtggtttttctttttctctgttgaggttgtcattgggagcactcaacctaaactattcaagttgtgaaagcacatcacaagaaaattcgcaagcgatggatccgaagctaaaagaggtttctcagctcttcgatcgctttaaggcttcgtttatcaggaacgactttgatacctgttccaatctcctttctcagctaaaggtgttacttacaggtttcagaagccttccaccgttgtttgcagatacacctaatgcagttcatgaattaacaatagcaagggatatatacgagcatgctgttgtccttagtgtgaaaaatgaggatcaagatgcttttgaaagggatttcttccagttgaagccttattatacagatgcctgcaatcgacttccaccatctcctcaggagtacccaattctgggtctcaacctgttgagattacttgtgcagaataggattgctgaattccatactgagttggaattgctttcatctgctgctcttgagaatccttgcattaagcatgctgtggagttggaacaatcttttatggaaggggcttacaatcgtgtcttgagtgcacgacagacagtgccacatgatacatacgtttattttatggatcttttggcaaagactgtcagagatgaaatagctggttgcagtgagaaggcctatgactatctttcaattaaggatgctaagcaaatgttgctgttctcctctgaccaggaactccttgaatatattaaagaggagcatcctgagtgggagattaagaatggtagtgtctttttccaaaaggcaaaagaatctgcaccttgcaaagaaataccctctctgcagctcatcaaccagacgcttagttatgctagggagttggagaggattgtctgagaagaaatgcaatggcggcttctgttcccaaaatttctaggtgtctggataatagttgctaatactgtcttttgaaattgttcatttctgattcaatgtgaaactataaaattgttcacctctgtattttgatcatttaggtggcagtatggttactttttttttttaacttgtgctctgggttttccacttttttatgttgaggattatatgattcatgaagctgtagtctaaatttcaaacccatagaaaggttggttgatatcagtgttgccaaatagcggctatcatgctatagcatagtggttttt

SEQ ID NO: 153 - DNA, 280 bp, Glycine max
  Clone ID: PAT_MRT3847_141452C.1
ggggaagaatgaaacctttttgaaatgatgattatcaacccacaaaaaggaaattttccatatgaggatgatgaccatgatcttaattaaaaaaggggtttaaatgcaacgcccatccttggaaggggaacaaaaacaaaattttgtgcccttggaacaaggagggcgggtttttttttcatgctaactttgggggcaccaccctttaatatttgttcttggggacccagcacttgcaagttgaagcactgaataaaagatgcaagaagtgttgccattc

SEQ ID NO: 154 - DNA, 373 bp, Glycine max
  Clone ID: PAT_MRT3847_141685C.1
tttttaaacagcattaacatcatacaaagatggggaaagagcgtacacagtaattgaatacggaacacacatttgcacgacatgtttcttgagctgtagaattagaaataaacatacaatatacgtacaccgattggagggataaagaaatgatgtgcaaaaaccaaaggttgtctttatgcttctgaatatataggacctaaagttgcactatctcgtttgaaacgtatattcttacaaccttggtattcaccttgattgctgattgcttaaaccctattatacttggcctatatggaacatattgaagatgtgttaaaacctgtgcgatgagaattaaactatacttgtgcaaatcctatggataacaggg

SEQ ID NO: 155 - DNA, 484 bp, Glycine max
  Clone ID: PAT_MRT3847_14188C.1
gttacttgcggaaaaaagctccacaggcaaggaaaaaacaacaccgagccaaaacaagtccctatttacaccaaactagcctacatattaggccttcgtgtttctccacatcacaggagaatgggaatagggatgaagcttgtgaagaaaatggaggaatggttcagggataacggggcagagtatgcatacatggctacggagaaggacaacgttgcatccgtcaagttgttcaccgacaaatgtgggtactcaaagtttcgtaccccctgcattctcgcgaatcctgttttctcgcatcctgctagaatctctcacaaagtgactatcattgaactctctccgagcgatgccgaaatactctaccgcagcaagttttccacaacggagttcttcccgcgcgacgtagactccgttctccgtaataagctctccttaggcacttttcttgccgtccccaaaggcttgtaccgggctgacacgt

SEQ ID NO: 156 - DNA, 535 bp, Glycine max
  Clone ID: PAT_MRT3847_141898C.1
acgtaagctcggaattcggctcgtgtcacaaatgtaaaaaaataataaaaaaacccgagaaagagtgaagtagaaataaaacctaggaaattaaggataatggaagtagcaaaggtactgcacatgaacggtggcgttggagacgcaagctatgcaaacaactcctttgttcagcaaaagttgatttgtttgacaaagcccttaagagaagaagccataaaaagcctctattgcggcacactccccagaaggttggcaatggcagatttgggttgctcttctgggcaacatgctttaattgtcgtgtcagacttcatcaaaactgtggagaagctttgcctagaattgaaccataaatctccggaatacaaggttttttttaacgatcttcctgggaatgacttcaacaacatatttaagtcccttgacagcttcaaacagaagttgtgtgaagaaatggaaagtgggattggtccatgctacttctttggtgctccaggttctttctatggcaggattttctcaaaccaaagtg

SEQ ID NO: 157 - DNA, 238 bp, Glycine max
  unsure (1)..(238): unsure at all n locations
  Clone ID: PAT_MRT3847_141941C.1
tgctcgtatatgtacgttgtcattggttgntgatgtttggtacaaccaattcatgtgtttccgttatggatggaatttaccccaaagtttttgagaattctgatggtgcacgaacatcaccatctgtggttgctttctaccagaaaggggagcttcttgtaggttccccagctaagcgtcaagctgtaactaacccaacaaacactctctttggtaccaagcgtttgattggtaggcg

SEQ ID NO: 158 - DNA, 520 bp, Glycine max
  Clone ID: PAT_MRT3847_142333C.1
ccacgcgtccgcccacgcgtccggaatgatgcagcattgcggcccttggccaagtgctctgaactgctcgtactgaaattaggcctgtgctcaagtatttctgacaaaggtcttgcttttatcagttcaagctgtggaaagctgattgagcttgatctctatcgctgcaattctattaccgatgatgggctggcagctttagctaatggctgcaagaagattaagatgctaaacctatgctactgcaacaagattaccgacactggtttgggccacctaggctctctagaggagctcacaaaccttgaactgaggtgcttggtccgcataacaggtattggaatctcatcggttgccatcggctgcaagaacctgatagagatagacttgaagcgttgctattctgtcgatgatgctggcttgtgggctcttgcccgatatgcgctaaaccttagacagcttactatatcctactgccaagtcactggcctgggcctgtgtcacctgttgagctccctga

SEQ ID NO: 159 - DNA, 590 bp, Glycine max
  unsure (1)..(590): unsure at all n locations
  Clone ID: PAT_MRT3847_142358C.1
ccacgcgtccgggcttcctgcaggatggcactcctccttggcttgctgctgctagtagtagcttcgcccgcgatcgctgatgacgactccggtatctactaccagctggctcttatgtggccaggagcatactgcgagcagaccagcgctgggtgctgcaagccgaccaccggcgtctcgccggcgcgcgacttctacataacgggcttcaccgtccttaacgcgaccaccgacgctgcagtgacgggatgcagcaacaaagttccttacgaccctaacctgattaccggcatccaaggcctgaatcagtactggagcaacatcaggtgccccagcaacaacgggcagagcagctggaagaacgcctggaagaaggccggcgcctgctccggcctcagcgagaaagactacttcgagactgccctctccttccgtagccggatcaacccactcgttcgcctcaaagccaaaggtatcgagccggacttcgggctctacggcctcaaggcgatcaccaaagtcttcaagagcggcatcaacgcgacgccggtgatccagtgcagcnaggggcccttcgacaagtacatgct

SEQ ID NO: 160 - DNA, 484 bp, Glycine max
  Clone ID: PAT_MRT3847_142490C.1
ttagccgagagaggaggcgccgtatagataaaactacagaaattggagaatggaagtagcacaggtactgcacatgaacggtggcgttggagacgcaagctatgcaaacaactcctttgttcagcaaaaggcgatttgtttgtcaaagcccataagagaggaagccataacaggtctctattgcaacacagtcccgagaagcttggcaattgcagatttaggttgctcttatggaccaaacactttgtctgttgtgtctgaattcatcaaaactgtggagaaactttgccggaagctaaaccataaatctccagaatacaaggtctttctgaatgatctccctgggaatgacttcaacaacatctttatgtcccttgacaacttcaaagagaaattgtgtgatgaaattgaaactggggttggtccatgctacttctttggggttcccggttccttctatagcagggttttcccaaatcaaagt

SEQ ID NO: 161 - DNA, 632 bp, Glycine max
  Clone ID: PAT_MRT3847_142514C.1
tccgggaaaacagtgtacaagagtacaaccttttcaactccgaaggcgagccacgatgtcaggaagaggaaagggaggcaagggtttgggaaagggaggagcgaagaggcaccgtaaggttctgagggacaacatccaggggatcaccaagcctgcgattcggcgcttggcgaggcgtggcggcgtcaagcgtatcagcggtctcatctacgaagagacacgtggcgttctcaagatcttcctcgaaaacgtcattcgcgacgctgttacttacaccgagcacgctcgccgcaaaaccgtcactgccatggacgttgtttatgccctcaaaagacagggcaggaccctttacggtttcggtggttagttaggacattatggtaggctcttactcttattagtatcgaatcatatgttgctagatggatcttcacattgtaatggctgttgttgtttaatttctgttcccagcttatttttcttttagccgcgcttattaactgatcacttcttttgagtgataatgtgactagagatttttatttatttatttatttctgggtattgcgaacttgagggtggaaacattattataaaatgaaaaggaagtgcgtcgccgtttgcattgaatc

SEQ ID NO: 162 - DNA, 541 bp, Glycine max
  Clone ID: PAT_MRT3847_14254C.1
aaacaacacactgaactctcttcactgaaacgacacacacaaaaaaaagctttagtttaggatgacccaagtgaggaacaagcaagtggttctaagagattatgtcaccggattccctaaagaatccgacatgaacattgttgaaggcaccataatattgaaggttccagaaggttccaatgatgtccttctaaaaaatctctacttgtcatgtgatccatacatgcgactcctcatggccaaggaccgttctttcggagatggctccttcacccttgcctctccattgaaaggatatggtgtgtctcaagtgctggaatctggacgtccagattacaagaaaggtgatttagtgtgggggattactaaatgggaagagtatagcttggtcccctcatctctcatacatttcaaaattgagcacactgatgtcccactttcctactacactggaattcttggtatgccaggaatgactgcttatgctggtttctttgaggtaggttctcccaaaaaaagagacactgttttcgtttcagct

SEQ ID NO: 163 - DNA, 1886 bp, Glycine max
  Clone ID: PAT_MRT3847_142712C.1
ggctcgagaaaatatctctctctcgaaaagctagtttccccaattattgtgtcaactacataagctgggttcgtgccgtttcccccatctggggttggcttccttctgggtttttccgtttccggggatactcctctttctcttcaaatggaatgggtttctaggtttggattaggagaccacatccttttctgttggcttactggctgagggggtgtgtcttttcctccagttgtggagagaaagctgcattttgttccatggattattgttttgctccggctacttctgatggggctgaagtaatatgggaaacgagtcccgtgcaaatgcttcttgattatatgcttctcagcggctccaccagtccacgaatgtcctgctcagcagttctccatctgacaactcttcaaagagagtgtgtaactagtaataactgtgtatttgtgtgtatgtttttatgatcatataataatagatatgtttttggcatgccagttatgagtgctactattactactactactaccttaaactagaacaatgaacaggggaattgaagttctttctccagcctcatacctccgaagttccaattggctgttccaagaaagcttggggaccaggtggactccacaggagaacaagctctttgagaatgctttggctgtgtttgacaaggacactccggaccggtggctgaaggtggcggccttgattcccggcaagacggtcggcgatgtgatcaaacagtatagggaacttgaagaagatgtgagtgtcattgaatcagggtttattccacttccagggtacactgctgctgattcctttacattggagtgggtcaacaatcaaggatttgatgggctcaggcagttttatggtgttactggcaaaaggggtgcttccactagaccatctgagcaggagaggaagaaaggtgtgccatggactaaagaggagcacaggcaatttctgatgggtctgaagaagtatggtaaaggagactggagaaacatctctcgcaattttgtgaccacaagaacaccaactcaggttgcaagtcatgctcagaagtatttcatcaggcaactaagtggaggaaaggacaagaagagatccagtatccatgacatcacaatggtgaatctcccagaagcaaaatctccttcatcagagagtaacaacagaccctattcaccagatcactcagtgaaggatgtgaatccaccatcccagaatcaaagattgtctactactatggtaattaaacaggaacatgattggaaattgccatgtgaaactgtgcctatgcttttcaattccacaaatggaaacatgttcatgacaccactttgtgggatttcttcatatggatctaaaccacttcaggagcagtatttcctcagtggatgccagtttggaccttatgatacaattatgcaaatgccgtccatgcaaaatcaatgaactatatagaatgcagggattaaagttaaggtactaaaatgctaaaccttattcattgatgttggattgatttttagatgcttaagggtggttttatgtaaatatttcaaggattcacgagtttccttatcactcaatctttgaagagccttcatattgtattctgatattaaatgtgctggcaccaaagatgcaatatcagagtttggcagtgatatgcatcttccacctaggcagaaaggattatctgtaaaacgtataggacgagaggagttaccttgagtttgtgattattcacttttttttaaatgcttgatgcttcaaataaatataggcctttgcagctttgctaacgaatgcaagtttttattagaattcaattttgaagatgcattgtgtactaataatatact

SEQ ID NO: 164 - DNA, 820 bp, Glycine max
  Clone ID: PAT_MRT3847_142931C.1
ctcgagccgaatcggctcgagctcaacttggcatggtatcaggcatcttacttcagatcttctatggccttattggaagctggactgcttatctagtcagtgtcctctacatagagtacggctcgaggaaggaaaaggaaaatgtcagcttcaagaaccacgttattcagtggttcgaggtccttgatgggttacttggtcgatattggaaagcagtggggctagccttcaactgtactttcctcctatttggatctgtgatacagcttatagcatgtgcaagtaacatctattacataaacgacaaattgtataaacggacatggacttatatttttggagcttgctgtgcattcactgtgttcataccttccttccacaattaccgtatatggtcttttttgggccttggaatgaccacttacacggcttggtaccttgctattgcagccatccttcatggccaggtagaaaatgttacacactccggtccaacaaagctaatactatacttcactggagccactaacatactctacacgtttggaggacatgctgtgactgtggagattatgcatgccatgtggcagccccgaaagttcaaatccatctactttctggccactttgtacgttttcactctaacgatcccttctgccgtcgccgtttattggtctttcggtgatcagctccttgaccactcaaatgcattctctctgctccccaagaatgttttccgtgacgccgccgtcatcctcatgctcattcaccagttcatcacatttggatttgcgtgcaccccattatatttttgtgtggg

SEQ ID NO: 165 - DNA, 165 bp, Glycine max
  Clone ID: PAT_MRT3847_143114C.1
ggccggtcggctctccgaaccctacaagggcattggagattgctttggcagaacaacgaaagacgaggggcttgtttcattgtggagagggaacactgctaacgttatccgttacttcccaacacaggccctgaactttgcatttaagactaatttaagaaagct

SEQ ID NO: 166 - DNA, 1388 bp, Glycine max
  Clone ID: PAT_MRT3847_143255C.1
aagcaaagcacaaccacacttgaacctcataagcggagccacccctccctgcccccaaggaataactcttccgacagcaaccctgttcgtttataaccatcaaccaccttaaaccctgggtagctagctttttttttcattattgtgtcggcaatcggttgaggaaaaaaaaaacacagaggagggtgcaaaaagcagggtggtggatgatggaaggggtttcgagggaggctcagatgtcgattgctgcttcgtccatgtttcctggattcagattctgccctaccgatgaggagttgatttcttattacctgaggaagaagttggagggtcatgaggagagtgttcaagtcatttctgaggttgagctttgtaaatacgagccttgggatttaccagccaaatcattcattcagtcagacaacgaatggttcttcttctctccccgcggaagaaagtacccaaatggttcacaaagtaaaagagcaactgaatgtggatactggaaggcaactggcaaagagcgtaatgtaaagtcaggttccaacattataggaacgaagcggactttggtgttccacttagggcgtgcacctaaaggggaaaggactgaatggattatgcacgagtactgcattaatgacaaatctcaggaatctttggtcatttgtcgcctcaagaggaacacagagttccgtttgagcgatgcttcgaatagagcttcatcaagtcaaaggcatccggtgaattcacatgaaagtggttgtgctatctcaggaggtggtattgatcaaagggatgcttgtgagcaagacaaagaggttggatgtagctccaagagggacagtagcagttatggttctccttcaatggagcaaattgattctgtgtccgaatcgaatcagcgaccagttaacgaagctactttcactgaatcttcaggtcaaccaaaggaggggtatgaagaggattgttatgcagagatactaaaggatgatatcatcaaattagatgaatcatcagtcttggtagagagtcacacaagaccacaggatcctacacagatgcaacctgcaccacaaggcacagcacaacggagaataagattaagggttgggaattcaaagcattctcgtgcagtagttcgtttcccaagcacaatgcactcatcaaagaataccttctttgccagaacaaccaacagtttggtggtattagctttcttcgttttcactttgatggttctatattttttgtccttagtgagaggacaaaaacaagacaagtattgtggggaattttcgggtgtaaatcatgattagtgctacacaaagcgtaggcaatttgttaaactgcttctttcctattaatatgttgcattagcctta

SEQ ID NO: 167 - DNA, 305 bp, Glycine max
  unsure (1)..(305): unsure at all n locations
  Clone ID: PAT_MRT3847_14659C.1
ggtttaataaattatgggccttggttccaaanataaaaaaaaaaaaaaaaaaaaaaaaaaaaaaaaaaaaaaaaaaaaaaaaaaaaaaaaaaaaaaaaaaaaaaaaaaaaaaaaaaaaaaaaaaaaaggggggggggttttaaaggatcaaagttaacgtacgggggaatggaaggaaatagtttttttatagggccacctaaattaaattaatgggcggtggtttaacaaggtggggatggggaaaaccttggggttaccaaatttaatggcttggaagaaaatccccttttggcaagttgggg

SEQ ID NO: 168 - DNA, 213 bp, Glycine max
  Clone ID: PAT_MRT3847_14773C.1
accacgcgtgcggccacgcgtacgctcacacctaactatgtattacggagcctcagggcagaatggtgtgaagccaatggcatatagccaccaaaacgacctaacgattcacaacctaataaaataacatcaagctactcttctggttagcaaaataagattgaaaggcttctacaaaagctcacatgagtgagtactgaagaccagagatca

SEQ ID NO: 169 - DNA, 268 bp, Glycine max
  Clone ID: PAT_MRT3847_14878C.1
ggctcgagcgcaactcagatggccttggatgcctgaatgtggacgacactaaagcagcccagccatgcacgcaccattttaaaagccaacacagaaagcacagaaccaccacagtggtgccttcctctgaacgataaattcatgggattctgaaactagtgatacatttttttgcatgaaggcagcttgttgaggaatgcaattagtgtattggaagatctacgtcaacatgtcttatgtaagcaacggtggaaggcaggcttccatt

SEQ ID NO: 170 - DNA, 636 bp, Glycine max
  unsure (1)..(636): unsure at all n locations
  Clone ID: PAT_MRT3847_1499C.1
tcgcatgccaccgccgtaccgtaagcctgtgnattgcctctagaagcggcgcggccctctttccttttttttttttttttttttttttttttttttttttttttcaaaaaaaaaaaaacttcagggcccttaataaaataggcattttggaaaacccttgaaaaaagggagggacaaactaaaccggcccagtccttccacatttcataacaaacttgagggcctaaaatcccagtcccaaagagattttaccaacaaaccccttttcctttaaaaaaaatttgggggaaaagttcatttttaattaccagaaaaatatttttactggccatccggtttcggggctgcttttttaatttaatctgctccatcgccctgcatggcaaaggcccaaagggggaggttatcacaaaggagttgcatgaccaaagggctatccttgaatgactcctctcccagggtatccaattcagcaatagcttcatcaaaaccctgttttgcaaggttgcaggcccaatccggaaaattaaggatttcgtagtaaaatccaaaaaagttaaaagcagggccaaccctatttggatgagtagggaggcagttcggcattccaaatgtcctgtgcggttttttatgcaa

SEQ ID NO: 171 - DNA, 494 bp, Glycine max
  unsure (1)..(494): unsure at all n locations
  Clone ID: PAT_MRT3847_15347C.1
aagaccgccagtatgcattagccgagatttgatcaatactgacagttgtgtgtgaaactcatagtttgcctctggcacaaacatgggttccatgtaagcatcggagtgtcttagcacatggcggtggtcataagaaaagttgctcaagttttgatggatgttgcatggggcaagtttgcatgtctataactgaggtagcattctatgtaatagatgctcatacatggggttttcatgaggcctgtgttgagcatcacttacaacaaggtcaaggagttgctgggagggcatttttgtcccacaacatgtgcttctgtggaaacatcgcccaattctgcaaaactgaatatcccttagtacattatgcactcatgtttggtttaaccagctgttttgcagtntgcttacaaagctctcataccggaaaagatgattatgtgctagagttttttctgcctcctgggatcacagactttaatgaacaaatagattgt

SEQ ID NO: 172 - DNA, 1059 bp, Glycine max
  Clone ID: PAT_MRT3847_15380C.1
aggagagttgtctctcttctcattaatagaaatcagcatggcatatctgatagatcaatcagctatgccaatgatttgaaacataaccaaatttggctttccgaaatagaagaggaagccaaaaaggggatacctcttgatatgtacctcattttaggagttgaacattctgtttcgtcatctgaaatcaagaaggcctatcacaaagctgcacttagacatcatccagacaaggctggccaatctttggcaagaagtgacaatggagatgatcagatatggaaggatattgttgaagaaataagcaaagatgccgataggcttttcaaaataattggagaggcatatgcagtcctgtcggacactgccaagcgttcacagtatgattctgaagaagaaatgagaaattcccaaaagaaacgccatggaaacagcatcaatagaaataatgtcattgatcaaactgacaataggagacactggaaagaggtttgaagatcaagtggtaactcatcttttaaagattctgaagctggcaggtcaagtaggcaataagaaaatctgtgttgaattttagtcagtgatgtgttttatcttatgcatttgagaccaatggcaatgcagttgaacaagctcggttcatcggttcttgggatttctttgggatattggaagaatttttcttttgacatgcgaaagagatcattggttgcattcgattgttgttttgttttttgtttttttttctactgaccattaatcagcttggatgacagcaagcaagtgaaaaggaagtttgaaattttgcattctgtctggtttgtcaggtgtgtaaagattttttttttttctttcttgaatgtgtgtatagatctatactatcagaaagttgataccgcatttgcatttgtgtaataccacatgaaaaattttgatgaccggaacatgtgctgccaaagatagagtacatttacattttagcaggaacaacataatttatatctatataaaaattatctagccgtcaaaaacccgaaacagaccaccagagcggggatc

SEQ ID NO: 173 - DNA, 2319 bp, Glycine max
  Clone ID: PAT_MRT3847_15714C.1
cggaattcccgggatcgacccacgcgtccgctagttcgtgctactattccactccacacaaataaaccctataaattctcactctccctcttttctctctcacactaataccaaactctctgaaaacaaaacctcatcatcatctaactcattcacatttttctctatcatctcgtttctactgtttcctcatggacactaacattggatctctatccctcgacgcgtgcaagcctgctaacaacgacgtcggttgtcccccgaacggagccgtttcagcaatcaaaccctccgtccccgcaaccacgatgacgtcctcggatgccacgctaggacgccacctagcacggagactcgtgcaggtgggggtgacagacgtcttctccgtgccgggtgactttaacctcaccctcctcgaccacctcatcgcggagccgcagttgaaaaacataggatgttgtaacgaactcaatgccgggtacgctgctgacggctacgcgcggtgcaggggcgtgggcgcgtgtgtcgtcacgtttactgttggaggactgagtgtaatcaacgcgattgcgggcgcgtacagcgagaatcttccgctgatctgtattgtgggtgggcccaatacgaacgattttggtaccaacagaatcttgcatcacaccattggattgtccgatttcagccaggagctcaggtgcttccaaacagttacatgctatcaggctgtggtgaataacatagaagatgctcatgaattgattgatactgcaatctcaacctgcctgaaagaaagcaagcctgtgtacataagcataagttgtaacttgcctggcattcctcaccccacattcagtcgcgagccggttccattttctctgtctccaagattgagtaacaagatggggttggaggctgcagtggaagcagcagcagagttcctaaacaaggcagtgaagcctgtaatggttggaggtcctaaactaagggtggctaatgcatgtgatgcatttgttgagcttgctgatgcatgtggctatccatttgctgtgatgccatcagccaagggactagtcccggagcacaaaccccacttcattggcacattctggggtgctgtgagcaccgcattctgtgctgaaatcgtcgaatctgctgatgcatacttgtttgctggccccattttcaatgactacagctctgttgggtactcactcctcctcaagaaggagaaggccatcatcgtgcagccggagcgcgttgtgatctccaatggacccgcattcgggtgtgtcctcatgaaggacttcctcagggaactcgcaaagcgtctcaagcacaacaacactgcttatgaaaattactcaaggatttttgtccctgagggaaagcctgtgaaagctgaacccagagagcctttgagggttaatgttctgtttaagcatatacaagatatgctgtctggcgaaaccgcggtgattgctgagacaggggactcttggtttaactgccagaagctgaagttgccaaaggggtgtgggtatgagttccaaatgcaatatggttcaattggttggtctgttggtgctacacttggttatgctcaggcggttcctgagaagcgagtgatttcttgcattggtgatggaagctttcaggtgacagctcaggatgtgtccacaatgctgcgaaatgagcagaagaccatcatcttcctgataaacaatggtggatacaccattgaagttgaaattcatgatgggccatacaatgtgattaagaactggaactacactggcttggttgatgcaatccacaatggtgaaggaaaatgctggaccactaaggttacatgtgaagaggagcttgttgaggcaattcagacagcaacaggtgacaagaaagattgcttgtgcttcattgaagtgattgttcacaaggatgacacaagcaaagaattgcttgaatggggctcaagggtttgtgctgctaacggtcgtcctcccaatcctcagtgaatttcaaacacttaattgagccattacaaatttgctggagtttctccctatttcaaacacttactcttgctgatagaaaaaagaaaatagaacaatttaatttcatgttttatttaacaaagacaataactaccatgagatttacttatatttatttttaaataaaattgagttttttaattagctttcgtacgagagaaattttccttttggaaatgctttttcagtttatctaaagtgttcaaatgagtgcactagattttagtaaatttctcatgggacaaaagttatcatcaatttttcc

SEQ ID NO: 174 - DNA, 229 bp, Glycine max
  Clone ID: PAT_MRT3847_15851C.1
cacacaactactacaagtacttccttaccatcaaaaccaacaacaactatggcaagttatcaaaagcactacgatgatcagggtcgcaaggttgacgagtatggcaaccctgagaagcacacccgcgaatacgggaaccctgttcatgctggtagtggcacctatgttgcccccataactggtgctggtggtttcagaggtgacatttataagccccctgattcccccc

SEQ ID NO: 175 - DNA, 721 bp, Glycine max
  Clone ID: PAT_MRT3847_15920C.1
gtaaattaatttctcgtatcgaaaatcatttccaccaccacaatttttttttatttccgtttactaaagattagtaagatcacaacactaacacagattttgattcgattcgattcgattcagtcgaggttttaagcagcagcaagatgtctgggcgtggaaagggaggaaagggattgggaaaaggaggagcaaaacgacatcgtaaggtgctccgcgacaacattcagggaattacgaagccagcgattcgtcgtttggctcgcaggggtggcgtgaagcgtatcagcggtttgatctacgaggagactcgcggtgttctcaagatcttcttggagaatgtcatccgtgacgccgttacttacacggagcacgctaggaggaagaccgttacggctatggacgttgtttatgcgcttaagaggcagggaaggaccctctacggatttggtggttagggtttttgcttgattttcctcgccagggaaaagtcttgctgtcaagaaaaacaaacgaggcatggattggggtagtttttttttattttttatggtggtgtttgtagtgaatggggaaaattaggagcaattttatgcttacttgttggtgtcaattatgtgatgtaactactccgttgaaatgtagaattattttggcttttaaaaatcgtttcgtaaatcaatttatagtttctatttaagttaaaaaaaaaaaaaaaaaa

SEQ ID NO: 176 - DNA, 1287 bp, Glycine max
  Clone ID: PAT_MRT3847_16358C.1
cggaattctagctccgatctcacgaaattgctcgaatcttagggctgaagcaatggatgtcgattcctcgatggtgccggagaccgatcacgatcccgccgtacagaaccacgccgccgatgacccggcgccggacgcggcggagggagaacagctaggggagccgccgtcgtccggaggcggatctccggagcagacgcagccggcgcctgcttcggcgccgcagagtccggtggtcggaccgaggctggcgcctagttacacagtggtgaatgcaattttggagaagaaggaggacggaccggggccgaggtgcggccacacgctaacggcggtggcggcggtcggagaggaggggaccccagggtacattggtccgaggttgattttgttcggcggtgccactgctcttgaaggcaattccgcggcgacagggactccttcatctgctggaaatgctggcatacgtttagcttgtgccacagctgatgtccattggtatgcacgcgtccgtaataaatggtctaggataactcccattggcgagcctccaaccccaagggctgcacatgtggcaactgctgtgggtaccatggtagttattcagggtggcattggccctgctggtttgtctgcagaggaccttcatgttcttgatctcacacagcaacggccacgatggcatagagttggtgttcctggccctggaccgggaccacgctatggacatgttatggctttggtggggcagaggtatctcatggcaatcggaggcaatgatggaaagagacctttggctgatgtatgggccttggacacagccgccaagccttatgaatggcgcaagttggagccagaaggagagggtccacctccatgcatgtatgcaactgccagtgcacgctctgatgggcttcttctgctttgtggagggagggatgccaatagtgttccattgtcaagtgcatatggacttgctaagcatagagatggtcgttgggaatgggccattgcccctggtgtctcgccatctccaagatatcagcatgcagcggtatttgttaatgcaaggctccatgtgtctggtggggcccttggaggaggacggatggttgaagattcatcgagtgttgcagtgttggacactgctgctggtgtttggtgtgataccaaatctgttgttaccagtccaagaacgggtagatacagcgctgatgcagcaggtggagatgctgcagttgagttgacacggcgttgtaggcatgcggctgctgctattggcgactt

SEQ ID NO: 177 - DNA, 239 bp, Glycine max
  Clone ID: PAT_MRT3847_16403C.1
ccctgttcatgctcctagtgtcacctatgtagccaccagaactgctgctcgtggttacagtgatgacattaataagcaacatgataccaccaatgcctacggcgtagacactgttagaagcatttctatggtggcttcgatggtgacactaataaacctcatggaattactggtgggtataatgatgactccatagaccttatgggactcccggtgtcttttgtataaaccccgatagg

SEQ ID NO: 178 - DNA, 500 bp, Glycine max
  Clone ID: PAT_MRT3847_16414C.1
ccacgcgtccgaattcttccaaaagaaactcctgataaatataaaaaggagggaaaaagaaaaacacttgcagcggcatccatcatcggtctatccctccgtgtcaaccccctcctcagaagttctaattgcagttcagcccctggccggtccgccgggccaccggaaggagccgctcgccggaggaagccccccatctccttgccctgcggcgggtttatggggttctcgctgtaccccatgaagacgtccacgcggttgctctggagcactagcttcttccgccataagctcagctcctcctcctgcttcctctgagcccgccccacccgcgtcgatcacctcggcggcggcccgctgttgctgcgcggtcctagcacccgttcgagtgtgtgtgtttgtgttctttgagtttcaagattgggttttggtgcgttcttggggagacgaagggactaaggcgcagtgagcggacaagaatcagcatggatccgagcgcg

SEQ ID NO: 179 - DNA, 2155 bp, Glycine max
  Clone ID: PAT_MRT3847_16575C.1
taccggtcgcgaattcccggctcgacccacgcgtccgcaaagacacattctttcagcctcccttcaacacccttttggcccttcattcttccaagtctcaaatcgaagctcgaagacctgcgaagaacaaagggttgtttaaattctgtgtggttgttgttggaggttgaaatacaagttgccgcctcaagtgtgtgttaatcttaaatttcacaagcaagttgtatttttggagtattgtattatatgaccaaatattttagtgttttaggactagatattttgcttctggtggcaatttttctcttctccttctggttctcatcttttgtgttcttctttgtttctcacctttctgaggatttttccatcttagttcctggaggcaccaggaacctgaccaaataaataaaccttttttttcttctaatttttctgaagtttcattttttagtccaatggcaacttggatattatcagaatgtggcttgaagcctcttgctccagtaattcctagacctagaactggggctgctttgtccagcacctcaagggttgaatttttggacacaaacaaggtagtggcaggtcctaagtttcaacctttgaggtgcaacctcagggagaggaattgggggctgaaagtgagtgcccctttgagggttgcttccattgaagaggagcaaaagagtgttgatttaaccaatgggactaatggggttgagcatgagaagcttccagaatttgaccctggtgctccgccaccattcaacttggctgatattagagcagccattccaaagcattgctgggtgaaggacccttggaggtccatgagctatgtggtgagggatgtgattgctgtctttggtttggctgctgctgctgcgtatctcaataattggttggtttggcctctctattgggctgctcaaggcactatgttctgggctctgtttgttcttggtcatgattgtggtcatggaagcttttcaaacaactccaaattgaacagtgttgttggacatctgctgcattcttcaattctagtgccatatcatggatggagaatcagtcataggactcatcaccaacatcatggtcatgctgaaaatgatgaatcatggcatccgttgcctgaaaaattgttcagaagcttggacactgtaactcgtatgttaagattcacagcaccttttccacttcttgcatttcctgtgtacctttttagtaggagtcctgggaagactggttctcactttgaccccagcagtgacttgttcgttcccaatgaaagaaaagatgttattacttccacagcttgttgggctgctatgttgggattgcttgttggattggggtttgtaatgggtccaattcaacttcttaagctttatggtgttccctatgttatattcgttatgtggttggatttggtgacttatttgcaccatcatggccatgaagacaaattaccttggtaccgtggaaaggaatggagctacctcaggggtggtctaactactcttgatcgtgattatggatggatcaataacattcaccatgacattggcactcatgtcattcatcacctatttcctcaaattccacactatcacttagttgaggctactgaggctgctaagccagtgtttggaaaatattatagagaaccaaagaaatcagcagcacctcttccttttcaccttattggggaaataataaggagcttcaagactgaccattttgttagtgacacgggggatgttgtgtactatcaaaccgactctaagattaatggctcttccaaattagagtgaatattaaaattcttttctatatagacaagagaggcttatacacaattcttattgctttaaagattgtcttgagtttctccgaaagttactgcacttacttggagttgaatccttcattaataaagggatggatggatcatataatttcaattgtaactgcatgatagaatgtttaggttatatgtagttttatctttcttgaatagtgaattcctcaatataaattgattatattgaagtgataccttgaggcatgatcaaattgtcaatgtgtttgatcaaaactgaaagatctcgattaaatagaaatttaaaatagattttgttttgtagcc

SEQ ID NO: 180 - DNA, 2182 bp, Glycine max
  Clone ID: PAT_MRT3847_16577C.1
ggctcgagcgaagataccttctttcagcctcccttcaacacccttttggccctttattcttcaaagtctcaaagcaaagctcgaagacctgagaagaacaaagggttgattaaattctgtgtggttgttgttggaggttgaaacacaagttgccaccccaagtgtgtgttaatcttaaatttcacaagcaagttgcttttttggagtattatattgtatgaccaaatatttttgtgttttaggactagatattttgcttctggtggcaatttttctcttctccttctggttctcatcctttgtgttcttctttgtctctcatctgtctgaggatttttccatcttagttcctggaggcaccaggaacctgacccaataaacaaacccttttttttctttctaatttttctaaagtttcattttttaatccaatggcaacttgggtattatcagaatgtagcttgaagcctcttgctccagtaatccctagacctagaactggggcagttttgtccagcacctcaaaggttggatttttggagacaaacaaggtattggaaggttctaagtttcaacctttgaggtgtaaccttagggagaggaattgggggttaaaagtgagtgtccctttgaggattgcttccattgaagaggaggagcaaaagagtgtcgatgtaatcaatgggagtaatggggttgagcatgagaagcttccagaatttgaccctggtgctccaccaccattcaacttagctgatattagagcagcaattccaaagcattgctgggtgaaggaccctttgaagtccatgagctatgtggtgagggatgtcattgctgtctttggtttggcttctgctgctgcttatctcaataattggttggtttggcctctctattgggctgctcaaggcactatgttctgggctctgtttgttcttggtcatgattgtggtcatgggagcttttcaaacaaccccaaattgaacagtgttgttgggcatctgctgcattcttcaattctagtgccatatcatggatggagaatcagtcataggactcatcaccaacatcatggtcatgttgaaaatgatgaatcatggcatccgttgcctgaaaaattgttcagaagcttggacactgtaacacgtatgttaagattcacagcaccttttccacttcttgcatatcccgtgtacctttggggtaggagtcctggcaagactggttctcactttgaccctagcagtgacttgttcgttcccaatgaaagaaaagatgttattacttccacagcttgttgggctgctatgttgggattgcttgttggattggggtttgtaatgggtccaattcaacttcttaagctttatggtgttccctatgttatattcgtcatgtggttggatttggtgacttatttgcaccatcatggccatgaagacaaattgccttggtatcgtggaaaggaatggagctaccttaggggtggtctaactactcttgatcgtgattatggattgatcaataacattcaccatgacattggaactcatgtcattcatcacctatttcctcaaattccacactatcacttagttgaggctactgaggcagctaagccagtgtttggaaaatattatagagaaccaaagaaatcatctcctcttccttttcaccttattggggaattaataaagagcttcaagactgaccattttgttagtgacaagggggatgttgtgtactatcaaactgactctgagattaatggctcgtccaaatcagagtgaagattaaaattcttttttatatagacaagagagacttatacacaattcttattgctctaaagattgtcttgagtttcttacttagagttgaatccgtcattaataaagggatagatggacggatcatataatttcaattgtaactacatgatataatgtttaggttatatgtagtttatcattcttgaacagtgaatcctctgtataaattgattatattgaagtggtaccttgagtcatgatcaaattgttaatgtatttgatcagaactgaaagacctcgattaaatagtaatttaaaataaattgttttatagaatgttgcggtgttttcttaccagttaccatcccctatttaatttatatactccctattttattcttcaaaaa

SEQ ID NO: 181 - DNA, 1662 bp, Glycine max
  Clone ID: PAT_MRT3847_16889C.1
tataatagcagtttaagaaattgaattggacaaagagcgccgagtaattaatgtgaaaggaatgaatgatttttgtattgcaaaataaattagtgtacttcacatgacggattttcacgagcaacaataagcatagagagaaatttggcattgcagtgcatcatcgcattgattgagttggaagatgggtagcaaaggcaaacgcaaagagcaagaatcaataataacgagggttatggctcacggaggtagatacgtgcaatacaacgtgtacggaaacttgttcgaggtctcctccaagtatgtccctcccattcgccctgtcggtagaggcgcatacggcatcgtttgtgctgctgttaattgcgatacgcacgaggaagttgccataaagaagattggtaacgcctttgacaacatcattgacgctaaacgaactttgagggaaatcaagctccttcgccacatggaccatgaaaatataattgccattagggatatcatacgacctcccagaaaggatgccttcaatgatgtttacattgtttatgaattgatggacactgatcttcatcagattattcgttctgaccaacctcttaacgatgaccactgtcagtactttttatatcagctgttacgggggctgaaatatgtgcattctgctaatatcttgcaccgtgatcttaagcccagtaatttgcttctcaattcaaactgtgaccttaaaattgcggactttggtctggcaaggacaacatctgaaacggatttcatgacggagtatgttgtcacacgatggtaccgagccccagaattgcttcttaattgttcagagtacacctccgcgattgatgtttggtctgttggttgcatatttggtgaaattatgaccagagaacccttgtttcctggaaaagattatgttcatcaactgaggcttataacagagttattaggttcacctgatgatgccagccttggatttctccgaagtggaaatgccaaaagatatgttcgacagcttccacaatataggaagcaaaatttctccgctagattcccaaatatgtctcctgaggcattggatctactagaaaagatgcttatctttgatcccaacaaacgcattacagttgatgaagcactatgtcatccatatctttcatcacttcatgacatcaatgatgaaccggttggtcctgggcaattcaattttgattttgagcagccaacatgcactgaagagcacatcaaggagctcatctggagggaatcggtgaagtacaatccagatccacccagtcagtaattctttcttgaatgatgattcccttattactcttgggtgtagacatccagagagagataagtgattgatatgattagtaatgtattgtgacaaaaagagagatattgagaaatgagaggtgtgtaagggtggtgagagaatccttgttcttctttcttattagtataaatgtatcaagataaacttctttcaccttaaatacagtgcctgttcattattcagataagttgctgcacacagaaagtcagaaactttgttcttgtaatctagtcctaagcatttagaatacaaaggaaaatgaatattcattaggaatccaattgaatattgctagcattcagacaagttat

SEQ ID NO: 182 - DNA, 448 bp, Glycine max
  unsure (1)..(448): unsure at all n locations
  Clone ID: PAT_MRT3847_16934C.1
ccacgcgtccgcccacgcgtccgcggacgcgtgggcggacgcgtgggcgcgccggatggggagtgatggcaagccacaggagtggcgagacagaggacaccttcattgctgacctctcagttggcctgtctacgggccaaatcaagacgggagctccttgccggtctgagcgcctggccaaatacaaccagctgctcaggatcgaggaggagctcggtgatgccgcggtctacgccggagcaaagttcagggcaccagtggagccctactaagaaaggaagaggatgaggatgttttcttgtggagctatactagctcgctgctgccttttgttacaatgtttgtacggtcgcaataaatgtatggtcgtgtttgctcgagagctactcangtgattttgtcgtgggagcaccaaaagcagaaagaactggnntttttcttctctctc

SEQ ID NO: 183 - DNA, 2206 bp, Glycine max
  Clone ID: PAT_MRT3847_17090C.1
tataaaacaaaaaaaggttgacagaagagagatacagtttttacagaagttaggagagaaagagagagagtacagatctgtttgaccaaaacctcttacaaacacatacaaatcagacagaagactaaaagagtgaagagaacaaacagagcaatggaaggaggaggagctgctccgccggccgacaccgtgatgtccgacgcggcgcctccgccgcagcaagcgatggctatggggatcgagaatattccggcgacgctgagccacggtggcaggttcatccaatacaacatattcggaaacatattcgaagtcaccgccaaatacaagccacccatcatgcccatcggaaaaggcgcatacggcatcgtttgctcggctttgaactcggagacgaatgagcacgttgccatcaagaagattgcgaatgcatttgataacaagattgatgcaaagaggaccctccgtgaaatcaagctgcttcgtcacatggatcatgaaaacgtggttgcaatcagggatatagtgtctgcttcttcttcttctctattcctatttttccataacaacaccgccgattcattgcatcaccgtcactaacttcatcatcataaaacattttcatataaataaatatattcattcattcattcattcacataataatcattaactatcattctctcatatcactctcacttactaaataagacagacaaaagaaagaaagaagagaacaacagagcaatggaaggaggaggagctgctccgccggccgacaccgtgatgtccgacgcggcgccaccgccgcagcagcctccggtggcgatggggatcgagaatattccggcgacgctgagccacggtggcaggttcatccaatacaacatattcggcaacatattcgaagtcaccgccaaatacaagccacccatcatgcccatcggaaaaggcgcatacggcatcgtttgctcggttttgaactcggagacgaatgagcacgttgccatcaagaagattgcgaatgcatttgacaacaagattgatgcaaagaggaccctccgtgaaatcaagctgcttcgtcacatggatcatgaaaacgttgttgcaatcagggatatagtgccaccacctcaaagggagatattcaatgatgtttacattgcatatgagttgatggacactgaccttcaccaaatcattcgttcaaatcaagcattatcagaggagcactgtcagtattttctgtatcaaatcctccgtgggttgaagtacatacattctgctaatgttctgcatagggacttaaaaccgagcaaccttctcctaaatgccaactgcgacttaaaaatttgtgattttggactggctcgtgtcacctctgaaactgattttatgactgaatatgttgttacgagatggtaccgtgcaccggagcttctgttgaactcttctgactacactgcagcaattgatgtatggtctgttggttgtattttcatggaactgatggatcgaaagcctttgtttcctggcagagatcacgtgcatcagttgcgtctacttatggagctgattggcaccccatcagaggctgatttggggtttctgaatgaaaatgctaagagatacattaggcaactgcccctttaccgccgtcaatctttccaggaaaagtttccacatgtccatcctgaagctatagatcttgtagaaaaaatgttaacttttgatcctagaaaaaggattactgttgaagatgcactggcgcacccatacttgacatctctgcatgacatcagtgatgaacctgtgtgcttgactcccttcagctttgactttgaacaacatgctttgactgaggaacagatgaaagaactgatataccgagaggctctagcatttaacctcgagtatcagcagtagtgatagacttgttatcattggatttggatcgtgtgatgtctgtgtccatagatcaagggatttcattgtgtatatatatctatcatctgaaaccaggtgatcttggagttgaattatttccatcagaggcatgattggtagactgaaacaatcataaggtatttgtattggctttttgcttcatattattgtccaattcattggctgcagccaactgataaatcttttcttggtctcaaatttctgcttttatggatttgaagttccctctctctgaacc

SEQ ID NO: 184 - DNA, 1804 bp, Glycine max
  Clone ID: PAT_MRT3847_17186C.1
gagagagagagagagagagatctatctatctatcaagatggcgttgttggttgagaaaacaagcagtggaagggagtacaaggtgaaggacatgacgcaagccgatttcggaagattggaaatcgagctggcggaggttgaaatgcccggcctcatgtcctcccgcaccgagttcggcccctctcaacccttcaagggcgctaggatcaccggctccctccacatgaccatccaaaccgccgtcctcatcgagaccctcaccgccctcggcgccgaggtccgctggtgctcctgcaacatcttctccacccaggaccatgccgccgccgccatcgcccgcgacagcgcctccgtcttcgcctggaagggtgagaccctccaggaatactggtggtgcaccgagcgcgccctcgactggggccccggcggcggccccgatctcatcgtcgacgacggcggcgacaccactcttctcattcacgagggcgtcaaggccgaggagatctttgagaagaccggccagttccccgacccggcttcctccgacaatgcggagttccagatcgtgctgagcatcatcagggatggcttgaagaccgatcccaagaggtaccacaagatgaaggacagaatcgtcggtgtctccgaagaaaccaccaccggtgtcaagaggctctaccagatgcaggccaatggctccctcttgttccctgccatcaacgtcaatgactcggtcaccaagagcaagtttgataacttgtatggatgccgtcactcgcttcccgatggactgatgagagccactgatgtgatgattgccggaaaggtagctgttgtgtgtggctacggagacgttggcaagggttgtgcttcggccatgaagcaagccggggctcgtgtcattgtcaccgagattgatcccatttgtgcccttcaggctctaatggagggtcttcaggttctcaccctggaagatgttgtctccgaggccgacatcttcgtcaccaccacagggaacaaggacattatcatgcttgaccacatgaagaagatgaagaacaatgccatcgtgtgcaacattggccacttcgacaacgaaatcgacatgctggggcttgagacctgccctggtgtgaagcgcatcaacatcaagcctcaaacagacagatgggttttccccgataccaagagggggatcatcgtgttggcagagggtcgtttgatgaacttggggtgtgccacgggacaccccagctttgtgatgtcgtgctccttcaccaaccaggtcattgctcagcttgaattgtggaaagagaagggttctgggaagtatgagaagaaggtgtatgtgttgcccaagcaccttgacgagaaagtggcttctctccaccttggccagcttggagctaggctcaccaagctttccaaagaccaagctgattacatcagtgtgcctgttgagggtccatacaagcctgctcactacaggtactgatccatcctattgggggagaataaacctaaactatcctatcaattcccgaggcgtcattgttacactttcctttttggatttttcccattacaatttacatttgtggtagcataggagcttcttttttctttttttagtaggatcacaatgccattgggctgaaggttaagaccaaaattactcattgctttcaataaggctttggctgcggctgtctgggttatgatttagcagctttcatattaatttgttcctttccatctttgatatccgaaacataataagcaaaaaaatattgttttttaaaaa

SEQ ID NO: 185 - DNA, 1433 bp, Glycine max
  Clone ID: PAT_MRT3847_17304C.1
ctacactttcgagttcgaactaaagaaaaaacagtaaagaaagaagaagaaaaaaaaaagatggtttcgtcagtttcgtgggtgagaggcaagtgcgtcggtaagggcgcgtttggggttgtcaacgtggcggtttcgaaaagagataatcgcgttttcgcggtgaagtccgtggattgcggaagggggctttctggtcaggtggaggcgttggagaacgagattgggattctgaaacgagttacctcgccgcacgtggtggcttatatcggcgacgatgtcacgtgcgagggaacggcgtcgttcaggaaccttcatttggagtacatgccaggtggcaccgtcgctgatttggaccgcgctgacgtggacgagcggttagtgaggcgctacgcgtggtgcctcgcgaccgcgctgcgtgacgtccacgcgcaaggcttcgtccactgcgacgtgaaagggaggaacgtgcttctctccggcgacggcgaaatggcgaagctcgccgacttcggcgcggcggtggaaattgaatcctctccggcgatgttgctgttcccgcgggggagtccgatgtggatggcgcccgaggtggtgcgccgggagcggcaggggccggagtccgacgtgtggtcgctcggatgcacggtgatcgagattgccatcgggaaaccggcgtgggaggaccgcggcgtcgacacgctgagtcgaatcggttactcggacgagttgccggaatttccaatccagttgtcggagctagggaaggattttctcgagaagtgtcttagaagagaaccgagtgaacggtggagttgcgatcagttgcttcagcatccatatttgcttccctactacgcccttgttgaatcgtcgcctcggtgcgttctcgaccgggttgactcggagttgaattccgagtcagattataacgaccgtgatcatcaagaagacgtgtttataaaatttaccaacagcgaagaaaaatcagttattaaaaatagaattagtaaatttgcgacagagtcgagggtaaattgggaaacgcagggttggatagtggtgagggaaattgagtccaacggaaaaccaacgacaacgggaacagaaacagaaatagaggaaggagcatgtacgtgtgagtgtgatggtgttggttcgagcaaagaaggggtaaattgggagtttcacaatgtggcggggactggtatggaatattcggattctgtaggggtaaatcggggaataggaaagttgggtgggagtaacaccgctggagggggtggtggttggagctgtcggtatgggtgtgggtgggaaaagttgggtaggaatagaggaatattcagcatttacagcttgtattgtaaaaatttcatgttgtgtaatttaatattcttaatgtatatcaatatatattatgcttttggatt

SEQ ID NO: 186 - DNA, 560 bp, Glycine max
  Clone ID: PAT_MRT3847_17306C.1
cgtagctcgtttttcggctcgagaacactttcgagttcgaactaagaaaaaaaaaaaggaaaacaaaatggtttcgtgggtgagaggcaagtgcgtcggtaacggcgcgtttggggttgtgaacgtggcgatttcgaaaagagataatcgcgttttcgcggtgaagtccgtggattgtggaagggggctttctggtcatcaggtggaggcgttggagaacgagattgggattctgaagcgggtggcttcgccgcacgtggtggcttatctcggagacgatgtcacgtgcgaaggaacggcgtcgttcaggaatcttcatctggagtacatgccaggtggcaccgtcgctgacttggaccgcgctgacgtggacgagcggttagtgaggcgcttcgcgtggtgcctcgtgtccgcgctgcgtgacgttcacgcgcaaggcttcgtccactgcgacgtgaaagggaggaacgtgcttctctccggcgacggcgaaatcgtgaagctcgccgattttggcacggcggtggaaattgaatcctcgccggcggagatgttattgt

SEQ ID NO: 187 - DNA, 2593 bp, Glycine max
  Clone ID: PAT_MRT3847_17614C.1
atattatatgcttcattgtttggtcagaaatttttgcagacccaaattaatgttcacctttggtcaagcaacacccaccaaaaaacactttgatttcccattgccgcatattttgtaaaggcaatcttattcttatggtaaaagggaaaaaaaaaatattcattagtcggtaaggggaaagtgagaagcacaaaattgaggcatggttatatagaagtctcagttttagtttaataggcacatcacactcacatctattgaagttcataattccacctcttgtgttttttccaaggctttgccaacaacaattctttggcttagagttatagagcatggtggggagcattatgggagtggttcacaatgcatacacaaatggaagtgttggtgtacaaaattgtaatggggtggaggagaagcttgattgtttgagaaggcttattgggaagggtgatggtgaccctttgagaattgtgagtgttggagctggtgcttggggaagtgtttttgcagctttgctacaagacacttatggccaatttagggataagatacagatcaggatatggagaagggcaggaagggcagtggatagagccactgctgagcatctctttgaggttatcaactcaagggaggatgtgttgaggaggttgatccggcgttgcgcttatctcaaatatgttgaggcaaggcttggtgataggaccctctttgctgatgagattctcaaagatggtttttgcttgaacatgattgatacaccactttgtcctttgaaggttgtcacaaacttgcaagaagctgtttgggatgctgatattgtggtcaatggcttgccttcaacagaaacaagagagatctttgaagagattagtaagtattggaaggagagaatcacagtgcctataattatctctttgtcaaagggtatagaggctgcattggagcctgttccacatattataactcccacaaagatgattaaccaagcaactagagtgcctatggagaacatactctatcttggtggtccaaatattgcctcagaaatctacaacaaggagtatgccaatgcaagaatctgtggagctgagaaatggcggaaagctctggcaaagtttttacgccaaccacactttattgtctgggataacagtgacctcgtcacccatgagatcatgggtggcctgaaaaatgtctatgcaattggagccggaatggtagcagcccttaccaatgagagtgctactagcaaatctgtctactttgcacactgcacatcagagatgatatttatcactcatttgttggctgaagagcctgagaaacttgcagggccactattggctgacacttatgtgactttactaaaaggtcgtaacgcatggtatggtcagatgttagctaagggtgaattaagcccagacatgggtgacagcatcagtggcaaaggaatgattcagggtgtctctgcagtggaggcattctttgaacttttgagccattcaagcctgaatgtgttgcacccagaagaaaacaaaccggttgctcctgttgaactctgccccatcctgaagacactgtataaaatattgatatccagggaacagtcatcagaagctattctccaagctcttagggatgaaaatctgaatgatccccgtgaacgcattgagattgcacaaagccatgctttctacatgccttcacttcttggacaaccttgaacgcattgagattgcacaaagccatattatctacaattaattattttattatttcataatagacgtgggataaatttttccactcctgtattgttgaaattaagaagtttatttgtgaaacaaacaaacacactgaactgactcggaaaaaaaattgacatatgcagaggccatcagttttagtacaaaattgagtaaaaataggaaatttaagttttttggatctttacaaaattttgatatcaaggggccaggtcatctccaggatattttgaaagccttgagggatgaaaatttgaatgatcctcgtgaacgaattgagattgcccaaagccatgttttctaccagccttccctttttggacaaccctgattgttttctcattggcaaaagccaaatgtggatgcaactatatatggaagcatttgtcaactcaaagagaatatttaaatgagcatgaatgtattgttttgtgatggattttgtattacattgttgtatgtatatatgtcaaaatataagccactaagcaattggactaataactcccaaaaacactcactacagtactgcctgatggacactacaacattgtggccaaaaatgagaggaacactgtttttggaagaaaaaaaaatcattaatggaatggaataagtgtggaagggatacaaagggagtggaaggaatgaaacaaagctagctttattcttgcttggaagattgatgagggattaggaatggaactaaattattttgtatggaagttaaattataaagatcttgaatgaaatgtaatatgcttaattatgaacaaaatttattcctccaattccacctcaattttgaagaacaaaaa

SEQ ID NO: 188 - DNA, 482 bp, Glycine max
  unsure (1)..(482): unsure at all n locations
  Clone ID: PAT_MRT3847_17878C.1
gacaatgtggtttggtgaaagtgaggcaaatgttcgcgagatatttgacaaggctcggcagtcagctccatgtgtgcttttcttcgacgaacttgactctattgcaactcaacgaggcagttctgtaggggacgctggtggtgctgccgatagggtgttgaaccaactcttaacagaaatggatggtatgacagctaagaaaacagttttcatcataggggcaacaaacagaccagacattatagaccctgcattgctcaggcccggacgtctggatcaattgatttacatccctttaccggatgaaagttcacgtcttcaaatcttcaaggcatgcttgaggaagtcaccaatctcaaaggatgttgacctatcagctcttgcccgttttactcatggattcagtggtgcagacattacagaaatttgtcaacgagcgtgcaaatatgccattanggaagatattgaaaagggtattgaga

SEQ ID NO: 189 - DNA, 162 bp, Glycine max
  Clone ID: PAT_MRT3847_18209C.1
ggtatgcagttgttgtggttctcatcatttgcatttacatatcaccatttgcctagtcatggggtcgccaaggttggttggtgcctcatgagatcgttcacttggcaatccgtacggctgctcaaagtatagatgtctcggtgaacatggttttcactttct

SEQ ID NO: 190 - DNA, 928 bp, Glycine max
  Clone ID: PAT_MRT3847_1894C.1
cataattccatcgtctaaatttcacacaacaattcaattcatagccagacagagataaacgaaaaattccacttcggagtgtgagctaaataaaagcctcacttattgaaattagctagccggcgataaaaacaagcacagagctaatttcacaaatctaaaacgtgacaaaaaaaaaaaaaactaatgtcatgtgttacagtatttagtatttagtatttacacaaaaataaataaggtttggcatattcacagaaagggaagagattccaaattcttagtcatgattgatcaacaatcaccaaacgtgaagcgagcgttcctgcggaagcgaggaacccttgagtccagcacttctagtctcgtgaaaatcctgtatgaccttgatgagaaaccgcgctttctttgcagcatgacaagttccatccgtgagaagcgaataaagcaaaggcatcaacgaaggctccttagcgagaaccgccacaacctccgctccaacattgacgcaaagcgacaacaaaatcgaagcagagtgctctttcccctcgcgtgacgtggcagatcgcagcatccctacaatcaaccgcaacgccgaaccttgcagtatctcacgcgccccatcaacgttctccgccagcgcggcaagaaccgccaaagattcagtcacaagctcgtccttattcgaagaagctataatgtcaagaagcgccggaacagcaccagcagcgataaccctttgatgattcctaggaagcaaaagtaatccgaaaatagcaaccacagcattctttctcccacaggttgttccttctttaactaactccaccaaagccggaatgacatcagggttttcccctattaacttgcgaaattctttcaccgaagaaagataaaatattgtagcagccgcgacttgacgagcttcaag

SEQ ID NO: 191 - DNA, 2535 bp, Glycine max
  Clone ID: PAT_MRT3847_19228C.1
aagaggataggtcagcgcctcgtcaggtcaattcccgctcttcaacaattgaaaatagttcaccctgccgccccaacccaacatcgtctttctctctccaatatctctaccctaatccaccctttctgaacaaaaataaaaaaataaaaaaaaacccatcgatttcttggacctccatgacttctttgtctacccatcacacctatagccgaaagcaaaaatctctcggcctcctctgcaccaattttctgagtttgtacaacaaagaaggtgtgcgcctggtcggtctcgatgacgcagcttcgcggttaggtgtagaaagacgtcggatctacgacatcgttaatgttttagagagtgtcggtgtgctaaccagaaaagctaagaatcagtatacttggaaaggattttgtgcaattcctgctgccttacaagaacttaaggatgaaggtttgaaggagaatcctggatcatttgatgactccaatgacaatgcaaaagtgtctgatgatgaggaggaggaagaagaaacatttcctaatattaacattgggagtcagagtgagaaggaaaatcctgattacactgctactgtcaaatcctccaagaatgaaaacagaagggaaaaatctctggcattgcttactcagaattttgtcaagctttttgtctgctctaattttgaaatgatctcccttgacgaagctgcaaagttgttgcttggaaatgccaacaatagaacaaaagtcagacgtctatacgatattgcgaatgtgttatcctccatgaacctaatcgagaagacccatacaacaaacacaagaaaaccagcattcaggtggttgggtgtgaggggaaaaacatggggtggatcagttgacttggctcaaaattcaaatgtcaaagagtcacggaaaaggatgtttggaactgacattggaaacataagttttaaaaggaacaaagttgatttgtccatggatggccagaattctaaaatgcaaaatcaacacgaaaatattagtccacgagctcagttagagaaaatcatcataaaaaaagatgctaagcagacttcagagagctatcagtttggccctttggctccagcttatgtgcccaaagttggaacccatgaaaataatagtctgaaacaggtgcatgactttgaaaacctctcatatcaccatagtcctcaatatcaaaatcaaggttctaacgttgaaaaatctatataattaccacatcgaagtaagtaaataattgcagctttctccagataatagtagcttttctagaactttattattgcattgttcagtgtatgttcaaaaaattgtggcatattctcaaaatgaaatgatccattactgaatgcatgttctccatgcgttactgtattctcaaaagaaaatgatccattattgaatgcatgttctccatgcgttagtgtatacttaatagaagatgatccattattgattacatgtcatctttgagattgggtattgctaccgtatgccgatttaaaaactgtaaattataaattattgttaacatgacttttaagataattttattaaaattaataattaataattgatcataaataatggtttctgattgtatgtttacactttcaattcatagttgttttggattacaaagtttgtggggtattaaaaggtttgaattaggggtaacaaagcatgatgaacctactagattcatatgcctagctaatcttgcttaacacaccaagttggtgagtcaaaggtaggttgtggttggttgatccaatgcatttttttgttaaaaatttgtttacctttctaagacaccggaacctatttcccggaaagtgatgcaaatgttgcaattttttgagtgatttttagtctaacaaattgtttaattcaccctaggccttctaccttcacgtggcattgctctgtcaggctttcgtccattgtagaaaattctcactactgcctcctgtaggagtgtaggctgtgtcttagttccagtgtggctgatcatcgtcttggtctcttggatcaagattgtcgccttggaaagttattgtctcgccaactagctaatcagacgcgaactcctcagacggattcctccaaactatcattaaagattagtaaaattatatttttatttttacagaaatcaaattgatataaatttttttaaagataaaattaatatttttcaaattttatatgtattttaaacatatcttaccttaaaatttttattagggtttcattgttgttcataacttgtattgagattgattgatcagaaatttataataaattatggatgaatgaattagtattttttttaataaatatttgacgggtttggtgggtcaattcactattttatgtcttccaactcatttttaaccgtgggtcaatctaacttgccttgcttaaagtggtagcttgaatctaagggattatttttactaaattgttgtaattcactttaaaaataaaaaactaatgtagtttttgt

SEQ ID NO: 192 - DNA, 2187 bp, Glycine max
  Clone ID: PAT_MRT3847_19229C.1
cgctcttcaacaattgaaaatagttcaccctgccgccccaacccaacatcgtctttctctctccaatatctctaccctaatccaccctttctgaacaaaaataaaaaaataaaaaaaaacccatcgatttcttggacctccatgacttctttgtctacccatcacacctatagccgaaagcaaaaatctctcggcctcctctgcaccaattttctgagtttgtacaacaaagaaggtgtgcgcctggtcggtctcgatgacgcagcttcgcggttaggtgtagaaagacgtcggatctacgacatcgttaatgttttagagagtgtcggtgtgctaaccagaaaagctaagaatcagtatacttggaaaggattttgtgcaattcctgctgccttacaagaacttaaggatgaaggtttgaaggagaatcctggatcatttgatgactccaatgacaatgcaaaagtgtctgatgatgaggaggaggaagaagaaacatttcctaatattaacattgggagtcagagtgagaaggaaaatcctgattacactgctactgtcaaatcctccaagaatgaaaacagaagggaaaaatctctggcattgcttactcagaattttgtcaagctttttgtctgctctaattttgaaatgatctcccttgacgaagctgcaaagttgttgcttggaaatgccaacaatagaacaaaagtcagacgtctatatgatattgcgaatgtgttatcctccatgaacctaatcgagaagacccatacaacaaacacaagaaaaccagcattcaggtggttgggtgtgaggggaaaaacatggggtggatcagttgacttggctcaaaattcaaatgtcaaagagtcacggaaaaggatgtttggaactgacattggaaacataagttttaaaaggaacaaagttgatttgtccatggatggccagaattctaaaatgcaaaatcaacacgaaaatattagtccacgagctcagttagagaaaatcatcataaaaaaaagatgctaagcagacttcagagagctatcagtttggcccttttgctccagcttatgtgcccaaagttggaacctctgaaaataatagtgtgaaaaaggtgcatgactgggtacagcctcgcacaggagcatcgtcctcaatatcaaaaccaagcttggtcttcaacaaccagctcttgaatcctgaaaaagtcatggatgaagccttattacatacttgggctgaaaaagtcatggatgaagccttattacatacttggtcctggttaaggtgtatggagaagggattccaaactcattttaaccattggtcaactaacttgaaggaggaactctcatagaggggtttgacatagctggtcagctgtattgtattgtacttgtcttttagttgggtttgacttttcgttgggtttgacttttcattgcctatattatctgttgtacacttcagtacacctacagctgattcttatttataatatataatataaatttttgctgagcaaaaaaaaaaaatgtttaatgagctcattttaaactcaagtttgttcatgaacccaattcaaaaaatcaattatcgaatttacaaaatcaacacgaaaaatattagtccacgagctcagttagagaaaatcatcataaaaaaagatgctaagcagacttcagagagctatcagtttggcccttttgctccagcttatgtgcccaaagttggaacctctgaaaataatagtgtgaaaaaggtgcatgactgggacagcctcgcacaggagcatcgtcctcaatatcaaaaccaaggagtcacacgtgaaggagcctattgcccgactgttgtgtgatgtattggattattttcaacttgatggaaacttgggaagttaactatctcaaaagctttaaaagatctattttcccactacatggaagcatggaaatcttggtactctgaagctgctgggaaaaagtcaacgaaaactttataattgacttgtccaaagtcagtccagataattgtagcttttctagaaaataaatgatccattactgagtgtatgttccacatatgttggcatattctcaaaatgaaatgatccattactgaatgcatgttctccatgcgttactgtattctcaaaagaaaatgatccattgttgaatc

SEQ ID NO: 193 - DNA, 2116 bp, Glycine max
  Clone ID: PAT_MRT3847_19587C.1
ggctcgaggacgcattcgctaatttcaccaatttctattttcataactttctctgcagtctcttcacctttatgttaatgatattatgtgtttagagagaaagagaacaagcatagttgagcttgattgtgttcttcaacattagaacaagaaaagaaagacaacaacatggaaggaggaggagtagaagttgatgcctctgctttcagagaatgcttgtctctgtcatggaaaaatccttacgttcttcgccttgctttttctgctggaattggtggccttctctttggctatgacactggagtcatatctggggctattttatatatcagagatgatttcaaagcagtggataggaagacttggcttcaggaagccatagtgagtatggctcttgctggagcaatcgtaggagctgcagttggtggatggattaacgatcgatttggaaggagaaaagctattcttcttgcagacacactcttctttattggttctgctgtcatggctgccgctaccaatccatctattctcattgttggtcgagttttcgttggccttggtgttggaatggcttcaatggcatcccccttatacatctctgaagcttctccaactagagttcgaggagctttagttagtctcaatggctttctcataactggaggacaattcctctcctacctcatcaacttggccttcacaaaagcaccaggaacatggagatggatgttaggagcagcagtagtaccagccctgatacaaatcgtattaatgatgatgctgccagaatcaccgcgttggctgttccgaaagggaagagaagaagagggtaaagaaattctaaggaagatttatccaccccaggaagttgaagcagaaattaatactttgagggaatcagttgaaatagaaatcaaggaagcagaggccacagataacatcagcatagtcaaaatgctgaaaactaaaactgtgagaagaggtttgtatgcaggaatgggccttcaaattttccaacagtttgtggggatcaacactgtgatgtactacagtcctaccatagttcagttagctggttttgcatccaaccgaacagcacttcttctgtcactagtcacatctggtctcaatgcatttggttctattttgagtatatacttcatagacagaacagggaggaaaaagcttgtgttgttcagtttgtgtggtgttgtgttctcccttgttgttctaaccgttgtgttccatcagagtacaactcactccccaatggttagtgcactcgaaacctctcacttcaataacacttgcccggattaccattcagctgcgaaccctggtggatgggattgcatgaagtgcctgaaggcttctccaaattgtggcttctgtgcttctggagccaataagctcttacctggggcatgtttgatctccaatgacaccacaaaagatcagtgccatgaagaagatagactatggtacaccgtggggtgtcctagtaaatttggatggcttgcaatagtagggcttgcactctacatcatattcttctcacctgggatgggaactgtgccatgggttgtcaactctgagatttatcccctaagatatcgaggaatatgtggaggaatggcatccacatccaattgggtctcaaatcttattgttgctcagtccttcctatcattgacacaagctattgggacctcatggacatttatgatatttatattcatcaccatagctgccattatctttgttattattttcgtgcccgaaaccaaaggacttccaatggaagaagtggagaagatgttggaaggaagagatctcaacttcaagttttggcagagaagttctcactgtggagaagaagtaccaccacaaaagactcaatcaaattaagtctattgtgttgcatcatttgtaatattggagtattaactaaagaagtataggtaataaaatcgtagaatgtagctattagattctaagtatatacaataaaatcgtagaatgtagctattagattctaagtatatacaatatcttgtttgtgtgaatttttttcttatcaacaaatattattttgttaattttgttacaaatt

SEQ ID NO: 194 - DNA, 1590 bp, Glycine max
  Clone ID: PAT_MRT3847_19765C.1
cctgtgccgaattcggcccacgcgtccgcccttccatttcaactccttctcgcgcgatagattgctctttctcctctgctcctccctttcccattcctcctttccctctcccctccgctcccccaatttcccccaaactttctccctccgccgcttcgccgccgcccctctcgctcgccctccgccgccgcctccgcccctggacgccatggcccagaaaatcggaaagtccacgcgccgccccggcgcgtcctccaaggcccgcgtctatgccgatgtcaacgtcgttcgccccaaggaatattgggactacgagtccctcaacgtccagtggggggagcaagatgattatgaggtggtgaggaaggtgggtagggggaaatacagtgaggtgttcgaaggtgttcactgcacggacggtgagaaatgtgtcattaagatcctgaaacccgtgaagaagaagaagatcaagagggaaatcaaaatattacagaatctttgtggagggcctaatattgtacagttgcttgacattgttagagaccaacagtcgaagaccccaagtcttatatttgaatatgtcaataacactgattttaaagtgctctatcctacattgtcagactacgaaatacgatattatatttatgaacttctgaaggcactggattattgccattcacaaggaatcatgcatcgtgatgtgaaaccacataatgtaatgattgatcatgagcagcgtaagcttcgccttatagattgggggcttgcagagttctatcatcctgggaaagaatataatgttcgcgtggcatcaagatatttcaaaggtcctgagcttcttgttgatcttcaagactatgattactctctagatttatggagtcttggttgtatgtttgctgggatgatattccgtaaggagccattcttttatggacatgataactatgatcaactggtcaaaatagctaaggtacttgggacagacggattaagtgcatatttagataagtatcgaatagagttggacccacatcttgcagcacttatcgggaggcatagccgcaagccatgggcaaagttcattaatgtagaaaatcatcacatggctgttcctgaggctgttgactttgttgacaagttattacgctatgatcaccaagaacgtcccacagcaaaagaagccatggcccatccatacttcaatccagttagaaatgcagaaagtagtagaactcgtgcacattgagttgctggtgcttgttgtgatatggtgttcgttcttgtcagggggccttcaacagtctgaactgttatttctagtggaacttgcttttagtagattcccctgttctgttgtgaaactcatttcaattagttctttatctaatcgttttgtttctggtttttaaaattatttttgggtggaaaattcagctctcaacaattttatttgattgtgtgccaaaatttggaaatgaaatgttgattcaatttcagtaaaattatacgcttgtgttcttttatgtaatactgttaaatcaaaaaaaaaaaaaaaaaaaaaaaaaaaactcgagactagttctc

SEQ ID NO: 195 - DNA, 509 bp, Glycine max
  Clone ID: PAT_MRT3847_20044C.1
tcgacccacgccgtccgcaagacaagaaagaaagaaagaaaaaggtagagaaggagagagagagagagagaaagaaaactgaaaaaaaaaaaaaaaagataagactaattaactacatttttggtttggtttttcttcatctcgcaggagacacgaagagacaagttacatcacatgagatgtcaggtggtggatgcagcagcatagtgtggttcagaagagatctgaggatagaagacaatccagcactgacagcaggagtgagagctggtgctgttgttgcagttttcatatgggcacctgaagaagaaggacaatactaccctggcagggtctctagatggtggctcaagaacagtttggctcaccttgattcctctctcaggaatcttggcactcctctcatcactaagcgatccactgatactctttcttctctatttgaggttgttaagtccactggagccactcaactcttttttaatcattaataagaacctctggcactt

SEQ ID NO: 196 - DNA, 1516 bp, Glycine max
  Clone ID: PAT_MRT3847_20045C.1
ccacgcgtccggttccttctaacctatccttctcatagtgtgtccattctgtcaaagcctttgggctttttcgtacaactaggtagtgaaagcaacaatactagaatttttgatggaaaatactaataatttaccccaaaaacaccaatattgggagaaagaaatacaaccaaaacttaaaaagtcatcaactcaataatcgtgctgtgctttcacctatttatggcttaaaatctcctgttaaacaagttagaaagaaaagccaagacaagaaagaaagaaagaaaaagggagagaaggagaaagagagagagagagagaaaactgaaaaaagaaaaaaaaagataagactaattaacgtttttttggtttggtttttcttcatctcgcaggagacacgaagtaaagagacaagttacatcacatggttaaaacttgttaaaagagttttgtgtgtgtgtgtgtgaaagtagtttaaggttgtgggggtggttgaagtttttagctttagctttgcagagatgtcaggtggtggatgcagcagcatagtgtggttcagaagagatctgaggatagaagacaatccagcactgacagcaggagtgagagctggtgctgttgttgcagttttcatatgggcacctgaagaagaaggacaatactaccctggcagggtctctagatggtggctcaagaacagtttggctcaccttgattcctctctcaggaatcttggcactcctctcatcactaagcgatccactgatactctttcttctctatttgaggttgttaagtccactggagccactcaactcttttttaatcatttatatgatcctctgtcacttgtcagggatcaccgagcaaaggaggttctgactgctcagggcataacagtacgttccttcaacgcggacttattatatgaaccatgggatgtgaatgatgcacatggccgaccattcacaacttttgctgctttttgggaaagatgtcttagcatgccttatgaccctgagtcacctcttctcccacctaaaaggataattccaggtgatgcatcgaggtgccctagtgatacattgctgtttgaagatgaattagagaaggcaagcaatgcacttcttgctcgagcgtggtcacccgggtggagcaatgctaacaaggcattgacaacattcataaatggtccactgattgagtactcaaaaaaccgcaggaaagcagacagtgccactacctcacttctctcaccccatttgcactttggtgagttgagtgtcaagaaggtcttccatctagtccgcatcaaacaagttttgtgggccaacgaaggaaacaaagcccggtgaagagagcgtgaacttgttcctcaaatctataggtcttagagaatattcaaggtacattagtttcaacccaccctacactcatgaatgaaaaggcctttttctaaggcccacctttaagttcttttcccttggggttggtaaaaccgaagggctatttttaa

SEQ ID NO: 197 - DNA, 496 bp, Glycine max
  Clone ID: PAT_MRT3847_20986C.1
ccacgcgtccggcttcttctccccctccggaacggattccggtaccagaggttcttcggggttcggtttcgagggtgagcggatcgagatggcggcgtcggatgttgagtaccgctgcttcgtcggcggcctcgcctgggccacggacgaccactcccttcacaacgccttcagcacctacggcgaggtcctcgagtccaagattatcctcgatcgggagacgcagaggtcccgcggcttcggcttcgtcaccttctccacggaggaggcgatgcggaacgccatcgagggcatgaacggcaaggagctggacggccgcaacatcaccgtcaacgaggcccagtcccgcggcggccgtggaggcggcggcggcggctacggtggtggccgtggaggcggcggctacggcggtggcgggcgccgtgatggcggcggcggatacggtggtagaagcggcggctactgaggcggcggtggctactgtggtggtggtggc

SEQ ID NO: 198 - DNA, 1500 bp, Glycine max
  Clone ID: PAT_MRT3847_21549C.1
acctttgcaaaccctttccaacaattagcaaaacatttgttaaacgatggaagtaatgtgtggtgccaaagttggcaatatggtccataaggccaagccttatgtgttaactgtggggttgcaatttgggatggctgggacatacctcttcaccatggccagtttgaaccatggaatgagccgtttggtgttcattgtgtatcgcaatgccattgctgcattggcccttgctccctttgccttgatctttgaaaggaaagttagaccaaagatgacatggactgtcttcatacagatattagtacttggatttcttgagccagtggttgaccaaggattcactttcttggggatgcaatacacttcagcttcctttgcatccgctgttatgaatgccgtgccctctgtaacctttgtgcttgcagtaattttcaggttagagcatataaaaataagggaattacgcagtcaagcgaaagtaattggaaccttagtaacctttgctggggctttgttaatgacactatacaaaggccctcaattcgacctatttcatcattcaaacacaacccaccaacaaggtggaagccacactcagaatcactcacactgggtcgcaggaactctcttcatttgcctgggttgcctggcttggtcttccttctacatattgcagtccataacggtgaaaaggtaccctgcggaactatcactctcatcgttgatatgcttggcgggtgctttgcaaagtgccgtggttgctctgattgcagatcataaccctcgagcatgggctatcggttttgactacagcctctacggtcctctatacactggaataatgagttcaggaatagcatattatatacaagggttggtaatgcaaagcagaggtccagtgtttgtaacatctttcaatcctctttgcatgatcattgttacagctttgggctccttccttctaggagaacacctctacttgggaagcatcattggaggcatcataatcgcagtgggtctatactctgtggtgtggggaaaaggcaaagactataaagatgacacgtcatcaccagcaacaacaaaagaaacagaaacaatgcagcttccaattaccttaccaaataataaataacagacactttgtgttaacttatagaaaagaaaaattacatagtaattcgatcgacttatgttggcggaagtgaccgatgatagcgtaatttgcaaatcatatagtgatttgttgtgctggtgtgggcactatatttagccatgttaagttgaaacacgactttgtttaagttaatactaatttgttagaaagtgttttgctatcgttaattattccaagagtttaaattgttaatcaatgtgtaattttattttcttcctgcttttgtattttttttatcatgatatatgatatattagtgcggaatatttatcacgatgaaatcagatagctggtttaataaaaccaaactcaattccactctc

SEQ ID NO: 199 - DNA, 266 bp, Glycine max
  unsure (1)..(266): unsure at all n locations
  Clone ID: PAT_MRT3847_21599C.1
aaaaaatcattnttttagctnttngctttttctcagttgcccccctcttcccnattgttagttctaagcanaagattctaacaccaatagtccaatagcatagatatacatgtattttctttgctcttgagaactatcccaattattgagtgtgtcacctctccaatattttgatttagccttttctnttctcttttggttggtcatggtggttatttcacctcctcttagatctgaagagtttcataaggggtttgctntgncca

SEQ ID NO: 200 - DNA, 1800 bp, Glycine max
  Clone ID: PAT_MRT3847_22087C.1
gtaacgctctctttcttgaataagcgacaattcaaaatgtcgacccagaatcgtcgctcgtcgttttcctcctcaacgacgtcgtcattggccaaacgccatgcatccgcctcaacgacgtcgtcgtctgctgccgctcctacaaacatggccaagaagcgtcctcctctctccaacctcaccaacaccgttgctcaccgcaactcttcctcttcggttccatgcgcagctaaatttgccaagaccaagaaagaggttgttccggcgtgttcagggaacaaaagacccacattggcgaatgttaaacccgctagcgcagttatttttccgaaggctaattctttccctgtaagggatgaagctccaccaactcctcctcctccggttgccaccgttactgttccggctccggtggtggatgtttcacctagtaaatcagatacaatgtcggtttctatggatgagtcaatgtcttcttgtgactccttcaagagccctgacattgaatatgtggacaatattgatgttgcagccgttgattcaattgagaggaaaacattcagcaatctcaacatctctgattctacagaagggaacatatgtagtagagacatacttgttgagttggagaagggggacaaatttgtcaatgttgataataattacgcggatcctcagctctgtgcaacctttgcttgtgatatctacaagcaccttcgtgcatctgaggcaaagaaaaggccttccacagacttcatggagaaaattcagaaggagataaactccagcatgcgtgctatattgattgactggcttgtcgaggtggctgaagagtatagactagtacctgatacattgtatttgacagtaaactacattgatcggtatctatcagggaatgtgatgaacagacaaaggttacagttacttggtgttgcctccatgatgattgcctctaaatacgaggaaatttgtgcacctcaggtggaggaattttgttacataactgataacacatacttcaaagaagaggttttgcagatggaatctgctgtcctgaattttctcaagttcgaaatgacagccccaacagtaaaatgtttcttaagaagatttgttcgtgcagctcaaggagttgatgaggtcccttcgctacaactagagtgcttgacaaactatattgctgaattgtctctcatggagtacagtatgcttggttatgctccatcacttgtagccgcttcagcaattttcctggccaaattcatacttttcccttcaaagaaaccatggaattccacattacagcattacaccttgtaccagccttctgatctgtgtgtctgcgtaaaggatcttcaccgtctttgttgcaacagccccaattctaatttgcctgcaattagggagaaatacagtcagcacaagtacaaatatgtggccaagaagtactgccctccttcaatacccccagaatttttccagaattgagcagagatgacagtctaatttttggttgggataggcttagattgatataacttcttgtctccagagaagatgcttctcttacactgtacaatgtagtagccaaccaacccttccatctcaattagaattcttgtatctgcttttattgacgtgcatactcttatgcccacaaattcacaaaaaaataacgcttcaagaagcaacttgtattattagctaagctactgcttcagtagcatcattaatggctaaaaggagccaacgcctaatttttttttccaggtataaaatctaggtgcattacctagt

SEQ ID NO: 201 - DNA, 1815 bp, Glycine max
  Clone ID: PAT_MRT3847_22149C.1
atctttgtggggactgcggcggagcatcgttggacctcacatattgacatgtgtcagttgaagcgcgttagtgacggaatctgatggacacacctttaaaaggaggcaagttgagtcccgtcaccccctgtgccccgctttattgcatctcagaggccaattctttcgccgcttcttctctctttccaacgcttccccctgtggtgttctcgtgttgctggtaacaatatggttgttgacgctttgaatgaggatttgagaatcaacggagcagttgaaccgttgcctgaggactttgatgcaacagctgtaatcatagatcccgtgcctttggcagttgtagacaatggcattgtcaaggaggaggcgcagatcattaaaggaaaagagaaaagagaaatagtactgggaagaaatattcatacctcgtgtctagaagtcacagagcccgaggcagatgatgaggtcactggggaccgggaagctcatatggcaagtgtgttggccagatacaaaagagctttgactgaaaggacaaagcatcatttagggtacccctataatttggatttcgattatggtgcgctcacgcaacttcagcacttttccataaacaaccttggagatccatttattgaaagcaactatggtgtccactcccggcagtttgaagttggtgttttggattggtttgcccgattgtgggaactggagaaaaatgagtactggggctatataacaaactgtggtacagaaggcaatctccatggcatcctagttgggagagaggtctttccagatgggattttgtatgcttcacgggagtcacattattctgtgtttaaagctgctcgaatgtacagaatggaatgtgagaaggttgatactctttggtctggggaaattgattgtgatgatttcaaggccaagcttcttagtcaccaggataagccagcaattataaatgtgaacataggtacaactgtgaaaggggctgtggatgatcttgatctggtcataaaaaaacttgaagaagctggattttcgcatgacagattctacatccattgtgatggggctttgtttggtctcatgatgcctttcgtgaaacgagctccaaaagttacttttaagaagcctgttggcagtgttagtgtttctggccacaaatttgtagggtgtcccatgccttgtggtgtgcagataacaagattggaatatgtaaatgctcttgccagggatgtggaataccttgcttctagggatgccacaatcatgggtagtcggaatggccatgctcccatattcctctggtataccttgaatcggaaaggatatagaggttttcagaaagaagtacagaaatgcttgcgaaatgcacactacttcaaaggccgccttgttgaggctgggattggtgcaatgcttaatgaactgagcagcacggttgtgtttgagaggccacatgatgaggaatttatacgcaagtggcagttagcatgcaaggggaatatcgcacatgtggtggtgatgccaaacatcactattgagaagcttgatgattttctgaacgagcttctggagaagcgtgctacctggtttcaagatggcaaggatcaaccctactgtatatcatcagacgtaggtgaaaagaattgcctttgtgctttgcacaagtaattgcagcatcccatctagtgtttattgctgtagttggtttttggagtgtttatccagtgtacgtcactatgttctatcaggactttgatgcaattaataacatttagaatcttctttgctgtccaaaaaaaaaaa

SEQ ID NO: 202 - DNA, 1832 bp, Glycine max
  Clone ID: PAT_MRT3847_2249C.1
gaaagcaagtttgttattcagagagagaactcggtgtggctggccgacagaaaattttctattggatgacaaggaagttggctatccattgcttagtgtaaagcgaagaagtgtgaacaaatatcctcagaagctgccttttcaaaagcaaatacatttcgatttataaaaaagattgtactagtagtagtagaaaccaatattaaaaaggaaagaaagaaaaataggagaaaaagatgaaaaatcacacatagaccctttcctctctcgatactataactgcgaatgcgtaggggacagtgagagccagatgtctcctctatatagttcgtaacgcctctttcttacctctcattcatgcattagcgatatttctcaatctctcttcttacccatttcctccccccctctttctcttttcttgttctgtttttattttcactgttctctgataacaacgttgttagttgtcaccatggttgttctgtctcagccagcattaaaccagtttttccttctgaaaacatgcaagcccacgcccttgttcgcggggattcctgtggtcgacctcacggaccccgatgccaagacccacatagtcaatgcctgcagggacttcggcttcttcaagctcgtgaaccacggtgttccgttacagttcatggccaatttggaaaacgaaaccctcgggttcttcaaaaaacctcaatccgagaaagacagggctggtccccctgacccttttggctacggcagcaagaggattggccctaacggcgatgtcggttgggtcgaatacctccttctcaacaccaaccctgatgtcatctcccccaagtcacagttcattttcagagaaggtcctcagaatttcagggcggtggtggaggaatacattagagcggtgaagaacatgtgctatgaggtgttggaattgatggctgagggattggggataacgcagaggaatgtgttgagtaggttgctgaaggatgagaagagtgattcttgcttcagacttaaccactacccgccatgcccggaggtgcaagcattgaacggaaggaatttggttggatttggagagcacacagacccacagataatttctgtcttgagatctaacagcacctcaggcctgcaaatctgtctcacagatggcacttgggtttctgtcccacctgatcaaacttcctttttcatcaatgttggtgacactcttcaggtaatgactaatgggaggtttaaaagtgtaaagcatagagttttggctgacccaaccaagtcaaggttgtcaatgatctactttggaggaccacccttgtgtgaaaagatagcacctttaccttcactcatgttaaaaggagaagagagtttctacaaagagttcacatggtgggaatacaagaaggctgcgtacgcgtcaaggctagcggataatagactcggcccttttgagaaatctgctgctgattaaggaggcaaagtgtgtcaaaattctactactcaattttggcacgtgttgttaggccaacttttttattttttattttttttgggtgtgtgtatctaggttccaaacagttgactttacttgagatatatagaaaatgaataggttgcttatgcacttccttttaatccttgttctttttcttgtttgattgaagtgtaatagtcactactgcccttctattatcaatgaaacgcaactctagtcacagcttttcattaatttttgcggtgtattatatcgaggaattaggataaacacgggaataaaatactcctattatttaatgataataaaaatatatattaaagtgcaaaaa

SEQ ID NO: 203 - DNA, 1291 bp, Glycine max
  Clone ID: PAT_MRT3847_22514C.1
gaatacaagacgtgtctataaaaagttaacatgacctgttccaatgggcaacaaagagagcaaggagagaggagatgtcggtggagcagaaagcagcagggaaggaggaggagggaaaactgcagaagggaattgcagagttctacgacgagtcgtctggcatatgggagaacatttggggcgatcacatgcaccacggcttttatgacccggattccaccgtttctgtttctgatcatcgcgctgctcagatccgaatgatccaagaatctcttcgttttgcctctctgctttctgagaacccttctaaatggcccaagagtatagttgatgttgggtgtggcatagggggcagctccagatacctggccaagaaatttggagcaacgagcgtaggcattactctgagtcctgttcaagctcaaagagcaaattctcttgctgctgctcaaggattggctgacaaggtttcctttgaggttgctgacgccctaaagcaaccattccctgacggccagtttgatctggtatggtccatggagagtggagagcatatgcctgacaaagctaagtttgttggagagttagctcgggtagcagcaccaggtgccactataataatagtaacatggtgccacagggatcttggccctgacgaacaatccttacatccatgggagcaagatctcttaaagaagatttgcgatgcatattacctccctgcctggtgctcaacttctgattatgttaagttgctccaatccctgtcacttcaggacatcaagtcagaagattggtctcgctttgttgctccattttggccagcagtgatacgctcagccttcacatggaagggtctaacttcactcttgagcagtggacaaaaaacgataaaaggagctttggctatgccattgatgatagagggatacaagaaagatctaattaagtttgccatcattacatgtcgaaaacctgaataaatggagaggcaggattacttttatagaatgaagcaagtttccaacaggtcgtttatttcgatagttgagaaacaagagaaaaaataaatgaaaggggttgttcgatttttattttagttttctacatatgcaatatctcctatgattggcgaaaatatattatctacttaaataagtggcacgagtatttataattaagtaattaaaaaagaagtattgtatatatagagatagaaaactaatatttgtgacttgtgaaaacatcgtaaaggtgataaagagaaatgttagttaacgccttttttaat

SEQ ID NO: 204 - DNA, 2681 bp, Glycine max
  Clone ID: PAT_MRT3847_22518C.1
tgaatacaagacgtgtctataaaaagttaacgtgacctgttccaatgagcaacaaagagagcaaggagagaggagatgtcggtggagcaaaaagcatcagggaaggaggaggagggaaaactgcagaagggaattgcagagttctacgacgagtcgtctggcatatgggagaacatttggggcgatcacatgcaccacggcttttatgacccggattccgccgtttctgtttgttgactattgaaggttgggcacccgtgagtgacatggccaccgtggtgaggatcccaacaatctcatgcatccacatccacacgttccgttcccaatcccctcgcactttcgccagaatccgggtcggacccaggtcgtgggctcctattcgggcatcggcagcgagctcggagagaggggagatagtattggagcagaagccgaagaaggatgataagaagaagctccagaagggaatcgcagagttttacgacgagtcttctggcttatgggagaacatttggggcgaccacatgcaccatggcttttatgactcggattccactgtttcgctttcggatcatcgtcctgctcagatccgaatgatccaagagtctcttcgctttgcctctgtttctgaggagcgtagtaaatggcccaagagtatagttgatgttgggtgtggcataggtggcagctctagatacctggccaagaaatttggagcaaccagtgtaggcatcactctgagtcctgttcaagctcaaagagcaaatgctcttgctgctgctcaaggattggctgataaggtttcctttcaggttgctgacgctctacagcaaccattctctgacggccagtttgatctggtgtggtccatggagagtggagagcatatgcctgacaaagctaagtttgttggagagttagctcgggtagcagcaccaggtgccactataataatagtaacatggtgccacagggatcttggccctgacgaacaatccttacatccatgggagcaagatctcttaaagaagatttgcgatgcatattacctccctgcctggtgctcaacttctgattatgttaagttgctccaatccctgtcacttcaggacatcaagtcagaagattggtctcgctttgttgctccattttggccagcagtgatacgctcagccttcacatggaagggtctaacttcactcttgagcagtggacaaaaaacgataaaaggagctttggctatgccattgatgatagagggatacaagaaagatctaattaagtttgccatcattacatgtcgaaaacctgaataaatggagagcccagtgcttgaggcatttctggcacagttttttccacttttattttaactttaagactgcacagagagaagcatataattcctgagtcaatatagaatttgtgaagtcagtccaaacttcagtttcaaagatgcctcgtggaacgcttgaagttgttctgatcagcgccaaaggaatcgatgacaatgattttctctccagcattgatccttatgtgattctcacatacagggcacaggagaaaaagagcactgtgcaagaagatgctggatccaagccacaatggaatgagagctttcttttcactgtctctgacagtgcatctgaacttaatctaaagataatggataaagacaactttagtcaagatgattgtcttggcgtggcaaccattcatctggatccagtgtttgaagcgggtagcattccagaaactgcttacaaggttgtgaaggacgaagaatattgtggagagattaaggtggctctcacttttactgttgagaaaaatgaggagcaggattatgctgaacctgaagagagctatggtggatggaaagaatccagtggggaattttaaagtgaaaaaaagtatttacatacttccatggccattatgacccgtataatgaaaaatatgtagttttggggtacttttcggcaatttccattattgtgttttctggtgtgaagcaatggtgttgtgctgttaggttgctttcctccctttggatatatattaaagtacattatgtttgatatattgtctttaatgcattagttaacattttaaaaaaaaaaaaatattttattttgtttgaagttattattattggattcactaattagttatggaaaatgttattttggcccgcagtgaatacgctccgcgttgacatggaatggcctcacttcattcttgcgcagtggacttaaagccataaagggagctttggctatgcccttgataataaaaggatacaagaagaatctgattaagtttgccatcattacatgtcgaaagcctgaataaaaactggagccagagtatagcgttttcatagaatctagtgcatgttttactgtgacggggaaatgtataagagtatatataatgagcggttgtttaaataagaggaaaaaaaaaacgaattcaattgggtgggacctgggagtttttggtactgtctttgttcgttttttattttcgacattatattgtagccgaaaagaaataatcaagatcctattgagcgttaaaggggccgtatgatcaatatgaagatgtaagctaattcctgtttaatttccatttgaacaaaggcatcaataatagtacctcgtgttttattt

SEQ ID NO: 205 - DNA, 170 bp, Glycine max
  Clone ID: PAT_MRT3847_22786C.1
gtcgacccagcgtccgcccacaccaatggcatgctcagggcgcgctggtcccctcttctgcgcaaacccaacacccctcttgtctcccaaacccggtctctccctccagcttaaccctgtgcccacgcgcccttctgcctgccggacgcgcgcttctctgtggctcacgc

SEQ ID NO: 206 - DNA, 662 bp, Glycine max
  Clone ID: PAT_MRT3847_23153C.1
ggacgctgctaattaattattagtttcacttcaatgactcaaagggatcgtcgcaccctatcattcccggcggttcacccatgcgaagccatttctccgccgacacttgtcacctctctaatcactctctcccaatccatatgcaatttccaaccccaatcattccccacccaacgaaggaacgccagggaaacaatacgccaaataagcattgtcttaatgttccttcaagaaattcgactaatccccaactccactatcctctctttggcggaactccacttcaccttacaaaaaatccactttttattgcaagattgcaccctccaaggctcgcgcctcctcctgctcgccaaatcgcaacacgtagcgtccctgttccccgccctccttcgctccgtggccacctctctggacgtcttgcctcttcaccagctccacttgtgccccgaagtcagggagctggccgaccttgttaccaagcaagccagcaaggccaagttccagctggaccccagcgacgcacgtgccaccaaaaccctccacacgcttctgcgccagttctccatgggcaccgaacctgacctcacttccatgcagggaatcctccactacctccaaattagaacctggacagattgcaatacggagattaaattctt

SEQ ID NO: 207 - DNA, 2190 bp, Glycine max
  Clone ID: PAT_MRT3847_23468C.1
ctaagttgcctgtttttggatcccgcaaacaaatagcacatggttttggaaacccctacataaacccctccctgtcgctccatccacagtcacactcgcggtcacagacacacgtcaaaatatccaatcatttcacatggaaagtgccactcaagtcggtgcggcggctcagcccagctcagcttcagcgtcggtgattccctccgccttcgacggcaccctgggccgtcaccttgctcgccgcctcgccgagaccggtgtcagggacgtcttctccgttcccggcgacttcaacttgacgctcctcgaccacctcatcgccgagccgagtctcaacctcgtcggctgctgcaacgagctcaacgccggctacgccgccgacggctacgcgcgcgccaagggcgtcggcgcctgcgtggtcaccttcaccgtcggcggactcagcgtcctcaacgccatcgccggagcttacagcgagaatttgccagtgatttgcatcgtcggaggacccaattccaacgactacggcaccaaccggatcctccaccacaccatcggtttacccgatttcacccaagagcttcggtgctttcaggccatcacgtgttttcaggcagtggtgaataacttggacgatgcgcatgaacttattgacactgcaatttctactgctttgaaggaaagcaagcctgtttatatcagcataagttgtaaccttcctggaattcctcatccaacttttgctagagaccccgtgccattctttcttgcacctaaggtaagcaatcaagaaggattagaagcagcagtggaagcaacggctgctttactgaacaacgctgtgaagccagtgattgtgggtgggccaaaactaagggtagcaaaggcacaaaaggcctttctggagtttgcagaagcaagtggatatccaatagcagttatgccgtccgggaagggactagtaccagagcatcatccacatttcattgggacatactggggtgctgtcagctctagcttttgtggggaaattgtggagtctgctgatgcatatgtttttgttggccccatcttcaatgactatagctccgttggatactcgttgttgataaagaaggagaaagccataatagtgcagcctaatcgggtaaccattggcaatggtccttccttgggctgggttttcatggctgatttcttaactgcattggctaaaaaagtgaagaccaacaccgcagctgtggagaattaccggcgtatctatgtcccaccaggcattcctctgaggcgagagaaggatgaaccacttagagttaatgttctattcaagcacattcaagaactgctaagcggagatactgctgtaatagctgaaactggagactcatggttcaactgtcagaagctccatctgcctgagaattgcgggtatgaattccagatgcagtatggatccattggttggtcagtaggtgctactcttggatatgcacaggctgcaacagacaagcgtgtaattgcttgcattggtgatggcagttttcaggtaacagcacaggatatttcaacaatgattcgctgtggacaaaagaccatcatctttctcatcaataatggaggttatacaattgaagttgagattcatgatggtccatacaatgtgataaagaattgggactacactcgctttgtggacgctatccataatgggcaaggcaaatgctggactgccaaggtacgtacagaggatgatctgactgaagcaattgcaaaagctactggaccacagaaagattcactatgttttatagaagtttttgtacacaaggatgacaccagcaaagaattgctggaatggggatctcgtgttgctgctgctaacagtcgtcctcctaatcctcaatagaaaatcatttcctaattattggcctgttttgtgtattttgttgaatagagttccactactggatatttacaagagaaaaacgacaaaaatgaaaaataagttgaaataaatgtttgcttttccagatttgtatctggtctcgtgttgctgacttgttgacttgttgtaatcatgaactattattgctttgtaataatgtcttgtataatggaattgttaatgaatcaaagaggatatagccattgtatgtaaattcatgtaaaaaaaacacgattgatattgag

SEQ ID NO: 208 - DNA, 242 bp, Glycine max
  Clone ID: PAT_MRT3847_23929C.1
gtcaagcagttgaacgaccttcttacagagaagaacaaggacactgggtgggacgtgcctatccacgtcgacgccgcgatcggagggttcatagcgcctttcctctaccctgagctcgagtgggacttcaggctgcctctggtgaagagcatcaatgtcagcgggcacaagtacggcctcgtctaccctggtgttggctgggtcatctggcggagcaaggatgatctgcctgaggagctcat

SEQ ID NO: 209 - DNA, 211 bp, Glycine max
  Clone ID: PAT_MRT3847_24039C.1
tggcacctccaatctataatcctgcactcaatcctctgatggcccggcctctaatttggcctgctgcaccagcgcaagcttggtatccgcaacaagcagcatatccacaacaatcagctgtttcagttcctcccatagttgctgggctccaccacaacagccactattcccaattcagaatgtgcctactcctatgacatcagcagctgct

SEQ ID NO: 210 - DNA, 1262 bp, Glycine max
  unsure (1)..(1262): unsure at all n locations
  Clone ID: PAT_MRT3847_24409C.1
cccacgcgtncgcccacgcgtncgnccacgcgtacgactacttttacaaaatatgcacgtttcttttcccacacactatcttcattcctataaacatcccttttttcataaccctcagagttcccttttccaaaatatccaccttttggggagaccaccggagatatgtacggacggagtgattcttacgaatccgatttggcgcttctggattcgattcgccgccacttgctgggagagtccgaattgatattcggagccccgaatttcggttcgggtcggagctccagtttcagcagcttggactcgtgtttgagtgatgattggggagagcttccgtttaaggaggacgattcagaagatatggtgttgtacggcgttctccgtgacgcagttaatgtggggtgggtcccatccctcgatgccggctcgcccgagagcgtctcgtcgggttttccggcggtgaagctggagcctgatgtcatgccggcgttgattaatccgtgtccgcctccggcgccggcggtggaggagaagaaggttgttccgccgaaggggaagcactaccgcggcgtgcggcagcggccgtggggaaagttcgcggcggagatccgggacccggcgaagaacggcgctagggtttggctggggacgtttgagacggcggaggacgcggcgttggcgtacgaccgcgccgcctaccggatgagagggtcgagggcgctgctgaattttccgttgagggttaactccggcgagcccgatccggtgagggtgaagtcgaagcggtcgtcgtcgccggaaagtacggcggcgctgccggcgaagagaaagaaagttgtggtggtggggacggtgcaagagcaagtggggagtcaagtggcagagtgtacacgtggcgagcagttattggttagctgaggtggattctaaaactggtgttgtgtttattaaatacaataaatacaatacacttttgtaattatgtgatgtgcgtgtgtgtgtaaagcacttagctatattatagccatcatccaactcaattttggaacaaagaaaaaaaggtgaaggatgaggatagatgattttagcacatcaaatggtgagtggtgtgaccccacgggaagaaaaaaaaaagagggggttcaaagaagatgatgaggaatgacgggggtgaggaactgaggatatgtaatttggctttgtgaatactaccaaatttgtattgttcaaaaaaaaaaaaaaaaaaaaaaaaaaagaaa

SEQ ID NO: 211 - DNA, 915 bp, Glycine max
  Clone ID: PAT_MRT3847_247C.1
gcgatttacaccttcatatcaatgtggtttgttggtggcctgactgcctttcatttatatcttataagtacaaatcagactacatatgagaacttcagataccgatatgatcgacgggccaacccgtataacacaggagtgttcaataatttcttagagatattctgcaccagcattccccaatcaaagaacaatttcagggcaaaggtaccaatggaaccagtattacctgctcgatcggtgggtggaggctttatgagcccgagcatgggaaaagctgttgatgacatagagatgggcaggaaaaccgtgtgggccgacatgggtactgctcttgatccttctgaaggtcaattaaatgaccgcgtggctgtaaaggatggggaatttggtgagttgtctccagaaattaggacaacagtagacgaaactagtcaccgtgccggaatgcatcccaggagatccagctggggaagaaaaagtggaagctgggaaatgtcccctgaagttcttgctttggcagccaaggttggggaatcaaatcgaatgggtggaggtagcagcagtttgaccactgagaacaggcatacatagccactgaaattatattagtctggcaaagggttttatttgttgtaattaaacggtgttacatttctgatgcagtaaatcatcagcaaaattaattgtatttgcaatgtgggggatgagggctttggagggtgtttgttagtgttgttttcgccatattgtgcttctagggagttgttgtgttgttgtgagtgagcttttttcctttgccttgtgttgtatcacgcttcccaattaactatttgtcttaccaattaccaattctgtctttgctaaaaaaaaaaaaaaaaaaaaaaaattgggaattattcttgccactcagct

SEQ ID NO: 212 - DNA, 1369 bp, Glycine max
  Clone ID: PAT_MRT3847_25106C.1
cggagccaccatctcgcttcttccctttgctttgtttcttcacaggtcagagcgtcctccactcacattctctgatagcaaaaagtaggcgtaaggagaaaaaggatgaggtagagagaaggtgggagtggcagagagaagattacaaagaaatggggagatgggtgaattgtaggggcaatatattcccattcctggggatggtgatggctatgctagctcaaagtggaagcatggtggtaatcaaagttgccatgactgatggaataaacaaatatgtcatggttgtgtactctttggcactctccaccatcttgcttcttccctttgccttgtttcttcacaggtcagagcgtcctcctctcacattctctgcactttgcagtttcttcttgcttgcattctttgggagttcaggacagataatggcttatgttggcatagatctaagctctcctactcttgcatcagccatgcttaatctcattccagctttcacttttatacttgctctcatttttaggatggaagaagtacattggagacattccagcagccaagccaagttcttaggaacaatagtatcaattgctggagcatttgttgtgatactgtacaagggcccacccatctttaagacacattcgtcaaactcttcgaacaaatttctattttcgcagcaactaaactggatcttgggagggatgttctgtgctggcgattctatagtttgttccctgtggtacatatatcaggcttcggttgcatacaaataccctgctgtaacaaccatagtattcttccaactcttattttcaaccattcagtgtggagtatttgccttaattgtagttcaagatcaaacggaatgggagctgaagttagatattgggttgattggcattgtatatcaggcaattgctgcaacattgatacgttacatcttatgcacgtggtgcgtccttaaagctggacctctgttctgttctatgttcaagcctgtggcaatcatcttctccgttttcatgggtgcaatttttctcggggatgacttaagccttggaagtttgattggtgcggttataatcgtgataggattttatgccgtactgtggggaaaatccatagaagataacaagattgagaaaggggttgagaacttggagtcatcgtgccataatgttcctttattacaaaataggacgtaacaggtaggttgaatatttgacatggagaacaatgtgatattgcaaaacccttaaaaagttagttagaagttgtaatgtttatgtattggtttttcatgtatctatttttaataataataatatttttgagaaaaatgttttccaaaaatattttttagccc

SEQ ID NO: 213 - DNA, 276 bp, Glycine max
  Clone ID: PAT_MRT3847_25202C.1
aaaatgcttgaaaagtttcaccttgttggtattcctcctgctcccagaggtctgcctcaaattgaggtcacatttgacattcatgctaatgggattgtgactgtctctcccaaagacaagtccactggtaaagaacaacaaataactattcggtcatccggtggactctcggatgatgagattgaaaagatggtcaaagaagcagaattgcatgctcagaaagaccaagagagaaaggctctcattgacattataaacagtgctgacactaccatc

SEQ ID NO: 214 - DNA, 587 bp, Glycine max
  Clone ID: PAT_MRT3847_25688C.1
gacaacacacattcccatcatcacaccaacaacaacacaccatgctcacagttctgcttctcttctcactccttcttaccacctctacttcccacaacataatatcataccctcatttccaacaactcaatgtcaaacaaatcctcacagaaaccaaactcaacccaacaaatacctacaaacacctccaacaccaaaaactcaacattgccaccgaagcatcttcaccggcaaaatataaactgaagctagttcacagagacaaagtccccacgtttaacacctcccacgaccaccgaacccgattcaatgcacgaatgcagcgagacaccaaaagggtcgccgccctccgccgccatctggccgccggaaaacccacctacgccgcggaggcattcgggtcggacgtggtttccggaatggagcaaggaagcggagaatacttcgtgagaatcggagttggaagcccacctcgaaaccagtacgtggtcatggactcaggcagcgacattatatgggttcaatgcgaaccctgcacccaatgcttccaccaatccgaccccgtttaaccccggcgatccttcttc

SEQ ID NO: 215 - DNA, 730 bp, Glycine max
  Clone ID: PAT_MRT3847_25700C.1
ctcgagccgattcggctcgagtaccgagaagacgacagaaggggggagagaaacagttatgcataaagagcaataagaacaaagagtgaaaggatgaggtagctagagagggtgggagtgagtgggcagagagaaggtttcaaagaaatggccacatgggtgaatggttggggcaaattactaccatttctggggatgttgatggctatgctaactcaaagtggaagcatggtggtaatcaaatttgctatgactgatgggatgaacaagtatgttatggttgtatattcaatggcactctccagctccatacttctcccctttgtcttgtttctacataggtcagagcttcctcttctcacagttcctgcacttggaagcttctttttgcttgcactctttgcgagttcagcacatataatggcttatgttggcatagaactcagctctcctactcttgcatcagctatacttaatgtcattccagctttcacttttgtacttgctctcattttcaggatggaagaagtacattggagatattttagcagccaagctaaagtcttgggaacaatagtgtcaattggtggagcatttgttgtgatactgtacaagggtccacccatctttaggacacattcatcatacacttcaaacaaactttaattttcgggacacccaaactggatcttgggagggatatttttggttgctgattctttccttagtt

SEQ ID NO: 216 - DNA, 1732 bp, Glycine max
  Clone ID: PAT_MRT3847_25891C.1
gttgtaaaaaagattcatgttcagttagtatcttgtgaaggcgatcgaatactagaaagaaacaaatcgatcaagcttgaaagataggaagaatttaagaaatgggtgaggaggaaatagatgattctcccttgattcaaggttttccttccggcgacgtgccatttaggagaactggtaatgtagagagggcagtagcacatataataactggtgtgataggggcaggggtgctgtctctagcatggtctgtggcacagttagggtggattgctggtccttttatcatcatagtctttgcaggaacaacctttctttcagcaaaccttctttctgactgctacagattccctcatcctctctatggcaacattaggtgcccctcctacattgatgctgtcaaggtttacctaggagactcaaggcaaaaggtgtgtggagtgctggtgcatgcgagcttatatggtgccaccacggcctatgtcattacatctgccaccagcatcagagcaatactgaaatcaaattgttatcacaaggaagggcatcaggctccttgtaaatatggggatgcagtatatatgatgctgtttggactagttcagatcataatgtcattcataccagatctccacaacatggcatgggtttcaattgttgcggccataatgtcctttacatactcatctattggacttggacttggcatcacaacagtaatagaaaatggaagaattatgggtagtttaacaggagtaccggcttcaaatattgctgacaagttatggttagtcttccaaggaattggtgatattgcctttgcctatccatacacagtcatcctccttgagatacaggacactctagagtctcctccaccagaaaacaagaccatgaaaaaggcctccatgattgctatcctcattacaacattcttctacctctgctgtggatgctttggatatgcggcttttggaaatcaaacaccaggaaacctcttgacagggtttggattttacgagccttactggctcattgactttgccaatgcttgcattgttcttcacttggtaggaggatatcagatttacagtcagccgatatatggtgctgttgacagatggtgttcaaaaagataccccaacagtggatttgtgaataatttctaccaattgaaactgcctcggttgccagcttttcagctaaacatgttcaggatatgttttagaacagcttatgtggtttccacgactggacttgcgatcctatttccttacttcaatcaagttataggagtgttaggagccttaggcttttggccattggctatatatttcccggtagagatgtactttgtgcagaggaaagttgaagcttggtctagaaaatggattgtcctcaggaccttcagctttatttgctttctggtgtcattactgggtctcattggatcacttgaaggaatcataagcgagaaactaagctaatgaagggtgcttcatttgtttgagtttaatgtcttgttgctcatatcttccatgtaattcagtttcatgctaattctattactattgagagttaataaaggggataccaattatgtggggatgtgtcaaaatgaaggtggtgttgagcatggtatagttctgtttggtgaagaactccctttaaaggtgtaatgctacataaacaactctctatgcacataaacttgtattgatactggattatt

SEQ ID NO: 217 - DNA, 2263 bp, Glycine max
  Clone ID: PAT_MRT3847_26125C.1
ggctcgagacgtaagctagctttggcatctttttcccctttttcctccaagcctataactatattcaacccaatctgcactggactcaagtgtaaaaagacattttcctgatcttctgctgtgccaagaaagcagtaatctccatgagcttctattgaattgatactttgatcaagatggatgggaaaaactctcttcaaataactagaagtggtattggtgcttatgatgatgatggacatgccaaaaggactgggaatttgcagagtgctgtagctcatatcattactgctgttattggttctggtgttctttctcttgcatggagcacttcccaattaggatggattggagggccattttccttgctttgttgtgcaattgtcacctatatttcttcattcctcctgtctgattgctacagaactcctgatcctgtcactgggaaaagaaactactcttacatggatgctgttagagtttatcttggttataaaaggacatgtgtagctggcttccttcaatttttgactttgtatgggactagtattgcttatgtactaaccacagcaaccagtctgagtgcaattctgagatcaaattgctatcacaagaaagggcatgaggctccttgcaaatatgggggcaatctgtatatggcactgtttggacttgttcagattgtaatgtcattcataccggatctccataacatggcatgggtttcagttgttgccgcacttatgtcctttacatactcattcattggactaggacttggcatagcaacagtcataaaaaatggaagaattatggggagcttgacaggaataccaactgataaaattgctgacaaattttggttggtcttccaagcacttggtgacattgcctttgcctatccatactccattctccttcttgagatccaggacactctagagtctcctccaccagaaaatcaaacaatgaaaaaggcttccatgattgcaatcttcattacaacattcttctacctgtgctgtggatgctttggatatgcagcttttggaaatgatacaccaggaaacctcttgacagggtttggattttttgagcctttctggctcattgaccttgctaatgcttgcatcattcttcacttggtgggaggatatcagatttacagtcaaccaatatacagtactgttgacagatgggcttcaagaaaattccccaacagtggctttgtgaataatttctacagagtgaaacttcctttgcttcctggttttcagctaaatcttttcaggttctgctttagaacaacctatgtgatctcaaccattggtcttgcaatctttttcccttacttcaaccaaatcctaggagtgttaggagccataaacttctggccattggctatatatttcccagtagagatgtactttgtacagcagaaaattgcagcttggagtagcaaatggattgttcttagaacattcagctttgcttgctttctggtcactgtaatgggcttggttggctcacttgaaggaatagtaagtgccaaattaaaatagctgaaagcctgaaaggttgtttatgccactccccttagtaatgcttactctatttgagtttgtagattgatggttatataatgtttcatataaaaaagtttaaagctgaatgctagtgttattgagagtaagatagagtacaagcaattgtgggggatttcagaaagtgaataaagtggtactgccagtgccattggaataatacaagttttgtttgatgaagaactcacctcaaaggagagaattctaacaaatttgtagtttgatattaatgtaattgtactgtatcatcaaatagattatatcaaattttaaattaatgattattcatatcttccatgtaattcagtttcgcattaattctattactatttactattgagagttaataaaggggataacaattatgtggggatgtgtcaaagtgaaggcgttgtggacgtggaatagttctgttgggtgaaaaactccctttaaagaaagtgtaatgctacacaaacaactccacataaacttgttgataactgctaaatatctgtgaatttataggaattaattagtcaaattttggcttaaaattagttatttagcagttatttgtaattaaaagtgagaaaattaatttaaattgaatttctggttgcagatacgaaaaataaggtcgcatttagcaaaagtggcacagaaaggaagaaaaaaag

SEQ ID NO: 218 - DNA, 1879 bp, Glycine max
  Clone ID: PAT_MRT3847_26127C.1
ggctcgaggacatggtcctaaagtctggcctgagatgaatataaaatggactaatcttcttctggcttgttttcttcagaatcatgggggttacacagagttacaaattgctgcaaatggaataacttgttttcttcagtggcttctctctacctctcacctgaaatcaacttgtaatcttcatgagcttgcattgaattgatactttgataaagatggatgggaaaaaatctctacaaataactagaagtggtactggtgcttatgatgatgatggacatgccaaaaggactgggaatttgcagagtgctgtagctcatatcattactgctgttattggttctggtgttctctctcttgcatggagcacttctcagttaggatggattggagggccagttgcattgctttgttgtgcaattgttacctatatttcttcattcctcctgtctgattgctacagaactcctgatcctgtcactgggaaaagaaactactcttacatggatgctgttagagtttatcttggttataaaaggacatgtgtagctggcttccttcaatttttgactttgtatggtactagtattgcttatgtactaaccacagcaactagtctgagtgcaattctgagatcaaattgttatcacaagaaagggcatgaagctccttgtaaatatggtggcaatctgtatatggcactgtttggacttgttcagattgtaatgtcattcataccggatctccataacatggcatgggtttcagttgttgcagcacttatgtcctttacatactcattcattggactaggacttggcatagcaacggtcataaaaaatggaagaattatgggaagcttgacaggaataccaactgataaaattgctgacaaattttggttagtcttccaagcacttggtgacattgcctttgcctatccatactccattctccttcttgagatccaggacactctagagtctcctccaccagaaaatcaaaccatgaaaaaggcctccatggttgcaatcttcattacaacattcttctacctgtgctgtggatgctttggatatgcagcttttggaaatgatacaccaggaaacctcttgacagggtttggcttttttgagcctttctggctcattgaccttgctaatgcttgcatcattcttcacttggtgggaggatatcagatttacagtcaaccaatatacagtactgttgatagatgggcttcaagaaaattccccaacagtggctttgtgaataatttctacaaagtgaaactgcctttgcttccaggttttcagctaaatcttttcaggttctgttttagaacaacctatgtgatctcaaccactggtcttgcaatcttttttccttacttcaaccaaatcctaggagtgttaggagccataaacttctggccattggctatatacttcccagtagagatgtactttgtacagaacaaaattgcagcttggagtagcaaatggattgttcttagaacattcagctttgcttgctttcttgtcactggaatgggcttggttggctcacttgaaggaatagtaagtgccaaattaaagtagctgaaagatttatgccactccccttagtaatgcttactatatttgagtttgtagctagattgatggttgtataatgtttcatgtaaaaaagtttaaagttgatgctaagattgttgagagttagatagggagtaagcaattgtgggggatttctgaaagtgaataaagtggtactgtagtctttggaataatacaagttttgttttatgcagaactcacctcaaaggagagagttcaaacgaatttgtagtttgatattgatgttattgtgctgtatc

SEQ ID NO: 219 - DNA, 675 bp, Glycine max
  Clone ID: PAT_MRT3847_26404C.1
aacttagccaactatatcttgggagtaagcatgccaggaaaaattcctatagaattaggaaatttaattagcttagcgctcttgaacatggcatataactactttgaaggaaaaataccaattgaaattggctctcttcagaagcttcaatacttttatgttgcaaaaaacaacttaacaggagaagtcccaccatccatagggaatctttcatccctgattgagctctcggtaggtttgaacaacttagagggaaagattccacaagaagtttgtagcctcaaaaacttgtcactgatgtcagtgcctgtcaacaaattgtctggaaccataccctcagaggtttttagcctttcctcactaacaaatttgctggacttatcacagaactccttgagtggtagtttaccaaatgtagtgagcaagttaaaaaatcttgagaagatggatgtctctgaaaatcatctgtctggtgatattcctggaagcattggagattgcacaagcttggagtacctttatttgcaagggaattctttccatggaatcatacccaccactatggcttcactgaaaggtcttagacgtttagacatgtcacgaaaccacttatctggatcaattcctaaaggtctgcaaaatatttctttcttggcatacttcaatgcatcattt

SEQ ID NO: 220 - DNA, 1215 bp, Glycine max
  Clone ID: PAT_MRT3847_26633C.1
aagatggaacgaagtggcggaatggtaacggggtcgcatgaaaggaacgaacttgttagagttagacacggttctgacagtgggtctaaacccttgaagaatttaaatggtcagatttgtcaaatatgtggtgacaccattggattaacggctactggtgacctctttgttgcttgtcatgagtgtggcttcccactttgtcattcttgttacgagtatgagctgaaaaatgtgagccaatcttgtccccagtgcaagactacattcacaagtcgccaagagggtgctgaagtggagggagatgatgatgacgaagacgatgctgatgatctagataatgggatcaactatggccaaggaaacaattccaagtcggggatgctgtgggaagaagatgctgacctctcttcatcttctggacatgattctcatataccaaacccccatctagtaaacgggcaaccgatgtctggtgagtttccatgtgctacttctgatgctcaatctatgcaaactacatcagatcctatgggtcaatccgaaaaggttcactcacttccatatgctgatccaaagcaaccaggtcctgagagtgatgaagagataagaagagtgccggagattggaggtgaaagcgctggaacttcagcctctcggccagatgccggttcaaatgctggtacagaacgtgctcaggggacaggggacagccagaagaagagagggagaagcccagctgataaagaaagcaagcggctaaagaggctactgaggaatagagtttcggctcagcaagcaagggagaggaagaaggcatatttgattgatttggaaacaagagtcaaagacttagagaagaagaactcagagctcaaagaaagactttccactttgcagaatgaaaaccaaatgcttagacaaatattgaagaacacaacagcaagcaggcgagggagcaatagtggtaccaataatgctgtgtaaacttatagatggagtagatatagagagagagaaagaggaaagaaattaaacattcgttgatgattctttctaggtgtgcgtttggaatacaatgaagtaaaggatgaaccttaagacatgctttgtcctaaaatagtgtgatctgatgtaccattgttgatgagtaatgtaattatcatacacagttttttacagtctcattttaattaataattatcaaactacttgatt

SEQ ID NO: 221 - DNA, 1875 bp, Glycine max
  Clone ID: PAT_MRT3847_26634C.1
ctcgagccgaatcggctcgagtacggctgcgggaacaacaacaacggaagaaagagagagagagagagagagagaggtgtgaagttggtgaaggtttttgagaagaaagatggaacgaagtggcggaatggtaactgggtcgcatgaaaggaacgaacttgttagagttagacacggctctgatagtaggtctaaacccttgaagaatttgaatggtcagagttgtcaaatatgtggtgataccattggattaacggctactggtgatgtctttgtcgcttgtcatgagtgtggcttcccactttgtcattcttgttacgagtatgagctgaaacatatgagccagtcttgtccccagtgcaagactgcattcacaagtcaccaagagggtgctgaagtggagggagatgatgatgatgaagacgatgctgatgatctagataatgagatcaactatggccaaggaaacagttccaaggcggggatgctatgggaagaagatgctgacctctcttcatcttctggacatgattctcaaataccaaacccccatctagcaaacgggcaaccgatgtctggtgagtttccatgtgctacttctgatgctcaatctatgcaaactacatctataggtcaatccgaaaaggttcactcactttcatatgctgatccaaagcaaccaggtcctgagagtgatgaagagataagaagagtgccagagattggaggtgaaagtgccggaacttcggcctctcagccagatgccggttcaaatgctggtacagagcgtgttcaggggacaggggagggtcagaagaagagagggagaagcccagctgataaagaaagtaaacggctaaagaggctactgaggaaccgagtttcagctcagcaagcaagggagaggaagaaggcatacttgattgatttggaaacaagagtcaaagacttagagaagaagaactcagagctcaaagaaagactttccactttgcagaatgagaaccaaatgcttagacaagtacattcatgttatcattgtcatcatcataacgttatatatacatgtctctagctcatcactgtcaccatgatgatgcaattgttctttaagtgggctgcctgatcttatttactttcgataaaattgacacaccaaaaccttttaaaatggaatcatgactaactcttgtctattgttgacttgtactctaaaaatttgttttagaaaggaacaaaggggatattcatgttatataaaatatgtccattatcattagtaacatattagactttagataggactttgtgatatcatatcaaatatggtttaggaaactgtgtgttggttcaagtggaaggaattcaagttcttttaaggatgttttactgggttatactgagattaatttgcatggaaaaaataccaagattcatatgcttgtaacttctcctatgtgccaataccaaaccataatttgcatactatgtgtcacttttgtctggctttattttgctcaatcaggcaattgctttgcagatattgaagaacacaacagcaagcaggagagggagcaataatggtaccaataatgctgagtgaacataatgtcaaaagatggcagagaaaacttatagatggaatagatttagaaagagagaatacattagccagaaagagaaaaaaaaattggacattagttgatgattctttctaggtgtgcgtttggaatacaatgaagtaaaggatgaaccttaagacatgctttatcctaaaatagtgtgatctgatattccattgttaatgagtaatgtaattatcatacaaacaatttgtagtctcattttaattaataattattaaactacttgatt

SEQ ID NO: 222 - DNA, 497 bp, Glycine max
  unsure (1)..(497): unsure at all n locations
  Clone ID: PAT_MRT3847_26863C.1
ccacgcgtccgcaccaatacactacaccataccagaaggagcaaaaataagacgagatggcggacgagcgcttgcctcaaacggccggcgcccgcacggctctcgccagagctactggatcctcggcacggaaacgcgcccgcgatagttaggtgcgcctgtgggcccggccggctcgtcacttacataggcgcacgcacccccgcctggtgcgtcgtcgatcgctgctttgctggcgcgcggcggccctgtgtggcacagtagaggtctgctgaggacgacgaccggaggcgtgctgcgtggatggtcctcatggccgggatgctccccggcgtggagtgcgcgcggcggcggcgggtccggcagggcggtgcggtgatgggagcggaggcggcccgaggaggcacggngcggcggtcctccttctgcctgtacgcggccggccacggcggcgccggcaattctggcaagcggagcggcggcgtggtgcaacggca

SEQ ID NO: 223 - DNA, 202 bp, Glycine max
  Clone ID: PAT_MRT3847_27175C.1
caagagcgaggccgtgctctcctacgtctgcgacggaatcctcaaactcctcgacacgcgcctcgtcccctccgccgcctccggcgactccaaggtcttctacctcaagatgaagggagactaccacaggtaccttgccgagttgaagaccggcgctgaccgtaaggagggcgtcgtaatcacgctttccgacttacaaagc

SEQ ID NO: 224 - DNA, 708 bp, Glycine max
  Clone ID: PAT_MRT3847_27189C.1
tgatcttctactctctgggtatggcattgtccaaggatatatctgacgttaaaggagataaagcatacggcatcgatactttagcgatacgtttgggtcaaaaatgggtattttggatttgcattatcctttttgaaatggcttttggagttgccctcttggcaggagcaacatcttcttacctttggattaaaattgtcacgggtctgggacatgctattcttgcttcaattctcttgtaccaagccaaatctatatacttgagcaacaaagtttccactatatcgttttatatgttgatctggaagttgttgtacgcagcatactttctcatggctttaattagataaggatgttgaggaaggttaaagcaatgttcatagcacatttggcagaataaaaagaatatggtatgcatctaaatttattaaaacaataaaaactgtagagatgtgtgtaccctggatagtaatttgcgaaccattaaactctttttttaattgtgtgaagactttaattatatatattctcgtgaagactgacttctatatcatcaaatatttgtaagtgcatggaagtcaatctgatttgagggatgcttctagttcatatgtgaaggaagaaagaatagaggaagttcacttctgtgttcaagtgaaagaaaaaaaaaaaaaaaaaaaaaaaaaaaaaaaaaaaaaaaaaaaaaaa

SEQ ID NO: 225 - DNA, 355 bp, Glycine max
  Clone ID: PAT_MRT3847_27885C.1
aaccctccttcaaggtcaaaaaaaccaaccaaaaatctagggttttcacaaaaaaacttaggaaaaagctcaactcaagggccggacttattgaaagggacaaaaaaatctgggtctacttctacccattaaaaattcactacaacaaggtctaatgcatggaactaggggggggaggaccggggcatttggaaaaccatgttctggggctgggggcccaagtaaaaaaacccaagaaaattctgccccccaattttaaccccaagaggggtttgcccccttaggagacatgaagactctttgttgacccggggggggaggctcggctcgtgcggggggggggccgggggggccc

SEQ ID NO: 226 - DNA, 1829 bp, Glycine max
  Clone ID: PAT_MRT3847_28411C.1
gccggacgcgtgggctgcgagaagacgacagaaggggatcacgcaaaaggatggatgatggaagaaacaaagagaagggaaatatcaggaggtgcgagtaccggagccaaacgcgggtgtgtgtgtgtgtgagggagagagagatgcagttccattcagaaactccaaactaaacatccctggcgacaaccttaggaatctcgatcgctgaaaaaacctatgcagccccgaacacactctctgcattccaacttgtttaagtcatgcctttcgattcacccttctctcaataaatttttaatcagattcttggccaccgccacactcataataaagttttgtttttccaaataaagggaatggcgactcctgttgagcctccaaatgggatcagaactgaagggaagcattattattccatgtggcaaaccctgtttgagattgactcaaaatacgttcccatcaagccgattggtcgcggagcatatggaattgtgtgctcttctgtgaatagagagataaatgagaaggttgccatcaagaagatacagaatgcctttgaaaaccgggttgatgccctgaggactttgcgcgaactcaagcttcttcgccaccttcaccatgagaatgtgattgctttgaaggacatcatgatgcctgttcacaggaatagtttcaaggatgtctatctggtttatgaactcatggacacggatttgcatcagattattaagtcttctcaagctttgtctaatgatcactgccagtatttcctctttcagttgctccggggcttgaaatatcttcactccgctaacattcttcatcgtgacttgaaacctgggaatcttctaatcaatgcaaattgtgacctaaaaatatgtgatttcgggctagctcgtactaattgcagcaagaaccagttcatgaccgagtatgttgtcactcggtggtatagggcaccagagctcctactctgctgtgacaactatgggacatctattgatgtttggtcagttggatgtatctttgcagagcttcttggccgaaaaccgattttccctggttcagagtgtctcaaccagctgaagttgattatcaatatccttggtagtcaaagggaggaggatattgaattcattgataacccaaaggcaaagaagtatatcaaatcacttccttattctcctggaacccccctttcgcaactttatcctaatgcgcatccattggcaattgatcttctggcaaagatgcttgttttcgatccaacaaagaggatcagtgtcactcaagcacttcaacacccttacatggcccctctgtatgatcctaactgtgaccctccagccgtcattccaattgatcttgacattgatgaggatctaggggaagagatgataagggacatgatgtggaaagaaatgcttcattaccatcctgaatctgctatggagagtgcagggttgtgctaatgatatttacttcctttcatagttatgttcccttttgttggtgccaggatagttctaatatcataacttgcttcaaataattaggagggctttgtcatcagtgagctccttatatgttctgttttctatttattgaaagcagagagaaacagcaaaaagatgaccatcttaaaaaaaaatgtgttattgctgatgatgcattgtagtctttaaacgccatgttgagagattgattttgtactgaactttgtattgtagttgccttgttttgttgtacataattatgtttctgtgtctttcataaaccattttgtaaattaagtctaatgtttatcaataatgtgttattgtttg

SEQ ID NO: 227 - DNA, 365 bp, Glycine max
  Clone ID: PAT_MRT3847_28504C.1
aacatgaaacttgctgaagatgttgatttggaaaaaatagccaaggatactcatggttatgttggtgctgatctagctgctttgtgtactgaagctgcacttcaatgcatcagagagaaaatggatgtgattgacttggaagatgagacaattgatgctgaaatattgaactccatggcagtgacaaatgagcatttccagactgctcttggatcaagcaatccttctgctctacgtgaaacggttgttgaagtgcccaatgtcagctgggaagatattggtggtctgaaaatgttaagagggaactccaagagactgttcaatatccagtggaacaccctgaaaaatttgagaatttggaatgt

SEQ ID NO: 228 - DNA, 2516 bp, Glycine max
  Clone ID: PAT_MRT3847_29389C.1
ccacgcgtccgctctctataaaagcgcttccttctcatttggaacctattccattctctaaaccctaaacgactctatctctcttcgttttgttcttccttgcgctcctcctcgttcgttcgttctccctcgcgtagatcggcaatggcggagaccgagacgtttgctttccaggctgagatcaaccagctcctcagtctcatcatcaacaccttctactccaacaaggaaatcttccttcgtgaactcatcagcaacgcctctgatgctttggacaagattagatttgagagtttgacggacaagagcaagctcgatgctcagccagagttgttcattcatattattcccgacaagactaacaattcgctgaccattgttgacagtggcattggcatgaccaaagctgatttggtaaacaacttgggtacaattgctaggtctggtaccaaggaattcatggaagccttggctgctggtgctgatgttagtatgattggacagtttggtgtggggttctactctgcatatcttgttgccgaaaaggtcattgttacctccaagcacaatgatgatgagcagtacgtttgggagtcccaagctggaggttcattcactgtcaccagggatacctctggtgaggttcttggcaggggtactaagatcactctcttcctcaaggaggatcagctagagtaccttgaggagcgccggttgaaggatttgattaagaagcattctgagttcattagctacccaatttctctttgggttgagaagactaccgagaaggagatttctgacgatgaggatgaggaagagaagaaggatgaggagggtaaggtggaggatgttgatgaggagaaggagaaggaagaaaaaaagaaaaagaagatcaaggaagtgtcacatgaatggtccttggtgaacaagcagaagcctatttggatgaggaagcctgaggagatcacaaaagaggagtattctgctttctacaagagtcttaccaatgactgggaagagcatttggctgtcaagcacttctctgttgagggtcagttggagtttaaggctatactctttgttcccaagagggcaccttttgacctctttgacacaaggaagaagcctaacaacattaagctctatgtccgccgtgtctttattatggacaactgtgaggagttgattcctgagtatttgggctttgtcaagggtattgttgattctgaagatctcccactcaacatttcaagagaaatgttgcaacagaacaagatcttgaaggtcatccgtaagaacttggtcaagaagtgccttgagctcttctttgaaattgcagagaacaaggaggattacaacaagttctatgaggctttctctaagaacttaaagcttggtatccatgaggattcccagaacaagggaaagattgctgaattgctcaggtaccactccaccaagagtggtgatgagctgacaagcctcaaggattatgtgaccaggatgaaggaaggtcagagtgacatctactacatcaccggtgaaagcaagaaggctgttgagaactccccattcttggagaagttgaagaagaaagggtatgaggttcttttcatggttgatgccattgatgaatatgctgttggccagctcaaggaatttgagggcaagaagcttgtctctgccaccaaggagggtctcaaacttgacgagagtgaagatgagaagaagaagcaagaggagttgaaggagaagtttgacaacctatgcaaggtgatcaaggatgttttgggtgacaaggttgagaaggttgtagtctctgaccgtgttgttgattcaccatgctgtctggtgactggagaatacggttggactgcaaacatggaaaggatcatgaaagctcaagccctaagggacaacagcatggcaggatacatgtcaagcaagaagacaatggagatcaaccctgagaacccaatcatggaggagctcaggaagcgtgcggatgctgacaagaacgacaaatccgtgaaggaccttgttctgttgctgttcgagactgctcttctcacttctggtttcagccttgacgaacccaacacttttggaaacaggatccacagaatgttgaagcttggactgagcatcgacgaggatgcagctgaagctgatgctgatgctgatatgcccccactggaggaggaggctgaagctgatgctgagggcagcaaaatggaggaggttgattaaacttttatatcatgcggaacggagttggctatgttttttctctttttttcctttcggattgctctgacagtgtttaatggataattagctaattagctataatttcgtggttctatttgcgagttcttggttgtagctttttttttttagttggatttctggcgttttctgaaattcatgataattttctggatggctttgctaacttgtccatgatcacatctttaatcgtgttatttaaacaattaattcttttctaactt

SEQ ID NO: 229 - DNA, 2554 bp, Glycine max
  Clone ID: PAT_MRT3847_29390C.1
aagagaattaactgtgttgattgacacgataaaagatgatcatgtccaagttagcaaggcatcccctgagtgcaattgttgtcaacactgcagattgaaaattatcatgaattccacaaaacgccataaatccaactaccaaaaaagctactacaaccaacaactcaaaaatagacccgcgaaattatagctaattagctaaatatccattgaacactgtcatcaatccaaaataaaaaaaaggagaaaaaaacatagccaaaaaaggcattagagacgctactaacaagaaacgcatcatatttaattttaatcaacctcctccatcttgctgccctcagcatcagcctcggcctcctccagtgggggcatttcagcatcagcttcacctgcatcctcgtcaatgctcagtccaagcttcaacattctgtggatcctgtttccaaaagtgttgggctcgtcaaggctgaaaccagaagtgagaagagcagtctcaaacagcaacagaacaaggtccttcacggatttgtcattcttgtctgcatcagcacgcttcctgagctcctccatgattgggttctcagggttgatctccatggtcttcttgcttgacatgtaccctgccatgctgttgtcccttagagcttgggccttcattatcctttccatgtttgcggtccaaccgtattcgccagtcacaagacagcatggtgaatctacaacgcggtcagagaccacaaccttctcaaccttgtcacccaaaacatccttgatcaccttgcagaggttgtcaaacttctccttcaactcttcttgcttcttcttctcatcttcactctcgtcaagcttgagcccttccttggtggcagagacaagcttcttgccctcaaattccttgagctgaccaacagcatattcatcaatggcatcaaccatataaagaacctcgtatcccttcttcttcaacttctctaagaatggagagttctcaacagccttcttgctttcacctgtgatgtagtagatgtcactctgaccttccttcatcctggtcacataatccttgaggcttgtcatttcatcaccactcttggtggagtggtacctgagcaattcagcaatctttcccttgttctgtgaatcctcatggatacctagcttcaagttcttggagaaagcctcatagaacttgttgtaatcctccttgttctctgcaatttcaaagaagagctcaaggcacttcttaaccaagttctttctgatgaccttcaagatcttgttctgttgcaacatttctcttgaaatgttgagtggtagatcttcggaatccacaatacccttgacaaagcccaaatactcaggaatcaactcctcacagttgtccatgataaagacacggcggacataaagcttaatattgttaggcttcttccttgtgtcaaagaggtcaaaaggtgccctcttaggaacaaagaggatagccttaaactccaactgtccctcaactgagaagtgcttgacagccaaatgctcttcccagtcattggtgagactcttgtagaaagcagaatactcctcctttgtgatctcctcaggctttctcatccaaatgggcttctgcttgttcaccaaggaccattcatgtgacacttccttaatcttctttttctttttttcttccttctccttctcttcgtcaacatcctccaccttaccctcctcatccttcttctcttcctcatcctcatcatcagagatctccttctcagtagttttctcaatccaaagagaaattgggtagctaatgaactcagaatgcttcttgatcagatccttcaagcgacgctcctcaaggtactcaagctgatcttccttgaggtagagagtgatcttagtacccctgccaagaacctcaccagtgttatccctggtgacagtgaaagaacctccagcttgagactcccaaacatactgttcatcatcattgtgtttggttgtaacaatgaccttctcagcaacaagatatgcagagtagaaccccacaccaaactgtccaatcatactaacatcagcaccagcagccaaggcttccatgaattccttggtaccagatctagcaattgtacccaagttgttcaccaaatcagctttggtcatgccaataccactgtcaacaatggtcagtgtattgttagtcttgtctggaataatatgaatgaacaactctggctgagcatcgagcttgctcttatctgtcaaactctcaaatcgaatcttgtccaaagcatcggaggcgttgctgatgagttcacgaaggaaaatctccttgttggagtagaaggtgttgatgatgagactgaggagctggttgatctcagcctggaaagcaaacgtctctgtctccgccattgtcgatctacgcgagggagaacaacgagcgaaggaagaagagaaagagttgtttagggtttagaggaagaaaatgggaataggcaccgaatgaaagaaggaagaggttttatagagagggttcactactagggtttctagatcc

SEQ ID NO: 230 - DNA, 322 bp, Glycine max
  Clone ID: PAT_MRT3847_29691C.1
ggcaagttataaaaaccaatactattatcatggtctcatagttaacgactatggcaaccttgagaagaaaaccgacaaatacggcaaccctgttcatgctgctagagtcacctatgtatccaccataactgctgatggtggatacaatgatgacattaataagcaacatgattccaccactgcctacggcgtatacactggtagacagcattctagtgttggctccgatggtgacactgataaatattatggaactactggtggctataatgatgactccaacttacgtcatgaaactaccggtgtatatagtctacacact

SEQ ID NO: 231 - DNA, 3071 bp, Glycine max
  Clone ID: PAT_MRT3847_30033C.1
ttctttccacgcgtccgcccacgcgtccgcccacgcgtccggtccactggtttgagaaatttaattggttcattagcagtgagaactatttggttatcagtggacgtgatgcacagcaaaatgagatgatagtgaagcgttatatgtcaaaaggagatctatatatacatgctgatctgcatggagcttctagtacagttatcaagaatcacaagcctgcacaaccagttccacctctgaccctaaaccaagctggatgtttcaccgtctgccatagccaggcctgggattcgaaaattgttactagtgcctggtgggtttatcctcatcaggttagtaaaactgctcctacaggcgaatatctgacagtagggagtttcatgatccgtggaaagaaaaattttcttccaccacaccctcttatcatgggttttggcctactatttcgcttggatgagagttccttgggatctcatttaaatgaaagaagagtaagaggagaggaggaagcagcagatgattatgaagaaactggccctcttgaagataaatctgattcagagtctgagaaggatgtcactgatatagaacctgccactgacttggaaaggaatggtaatttgtcagcagattcacacaaacccctaccagaagacttccctgcagatccatcccaaactagtttggctactaccgatgccgaaactgcaatttcacaggattttcctgcgaaagagacaagtacattgaatatggttgatagggagatattatcaggcgcgggtggaaatggcttagcatctgtgacccctcaacttgaggaacttcttgatcaagttctggaacttggacccattgctaaatcaaataaaaaatatggaattgagaagtctcaaattgatttagacactgaacaatatcttgaacaaagcaaaactgcagtaagggataaaccttatatatcaaaagctgagagacgaaagcttaaaaaagaacagaaacatggagaagaagatttgaatgttgaacatggaaagtatgaatcaaagctaaaagatatttctgctaatctacaagcgaaagaagatcaaaatttgaaaaaaggtggtggtcaaaaaatcagccgtggacagaagggaaagcttaagaagataaaggagaagtatgctgaccaggacgaggaagaaaggagcatccgaatggcattgttagcttcttctggaaaatcaatcaagaaggaagagacatcatctgaaaatgatacattggaccaagggaaaaaacctggcagtggtccttctgacgctccaaaagtaccttctgatgctccaaaaatatgttacaagtgtaagaaggcaggtcgcacttatctcgggattgtaaggagcaaccagatggtcttttgcataggaatgcaattggtgaagctgaagaaaatcccaaatcgactgctattgacacttcccaagcagatagggtggcaatggaagaagatgatattaatgaccacatgggtagacgcctcttcaacaacccttgttttgttctgtgcaagtgatcttgaaaggaacaacaatggtgaagtctataaactttctcctgcttctgtctctactagcctttgttccaaactcttcttcaacaacccttcttttgatctgtgcaagtgatcttgaaaggagggaacaacaatggtgaagtctataaactttctcctacttctgtctctactagcctttgctcccttatgtcactgtaaaaagaaaataggaggttacctctaccctcaattctacgacggttcatgccccagagctcaagagattgtccaatccatcgttgccaaggcagtggcaaaagaaccccgcatggctgcttcgttgctcagactacatttccatgattgttttgtcaagggctgtgatgcatcggtgctgctagatagcagtgttttggctctagctgctagagattccactgttcttaccggaggaccaagctggggagtacccttgggcagaagggactctcttggtgcgagtattagtggctccaataacaacattcctgctcccaacaacacatttcagaccatcttaactaagttcaagctgaaggggcttgacattgtttatctagttgctctatctgggagccacactataggaaattcccgatgcaccagcttcaggcaaagactatacaaccaaacaggaaatggaaaagcagacttcactcttgatcaagtgtatgctgctgaattgcgcactaggtgtccaagatctggtggggaccagaatctctttgtcctagactttgttaccccaattaaatttgacaacttctattacaagaacttgttggccaacaagggtctcttaagttctgacgaaattctcttgacaaagaatcaagtatcagcggatttagtgaagcagtatgcagaaaacaacgatcttttctttgaacaatttgccaagtccatggttaagatgggaaacattactcctttaacagggtcaaggggagagatcagaaagaactgcagaggaattaacaagtgatgtagtgatatcattgtcatgtgacacgtgtgaaagttgcacctacattttacttttcttcctcttgtttactgcattaaaaaacaggagtgtcaattgatcaattctgtggtgagttgaggaagtcataagcagtgtcgtgatgttccttgaatatccttttgatagcgttgctgtgtgtttaaattaaatttatgtgcttagatgtttcaaggtcaggcttgaaatttgaattgatagctggaacttggaatttatgtaggtattcaagtttaaataaattttatatcatttctcatgttgaataaaattaattccaataaattttatttttccttgtcatagaattgattgttcaagtagtaggaatttatgtaggtattcaagtttaaataaaatttgtatcacctttcatgttgaataaaatagaattccaataaatttttattgcccaaaaaaaaaaaaaaaaaaaaaaaaaaaaaaaaaaaaaaaaaaaaaaaaaaaaaa

SEQ ID NO: 232 - DNA, 1081 bp, Glycine max
  Clone ID: PAT_MRT3847_30133C.1
acgaagctcggaattcggctcgagctaactggcaactaattaacgtgtttgggactcgcgagttgtgcattcctaacacccatttctgggcccaggcattggtgggttcttaccctttattattattattattggagatgactagaaagaggatacagatcaagaaaatcgacaacatcagttccaggcaagtgactttctccaagagaaggaaagggcttttcaagaaggctcaggaattgtcaaccctttgtgatgcagacatagctctcattgttttttctgcaactagcaagctctttgagtatgccagttcaagtatgcatcaagtaattgaaaggcgcgatagccattcagcaatgaatagactggatcgcccctcaattgagctgcagattgagaatgactccaatgaaatcctgcgcaagaaagtagaagataagaaccgtgagctgaggcagatgaatggggaagatctgcaaggattgacattacaagaactgcataaactagaggaacaccttaaaagaggtttgatcaatgtttcaaaagtaaaggatgaaaaacttatgcaagagatcagcacgcttaagagaaagggagtggaactaatggaggaaaaccaaagactgaaacaggtggtaccgagccttatccatgtacataggcaatcatcggaatccattcttagcaattcatctaaccttcctgaagatggtggtagcgacacatctctcaagttggggttaccttaagtattcaacaaaatgtagattattagaagtgaccgggttcgcttcctttatatatgttttaagtgtttcactcaaaaccagttgagtccagtgatgtttgctgtttaaaaacaactcctgcaaagtaagtaaatcctagggatgaggttctgcaggcagaattgcatgtacttgaattcgtattctattttcttttcgtagattgattcataggaagtgttatatatgcccgagttaatggtcaatgctttggccgtttcttactttctatactttgtcatcataaaaaaattattcttacctaaaaaaaaaaaataccccaggct

SEQ ID NO: 233 - DNA, 864 bp, Glycine max
  Clone ID: PAT_MRT3847_30135C.1
ctaactggcaactaattaacgtgtttgggactcgcgagttgtgcattcctaacacccatttcaggaagcccaagcattgggagatgactagaaagaggatacagatcaagaaaatcgacaacatcagttcgaggcaagtgactttctccaagagaaggaaagggcttttcaagaaggctcaggagttgtcaaccctttgtgatgcagacatagctctcatagtcttttctgcaactagcaagctctttgagtatgccagttcaagcatgcatcaagtaattgaaaggcacgatcgctattcagcaatccatagattggatcgcccctctattgagctgcagattgagagtgactccaacaacattctgcgcaagaaagtagaagataagactcgtgaactgaggcagatgaatggggaagatctgcaaggattgacattacaagaactgcagaaactagaggaacatcttaaaagaagtttgaccaatgtttcaaaagtaaaggatgcaaaatttatgcaagagatcagcacctttaagagaaagggagtggaactaatggaggaaaaccaaagactgaaacaggtgccgagccttatccatgcacatagctataggcaatcatcggaatccattcttagcaattcatctaaccttcctgaagatggtggtagcaacacatctctcaagttggggttaccttaaataatgaacaaaatgtagattatttagaagtgatcggtttcgcttcctttatatgtcagtcaaaaccaattgaatatcctgtgttgtttgctgtttaaaaacaactcgtgtaaagtaagtaaatccaaaggatgaggtcctgcatgtagaattgtgcttg

SEQ ID NO: 234 - DNA, 516 bp, Glycine max
  Clone ID: PAT_MRT3847_30144C.1
gtcccaacactctctcaacatatgatgtattggcacaacatgtctgcctttattatggtttatatttgagccacatgtataagacccttacattactacatgcatacattgttttattacttctacctaaactatagaccatatgctatatctctgcacatacatgaaaaggacactggacggacgcagggacatatgcagcaaatttattcaaagacaacattcttatatatatgcctgcatgcatgatgcacgatgcatctacttgtaactgggacctacaggaagcttgtccttaatgttggccataatcgcctttcttctcgttctgatcaccatgagatgggtcatgctgacgaagttccttactatatcctgctgcagtgtgcgcacccccagtgttgactccgtacccagttccagttaaataaccagggcctccctttggtacataaacagggcccccagtgcctgcataaccgaggccgcccgtgggtccccttgtgggaccagtac

SEQ ID NO: 235 - DNA, 552 bp, Glycine max
  unsure (1)..(552): unsure at all n locations
  Clone ID: PAT_MRT3847_30158C.1
ggagtcccgcggtcgacccacgcgtccgcggacgcgtgggcgcctcctcccctagcctcgccgagcgcttcctccgcctccgccgccgcgtcgatctcgctcgcgcagccggtttcttctctcgtcggtgggtgggggataggatggcgggacgcgggaaggcgatcggcgccggggccgcgaagaaggcgacgtcgaggagctccaaggccgggctgcagttccccgtcgggaggatcgccaggttcctcaaggccggcaagtacgccgagcgcgtcggcgccggcgctcccgtctacctcgccgccgtcctcgagtacctcgccgccgaggtgctggagctcgccgggaacgcggcgagggacaacaagaagacccgcattgtgccgcgccacatccagctcgcggtgcgcaacgacgaggagctcaccaagctgctcggcggcgccaccatcgccagcggcggcgtcatgcccaacatncaccagcacctnctccccaagaaggccgggtcatccaaggcgtcccacgccgacgacgacgacaactgag

SEQ ID NO: 236 - DNA, 235 bp, Glycine max
  Clone ID: PAT_MRT3847_3026C.1
caacgacgaggaacttaccgtggaggagaggaacctcctctccgtcgcctacaaaaacgtgatcggagcgcgccgcgcctcgtggcgcatcatctcctcgatcgagcagaaggaggagagccgcggcggctaggatcacgtcttcgtcatccgtgactaccgatccaagatcgagtacgagctcttctacctctgctacggtgtccttaagctcctaggtactggggttattgca

SEQ ID NO: 237 - DNA, 2262 bp, Glycine max
  Clone ID: PAT_MRT3847_30912C.1
cccacgcgtccgtacggctgcgagaagacgacagaaggggacaaccaattccattattaaagggataagcctcaaccttgcaacccaacacaaccaaaattcgctacttgttaagggctgcactataccagaatgtctcagggaagaggcagtgcatctttgcctattgtggtcactgtggtttcactactgtgccttttggaacgtgctaacgcagcaacttactccgttggaggacctgggggatggaccttcaacactaatgcttggcccaatggaaaaagattcagagctggtgatatcctaatcttcaactatgactcaacgacccacaatgtggttgctgtggacagaagtggatacaacagctgcaagacaccagggggtgctaaagtgttcagttcagggaaggaccaaatcaaactagcaagagggcagaactacttcatatgtaactaccctggtcactgcgaatctgggatgaaagttgccattaatgcgctgtgatatactagtagtgctcaatacttcttgaaatgaagtaactgttaagttaatggtcaattaactagcattagtaaatgttagtgtgtgatattgtatgtagtcttttttttatatgaagctgttatatatattaattactatagtttgtgaagcaagtgggagtgagctggcttggtagatcaattgttcctgtatttggtatgtgttgtgtggtgggagtatgataatggtccattagtcacgggctcttcttattagacattggatctgcatattttgaaattattcaagtctgagccaattatctgtatctagtgtctcggtgtcacagtgtgtggttgtattactgaatttgttgccttcaataaattaaattttctacaatgataaactcaaaaaaaaacgatgacaaaaaaatttggttggagctagctaagaggagttaaattaatcttatattgacgattattaatttattataattcgaagttgttacaaatgatcatataactaccctttacccaattatccatcacgtttgacataatatggtttgaatttcttataagaaacatgaaccatactcgcaaatactaattgaatgacatcagatatcataatcgattaattagtccaattatttgtctttactttccagtatatgctcaatttcagcttcttgtttttaaagatatgtacattaagcataggaattgttccctctgaattaatattttaccttggcatgtcatagatgggactgctaacatgaatggcctctttgatcagcattgagggatcagcagattcaggaagccctccattctccattagtgtagattcaatgaaaacagtggacaaaccaaatgttttctcaaagctcatttgtgaaatcagcattgacctctcatattcatcatagttgtcaatctccctgagattaaaaatggcggcatcaagttcttccctctttgcatctctataaagctctgagacatctttggtttgcttctttgaggggcagcaacagcaggatgatgattttggtaatttgggcatagaaggtggactgtagccataaagtgcttgtctattgaaaacacatccagttcccacatacataggtccttgaatgccatcaagtcctttcatgttaacatcaaagaaaactgtgttgcgattggcatatcgatcactacgatcaataccatcaaatctctggggaaactgcacataacacaaatctctgccaactactggatccatcagaaaacacattgcttcccgtacagccttgctattgttcacataatgatcacagtcaagattgagaatgaagggagcatttgtgagaactgcagacaccctcaccagtgcattttcagcaccagcctttttgtggtgttggtagcctggccttttctctctagaaacatacaccaacctgggaagttcatttccctctatgtcatgggcaccactgtgtccaaggaaaacctgaatcatgccagggtgatcacgtgagttgtttcctggccatgaagttccatcttgcatagtccatccttcatctggtgttttctgagcctttgctaccaaagcattaactcgcactttaaactcttcatactccctcttcattgctctacgttccttcacaaaagaaggttgtactttgtccttcaggtagtcaatcttctgagagaagtagaactcaggtgcgcgtggttcaattgaaaactttttgcaaaatgg

SEQ ID NO: 238 - DNA, 452 bp, Glycine max
  Clone ID: PAT_MRT3847_3128C.1
gtatactccacatacaaatatgcttaactagttatcaaatttgaagagcctcttttttttcccatactatttgaagtgcctctttgcctctaagttgaaacatttcattaattatacacggggcttgaaatccattattcttagacaacatagaaaaaccaaccaaaaccaacgttggggacttggttgcctgccactcctttcaagaagttcttatttgttgaagaaacaaatgtatgtaccttccttcaagttcataataactaaccaacaatctagggtattcacataagaacttggggaaaaagctcaactcaagcactgtacttattgaaatggacagaagattctggttctacttctgcccattaataattcactacaacaagtgataatgcatggaactagtgttgagaggactgttgcatttggaaaaccatgttctgtgtctg

SEQ ID NO: 239 - DNA, 301 bp, Glycine max
  Clone ID: PAT_MRT3847_31418C.1
ggggaaggagggaccataaattactggaggttcagggctaaaacaatacttaaggtttcttatcaaagcctattaagcggggttttaaacagcgttaacatcatacaaagatagaaaaagagcggccccagtaatttaatacggtccacacatctaccccacaggtttcgggagctgccaaattagaaaaaaacatacaatttcagggccccccgtgggggggaaaaaaaaatgatatgcaaaaaccaaagggcgccttaatgaaactgcatatacaaaaccccaaggggaaggcccccct

SEQ ID NO: 240 - DNA, 264 bp, Glycine max
  Clone ID: PAT_MRT3847_3144C.1
ttcccgggtcgacccacgcgtccgagctgcagctcaggtgcttgtctgaggctgcctcctcgttggcaaccggattgcctgctgctggtggatgtggtgatcaacagtattattacagagccatgctatgtgaacattactagtagcagtgctcataaaagctacaatcccatctccctttttttttccagtcatgtaaaacttccaaactgctccatggttcaaaactctgttcttcaatacatcatcaattatcgattatat

SEQ ID NO: 241 - DNA, 310 bp, Glycine max
  Clone ID: PAT_MRT3847_32234C.1
aaagcactaggatgatcaggggcccaaggttgacgagtatggcaacgatgacaatcaaaccgacgaatacagcaaccgtgctcgtgctgatagtgtcacctatgtagccaccacaactgctgctggtggttacagagatgacattaataagcaacatgataccaccaatgcctacagcgagcacactggtagacagcattctagtggtggatccgatagtgacactaataaacatgaaggaactactgatggctgtaatgatgacaccaataaacataatagaactggcagtgtgtatggtatagacgca

SEQ ID NO: 242 - DNA, 806 bp, Glycine max
  unsure (1)..(806): unsure at all n locations
  Clone ID: PAT_MRT3847_32783C.1
tttttttttttttttttttgtaaagcttttaaacttaggaaatcaaattagaaataaaagatgaaggaaaaaagtaaattttagttacataacataacatgaaaaatggaccgtgcctatctccatttaagtatcagtccaagaagcaaaaactggcaagtgagacaaagagatagcaggagaaggcctcatttgaaccgttggtgagggtagccaagaggtaacactggtaccaatggggttcacaatctttgtttccattggaggcattgggaacagaagcgagggaccccttttctcaggactagcctctcttgagctgcttaaacttgtcaccagcgatgacgtgtttgaaaaatgagtcccaattttgctagactcgtccagcatattatgctgcccagaacccaccgaatcaatcccaataagatcttgtagggccatagaaaatgcactgtttctgtaatttccacagttcattattttttggtcactgccattgccctttgcctgttgctgctgtgaagggtggttaaataaaaccatcttccactctgagtcgttttcattattgttgtttcctgcttgaacttgaaccgtttcctcattgttcacacttgttactacactcttgttgtagtctatgtccttgtttctaggatcgttatctttcttacgccttgcaagctccccnncgaggagattgctactnnnnatgattcnnnnnacancgtatnntgaaatgtcaaagtttgtgactgcnnnngcnccgcgaaatttgatcgnnnctacatcgtatgcttctg

SEQ ID NO: 243 - DNA, 707 bp, Glycine max
  Clone ID: PAT_MRT3847_33044C.1
gaggaccaagaagaagaaacaacctcaaaatccctttcttgtgtcgattagattactttcacaccagagtcgttcgagtacttcaccttctttctctctaagcgcaaaacctcgtactgtttttggcggttaaggatgtcggggaaaggagcgaaggggttgatcacaggcaaaacctccgccgccaacaaagacaaggacaagaagaaacccatctcgcgttcttctcgtgccggccttcagttcccagttggtcgtatccaccggcttttgaagtcaaggacaaccgctaatggtagagttggggccacagctgctgtctactctgctgctatcttggagtatctcactgctgaagtattggagctggcagggaatgctagcaaggatctcaaggtcaaacgtattactccccggcatttacaactagcaatccgcggggatgaagagttggataccctgataaaaggaacaattgctggaggaggagtgattcctcacattcacaagtctcttatcaacaagtcttccaaggagtagattactagtgaataatagcttgcttgatggaaaatttctctctactaattgtgtaatttttgcatggcacttgaaaaacaaagtagggccttttatttatgactttgttgcctgttgttgatcatggatataatatttagtctttctctttgcggtttctctttgtt

SEQ ID NO: 244 - DNA, 1244 bp, Glycine max
  unsure (1)..(1244): unsure at all n locations
  Clone ID: PAT_MRT3847_33047C.1
atgctttcaaggatcttatgttcaagcgtattactccccnncatctacgtctagctatccatggggacgagcagctctataccctnataaaangaacaattgctgtaggaggagtgattcctcacatccacaagtctcttatcaacaagtcttccaagtattatattactggtgaatgatagcagcttgatggaaaatttctctactaattgtgtatttgttgcatgacacttgaaaacgtccgtacggctgcgagaagacgacagaagggaggagcaagaagaagaaacaacctcaaaatccctttcttgtgttcgattagatattgccttcacaccagagtctgagtcctctgagactttccttcagtccttcaccttctttctctctaggcgcaaaacctcgtactgtttgtggcggctaaggatgtcagggaaaggggcgaaggggttgatcacaggcaaaacctccgccgccaacaacaaagacaaggacaagaagaaacccatctcgcgttcttcacgtgccggccttcagttcccagttggccgtatccaccggcttttgaagtcaaggacaaccgccaacggtagagttggggccacagctgctgtctactctgctgctatcttggagtatctcactgctgaagtattggagctggcggggaatgctagcaaggatctcaaggtcaagcgtattactccccggcatctacagctagcaatccgtggggacgaagagctggataccctgataaaaggaacaattgctggaggaggagtgattcctcacatccacaagtctcttatcaacaagtcttccaaggagtagattactggtgaatgatagcagcttgatggaaaatttctctactaattgtgtattttttgcatgacacttgaaaaacacagtagggccttatgatatttatgactgtgttgctgctgttgatcatggatataatatttagtgtttctctttgttgtctctatcactgaaaatgttaaggataattcaatctggggttctgcacatgccggccttcacttcccccttggccgaatccaacggctttaggagtcaaggccaaccgccttcggtagggttggggccacagctcctggttgtccgtacccaccggccggtgaactccaggacaaacgtctaggatcgggcgggggacgcagcatggcttgattcctcacatccacaagtctcttatcaacaagtcttcccaggag

SEQ ID NO: 245 - DNA, 2933 bp, Glycine max
  Clone ID: PAT_MRT3847_33935C.1
ctcgagccgaatcggctcgaggtggatattcgtctgaattagtagatgcaagtgcgggtggtggtcccccattacacatataagcatgccttgcacggttgtattgacacatgatcaaggtagtgggctggtgggttggtcctttgcctatctctggaccttgcatttaactcctagaagaaaatatcatcaaaatctaagattcagtgccctcaatatttatgtgaaattggttttagctcaaaattgtttttttcattgtcattgttctatgtctgcattctgtttttctcaccttagatagtggaaggaaagcatttatttcttgcagtgagtacttaaaccttgtaatttctcgctcttcctttgaactccaggttccaacggatatccacttcctcttcttctcttcccatttcccttccaatctcctaatttctcttcagcttctgggttctccattttccttcgtcttctgcatctgcattccgtagattcagttctcgtcggaaaatggacgttcgccgaagacccattcctccctccggcgatcgccgacaaacccagaagctgaagaacaccgccaccaccgattcgcagactcttctgcctctctacctcaccaacgccctcttcttcgcggtgttcttctccgtggcctacttcctcctccaccgctggcgcgagaagatccgcaccgccactcccctccacgccgtcacccccgccgagaccgccgccatcgtctccctcgtcgcctccgccgtctatctcctcggcttcttcggcgtcgcctcccgcgcctccctcgacgagctctccgacgacgagatcatcctcaaggaagactcccgcgccccgggcccgtgcgccgcggcgctgtcggactcctgctcactccccaacaacaaaatccaagaccaattccctctgccacccagggctgtccacagtttggcgaaggaaaaacaacatattccttcgccaccacaagtggacagtcctgtctctgtctcagtctcggtctcttcctcctcggacgacgaggacgaggagatcgtgcaagccgtagtgtcgggctccatcccgtcctactcactcgagtcgcggctcggtgacacccgtcgggccgccaccatccgccacgaggtggtgcagagactgacttcccgatccctgtcaggtttacctctggaaggtttcaactacgactcgatattggggcagtgctgcgagatgccgatagggttcgtgcagatccccgtgggagtagcggggccattattgttggatggaaaagaattcaccgtgcccatggccaccactgaagggtgtctggttgcgagcaccaacagaggttgcaaagctatatacgtctccggtggggcctcctcggtgttgcttagggatggtatgaccagagcacccgttgttcggtttccctccgcccagcgcgccgcgcagttgaaattcttcttggaggatcctctcaacttcgattctcttgctgtcgttttcaataagtcaagcagatttgccaggttgcagaatattcagtgtgctattgcgggcaagaatttgtacatgagattccgatgcagcactggtgatgcaatggggatgaacatggtgtcaaaaggtgttcaaaatgtccttgattttcttcagagtgacttccctgacatggatgttattggaatttctggaaatttctgttcggacaagaaagctgcagccgtgaattggattgaagggcgtggcaagtctgtggtgtgtgaggccataattaaggaggatgtggtgaagaaggtgttgaagaccagtgtggaggccatggtcaagcttaatatgctcaaaaaccttacgggttcagccatggctggtgctcttggtgggttcaatgctcatgctagcaatattgtgtctgctatctacattgccactggtcaggatcctgcccagaatgtggagagttctcactgcatcaccatgatggaagctatcaatgatggcaaggaccttcatgtttccgtgaccatgccctccattgaggttggtactgttggaggtggcacacaactcgcatctcagtcagcatgtcttaatttacttggtgtcaagggtgccaacaaagaatctccgggtgcaaattctaggctactggccaccattgtagccggttcagtcctcgccggggagctatcgctcatgtctgctattgcagctggacaacttgttaagagccacatgaaatacaacagatctagcagggatatatctacaattgtccaatgaactggccacagtacacttaaacttgtgtcagagactaatattctaataagcaaaccatcagataaagacataaataacgagaaaaaaattggtattgatgatggtgggggtaaaagataaagtgatggttggcatcttccatgggcaaatccagctccccagaagcgtggggttggttggcattcattgaatatctgcttcgtgtgaggcattttctcttatggagattgtacagaggtacttgaattagagggtggaggtaaacaggagccacacttttgggattagagtttctctttgtttgaggcattttctgttatggagattgtacagaggtacttgaattagagggtggaggtaaacaggagcctcacttttgggattagagttttttgttgttttccaaaaaaaggaaaatcattttgtgttgtgtgttatcctcttgtttaaggcttactgcttcaataatgtggtattttagcgggctgtgtttttatgtgttgtaatctccatcttgttaatttgtaattgtagcaagagatgtctcccattgggatgtagagttgttaataataacagtttctggttgctcaaaaaaaaaaaaaaaaaactcgcgactagttctctctctctctctc

SEQ ID NO: 246 - DNA, 549 bp, Glycine max
  Clone ID: PAT_MRT3847_33965C.1
gtcgacccacgcgtccgatgaactcgattgcatttcttgtcatgggtgttgcggttaatgagaatgaggatgatgatgaagttggggctgatcaacctgcacaacagctgaagaggaagaaactatggggactccttgtttgccaccatgagagccccagatatgttcctttaccattgctgtatgcctgttttttcttagcgcacgtgcttgctgtccatgttaacaaggagtttgaattacagaggcaagtacgcgagaaaagcatattgaggatgcaaacaatgctctctgacatgctagtcagggaatcctctcctctgagtatagtatgagggactaccaacatcatggaccttgagaaatgtgatggggctgctcttttgtatgggggaaaagtgtggcggctacagaatgctccaactgagtctcacatacgtgatattgccttctggctgtcagatgtccacagggattccactggcctgagtactgatagcctacatgatgctggatatacaggagctgctgctcttggtgatatgattt

SEQ ID NO: 247 - DNA, 1753 bp, Glycine max
  Clone ID: PAT_MRT3847_34828C.1
tttttacagtaaaaaatttcccagagtttgattgcgttaaatacttaagtcctccagaagttctcatcgaaagtaataggtagtaacagtcatttagttaacatctagaaccatttcacatgatttggtatcagtgaggatccgggtaccatggttttttttgaaatttactgatatgaatgcttctattgccacaaaattatatccaatttgaacatgttcaaagttatacaaaattcttgttcaaaatgatctgcagattgttgtaatcatttttttctttgcacaaaaggacggggggggggggggggggggtataaaaagaatccttaaaaccatgattgtattgctttggaagttttgattgggcataattttcatacacaagtaaacctcttgcattagcttatcgtttaagccaagtacttttccaccttctctacctcttctacgctcccaatgtacagtggcactcgttgatgaatctctgttggttgaatgtcaagtattctctggtggccatctgacccttttccaccagcctgttctactatgaagctcataggagcacattcatacaggagcctgagtttcccattcttacttttcttgtccctggggtacccataaatgccaccatatagcagtgtcctgtggaagtctcctaccaagctaccaatgtaccttgcagaataaggcttgccgctaggacctgggtccttgagatcatcaatatatttcttaagcttgtcatcccacaactgataattcccttcattgaaagcataaattttgcctgctctaggtatttggaggttttcctgagtcaaaacgaattcgccatacatcgggtccaatgtaaacacaaacactccatttccaagggtgagaacaaagattattgagctagaatacatgcagtaaccagctgcaagaaggttgcttccgggttggcacacgttcacaacacatctttgttctgttgtgtcaagtgtggggtcatcaccaatgtcagcaagacactcatcattggggctgtatatcccaaaaatggacccagttgacactgcagcatcaatattggatgacccatcaagtgggtcaaacaccacaatgtagtttccagaataactctcttctactgccactggcacatcttcctcctctgatgctattatccctgtcctcccacttgacctcaagcagtttgagaaaacctcatttgaaacaacatcaagctttttctggtcttccccctgaacattgacagctccttgaaccccagtgaggttggaaatgttggctctttgcaccaaagaagcaatctgtttgcacgccatggaaatgctagacagcacaatagtgagttctgcatcaatcaccccagcttgctcctgcttcagcaaccagttagtgagtgtttgaagctcatatccacttctcttctttgtcccagtggttgcagcttcccccaccgccatgcacctaactccagaaccccccacatgccttctcctgccacttgaacttgacagcacttgtttagtgtcaaagacacatagttggaaggggcagagacgcgagggggaacgaggctttgagaaaatcaactgggtggatgctgttgctgctgccattgcaaccatggttgttgcaaaagtttacctttttggttgttgattttggcagtgtggtatggtgctagtggtggttacatggattgtgttctaaggcactgagagcaaagagatag

SEQ ID NO: 248 - DNA, 174 bp, Glycine max
  Clone ID: PAT_MRT3847_34899C.1
cgtacgtaagcggtgagatttgcggatctgtgaaatggcggattcttttcgggaggagaacgtttggattctggaattttcggagcatgccgtgcgttactaggagatggttgtgttcatggagaatgttgcaaagactgtggatgttgaggagttgacagttgtcgagaggaa

SEQ ID NO: 249 - DNA, 2997 bp, Glycine max
  Clone ID: PAT_MRT3847_35003C.1
gtcgacccacgcgtccgccacccctatcctctctctctctctgtgtcacatataaataaaacccttctccacccattcatattcattcactcattccgttccttcttcccttccctctcttcactatcactctctctctctctccatctctctcatccatcatgggagcagtgattctcccagatctcggcaccgagattttgattcccgtctgcgccatcattggaatagcgttcgccctcttccagtgggtcctcgtctctaaggtcaagctctccgctgcgagagacgcttcctccaacgccggcggcggcaaaaatggctacaacgattacctcatcgaagaagaggaaggcctcaacgaccacaacgtcgtcctcaaatgcgccgaaatccaaaacgccatttccgaaggagcaacctctttccttttcactgagtataagtacgtgggaatcttcatggtggcttttgccattttgatattcctcttccttggctctgtggaaggattcagcacaagctaccagccttgcacctatgaccaaactaaaatgtgtaagccagctcttgccactgctgttttcagcaccatatctttcctgcttggaggtgtcacatcgcttatttctggattccttggaatgaaaattgcaacttatgccaatgcaagaaccaccctggaggcaagaaagggtgttggaaaggctttcattacggcttttagatctggtgcagttatgggttttctccttgctgcaaatggtcttttggttctttacattgccatcaacttgttcaagatttactatggtgatgactggggtggtctttttgaggccatcactggttatggtcttggtgggtcttctatggctttgtttggaagagtaggtggaggtatctatactaaggctgctgatgttggtgctgatcttgtcggaaaggtcgaaagaaacatcccggaagatgatccaagaaatccagctgtgattgctgataatgttggtgataatgttggtgatatcgctggtatgggatctgatctttttggttcatatgccgagtcatcctgtgctgctcttgttgttgcttccatctcttcttttggggtgaatcatgagttgactgctatgttataccctctaattatcagttctgtgggtatccttgtttgtttgctcacaactttatttgcaactgacttctttgagatcaaggctgtaaaggagattgagcctgcattgaagaaacagctcatcatttccactgccttgatgactattgggattgcaattgttagttggattgcactcccaacttccttcactatcttcaattttggagtgcagaaagatgtcaagaattggcagctattcttgtgtgttgctgttggtctttgggcagggcttattattggatttgtaactgagtactatactagcaatgcatatagtccggtgcaagacgttgcagactcctgcaggactggtgctgcaactaatgttatctttggccttgccttgggatacaagtctgttattattccaatttttgctattgcaatcagtatttttgttagtttcacctttgctgccatgtatggtattgccgttgctgcacttggcatgctgagtaccattgccaccggattggccattgatgcatatggtccaatcagtgacaatgctggaggtattgctgagatggccggtatgagtcacagaattagagagagaactgatgcccttgatgctgccggaaacacaactgccgcaattgggaagggatttgccattggttctgctgcccttgtatcactggccctctttggtgcctttgtgagccgagctgctattacaactgttgatgtgttgactccaaaggttttcattggtttgattgtgggtgcaatgcttccttactggttttctgctatgactatgaagagtgtgggaagtgctgctctgaagatggttgaggaagtacgcaggcaattcaacaccattccaggattgatggagggaactgctaagcctgactacgccacttgtgttaagatctccactgatgcttccattaaagaaatgattccacctggtgctcttgtcatgcttacaccccttgttgttggaatcctttttggtgtcgaaacactttctggtgtcctagctggatctttggtgtctggtgtacaggtgatgtttcatccaccactatttattactagtttaataacctcaacaacttattggtctttgtcattctcctcttttattctttgcttctaagacatatttccattccatgtttacagattgctatttctgcatccaacaccggtggtgcttgggataatgccaagaagtccattgaggctggtgcttctgagcatgcaagaagccttggtccaaaagggtcagattgtcacaaggcagctgttattggtgacaccattggagaccctctaaaggatacatctggaccttcacttaacatccttattaagctcatggcggttgagtctcttgtgtttgctcccttctttgctacacatggtggcctactcttcaagatctaaaggatttgatagaaaaagagtatcgtccatcatttttctacaacgacagaacaaggaaaagccgtccctttaccaatgccttctcgtttttgtgttagtctttaactcatctgtcatgtcaattccattgtttttgaaaccttttcctcccccaccttgaaacaaagtatattttgtctcatgtagttttaagacaacttgattaggctgagtctgttgcgaaaattttccttgtatgatgacgatgatgtttaccatctcttccgcgtggtcaattttctaaatatattcctttccggatggttcaactttcttaatatttctttaccattttgtttttattgtattgtctgtttttaagagtgtttgcaattgaactaattcaattataactaaaaataaataattcaagatat

SEQ ID NO: 250 - DNA, 2817 bp, Glycine max
  Clone ID: PAT_MRT3847_35116C.1
ctgaaaatacagtacatttatttgatcttcttgatttgccttacaacaaggttgaggatttatacctcatttttcttgtaaataactcaataccactaagtctcccgtgttaaaatgaaagtccttcattcataggctccttttttttcaacagatgcttttattggtgtcaacattggttcagatatatctgacatgcccggtccaacagagattgttgctcttctgaaggctcaaagtatccaacatgtcagactctatgatgctgaccaagccttacttcttgcacttgccaacacaggaattcgtgtaactgtttctgttcccaatgaccagctacttggcattggtcagtccaatgccactgcagcaaactgggttactcgaaatgtcatagctcatgtccctgctaccaacatcactgccatatgtgttggatctgaggtcctaactaccctcccaaatgcagcccctattctagtctctgccataaatttcattcactctgctcttgttgctgctaatctagaccggcaaattaaagtctctagcccgcactcttcttctatcatccttgactctttcccaccttcccaagcatttttcaaccgtacatggaatccagtcatggttcccatgtttaaatttttgcaatcaacaggttcatgtcttatgctcaatgtgtatccatattatgattaccagcagtccaatggtgtaatcccactggattatgctttattccgccccctacctccaaataaggaagctgttgattccaacactctgctgcattatactaatgtttttgatgcagttgtggatgctgcttattttgcaatgtcagatttgaactttaccaatattcctattatggtgactgagtcaggatggccctccaaaggtgactcatctgaatctgatgcaactgttgataatgctaacacttacaacagtaacttgatcagacacgtcctgaacaatacggggactcctaaacatcctggaattgcagttagtacatatatttatgagctttataatgaagacttaagatcaggtccagtctcagaaaagaactgggggctattttatgctaatggagaaccagtgtataccttacacttgactggtgctggtattatatttgcaaatgatacaacaaaccaaaccttttgtgtcacaaagagtaatgctgaccctaagatgttacaggcagcacttgattgggcttgtggaccagggaaggtggattgctcccctttgctgcaaggtcaaccatgttatgaacctgataatgtagttgcacattctacatatgctttcaatgcatattatcagaagatggataaatcacctgggagttgcgatttcaaaggagttgccactgtcactaccacagacccaagtatggcaatacatactcccacataaatatgagttggatacaaatatctgtgtacatttatttgtaaagccactagaacaccatagctataggcaataagaaaacatgcatgtttcaggcttgcaccttaacacaataggtttgatagaattgcaagtaagatgaattatgatgaaacttgtttcaggcttactacacctttagtccctctgtatcttcaattcaagagtttggtctattcaattttaaactcctttcagatgtggttcaatcttaccacagacattttatttggtgacaaagagagctcacatggcacataattagcttatgtggcaccttagccattcaacacaatctatgtgccacttcagcactttgcatctccaaatttatgttaagataggaccacaattgaaagaatttaagattaatgagaccaaaactgttgcgactaaaaacaggggactgcaattttaaaattgaagtaattagggaaaatgatcctgtgacgttaagtatgagaatagtggtattcaaatcttgcttatcagtttgtttcagaagtatatttgttaaaattatggatgattatattaatgtattttgaaatgttacatgaacactttttgaatttcatttccttagcatccttttgacataattaattagtcagtatgaaaaaatctcttcaaattttgcagcttttttctttcttgtccattttctattggctcagatttgttatacattaaaataggtcttgcataatgaattttctatttaaaattacttagcattataatacaataaatatcagttatattaaaatgctaagtaattttctatttaaaattacttagcattttaatataactgatatttattgtattataatttttacaggtcatggttcttgtatatttcctggaaggtatgatttctggagtctatgttagtttgcttgttgtcattcctttccgaatcatatgctagtcttgttctaagatgtcttattaatgtatttttctcgagccgaattccgagaaagggacccagaacaaatggcacatcactggccccatctaattccacaagttcgggctgcttgtcacaataccacgacaatggtggatttttcacaagctcgttgattctagttctacttttgtgtgcagttgtgtaaaactaggcttatcttctgttcagctttggaatataattaatggtggcattctcttctgtcttctggaagattgcgtcgcaacatagttagtgttccttgctagaaattatttgagttgtccaattgatcaaaatgtatatcggcaattgtatcatgagttgtccattgaattttgtacaaacagaccagagtaattatttgacatcattgctgtaaacaaaaa

SEQ ID NO: 251 - DNA, 300 bp, Glycine max
  Clone ID: PAT_MRT3847_3536C.1
tcagtttcgcaatgcctcgtaagcgctttcaggagccgcaacccaaaacaggtctacaacatacccaggatttcctgaggaaaatagggttggggaaggagaactactacttctggaagcagattggaaaggctttgctttgcacctatgcagtgatcggggcagtgtgggtgtacaacgagacctcaccactgggttggtggacactgaagccaaagccaaaggaagagcttgagctggctcatttgtacgagcggcggcagtttccttacccgggcgatgaagaggcaatgcaagagt

SEQ ID NO: 252 - DNA, 2238 bp, Glycine max
  Clone ID: PAT_MRT3847_35389C.1
gtctcgagccgaatcggctcgagtgagctttcacttcttccaacttcttcatctatctacttctcttctcttctcttcccttcttctgttgtaaccaacaacaaataacacttttatccctcagaaattaaccatttttcgtttctgggttttctataattttgttgattttccattccttctattttctgctgctgctaggtagcagtggtatgtctagcttatgagttatgagctatgagcatctttctattttgaagagaagattggaatttttttctctttagagaaaggcttcttcctagtggttaggattttaatccatcaaattattgattgagacatgttgtgatacatgcgttcttgtagatgatggagtgggattttgtttcttcgatttgttagtctgaattatagggatttggctaagtcaaccttgggtcctccgttatgaacgaaacatttgacattttgttgaaggtgtcttcaactttgtgaatctgtgatgtgaattattcgcttgtgaagtctctaacaaaagcggaatttgcttgaaagattagactttgggctcgtgatgggtaacctcttatgaattttatgtttccttcaaattaatgtgtttccatcaaagaagacacagcagaagaatattccgttcggactttcaaacttttcggaatgactctatttgtaacagacacctgcaaaccagctccaacaatcgaggcatgcaaacgtttcttctgcaactatggcgattcaagatcaaaatggatttttcagatcacagggtggtcctccagaaggagctggtgtatctttgagttctgggcattctgtcacacatattcaacttaatgaccagttttcttgtgggaatgactatgctctgaaggtaaggaagccgtatactatcactaaacagagagagcgatggacagatgaagaacataagaagttccttgaagctttaaagctgtatggacgggcttggcgacgtattgaagaacatgttggcacaaagactgctgttcagattcgaagtcatgctcagaagtttttttctaaggttcttcacgatcctactgggaacaatacaaacacagtggagtcaattgaaattcctcctccaagaccgaaacgaaagccgatgcatccttaccctcgtaaactagttgagacccctaataaggaaatttcgatcccagaacaacctatgaagtctaattctctgaagtcgtcagactttgatcaagaaaaccaatctccaaaatcagtattatcaggagttggttcagacagcattgggtcctctgattcagataaaccaaatggaagtttgtcgcccatgtcatccattagtggcttccatacaagcagttttacacgtgccaaacccaaaacaacaacatctgaggaagaagctgggatggacactgattcaactcatgatgagaaacctcttatgaaattcaagcttcctccaaatggatgtgtttccatcaaagaagacaacacagcagaagaatcttccggtcggactttcaaactctttggaatgactctatttgtaacagacacctgcaaaccatctccaacaatcgaggaatgctaaagatacctctaaacattcgcgcgcaacgcctttcctcctccatggaggatggcaaattggaacttgttggacactctagagcaagtgaaacatcagcaatatccaagctaaaggtgagagtggaacctgaagcatgtgggaaagggtttgtgccatataaaagatgcatatctgttgtgacagctgatgatagagaagagcaatgtatccatctttccttgtagcttataccccactggatttttccttcaaaaagtgttccctttgtcatgatgagctgtaatggttgttttggttgctgctggatgtgagttggtatgatataggaaggaaaaaggggtggctgaaaattttgatatttccgttgaattgcactgcactgcacattctccagctgttcaaatccgtaaacttgccttttctatttttttgacttccaagtttcaacacattctccgcgggtccaagccgtgtctgtgcgcggcacttaggagctgtgtccgtgcttcctagtttaactgtgaataactgtgaattatatctagtgccttttttttaaaaaaaaaaaaaactttttatgctccctaagagtatgcaaagtgtaagtcacgtactaaaaa

SEQ ID NO: 253 - DNA, 271 bp, Glycine max
  Clone ID: PAT_MRT3847_35541C.1
ctactctcagcaacagcagtttctgccattcaaccatactggctaacattgactctgctgcgtatttgcaacaacaactaccattcaggcaactagctgttgtctacccccagcaatttcttccattcaagcaactagcttcattgaactctgctgcttatttacaacagcaacagctatcaccattcaaccagctagctgatgtgagccctgctgacttctagacacaacaatagttgttggtcgttctacctgcacgctgcgcctaacg

SEQ ID NO: 254 - DNA, 572 bp, Glycine max
  Clone ID: PAT_MRT3847_36480C.1
gaacatcgaccagatctccgcatctgtcgagaaagtcgtccccgtcctccacgccgacgtcgagccgttccgcgtcccgctgcctgcgagcccactgatatcaccgcaacgagagcacccgccgcagctgccaccgccccaaatcacactgcaggaagacagcgacgaggaagctgtcaaagaacaagctgcaaagatgcctcctaagacacagaagcagaaggagcagaaggaggaagaggagcatggcgctgtcttctccgtctccggtcccgtcatcgtggccgagaacatgattggtgttgccatgtacgaactcgtccgtgtcggccacgagaacttggtcggagaggtcattcgtatcgatgccgacaaggccaccatccaagtctacgaggagactgctggtgtgactgtcggcgaccccgtcttcaggtccggacagcccttgtctgtcgaactcggccctggtctcatggagaccatctacgacggtattcagcgcccttctaagggtatcgccgacgactccaacagcatctacatctccgtggtatcgatctgcccgccct

SEQ ID NO: 255 - DNA, 408 bp, Glycine max
  Clone ID: PAT_MRT3847_36525C.1
agcccacgcgtccgcccacacgtccgcccacgcgtccgcgcacacgtccgaccacgcgtctgcacataaacaccacaaatacttccttacaagcagaaccatcatgtaatatggcacattatcaaaagcactaagatgatcatggtcacaacgttgactagtatggcaacgttgagaaacaaaccgacgaatacggaaaatcagttcatgctgctactagttcctatgtacccaccagaacggctgctggtggttacagtgaagacattaataggcaacatgagagcaccaatgcctactgagtagacactgggagacaacattctagtggtggctacgatggaggcactaataaacatcaagggactactggtggctatgctgctgacaccaatagacatcatggaa

SEQ ID NO: 256 - DNA, 913 bp, Glycine max
  Clone ID: PAT_MRT3847_36598C.1
tgctcgagacttaattcaagttgaacctcttctgagctttgaccacgacaagaactaaaacttctccctcggcctcacatcacaacacaagaaagttcctattaatttccaccactttcccgctctcatctcttggaagcctcaaaagctgcaatctttcttcttccaatgttttttttccctggctctccgttgaaccttccatgtttcccagccccttttgattgttttccactagaagcagtgttttctgttaatagttaggaggttctaatggctgtgctgatgatttttcacatgtttgctgcaatatctttgcctgcttatggagatgctttcatcggtgtcaacattggtacagatgccaccaacatgccaagtccaacagaggttgttgcccttcttaaggctcaaggtatccaacatgttagactctacgatgccgacagagccatgcttcgcactcttgccaacacaggaatccgtgtaattgtttctgttcccaatgatcagatactcggcattggtcagtccaatgccacggctgcaaattgggttgcacgcaatgtcatagctcatgttcctgctaccaacatcactgccatagctgttggttccgaagtcctaacttccctcccaaatgcagctcctgtcctagtctcagcactaaaattcattcaagctgcactagtcgcagccaatctcgaccagcaaatcaaagtctctactccacactcttcttctgtcatccttgactctttcccaccttctcaggcatttttcaataaaacatgggaccctgttatggttcccttgctcaattttttgcaatcaacaggttcatatcttatgctcaatgtgtacccttattatgattacatgcaaaccaatggtgtgtccctctagactatgc

SEQ ID NO: 257 - DNA, 845 bp, Glycine max
  Clone ID: PAT_MRT3847_36609C.1
attccacgcctaaaatacccaaataccattcaactcttgtcatttttttcactttctctttttcaaaatactcttagtctctctctaaccttcttccagttgtctctaaacctcttgaaatccgtgatggataccaggataggttcactcgacgcggccaagcccgcctgcaacgacgtcgtatcgtgcaaccacaccaccagcgccgccatccagccctgcgtgccggcgacggtgatcaacggcgccggcggagactccactttaggcggccacctggcacgccggctggtcgaaatcggcgtcaccgacgtgttctccgttcccggggacttcaacctgacgctgctggaccacctgatcgcagagccggcgctgaacctggtcgggtgctgcaatgagctcaacgccgggtacgccgccgatggctacgcgcgcgccaggggagtcggcgcgtgcgtggtgactttcaccgtcggcgggctcagcgtgctcaacgccatcgccggagcgtacagcgagaacttgccgctaatttgcatcgtcggtgggcccaactccaacgactacggcaccagtcggatcctccatcacaccatcgggttacccgatttcagccaggagctaaggtgctttcagaccattacttgcttccaggctgtggtgaataacttggaagatgctcatgagttgattgatacagcaatctcaactgcgctgaaagaaagcaaacctgtgtatataagcattagctgtaacttgcctgggattcctcaccccactttcagtcgtgaccctgttcgttttccatgtctcaagatgagtaattaaaaggggttggaggc

SEQ ID NO: 258 - DNA, 2344 bp, Glycine max
  Clone ID: PAT_MRT3847_36610C.1
cgcctcgtgcccaaataccattcaactcttgtcatttttttcactttctctttttcaaaatactcttagtctctctctaaccttcttccagttgtctctaaacctcttgaaatccgggccgacccccccccaaaaaccattcacttttccacaagccttagttcttctcatttattctctttttcaaaatactttcactctctctaaccttccagttctcactaaacctcgtgaagctcgtgatggacaccaagataggttcactagacgcgcccaagcccaacagcaacgacgtcgtatcatgcaacctcaccagcagcgccgccatccagccctgcttgccggcgacggtgatcaacggcgccggctgtagtgactccaccttgggcggccacctggcccgccggctggtggaaatcggcgtcaccgacgtgttctccgttcccggggacttcaacctgacgctgctggaccacctcatcgcggagccggcgctgcacctggtcgggtgctgcaacgagctcaacgccgggtacgccgccgacggctacgcgcgcgccaggggagtcggcgcgtgcgtggtgacgttcaccgtcggcggcctcagcgtgctcaacgccatcgccggagcgtacagcgagaacttgccgctaatttgcatcgtcggtgggcccaactccaacgactacggcaccagtcggatcctccatcacaccatcgggttacccgatttcagccaggagctaaggtgctttcagaccattacttgcttccaggctgtggtgaataacttggaagatgctcatgagttgattgatacagcaatctcaactgcgctgaaagaaagcaaacctgtgtatataagcattagctgtaacttgcctgggattcctcaccccactttcagtcgtgaccctgttcgtttttcattgtctccaagattgagtaataagatggggttggaggccgcagtggaggcagcggcggaattccttaacaaggcagtgaaaccagtgctggtgggtggtcctaaactgagggtggcaacagcatctgatgcctttgtcgaactggctgatgcgtgtggttatgcgcttgctgtgatgccgtcggctaaagggcaggttccagagcaccatccccattttatcggaacttattggggtgctgtgagcactgccttctgtgctgagattgtggagtctgcggatgcatacttgtttgctggtccaatttttaatgactacagctctgtggggtattcacttcttctcaagaaggagaaggcgatcattgtgcagcctgatcgggttgtgatcgcgaatggacctgcttttgggtgtgtgctgatgaaggatttcctcaaggcactcgcaaagcgcctcaagcacaacaatactgcatatgaaaattaccacaggatatttgtccctgatgggcatcctttgaaggctgcacccagagagcctttgagggttaatgttctgttccaacatatacaaaatatgctgtctggtgaaactgctgtaattgctgagacaggggactcctggtttaattgccaaaagctgaaattgccaaaggcatgtgggtatgagttccaaatgcaatatggttcaattggatggtctgttggtgctactctgggttatgctcaagccgttcctgagaagcgagtgattgcctgcattggtgatggaagttttcagctgactgcccaagatgtatcgacaatgttacggtgcgggcaaaaaaccatcatctttctgatcaacaatggtggatacaccatcgaggttgaaattcatgatgggccgtacaatgtgattaagaactggaattacactgggttgattgatgcaatccacaatggtgaagggaaatgctggactgccaaggtgttctgtgaagaggagctagttgaagcaattgccacagccacaggacccaagaaagactccttatgcttcattgaggtgattgttcataaggatgacaccagtaaagaattgcttgaatggggctcaagggtttctgctgccaatagccgtcctcccaatcctcagtaatcttcagaatttatcctatgactaaattgctgcagttgccctttagctctatgaaagtgagaatcatttgagatgatgcccttgtagggaatttacctttgttaatggcttgaaacatttatgctaaactgactccccacttgtttgtgtaaattctttcacttttgttcacctttgtttatcacctttgttcatttcgattattcttaagtaaagcatcgttctttttatccaaaactgtttgctacattttgttaaacaggaaccgatttcat

SEQ ID NO: 259 - DNA, 496 bp, Glycine max
  Clone ID: PAT_MRT3847_3683C.1
gagtacagaaaacgcagttctcaccatttccctctcggtaatttccaattactactaattttgccatgctttcttcatcttactcttaatcctctttggtttagtttaattgttgtgtgtttgaatttacggtgcagattgtgagacttgttgttgttaactgaacttttctgagcaagaatgtctgggcgtggaaagggaggcaagggtttgggaaagggaggagcgaaacgacaccgtaaggtgctgcgcgataacattcatggaatcaccaagcccgcgattcggcgtttggctcgtaggggtggcgtgaagcgtatcaatggtctcatctacgaagagacacgtggcgtgctcaagatctttttggagaacgtgattcgtgacgccgttacctacactgagcatgctaggagaaagaccgttacggcaatggacgtggtttatgctctcaagagacagggaaggaccctctactgattgggggctagggttt

SEQ ID NO: 260 - DNA, 802 bp, Glycine max
  Clone ID: PAT_MRT3847_3684C.1
acactgagcacgctaggagaaagaccgttacggcaatggatgtggtttatgttctcaagagacaaggaagaaccctctagggatttggaggcaagttcgtttttttttttttttacggctgggggaagacgacagaaggggattggtaccgcgaaacgcacatttcactattcattctcgtttccctttcgactgtgattgtttgttaactgaacttttcgagcaaaatgtctggacgtggaaaggggggcaagggtttgggaaagggaggagcgaaacgacaccgtaaggtgttgcgcgataacattcagggaatcaccaagcctgcgattcggcgtttggctcgcaggggtggtgtgaagcgtatcagtggtctcatctacgaggagacacgtggcgtgctcaagatctttctggagaacgtgattcgtgacgccgttacctacactgagcacgctaggagaaagaccgttacggcaatggatgtggtttatgctctcaagagacaaggaagaaccctctacggatttggaggctagtttgttttttttttttttttttaatttttattgttaggtttcgtttgttttggaggtttatgtgggatgtaagagacccttgctattagggagatagggaaaaaaattgcaaggatttggtgtagtaagttgctggtggtgttttaggtataagggtttctataacatgtaatgtattgagctatattgctgccaagcttgtaattgtatcacaatatgttgctaatgtcagattcttgtttttctgtctgatttttattttg

SEQ ID NO: 261 - DNA, 915 bp, Glycine max
  Clone ID: PAT_MRT3847_3685C.1
ccacgcttccgtcacggttgcagaaaagagtacagaaaacgcagttctcaccatttccctctcggtaatttccaattactactaattttgccatgctttcttcatcttactcttaacttctttctctcacttcagaacctccgcgaattccttcctctcccaatacgaacctacctctctgctgagtacagaaaacgcagttctcaccatttccctctcgattgtgagacttgttgttgttaactgaacttttctgagcaagaatgtctgggcgtggaaagggaggcaagggtttgggaaagggaggagcgaaacgacaccgtaaggtgctgcgcgataacattcagggaatcaccaagcccgcgattcggcgtttggctcgtaggggtggcgtgaagcgtatcagtggtctcatctacgaagagacacgtggcgtgctcaagatctttttggagaacgtgattcgtgacgccgttacctacactgagcatgctaggagaaagaccgttacggcaatggacgtggtttatgctctcaagagacagggaaggaccctctacggatttgggggctaggtttttttattttattgttaggttcttttgttttggaggctaatctggatttgagaaacccttgctgttatggatatagtaaaaagaaatggcaaggattgggtgtgggaagttgccggtggtgttgcagtaacttgtaatgcagtctttagctgttattgctggcaagtttgtaattgaatcactatatgttgctaatgttagaatcttggtattagtatgattttcgcaaaaaaaaattgccacctgaaattgtgttgtggacttgtgggtaatgagctagtggattgttgtttagtgatttagcgttttcgaaatggatttagttgaatgtgctagc

SEQ ID NO: 262 - DNA, 1408 bp, Glycine max
  Clone ID: PAT_MRT3847_37654C.1
cagtaggaaccgctacaacacactactatgctagtgaagaattcaaaatcaagcagcacaagaccaagtcattcacttgtagccctcaagaagtgatttctggtggagactacaagcaatccacatattgtcaccttcttcttggcctatacttctctgaccaagttgagtttataacctcagcttttatctacagcatggtgcaagctttcaccacttttgaggaactttggagagaaatttgcaatgacataagagatggaactcttagctcaagaatcaagtcatccaaaatgagaaaggctgctttggatatcatctctccaagcccaaatttggcctcaaagttagaagattcttgcaaggagctagaaggggtggattggtttggtttgattccaaaactttggccaaatgcaaagtatgtttattccataatgacagggtccatgcaaccatatttgaaaaaacttatgcactatgcaaatgggttgcctttggttagtgctgaatatggctcaactgagagctggataggggttaatgttgaccctagtttgccaccagaagatgtaacatttgctgtggttcccactttctcttactttgagttcataccactccacaggaatgaaaaaaatttcagctcaggaggtgatgatttcattgaagacaagcctattccactgtctcagatcaaagttggacaagagtatgaagtagtcctcacaactttcaccggactgtacaggtgcaggttaggggatgtggtggaagtggcaggcttccacaatgggaccccaaagttgaactttgtgtgcagaagaaagctaattctgactataaacatagacaagaacacagaaaaggaccttcagctagtggtagagagagggtcccatattctgaacatgacaagtagaggcgagctagttgatttcacaagctacgcggatgtctcaaagcaaccggggcactacgtgatttactgggagatcaaaggggaggttgaggacaagatacttggcgcatgctgcaacgaaatggacaagtcttttgcggatcatggctatgtggtctcaaggaaaaccaactcgatagggcccttggagctttgcgttttggagagtgggactttcaagaagattttggacagcttcatagctaatggggcagcacttagccaattcaagacccccaggtgcaccaataatcatgtcctcctcaaaattcttaacacgtgcaccaccaaaaagttccggagcactgcttacaacagttcaatggaacaatgattgatatgtcactctatgaatgaatgaatggttatttcctttcgctactctttcaaaattttgttatggttatttttcttccaatatggtatatgatatgacttaattagagc

SEQ ID NO: 263 - DNA, 386 bp, Glycine max
  Clone ID: PAT_MRT3847_38272C.1
accaccaccaacccttaacattatattgctcatctgcgtctctcactgtctatctcacatagacaactcgatctaaccatggacctgggtcagatgcagagacagtggatcgactacaccaaatccctcttccatgagggcatcatggatggtcagtttctgcaacttcagcagcatcaagatgagaacaaccctgacattgtggtcgatattgtctctcacttccttgcagattccgatcggcttctcaaagatctcacctttgccataaatgataatagagttgacttcatacaagttgatgatcatgttcaccagttaacgggtaacacttcatgcacaagcgcacatagggtaaacactgcccgtattgctttccgcaacct

SEQ ID NO: 264 - DNA, 227 bp, Glycine max
  Clone ID: PAT_MRT3847_38797C.1
gatggtttggtcagaactcttaaggatctagccaatagtccatattcaccagagtatgatattgctggtatcacagacccatttctgcacatcagattgcttaaacttttgcgagtgttgggtgaaggcaatgctgatgctagcgacaccatgaatgacatacttgcccaggtggctacgaagactgagtcaaataaagttgcagggaatgccattttataagaatg

SEQ ID NO: 265 - DNA, 1675 bp, Glycine max
  unsure (1)..(1675): unsure at all n locations
  Clone ID: PAT_MRT3847_38946C.1
ggcnggggagagcgtatatggaaatcaaacagcagatagagggtctagcatacgtgggttaaatgcatgcgcatgagtcggaagaatttgtgttagcggtgaggagatatattgagaattaacatttgatactgctgcgtgagactcacggtcatgactcatgtaaattcgtctcccacaacaacactagctctcacgtacataaatataaagatgttgatagcatattataaatcatagagttcattccatacacagaaagaagaacaacactaagaaagcagaatagggaaaaatacatcgatagaggaaaattaattgaagggtgctactactacgaccttctatatcattaatgattgaaattcgtgttggaattgtcttgtaggtgtagtagtgataataagagaggatcatatatatattagtagtgctagaaattaattgaagtgtgtaatagaatagagtgtgatagagagagatatggggagaggaagggtgcagttgaagaggatcgagaacaagatcaataggcaagtgacgttttcaaagagaaggtctggtttgctcaagaaagcacatgagatctctgtgctttgtgatgctgaagtggccctcatagtcttctccaccaaaggcaaactctttgagtactccagcgatccatgtatggaaaaaattcttgaacggtatgagaggtattcatatgcagagaggcagcttgttgcaagtgatcaaccactaactgaaaattggactctggaacatgcaaagctcaaagcaaggttggaagtcctacagaaaaatcaaaggaattttatgggacaagatttggagggcctaagtatcaaagagcttcaaaatttggaacatcaacttgatagtgctctaaaacacattagatcacggaagaaccaaatcatgcatgaatctatttcagagcttcataaaaaggataaggtcctacaggaacaaaataacactctcgcaaagaagataaaggagaaagagaaggcactagcccagcatgcacaaatggagcagcgtggtgatgaaatggatcttacttcctctgccctagtacctcatccattggagacatcaaacattagagagtcctcacaaataaggggtgaaggagataatgaaggaaccccaactccaacccgagcaaatgccattcttccatcttggatgcttcgtccttcaaatgaatagaagagtattaacgacctaaaattttaaattacatatgaatatggcgaatacaaagcttaccctataagatgtaaaatggtctatgtgttgaattgtgaacaccacccaatgagttcaattggaatatcatagatatgtaatgtgtctctgactactacatttcaaggatgctaagtaaattatatggtatggcctgtctagatatagacctgcaatacatatatagtgtcaattatgtatgcttggttcttatcaaaagtttaagttggactttacatgcctctcttcctagaaattcggaaggtaaacataatttcagtacacatatatagtgagtttgtgtaatggaatgtaatctttgtgtatcaagtgttgaaggtttagacttttgggtgtatagatagatcctaacaatactacaataaaaacatactatatcggttatttgtagtttgtt

SEQ ID NO: 266 - DNA, 1395 bp, Glycine max
  Clone ID: PAT_MRT3847_38947C.1
tacggctgcgagaagacgacagcgagaggacgaatgaattctatacacacacagaaagaagaaccaccaagaaagaagcataggggaaaatacatcgatagagagaaattgaagggtgctacgtccttctattgtattaatgattgaaattcgtgtgggaattgtcttgttggtgtggtagagataataagagaggatcatagtagtgctagaaattgaagtgtgtaatagaatagtgatagagagagagagatatggggagaggaagggtgcagttgaagaggatcgagaacaagatcaataggcaagtgacgttctcaaagagaaggtctggtttgctcaagaaagcacatgagatctctgtgcattgtgatgctgaagtggccctcatagtcttctccaccaaaggcaaactctttgagtactccagcgatccctgtatggaaaaaattcttgaacggtatgagaggtattcatatgcagagaggcagcttgttgcaagtgatcaaccactaactgaaaattggactctggaacatgcaaagctgaaagcaaggttggaagtcctacagaaaaatcaaaggaattttatgggacaagatttggagggcctaagtatcaaagagcttcagaatttggagcatcagcttgaaagtgctctcaaacacattagatcacggaagaaccaactgatgtatgaatctatttcagagcttcataaaaaggataaggccctacaagaacaaaacaacactctcgctaagaagataaaggagaaagagaaggcactagcccaacaggcacaactggagcgacttggtgatgaagtggatctgacttcctctgcccttgttccccaaccactggtgacatcaaacattagaacctcctcacaaatcagaggtgaaggagataacgaaggaaccccaactccaacccaagctaatgccattcttccaccttggatgcttcgtcctacaaatgaatagaatactatttaattaatgacataaagttttaatcaaattaaatatgaatatggccaatacaaagctcaccctacaagatgtaaaatggtctagtgtgttgatttgggaatggcacccggtgacttgaccagttggaatatcaacgatatgtaatatgtctgtgactaccacatttcaaggatgcttagtaaattatatggtatggcctgtctatacaggcctacaatacatatatagtgtcaattatgtatgtttggttcttatcaaaagtttaagttgtgctagaaactacgatattgggcgatgttagatccctcaaaatctatgattttttacaacagaaatattaaattttgtatgaactaatggttttatctaagtgttacaagaatacattgtctgtatt

SEQ ID NO: 267 - DNA, 1572 bp, Glycine max
  Clone ID: PAT_MRT3847_39240C.1
ccacgcgtccgggaatcgcaagcaaatggtgtacacagctctaaacatgatgatgatggtcgcttaaaacgaagaggaacatggttaactgcgacttcacacatagtgacggctgttattgggtctggggtcctatcactggcatgggccgttgctcagttgggctggattgctgggcctgccattctgacaatcttttctgtcatcactgtcttcacttcttctctgctcagcgattgttataggtaccctgactctgttcatggaaccagaaaccataactacagggagatggtaaaaaatattctaggaggacgtaaatacctgttttgtggattggcccagttcgcaaatctgattggaacaggcattggatacaccgttactgcatccattagcatggtggctgtcataagatcgaattgctttcacaagtatgggcacgaagcgaagtgtcatacatcaaattacccatatatgaccatctttgcggtcatacagattttattaagccaaatccctgatttccaggaactctcaggcctctctattattgctgccgtcatgtcttttggttattcttccataggcattggtctctccatagccaaaattgcaggaggaaacgatgccaagacaagtctaacggggctcatcgttggagaagacgtgacaagccaggagaaactatggaacactttccaagcaattggaaacattgcttttgcatacgccttcagtcaagtacttgttgagatacaggacacgttaaaatcaagcccaccagaaaatcaagccatgaaaaaggcaacccttgctggatgctcgatcacctcactgttttatatgttatgtggcctattaggctatgcagcattcgggaacaaggcacccggaaacttcttaacaggatttgggttttatgaaccatattggcttgttgacattggtaatgtcttcgtatttgttcatttagtgggcgcctaccaggtattcacacaaccagttttccagcttgtggaaacttgggttgcgaagcgttggcctgaaagcaacttcatgggaaaagaatatcgtgttggcaagttcagattcaatggattcaggatgatatggaggacagtgtacgtgattttcacagcagtggttgctatgatacttcccttcttcaacagcattgtgggtttgcttggagctatttccttctttcctttgacagtgtattttccaacagagatgtatctggtgcaggctaaagttcccaagttttctctggtctggattggggtcaaaattctaagtggcttctgcttgattgtcactcttgttgctgcagctggatcaatccaaggaatcatcgcagaccttagaatctatgagcccttcaagtaaatatcctttgtgtagtttagctctttggatgaacaatggtttgtggctaagtttgtggtcattattgatcagttgtttggataaactttctttcaagtgttttcataatatatacttttataatggatcgataagaatgcttttagatcctagaaaaattttaaattgctttttgtcctc

SEQ ID NO: 268 - DNA, 239 bp, Glycine max
  Clone ID: PAT_MRT3847_39392C.1
gaactttcaaggcctaacagtttgtgcaggaaaacccaaataaagttggccctgtgggggggaagcctggggagaagtccatgaaaccagaccctaaacttagcaaaaactactttgcaggggggtagctaggttattagttaaaagtggctttctgaatcgtgttaaatcagggaattgcaaaagggcctggttttttttaatgttttttaagtcctaaaatttagagccgataggtt

SEQ ID NO: 269 - DNA, 3174 bp, Glycine max
  Clone ID: PAT_MRT3847_40132C.1
tgctgaaagagcacattgcattggcgacaccgcgagcgacgacggaaattgaattgctcgtgcgcgtcggtgcgtgatcgatcgaaggacgaacgatgtcggagatggcgagcccagatcccgagggactcgacggagtccgcatgacgtggaacgtgtggccccgtacgaaggttgaatcgagcaagtgcgtgatccctctggcggcgacggtggctctgatccgtccccaccctgacatcccccgcctccagtacgcccctctccgctgcaagacctgctcctccgccctcaaccctttctcccgcgtcgacttcaccgccaagatctggatctgccccttctgctaccagcgcaaccacttcccccctcactaccacgccatctccgaaaccaacttccccggcgaactctacccccaatacaccaccgtcgagtacctcctccctctctccaattccctcaacccttcccccgtcttcctcttcctcctcgacacctgcctcatcgacgaggagatccacttcctcaaatccgcgcttcgtcgcgccattggtcttttacccgataacgccctcgtaggcttcgtttcattcgggactcaggtccaggtttatgaattgggcttctccgacatgtccaaggtttactgtcttccgcggctccaaggagattcccgccgaacaagattctcgatcagcttggtctttctgctgccggaaggagacctcaaaagggtgctgctcccggtgtcgccggtgccggtggattccccaattcaggcatcacgcgcttccttttgcctgcttctgagtgtgaatatactctcaatgcgctgctggatgaattgcagacggatcaatggccggttccgcctgggcgccgccctgcacgctgcaccggggttgcattgagtgttgccgcggggttgctgagtgcttgcaatcctgggactggtgctagaatcatagctttggttggtgggccatgcacggaaggacctggcgcgattgtgtcaaaagatttatctgacccagtgcgttctcataaagatcttgataaagatgcagcaccattcttcaagaaagcagtcaaattttatgagggtctcgcaaaacagctggttggccagggtcacgttttagatatttttgcatcagcacttgatcaggttggagttgcagaaatgaaagttgcggttgaaagaaccggtggccttgttgtcctgtctgaaagttttggtcattcagtcttcaaggactcttttaagcgagtttttgaggatggggagcaatctcttggtctttgtttcaatggaaccctagagataaattgctccaaggaaatcaaaattcagggaattattggaccttgcacctcgttggaaaagaaagggccttctgttgctgatactgttataggagagggaaacacaacagcatggaagatgtgtggccttgacaagagtacatgcttgactgtgatgtttgatctttcatcaagtgatcgttcaaatacccctggtgctgttaacccacaattgtacctacagttccttacaagttaccaggacccaagtggtcaatcagtgcttcgtgtcacaacagtaactagaagatgggtggatagttctgttagctctgaggaattggttcaaggatttgaccaagaaactgctgcagttgtaatggctagatttgcttctctgaaaatggagagtgaggaaacatttgatgctacacggtggttggatcggtttctcattcgcctctgttctaaatttggtgactaccgcaaggatgatccatcgtcttttacattaaacccatcattttcacttttccctcagtttatgttcaatctgcgacgctcacagtttgtacaggtttttaacaacagtccagacgagactgcatatttccgcatgttgttagacagggaaaatattagtaatgctgccgttatgattcagccgtcattgatatcgtattcatttaatgcactgcctgcaccagcattgttagatgtggcttccattgctgcagacaagattttgttgctagattcatattttagtgtggttatttttcatgggatgacaatagctcaatggcgcaacttgggataccagaaccaacaagaacaccaggcatttgcacaactattacgagctccgcatgacgatgcccaaatgataattagagaacggttcccggtgcctagattggtagtgtgtgaccaacatggttcccaggctagattcttattagcaaaactgaatccctcagcaacgtataataatgcacatgaaatggctgctggttcagatgtaatctttactgatgatgtgagccttcaagttttctttgagcatctgcaaaggttggctgtccaatcatgaggacagataatagtagagattgacattttatgggttctggactttggtttggggaattcaccaatgatgtgtgtgtcctgcgttgtgctgttgcattcagtacttttcctttctttcctttgttcttaacaaagagaaggccggagcctgcatgaattgaagaataaggaagacctaaaacataattctttaaggttctggtcgaattttcttttgtggagaaaataaagggttcaaaagtatgttgttaagtttgggtattgcggaaagaaaggatagaaaatcgagttaagagcccccaccactgctacagcagcataatagcaaatgagggagatatttttgactcagtttttcctatttgttttggcccagatctgaatttttgggttcctcagctggattaatttatatagttcttttacttttatatgttccccaggtagcaaagtaacgaaagccattttgtcacgttgagtttgatatcattctcttgatactgttttgtattgtatattgtcaagtaagcgtataggactcatctcggtgcaatggatggaatcaatgatggatgaagcatttgccgccaaagataccttcaaagctcccttcaaatctgaagggaagggaacattcaagactgtaagcttcaagttcaaagcaattgcaccaagaactagactcactttctacagctccttctaccataccagaattgatgactatggttctctttgtggccctgttgttgatcaagttatagtgttccctgt

SEQ ID NO: 270 - DNA, 281 bp, Glycine max
  Clone ID: PAT_MRT3847_40249C.1
gtcggtgtctttcgatgagctcattgcactctacgccgtctctgatgtgtgcttggtgtcctcgacccgagatggcatgaatctcgtttcctacgagtacattgctactcagcagaagcgtcatggcgtcatgatcttatccgagttcgctggcgccgctcaaagtttgaacggtagtatcattgtcaacccttggaacacggaggaacttgcagacgcaatccacgatgcagtcaccatgggtgcggagcaacgggctcttaactaccaaaagctggcca

SEQ ID NO: 271 - DNA, 592 bp, Glycine max
  Clone ID: PAT_MRT3847_40255C.1
ggctcgagatgccatcttatatgagtgtgttcaaacaataatgagtgttgaagataatggtggcttacgcgtgcttgcaatcaatatcctaggaagattcttgtcgcacaaagacaacaatatcagatatgtgggattgaacatgctgatgaaggctgtaactgttgatgctcaggcagtgcagaggcatcgtgcaacaattctggaatggctaaaggattctgatgcttcaattcagaaaagagctcttgaacttgtttgtattctggtgaatgaaactaatgtgaatgccttaacaaaagagctagtagaatatctggaagtcagtgatccagatttcagggcagaccttactgccaaaatttgctcaatagtttcaaagttttccccagagaagatctggtacattgatcaaatgctgaacgttctgtctgaggctgggaactttgtaaaagatgaagtatggcatgcctaaattgttgtgataagcaatgcttcagagcttcatggatatacagtaagagcattatacaaggcatttaaaatggcaggtgaacaggaaactcttgttcgcttaacagtttgggggata

SEQ ID NO: 272 - DNA, 1159 bp, Glycine max
  Clone ID: PAT_MRT3847_40335C.1
cgctttgtgattccaaaactcaagtgtctcgtgttccgcttttgacttccactcagatacctatatgagctagatcaacaccttgatcgctttttaaggtcagcatccatgtctaaaatagatcccccatttgatcgaggaagcataagaagaatactcatacaaactgtaagtgcttccaagtccagaaaaggatcactaagatattggctctcggcaggacctggcgactttcagttatctccctcttgttgccaccgatcaagtctgtatgcgatagtaatacaggatctgtcaccatcctcacctaatttcaggggcgttaaagttgtcacttcatctattcccattaaacaccccaagtttgctatcactaagagtgtgaactatcttccaaatgtgctctcaaaggtggaagctgaagaagctggtgcttttgtaggcatttggcttgatggtgaaggttttgttgctgaagggcctaatatgaatgtggcctttgtcactaaagataaggaacttataatgccacactttgacaaaattctaagtggctgcacagctaagagagttttaacccttgctgagagcttgttaagggagggtaagcttaaagggataagggtgaaaactgtgactgtcgaggaaggtaagcaagcagatgaaatgatgcttcttggcagcggagttcttgtttgccctgtagtgcaatgggatgagcaggttattggtgatggcaaagaaggccctataacgcaggctctcttaaatctaattgttgaggacatgaaatcaggtccctccactgttcgtatacctgttccttattgacacaactttatttccttctcttcattttgtaatgaagattaatcagtagttgtgatgcccctacttctacagggaggaatgactattaataacttcattgtctaatggtttttagagcttgtagtgttataagaaactctattccatggagcttagttttcaaatgtttttgtggtctcatgaactttttttttgagacttgctagttgttagtgaaaaatttgactcattcttctttccgtatcttatgaagggacaacttgctgctgctaatacgtgtgtactttgactttgttgttggaaatttgtgaagcatgagtttatgtac

SEQ ID NO: 273 - DNA, 524 bp, Glycine max
  Clone ID: PAT_MRT3847_40690C.1
gaaagcaatgctcttgccttgcctcttgttgttaagaagcttttgagggtgtcaccattggcttcaagttttgctgtgtctattctaaggaagatttgtgacaagagggaggaaggggttctggttgaggcacttcaagttggggtttttcagaagctcttggttatgctgcaggttgggtgtgatgagagcaccaaggagaatgctacccggttgttgaaactgttgaatggttacaggaacaaagcggagtgcactgactcatcatcattggatttcaagcatcttaagaagccattctaatttgtgatgaatggcaactagattcatttattctttatttttattatttgtataggtcaatttattgatacaaaattctttgctgtaaaaagatacacacatcaattgattctttgaattcattttggataattgattcgatgtaattagttagactactaataagtaataaccatggttgtggcaaatagccaaatacagagaagcatctttttaaatcc

SEQ ID NO: 274 - DNA, 2590 bp, Glycine max
  Clone ID: PAT_MRT3847_40691C.1
gtccagggtattaacttactttgtttgggagtcctgaaaagcaacaacgtgaacattataggacgtgagtattttaattgaagaaaaactaaattatatctgactatatatgatcttgaagctttcatttcagattactttgtcaattcatgcttcttatcaatatagcagccacaactgctatattcttattagaccttcttatgtcgacattgaaattctttagcatttcgccaatgcctgtctttgtttgtctgtttttaagtttaacaaatcacacatcaatactatgacaaaaacacctaaacttccacagttattgctgatgcattgatacatacctgaaatattcgacgtatttatcttcatgcagaaaatttcatgacgtcagtgtattaacttactttgttttgaaaagcgtgatatcataggacaaaatttcatgctgtccgaagctaactactttgacccatcctcatctcctccgcacacccatctatatatataccaaccacgcaaccttctcttcctcataacatctctcattcacctcacaacttcatcaaaccaaaaaacacaacaaaagaaagaaagaaagaaacaaagagttccttgctttgtagtaagatatatcatcaaaaatggttttgtcttggactagaagaaacgttttccgccgtgcaaagaaggagaaggaacaaagtcaattagaagtggaggttgtgattcccaaccactttcgctgtccggtgagtttggagctgatgacagatccggtgactttatcaaccggcattacctacgaccgtgtgagcatcgagaagtggatcgagggaggaaacagaacctgccccgtcaccaaccaggtgctgacaaccttcgacctcatccccaaccatgccattcgcatgatgattcaggattggtgcgtctaaaacagttcttatgggattgaaagaatccccacacctcgtattcctatctcggcatacgaggtttccgacacgtgtacgaggatcttgtcggcttgccagcgtggagatgacaagaggtgtcaggagttggtcgggaagattaaggtttggagtagagagagtgagaggaacaagaggtgcatagttggtgctggtgctggtgctgttcttgcatatgcctttgattgtttctcaagtaactctattgaaaaacatgtggttgttttggaggaggttttggaggtgatgacatggatgatcccatttggggaagagggtgtttctaaattgagttcaggagcttctttgaattcattggtttggtttctagaagggaaagaccttgcatcaaggcaaagtgctgctttgttgcttaaagaagtgtgtgttcaagaattggccaaggttggagaagttgttgaagctttggttaagatggttagggagcctattgggagcacttccacaaaggcttgtttggcaacaatttttaacttggtttcgttggctgcgaatagagagggaattgatcaaagatttgtggagttgggtttggtttcacttttgctagaggctattgttgatggagagaaaggggtgtgtgagaaggcacttggggtgttggattgcatttgtgattgcgaaaaggggaaggaggttgtgaagagcaatgctctagccttgcctcttgttgttaggaagcttttgagggtgtcaccattggcttcaggttttgctgtgtctattcttaggaagatttgtgacaagagggaggaagggattctgattgaggcacttcaagttgggctttttcagaagctcttggttctgctgcaggttgggtgtgatgagagcaccaaggagaatgctaccgggttgttgaaactgttgaatggttacaggaacaaagcggagtgcactgactcatcattgaatttcgagcatcttaagaagccattttaattagtgatgaatggcaactagattcatttattctttttttttttttgtgtaggtcaatttattgatacagaattttttgctgtaaaaagatacacacatcaattgattcattgaattcattttttggactggttatcgtatagtcttagaccgtgagaacatgattcttggttggagggaatctaactgttatgatgatgaactctctactttacctattaaccgatcaaatacacctgctatttctcctgccatagctgtgaatcctgaagcaagatcaagccagtctaataatcctgtgctgtcacctaatctctcatttaagataaaacctacttctgcgtttatgatggccctttttgtgcttttggccatattttgagcatatcttataggctattcagtgttatattactaatattagtattttctttagcacacaccagagaagcgttattactacgcattttttggattcttagtagcactattttgataatgagtttgtaaataatgtaacaacatgtcagtatagttgtgaaaatatatatttccattcttacatttagaaaaaagggttaaaggctgaccgccgtttttactcggtctcaaatgcaaatcctcacaggtcagttacaaaaaaaaaaaaaaaa

SEQ ID NO: 275 - DNA, 1860 bp, Glycine max
  Clone ID: PAT_MRT3847_40848C.1
tacggctgcgagaagacgacagaaggggaaacaatgcttgttttattttattttggtttatttttcgtttccatttgctctttcttccactgataatccaaagttccctcctttactttaaatcaacacatctcaagagagaaagagagagagagtgtgtgagagagagatggcaggtatcgctggtacatgtcctttaggagcattgctcagaaacagtgtctcagaaaacaatgggaagatatctgtggttcattatgaggggcttagattgcagcagagaatgcaaatgccttcaccaagccagtacatttcagcttcttcatcagctccaagatgcagaacaatcaaggccatggcttccccaactgttggagcaccaaagagagaaaaggatccaaaaaagcgggtagtaataacaggaatgggtcttgtgtcagtctttggtagtgacgttgatgccttttacaacaagcttcttgagggagaaagtgggataagcctaatagataggtttgatgcctcaaacttctcggtccgttttggaggtcagatacgtgatttctcttcagaaggctacattgatggcaagaatgaccggcgccttgacaattgctggaggtattgcattgttgcaggcaagagggcccttgatgatgccaaccttggaaagcaagtccttgacactatggacaaaacaagaataggagttctggtgggatcaggaatgggaggtataacggctttctcgaatggtgtggaagctcttgtacaaaagggatataagaaaattactccatttttcattccctactccatcaccaacatgggttctgccttgttggctatagacacaggcctaatgggtcccaattattcaatttccactgcttgtgcaacggcaaattactgcttttgtgcggctgctaatcacattagaaaaggcgaagcagatatcatggtggttggtggaactgaggctgcaatcatgcctagtggtcttggaggcttcattgcttgcagggctttgtctcacagaaacgaagaccccaagaaggcttcaagaccatgggacaaagatcgtgatggttttgtgatgggtgaaggctctggtgtgctggtaatggagagcttggagagtgcaacaaaaaggggagccaaaataatagcagaatatttggggggtgccataacgtgtgatgctcatcacatgactgatccaagagctgatggtcttggagtttcatcttgcataagcaagagtttagaagatgctggagtttctcctgaagaggtgaactatgtgaatgctcatgccacgtcaacactggctggtgacttggctgaggttaatgcaattaaaaaggtttttaaggacacatcagaattgaaaatgaatgcaactaagtcaatgattggtcatggtcttggggctgctggtggtttggaagccatagcaactatcaaagccataacaactggctggttgcatccaagcattaacctagataacttggaggctagtgttacaattgacactgtccctaacgttaagaagaagcatgaagttaatgttggtatatccaactcatttggattcggtggacacaattcagtagttgtctttgccccattcaggccataagtaggattcaaactcaatctgagtatttcttttactttgtcttttttttttctttacacattttgagaaccagtgatttttggacacaaattcataggactatgagttatggactgaaaatagttgtttcattatgtattgaaatcatatacccagatcgtgtggtctaatgtaatgagccctgaagtcaataaaatgtaattttcagccaaaaa

SEQ ID NO: 276 - DNA, 1086 bp, Glycine max
  Clone ID: PAT_MRT3847_40928C.1
attgagtcttggcgtggccaaagtagcagaaaataaaagtttcaaaggaagcctgatgggaattagcattggcacagtaacacaagccggaacagtcactagcacacagaaaatatggaggagtttacaagctctcggggcaatggcctttgcatactccttttccattatcctcatcgaaattcaggacaccataaaatctcctcctgcagagcacaagaccatgagaaaggccacaactttgagcatcgcagttactacagtgttctatttactctgtggatgcatgggttatgcagccttcggagataatgcacctggaaacctcttgactggttttgggttctataacccttactggcttctggacattgccaaccttgcaattgttatccacctagttggggcataccaggttttttcccagcccttatttgcatttgtggaaaaatggagtgcacgtaaatggccaaagagcaattttgtcaccgcagaatatgatatacccattccctgctttggtgtgtaccaactcaacttcttccgcttagtatggaggaccatttttgtgctgttgacgaccctcatagccatgctcatgccttttttcaacgatgtggttggaatacttggcgcttttgggttctggcccttgacagtttatttccctattgacatgtatatttcgcaaaagaagattggacgatggaccagtcgctggcttggacttcagttacttagtgccagttgcctcatcatttcattgttagctgcagttggttccatggcaggggtggttttggacctcaagacttacaagccatttaaaactagttattaaatcaaggccgtaagaaatagctagaagtgtttgaacatatgatatttttatacaaaactaatgataagttagtttgtgaaattaaagtatatacgttccatgcctgctgctgttagagcaacttgatttgaggaaaaaagtgataattggacataatatacctcagatttggacgtatacagtctgtgtatgtgtgttattttacaaggaataaaagtctttgaacgtgttatttctttagtcat

SEQ ID NO: 277 - DNA, 1850 bp, Glycine max
  Clone ID: PAT_MRT3847_40929C.1
attccgggtcagctttcttcttagtatcgagctacatatttcacagccatgttgccaagaagtagaacccttcctagcagaatccaccaaggaattatagaagagaggcacgatgtcaggccctacgtacaagtagaagtgcgacccaataatatccaaacggagacccaagcgatgaatatccagtctaactattccaagtgcttcgatgatgatggtcgcttgaagagaacaggaacattttggacggcaactgctcatatcatcactgctgtgatagggtcgggagtcctttcactagcatgggcggttgctcagcttggttgggttgctggacctgttgtcatgtttctctttgccgtcgtcaatctctacacttccaacctattaacacagtgttacaggaccggtgactccgttaatggacacagaaattacacctacatggaggctgtcaagtccatcttgggaggaaaaaaggtcaagttatgtggcctcatccaatatatcaatctgtttggagttgcaatcgggtacaccattgctgcctctgtcagtatgatggccataaaaaggtcgaattgctatcacagcagtcatggaaaagatccctgccacatgtcaagcaatgggtatatgataacatttggaatagcagaagtgatattttcccaaatcccagactttgatcaggtgtggtggctatccatagttgcagctatcatgtccttcacttattcttcagttggattgagtcttggagtggccaaagtagcagaaaataaaactttcaaaggaagcctgatgggaattagcattggcacagtaacacaagccggaacagtcaccagcacacagaaaatatggaggagtttacaagctcttggggcaatggcctttgcatactccttttccattatcctcatcgaaattcaggacaccataaaatctcctcctgcagagcacaagaccatgagaaaggccacaacattgagcatcgcggttaccacagtgttctatttactctgtggatgcatgggttatgcagccttcggagataatgcacctggaaatctcttgactggttttgggttctataacccttattggcttctggacattgccaaccttgcaattgttatccacctagttggggcatatcaggttttttcccagcccttatttgcatttgtggaaaaatggagtgtacgcaaatggccaaagagcaattttgtcacggcagaatatgatataccgattccctgctttggtgtgtaccaactcaacttcttccgcttagtatggagaaccatttttgtgctgttgacgaccctcatagccatgctcatgccttttttcaacgatgtggttggaatacttggcgcttttgggttctggcccttaacagtttatttccctatcgacatgtatatttcgcaaaagaagattggacgatggactagtcggtggattggacttcaattacttagtgtcagttgcctcatcatttcattgttagctgcagttggttccatggcaggggttgttttggacctcaagacttataagccatttaaaactagttattaagtgagatttaaagaaggtcgtagaaatagaagtgtttaagcttgatgatattatagaaaactaatgataagttggtttgtgaaatttaagtatatacgctccatgccgctgctgttagagcaattgatttgagaagaagaaaaaaatgataattggacataacatacctcagaatttggacgtatacgtgtctgtgtaactgctatattgaagtcaattgtaaggaataaaagtctttgaacgtgttatttctttaaaaa

SEQ ID NO: 278 - DNA, 175 bp, Glycine max
  Clone ID: PAT_MRT3847_41138C.1
gatgcagagactgtggatcgactacaccaaatccctctttcttgagggcttcctggatggtcagttgctgcaactgcatcatctccaatatgataacaaccttgactttggggacgaagttgtctttctcttgtttgaagattctgaaaggctactcatagatctaacctttgcc

SEQ ID NO: 279 - DNA, 242 bp, Glycine max
  Clone ID: PAT_MRT3847_41731C.1
gattcaacatttcacacaactactacaagtactgccttacgatcaataccaacagcaactattccaagttatcaaaagcactaccatgatcagggtcgcaaggttgactagtatttctacgttgagaagcaaaccgactaatactgcaaccctgttcatgctgctagtgtcacctatttaaccaccataacttcttctttttgtttacagcgattacatttataatcaacattataccacca

SEQ ID NO: 280 - DNA, 1140 bp, Glycine max
  Clone ID: PAT_MRT3847_42207C.1
ttgatgcgtgggcggacgctcttgttttcctttgtcaattgagaattgttcctctcttctcttccattcgtgtacgcgcaaaagaatcatgacgagttcctctgctgccgctcgcaagaatctgagtaagattgcctgcaataggctccagaaagagctcgtggagtggcaggtcaatccccccactggtttcaagcacaaagtcacagacaatctccagaggtgggtggttgaagtcactggagctcctgggacactttacgctaatgagacctaccagcttcaggttgattttcctgagaattacccaatggaggctcctcaggtgatattcttgcatccggctccgctgcatccccatatctacagtaacggccacatttgtttagatatattgtatgattcatggtctccggcgatgacagttagttctatctgcatcagtattctctcaatgctttcaagctcaaccacaaagcaacgccctgaagataatgaccgctatgtaaagaactgcagaaatggcagatcacccaaggagacaaggtggtggttccatgatgacaaagtataataattataaaccagtttctctaataagtccacaaaagtagagtagaggattatccttttgaaaacaaaatgaagaaatgggaaaatgcattttgagaaaccaggatccctttaaattcaatggataataactctgctgtaaattggcattgcctggtatttgtaaaggaaggggaaactatgtgtcttaagcaacttaaggagcaaacaaactcaaaacattgtggttaatctcacaggtatttggatgtggatatagatggtctgattaacccccttattgacaacttgtgtttcatacttcttttaagaattgcccattatatctcataattgactatatgcattgccgataaatactcccccattatatctcagaatttgattatatgcattgcctttatttttttttccttttcaatttccagaactggttttttttttcatttattttttttcactttcttgtttttgtattgtttattttccatttaatcgttctctttggattttaataaatttagtgttttattatttttttattattattttattttttatttttat

SEQ ID NO: 281 - DNA, 1647 bp, Glycine max
  Clone ID: PAT_MRT3847_4236C.1
tacaagttaacgagttatgggagctccccggacctcagttttaaaggggctttagggcgttaaaaagaaagcgcagagaaaggtgttgttctcagatccatccatcagtggtgggcgatgttgttgttctcagatccagactgagggggtgaaggaaaatgaagtcgtcgaggcgtctgttgaggatcgggcttgtgtcggcgtggtactcgtcgaacattggggtgctgctcctgaacaagtacctccttagcaactatggcttcaagtaccctatcttcctcaccatgtgtcacatgaccgcttgctccctcttcagctacgtcgccatcgcctggctcaagatggtccccatgcagaccatccgctcccgcctccagttcctcaagatcgccgccctcagcctcatcttctgcttctccgtcgtcttcggcaacgtctctctccgctacctccccgtctcttttaaccaggccgtcggcgccaccactcccttcttcaccgccgttttcgcttacgtcatgaccttcaagcgcgaggcctggctcacctatctcaccctcgtccccgtcgtcaccggcgtcgtcattgccagcgggggtgagccgagcttccatttatttgggttcatagtatgcattgcagctactgccgcacgtgccttaaaatccgtgttacaaggaattttgctttcttctgaaggagagaagttgaattctatgaaccttcttctttacatggctccaattgctgttgttttccttcttcctgctacacttataatggaagaaaacgtggttggcattacattggctcttgccagagatgatgtgaagatcatttggtatctgctatttaattcagcacttgcttattttgtcaacctgaccaattttttggtcaccaaacataccagtgctcttacccttcaggtgcttgggaatgctaaaggggccgtagcagtagtagtttcaattctgatatttagaaacccagtgtcagtcactggaatgatgggttattcactcacagtcctcggagttgtactttatagtcaagccaaaaagcgaagcaagtgatactgatgctgtctgtcattcatgattctgtggaaatcagcagtgaattccctatatttgttttcattcctgtgcggacaaactcaagattccatgaggcaaatttgttagcatgattgtgatcagaatgtttcagactctacaattttttggccctacatggaaaaacgggtttcccattgtattagtacctgtgcagaaatagcccacagtacaaagtttcaataagtgactgatctctctactatacccatgttggcatataatcgaggaatgtctttttgtcatttattctttgaagaaagagttgtagaaggacctctactcatttgttgtttacattgcttacatttgtttattgatgataaaatttgtatctgggatgcgccaacaacatcatacacacgaattaatagattgatcttctccactctactcatttgttgtttacattgcttacatttatttattgatgataaaatttgtatctgggatgcgccaacagcatcatgcacatgaattaatatattgacctgcgcaactttttaaaaaaaaaaaaaaaaaaccc

SEQ ID NO: 282 - DNA, 1378 bp, Glycine max
  Clone ID: PAT_MRT3847_42797C.1
tacggctgtgagaagacgacagaagggggtggaaaaaaagcattttgcaactgctcgcagcttaacgctgcaatttctttccaagttggtcgagcgacttcaggattgccttgcatacttttggtgtttgaagagctaatctgtctaccaaaatgaagggacgtgtaaggtgggatgaggctaatattggagaaattgaggcaaacaaacctgtgaggcagaaaattactgagcctaagactccatatcatcctatgattgatgatgacagttctctatctcctgtacgaggaagttttgatgcatgtattgataatgaaaatcgtgctgaagcaatatggagtgctctgaatgatgtagcctccagtagcagaagaggcactggacaatctggtggttggacatcatctgaggatgagccagaagcaatggagcaagatgatgatgattctgaaacagataggaacttgagttttaaagagcacagaaaggcccactatgatgaatttcttaaagtcaaagagctgcaagagacgggttctcttgaggatgaaagtgacgaggatcataattctcaacccagtaaggcggagaaatgtgagtcgtcttcactgagtcatagtgtaaaagagatggtcattgagggtaagaagtcttcaacgcctccagctaatggttcttagacagtgatcaacaaataaaatccactgtcttttcattagtttcattttgtgtattgaagaaaactaaatgattcactgtattgtatcatttgtatgtaaatagtttctttcttcatcatgcttattatgatccgttcacacttttgtattctggcaaattggtttgttttcggcatctttgaggaatttgcttgtggcttttataaggaattaaggttggatgcttaaagggaggaaatatcccaaactgaaactatatttcatttcttatttccttgtgatttttatgtgatttgtgtgggagtattatgccccaatttttaataccatatttcttcaaccacttgcataaataactgaatcaaatttattaactctttgccattcaacttattgaatgaagggtataacaccaaatcattgatgttgcatgatgcaaacagataatgcaatctaatctcagacgcacagaaaccatcatatgccatcataagcaaaatacaagcctccttcaccgtaagcaagtacttcttcacaatgctatcatttgctttttcagtggcctaacagcacttggcactcccaatccttcttcacagttcccacgcctgttatgtagcatctttggacggagaaagaaagtaccgcaaaatggtaagtatttgtgatgaaccaagatcctcgaaccgcgatcc

SEQ ID NO: 283 - DNA, 1930 bp, Glycine max
  Clone ID: PAT_MRT3847_43305C.1
gcacttgcccgcgcggttgtactgccactactagctcacaggatgggaacatgaacattagcagaaaatcaaataagacccacttgttagattggttacactagcagcacgcagggttctgttctgctttgcattctccgccatcatcatgcaagcgcttcactctcccaccctccgcgcttctcccttggaccctcttcgtggccccaacaatgccgccgccaaccgccgctcctccagcgccaagcgcgtgttcttcgtctccgccacggtggcgccgaaggtgtccgccccgcagcgacagaaggaccccaagaagcgcgttgtgatcaccggaatgggcctcgcgtcggtgttcggtaacgacgtggagggttactacgagaagctcctcgccggcgagagcggcatcaccgccatcgaccgcttcgacgcctccaagttccccacgcgtttcggcggccagatccgcggcttctctgccgagggctacatcgacggcaagaacgaccgccgcctcgacgactgcctccgctactgcattgtcgccggcaaaaaggccctcgaaaacgccgaccttgcccccgacaaccactccaagattgataaggagcgtgctggtgttcttgtaggctctggaatgggaggcttaacggtgttttctgacggtgttcaggctctgattgagaaggggcacaggaagataacgccgtttttcattccttatgcaattactaacatgggttcggctttgcttgggatagaccttggattcatgggtcccaactactctatatccacggcttgtgctacttccaattattgcttttatgctgcggcgaaccatattcggagaggggaggctgatttgatgatagccggtgggactgaggctgccattattccaattgggttagggggttttgttgcttgcagggcgctttcgcagaggaacgacgaccctaaaaccgcttccaggccatgggataaggaacgtgatggctttgttatgggtgaaggtgctggagttttggtaatggagagcttggagcatgctatgaagcgaggcgcacctattattgctgaatatttgggaggagctgttaactgtgatgcttatcacatgactgatccaaggtctgatggacttggtgtgtctacatgcattcagagcagccttgaagatgccggtgtgtcaccagaggaggtcaactacataaatgcacatgcaacttccactcttgctggagacttggcagaaattaatgctattaaaaaggttttcaaggacacttctggcatcaaaattaatgccaccaagtctatgatagggcactgccttggtgcagctgggggtttagaagccattgccacagtgaaagccataacaacaggatggctgcatccaacaatcaatcaatttaacccagaacctgcagttgattttgatacagtggcaaatgtcaagcagcagcatgaaatcaacgttgccatttcaaattcatttggattcggtggacacaactctgtggtggcattttctgctttcaagccttgattgcccagcttagcttgtctgcactttatgtagaacacgggtttaagttaattgaaattttgttccctctacatcattgaggttatttactctagctgagtccatcatcatatataaaaagctgtaggcatgtagttgttcattttgtgcctaattgtgacttgacaattagctataagactattttgtagtagaacattttgaatatagctcgaagattttattagtttggaggtatacagcagcggatagaatgtcaaagagcttatattcttaagcattcttccttattgttaagtatcatttgaatctcagggcggcccgggcccccttgatcggcttcttgaatacatgcttatacaacattatttc

SEQ ID NO: 284 - DNA, 249 bp, Glycine max
  Clone ID: PAT_MRT3847_43345C.1
aaaaaaaaaaaaaatttaaaaaaatttaaaaaaaaaaaaaaaaaaaaaaaaaaaaaaaaaaaaaaaaaaaaaaaaaaaaaaaaggggcggccgttttaaagaatcaaagttaactaacccttgaatgcaacaaaaaagtttttttatagggcaactaaaattaaattaattgcccgtggtttaaaaacgtcggaattgaaaaaaccttggcgttaccaaattaaatggctttgaagaaaatcccctttt

SEQ ID NO: 285 - DNA, 1885 bp, Glycine max
  Clone ID: PAT_MRT3847_43486C.1
cttgtgatctctccgtagggacaataccatgcctcttggtcctttctctaatccaaatatctctccgttaatgctctcaccacaaacttcaatagactagccaaaagctaacaccaactataggccaaatcaccaataaatattatttcccgttcttttggcgtgttggccacccactgaacacatttgcactcacacatagaagcagagagaggccattggttggtttcagagatgggaagcatgcacatagaaaccccagaaacttttgctgatggtagcaaaaacttcgatgatgatggacgagctaaaagaactgggacttggattactgcaagtgctcatatcataacggctgtgattggttctggagtgctatctcttgcatgggcaattgcacagatgggttgggtagctggtcctgcagtgctctttgtcttctctttgataacatacttcacctccactcttctcgctgactgttaccgttcacctgaccctgtacatggcaagcgaaactacacatattctgaggttgtcaaagccaacctaggaggaagaaaatttcagctgtgtggattggctcagtatataaatcttgttggtgtaacaatcggctacactataactgcatcacttagtatgggggcggtgaagaagtcgaactgtttacacaaacatggccatcaagacgagtgcaaagttaaggacaacgcttttatgattgcttttgcctgcatccaaattcttctaagccaaataccaaacttccataagctctcttggctctctatcgtagcagctgttatgtcttttgcttattcttccattgggcttggcctttccatagccaaaatcataggtgggggacacgtgcgaacaaccttaacaggggtggaagtttcgggaacggaaaaggtttggaaaatgtttcaagctatcggtgacattgcctttgcttatgctttttctaatgtcctaattgagatccaggacacactgaaatcaagcccacctgagaacaaagtcatgaagagagcaagtttgattggcattatgactacaacattgttttatgtactatgtgggtgcttaggctatgctgcatttggaaatgatgcaccatctaatttcctcacaggattcggcttctatgagcccttttggctaatagactttgccaatgtctgcatagcagtgcacttagttggggcataccaggtctttgtccaacctatatttgggtttgtggaaaagtggagcaaagaaaattggacagaaagccaatttataaatggcgagcatactttgaacattcctctatgtggaagctacaatgtgaacttctttagggtagtgtggaggactgcatatgtgattatcactgccgttgtagctatgttactcccattcttcaatgactttttggcccttattggtgcactctctttctggccattgacggtttacttccctatagagatgtacattaagaagtcaaatatgcaaagattttccttcacctggacttggctcaagatattgagttgggtttgcttgatcatttctattatctcacttgtgggttccatccaaggcctttcggttagtatcaagaaatacaagcccttccaagcagaacaatagaactttcatacttagtattccaacttgagccaagagtttctattgagggcgacaaaatttgtattactatgttttgaaatagttgttatattttcaattctcgaaatcgagacaacttgttatactaaagtaatataataaaatgtttagtttgctatgttaaatggttttcttcttggtagctgtttttttttcttttttgttaggttatgtttagattgatggaagaggatggaat

SEQ ID NO: 286 - DNA, 3616 bp, Glycine max
  Clone ID: PAT_MRT3847_43512C.1
ggggaataaagtatcaacccaaatatatatcatgttatctggtaaattgagttattatacaggaatccctactaaaatggacatcgcactaccttttacgaaaaaagagtaaccttagtgcaagccccccaacaaaatacacaattcaaaatacatggcagccaatcgcgaccagctggcagtgatagcactaccttaaattatcattccctcatctataagcagaaactagttttatctccatatacacgaagaattataacatgatggtgtttttatttctccgctaatgtttagtccctgatttgagatcataatgccagaacaatagctgcaaatttaatcggaatcaatactaactagcaacaataaaaaatttataaatcactaaaccacattcttctcatccataaaacacattagacaatccactgaaacattgtaaatcccaagcgcaacgcgcacttgaaatcataaaattcattaatacaataatcccactatggcaagccacattggatccatattatcggtaatacatatccaatcaactaccacatcgcaactgccatcgcctattcgcctggttgttgcttagatgtttccttgatctcatctccagcatcgtccgtgatgtctgatgtccacaaagtcagattgtcacggagaagttgcatgatcaatgtactatctttgtatgactcttcacccaatgtgtcaagctcggaaattgcctcatcaaatgcctgcttggcaagattacaagcacgatctggcgagttaaggatttcataatagaacacagaaaagttgagagcaagtcccaacctaatggggtgagtgggggccaagtcagcaagagcaatatcctgagcggatttgtaagcaagcaaagtactctctgcagcctctttcctctctgccccggtcttgaactcagcaaggtacctgtggtaatcacccttcattttaaggtaaaagactttgctctcgggagatgcagcggaaggaatgaggttggactcaaggaggttcaaaatcccatcacagatcttgctgagttcagcctcaattttgcccctgtactcctttataatggccacgtggtcctcattgcccctgctctcctccttctgctcaatggaggatatgatcctccacgaagccctcctcgcaccaatcacgttcttgtaagccacagagaggagattcctctcctccaccgtcaactcctcaacctccacagtctttgcaaccttctccatgaactcaaccatctcctcgtaacgctcggcctgctccgccaatttcgccatgtaaacgttctcctcccgagaagaatccgccatttctcagattcgcaaattcctcgcaccaatcacgttcttgtaagccacagagaggagatttctctcctccaccgtcaactcctcaacctccacagtctttgctaccttctccatgaactcaaccatctcctcgtaacgctcggcctgctccgccaatttcgccatgtaaacattctcctcccgagaagaatccgccatttctcagattcacgaatctcaccgcttaatcctaaaaaatggaagatgcagatctggaaaggagaaacaaaaaggaaaccctaaaaggagaagaaagtgggacgatgaacctgctcagaacttggtaagcctcacctaaaacctgaaaattttgtgcagcaagagggtcatttgggtttttatctggatgcacttgccgtgccttaatgtaataagctttcttaatctcggcttcggatgccgtagggctgacacccagcacgtcatagtattcggtctccttcaccatttcaaagcccagttgattgatagtggatgacgtattccaagccaaaaccaaatggcgttatccttctcactaaggcctaaactctctctccgcctgttgtggttggtatggacgtgggaatcccgggcgttgactgctgcaaccgcgtaattctctgtgtgaagccctcctctccggtggttccgactttttgccctcccccttctgtcgtccaggcgtagaattattagacaagcaaaacaacactgcacaatgcggtccccgccgacaagatgcgatctccagcacatacaggcacattccacacgagcgatacatacaatacaccccctcaaaaaccaacaaacaatcaaataaactacaaaccggatatcaaactcaatccttgctggttgaagtaggtctctgggcacccgggggggcggttggcctagggaaattataatcaaattgcatgccagcaaagcgcggggcctccacataggggctctgagacgaaaaatcaggacttgaagatttgggtgatgtactaggagaagtatcattgccagtttcacttccattcaacttgtgtactgccttatttggacactttcattctcgtttccattggctgatttaaccctctggaagattttaccaagagtttttaaccctttagctcgagcgcggagttcttctttcttggcaccgttgtcttgaagaaccatttgacaaacgcgggaaagagtggcttcaatgtctgccacattaagcttccacaatgagtcaatcattaatttcttgtgattttgcatgtattcttcaagctcttcttcagtatagtccccttctgaactgagttgctttttcatatcctcctgcaattggattaaagcaattgcccctgttgctgctgtaacttgagatttaatagagtgccctttgtttctaaaccactcagcaataaaaggcacacccaaataaattgctttcttccctagctcttttgctgcctgccttgcgtatatgtagccaatggtattcaacatatcaaccccataagctgcattagatagccgggctacttcagcttctgcatcattaacaaaaccctctttgtttccttgaacatattggttgagtctatttttcagtatctctgcaagcttttcttctctctccttctgaacaaccctcattttctcttgcaactttttactatcaaattgttctccttcagtaaagatgtccattgaagccattgatgccatggctaactgacctatatattcctcaaaaagctcactaccaaaaagcatggcaaagattgctgcaggatcaataattgcttcagttgaaattcctgattttccatgagcatcataagcttgtctttgagctgggtcactcagaacttggtaagcctcacctaaaacctgaaaattttgtgcagcaagagggtcatttgggtttttatctggatgcacttgccgtgccttaatgtaataagctttcttaatctcggcttcggatgccgtagggctgacacccagcacgtcatagtattcggtctccttcaccatttcaaagcccagttgattgatagtggatgacgtattccaagccaaaaccaaatggcgttatccttctcactaaggcctaaactctctctccgcctgttgtggttggtatggacgtgggaatcccgggcgttgactgctgcaaccgcgtaattctctgtgtgaagccctcctctccggtggttccgactttttgccctccgcgttccgtcgtccag

SEQ ID NO: 287 - DNA, 596 bp, Glycine max
  unsure (1)..(596): unsure at all n locations
  Clone ID: PAT_MRT3847_43712C.1
cgggattaaggcacacaatggaagaggagtcaaaggagaaaaagaaggacactaaggaggaaccacgttatagaggagtgcggcggcggccgtgggggaagttcgcggccgagattcgggacccggcccggcacggtgcccgagtgtggctggggacatttctcacggcggaggaggctgctagggcttatgaccgagctgcctatgagatgaggggcgctttagccgttctcaattttccaaatgagtatccttcatgctcttctatgaactcatcttcaacattagcaccttcatcttcttcttcaaattcaatgcttaaaagtgatcatggtaaacaagttattgagttcgagtgcttggatgacaaattgttagaggaccttcttgattgtgatgactatgcctacgagaaagacttgcctaagaactgaacggtttgatcaaatttgaatgttagattgatttcaaagcatacctatagtagggtgaatgtcttcatatatgatatgatttccttttaggcagcactttactttggtgagtatggtttataacttaagaatgactttgttgaaccatnttagtttgatcgt

SEQ ID NO: 288 - DNA, 837 bp, Glycine max
  Clone ID: PAT_MRT3847_44678C.1
ggctcgacccacgcgtcagcggacgcgtgtacggctgcgagaagacgacagaaggggagattcgtcttcagtttcagcctttctctctcactcactcactcacagttaagcaatggcgggaaaaggagggaaggggcttcttgcagcgaaaaccaccgcggcgaataaggacaaagacaaggacaagaagagacctatttctcgctcttcccgtgctggaatccagtttcctgtgggacgtatccataggcagctgaaacaaagggtccaagccaatggacgtgttggggcaacagctgcagtgtacttagcctcaattcttgagtatctgactgctgaagttcttgaacttgctgggaatgcaagcaaggatctgaaggtgaagaggatcacaccaaggcatttgcagctggctatcagaggagatgaggagctggacactcttatcaaagggaccattgcttggtgcgtggtgtcattcctcacattcacaagtccttgatcaacaaaaccgccaaggattgagctctctttggccttctgaattcatgttgctgtttactgaaaactaagtttgtggtttattgttgaattgatcacagcagtaggtttgtatgaagatttattttaacagttttataactcaggtggtagtgtgtaaatggcttgcttgctagacaatgctttctttaactgttttagttggtctgtttttagagctttaaccatgttggattgctagacaatgcttgcttttagatacaatctgtgatctgttgttgtctttgttgcccattgaccccttcatatatggttgttttattttaatctttgcaa

SEQ ID NO: 289 - DNA, 1379 bp, Glycine max
  Clone ID: PAT_MRT3847_44731C.1
gcagaaacagaagcacagcaccacgaaccaatcccagcctttcggttcccccacaaataaaatagttaccacaacccatttgttgcttgctgcgagcgaatccctctctctctttctctttctctctcatccagatcttgcaaaaaaaaaaaaacacaatggcagcgagcgctcccactccacgcgaagagttcgtgtacatggcgaagctggcggagcaggccgagcgctacgaggagatggtggagttcatggagaaggtctccgcctccgccgagagcgaggagctgaccgtggaggagcgcaacctcctctccgtcgcctacaagaacgtaatcggcgctcgccgcgcctcctggcgcatcatctcctccattgagcagaaggaggagagccgcggcaacgaggaccacgtcgccgtcatccgtgactaccgctccaagatcgaggccgagctctccaacatctgcgacggaatcctcaagctcctcgacacgcgcctcgtcccctccgccgcctccggcgactccaaggtcttctacctcaagatgaagggagactaccacaggtacctcgctgagttcaagaccggcgccgaccgcaaggaagccgccgagagcacgctctccgcctacaaagccgctcaggacattgctaacaccgagctgcctccaactcaccctatcaggctgggtcttgctctgaatttctctgtgttttactatgagattcttaactctcctgatcgtgcatgcagccttgcaaaacaggcttttgatgaggctattgctgaattggatacgttgggagaggaatcatacaaggatagcactttgatcatgcaacttcttcgtgataaccttaccctctggacctctgacatgcaggatgatggtgcagatgaaattaaagaagccgcacccaaaggtgacggggaacaaaattaaacataccatacttctaattagtgattgaacttcccttgtgtaatgttttcaaagggagaaggtgttgaatgctaatctcggtgttactgagattttgggcattcatgttcttcgttatgaattgtggatgtactgggctattttagtttgtccttccattagtacgcgtttctgaactgcctattttcataatgacactgaaatttccattataatgctgtttagaatattaagatattgttctctagcaaacttggtattgctaattgttttagcatgtgaaggtgtgacacctttatttgtttttattctaaagcctcggaatcatttattccgatcgattttaacgtgtttttgttgtgaggattgtcaacttcattatgtttgggtgcatggggttatggagaatttgatataaaaagtatgatttct

SEQ ID NO: 290 - DNA, 1446 bp, Glycine max
  Clone ID: PAT_MRT3847_44732C.1
gatgggtggcagaaacagaagcacatcaccacgaaccaatcccaacctttcagttcccccacaaataaaatagttaccacaacccactattagttgcttgctgcgagcgaatccctctctctatctctcacacacactttctctctctctctctctctcacccagatcttgtagcaatggcgagcgctcccactccacgcgaagagttcgtgtacatggcgaagctggcggagcaggccgagcgctacgaggagatggtggagttcatggagaaggtctccgcctccgccgagagcgaggagctgaccgtggaggagcgtaacctcctctccgtcgcctacaagaacgtgatcggcgctcgccgcgcctcctggcgcatcatctcctcaatcgagcagaaggaggagagccgcggcaacgaggaccacgtcgccgtcatccgcgactaccgctccaagatcgaggccgagctctccaacatctgcgacggaatcctcaaactcctcgacacgcgcctcgtcccctccgccgcctccggcgactccaaggtcttctacctcaagatgaagggagactaccacaggtacctcgccgagttcaagaccggcgctgaccgcaaggaggccgccgagagcacgctctccgcctacaaagccgctcaggacattgctaataccgagttgcctccaactcaccctatcaggctgggtcttgctctgaacttctccgtgttttactatgagattcttaactctcctgatcgggcttgcagccttgcaaaacaggcttttgatgaggctattgctgaattggatacattgggagaggagtcatacaaggatagcactttgatcatgcaactgctacgtgataacctcaccctctggacctctgacatgcaggacgatggtgcagatgaaattaaagaagccgcacccaaaggtgacggggaacaaaattaaacataccatactctctgcttattagtcattgaacttcccttctgtaatgttttcaaagggagaaggtgttgaatgctaatctcaatgttactgagattttgggcattcgtgttcttcgttatgaattgtggatgtactgggctattttagtttgtccttccatttatacgcgtttctgaactgcctattttcttaatgacactgaaatttccattatgatgctgtttagaatattaccaagatgttgttctctttagcaaacttcgtattgctcattattttaggatgcgaaggtgtgacacctttcatttgtttttattctaaagcctcggaatcataactctgatcgattttaacgtgttttttgttgtgagggttttcaacttcactatgtttaggtagggttttgttgttcttgatcgctattttagtgcaatgcccatggggtcatggaaaagtgtttgatataaaaagtatgatttct

SEQ ID NO: 291 - DNA, 1044 bp, Glycine max
  Clone ID: PAT_MRT3847_44887C.1
cccacgcgtgcgcttttcttctcgcagagcgaaatcccaatcccacacaaatggcatgctcagccacctctgcttctctcttctccgcaaaccccacacctctcttctctcccaaatcctccctctccctccctaacaactctctccacctcaaccctctccccacgcgcccttctctctccctcacgcgcccctcgcacactcgccgctccttcgtcgtcaaagcctcctccagcgagcttccgctagttggaaacaccgcaccggatttcgaagcagaggctgtgtttgaccaggagtttatcaacgtgaaactatctgattacattgggaagaaatatgttgtgctcttcttctacccgttggacttcacttttgtttgtcccacagaaatcactgctttcagtgaccggcatgcagagttcgaggcactaaatactgagatattgggtgtttcagttgacagtgtgttctcgcaccttgcatggatccaaacagatagaaagtcaggtggccttggtgacttgaattatcctttgatttctgatgtcaccaaatccatatcgaaatcttatggtgttctcattcctgatcagggaattgcattgagaggtttgttcattattgacaaggaaggggttattcagcattctaccattaacaacttggcaattggtagaagtgttgacgagacaaagagaactctccaggccttacagtatgtgcaggagaacccagatgaagtttgccctgctgggtggaagcctggggagaagtccatgaaaccagaccctaaacttagcaaagactactttgcagcggtgtagctaggatactagatagttaagagtggctatctgcatctgtatcagtcagtgtgaattgcaaaagggtcttgtttcttaatgttttgtaagtccttaaattttgagccgcagggtatgggaatatactaataaatgcatgctggattttgaagtgtactatgtattaatttgcaatttattttgattatgatctctgtttcgtgttcatatatgagcc

SEQ ID NO: 292 - DNA, 296 bp, Glycine max
  Clone ID: PAT_MRT3847_45016C.1
cttactcgtgggcggacgcgttggaaaaaaaaaaaaaaaaaaaaggggaaaaataaaaaaaaaaaaaaaaaaaaaaaaaaaaaaaaaaaaaaaaaaaaaaaaaaaaaaaaaaaaaaaaaaaaaaaaaaaagggggcggccgttttaaaaaatcaaaatttacttccccttgcttgcaacgtaatagctttttttttgtgccacctaatttaaattaattggccgtcttttaaaaacgtcttaactgtaaaaaccctggctttaccaaatttaattgccttgaaaaaaatccccttt

SEQ ID NO: 293 - DNA, 870 bp, Glycine max
  Clone ID: PAT_MRT3847_45510C.1
cggaataatctttgtgatccacgcgttttttcgctttgttatcaaagacttaaatcaacacgttggacgagtttttttctgtctgtagctgtcggaagtttgaaacatacatattcttcttaattttgggtcagtagtatgtggaagttgaagatagcagaaggaggagatgggttaatctctgtgaacaatttcattggacgtcaacactgggagtttgatcctaatgctggaactccacaagaacgtgctcaagttgaaagggtacgagaggaatacaaaaagaaccggttttgcattaagcaaagcggtgacctactcatgagaatgcagctcacaaaggagaacacgtgtgggcccattctagcaagagtgaacgtgaaagacacggaaaacgtaacggaggaagcattgatcactacaatgagaaaggctatcaatttctattcctctattcaagcccatgatggccactggccagcagaatctgctggccctttgtttttccttcaacctttggtaatggcactctatattacagggtccctaaatgatgttttaggaccagaacaccagaaggaaattattcgttatttgtataatcatcagaacgaagatggaggttggggattgcatatagagagtcacagcacaatgtttgggtcagcgttgagctacattgccttgagaattcttggagaagggcctgaagatggtgaagacagggcaatggctagaggcagaaaatggatcctcgaccacggtggtttggaagctattccatcctggggaaagttctgggtcacggtacttggagtttatgagtggtcaggctgcaacccacttccaccagagttattatttgggtat

SEQ ID NO: 294 - DNA, 123 bp, Glycine max
  Clone ID: PAT_MRT3847_45570C.1
gccagctgtgactgcctgtatcacccttgtacctccatcaatcatcagtgctattacagcagttacctttggcgcattgattggcacaatccatcagggcacaacaattacatgaacttgtgc

SEQ ID NO: 295 - DNA, 1869 bp, Glycine max
  Clone ID: PAT_MRT3847_45795C.1
gtacacccgcggtaccggtccggattcccggtcgaccacgcgtccgcattttcattttcttaagcgcccatttcccactcctcctttctctctctttcattattgagacttctttccagatttctcaatctatggctctgcattttcttctcctgctgctttttgcagtgtctgttgttgcagctgatgaagaaccatttataggagtgaatattggaacggatctctcagatatgccacaccctactcaagtagtagctctactaaaagcccagcaaattcggcatgttcgattatatgatgcagaccaagctatgctccttgcacttgcaaagacaggcattcaggttgctgtgactgtcccaaatgaagagatcctagcaattggtcaatcgaattccacggctgccaattgggtttcccgcaatgtggtagcgcattatccagccaccaatatcactgccatttgtgttggttctgaggttttaactaccctcccaaatgcagcaaaagtacttgtcagtgcgattaaatacatccattcagcccttgtggcatccaatcttgatcgccaagttaaagtttcaacacccctttcctcatccatcattcttgattcatttccaccttcacaggctttctttaatcgctcactcaatccagttttagtcccactacttgatttcttgcaatccactggctcttatctgatgctaaacatatacccttactatgactacatgcaatcaaatggagtgattccgttagattatgcactcttcaagtctctccctcctaacaaagaagctgttgattccaatacccttctccactacaccaatgtctttgatgccatggttgatgcagcatactttgccatggcctttctaaattacaccaacattcctgtagtggtgaccgagtcagggtggccctcaaaaggtggctccaacgaaccagatgcaacggtcgacaatgcgaatacttacaacagcaatttgatcaagcatgtgtttaacaaaaccggaactcccaagcatccaggaatagatgttagtacatacatctatgagctctacaacgaggatatgaagtctgggccattgtcagagaagaactggggactgtttgatgccaatgggacacctatttacattctacacttgacagagtcaggggcagtcttagcaaatgatactagcaataatactttctgcattgcaaaggacggtgctgacccgaagatgctgcaggctgcactagattgggcatgtggaccggggaaggtcgaatgctctccattgctgcagggtcaaccatgctatgaaccagacaatgtgattgcgcatgcaaattatgcatttgacacttactatcataagatgggaaagactcctgatgcatgtgacttcaatggagtggctacaatctccacctcagatccaagtcatggttcttgtttatttcccggaagtgttggcaaaaatggaaccttaggtaacttcacagctccttccatgaattctacaaattcagattcctcagcctacaaattcagctgtgacttgagaattagaagccttttaatggtaacaggatttctattatggggagtggttttgctataaagtggtatatgtcagaacgtgttactttgaaattttttgtggtggatgataatgctacatattcgtcttggtacgattctattgttcatagtggtccattcaattttgtacaaaaaccagctaagggtttggaccgaatgaggccgcaactgaattatcatcatcatcattattattcttttcaactagaattgattcaatctttatcaaaaattgaagtgattcaatctatatcaaccat

SEQ ID NO: 296 - DNA, 254 bp, Glycine max
  Clone ID: PAT_MRT3847_46662C.1
ggctgtaaaatgtagtcacgtctgtgggaattaggctagtcaataaagccttgatggctacatatggatttaattttgctacatgctttaactgcactacatcattccacaacaaccttgttgacacttactcttaaatcaatctcatatatccatacctctcatctaccattatctgatatcatcaaatttgtctcgtttgcatatttcttcattgttgttattaatgtgattttaatgttgaactcttacat

SEQ ID NO: 297 - DNA, 1828 bp, Glycine max
  unsure (1)..(1828): unsure at all n locations
  Clone ID: PAT_MRT3847_46694C.1
attggaaatgtaaaatgatttcattctaattttttaagaatcaaactcaagtaaatttacaagactctgacagcaagcatgatcttttctaaaatagtaaaatgactttagagtttagagtaggtcacattattaaattaaaaaataataagccatgagaaaaggaggcatcgcgctcgccgagatcgtcttcgaggtcctcactctttctcatttccacatatctgacagaaaaaaatggagaactatcagtacccggcgtcgtaccctgactccggcgagtcctccccgcgctcgcgcgagatcgacttcgagaacccgccgccgtgggacgagcagcagaaccaaaactacaaggccaagttcatgtgcagctacggcggcaagatccagccccgcacccacgacaatcagctctcctacgtcggcggcgacaccaagatcctcgccgtcgaccgctccgttaagttctccgccttcctctccaagctctccgccctctgcgactccccgccacaggacctcaccttcaagtaccagctccccggcgaagacctcgacgccctcatctccgtcaccaacgacgacgacctcgaacacatgatgcacgaatacgacagactctatcgccctaacctaaaacctgttagaatgagactcttccttttcacactctctaattcaaaccctaattcctctttctcctccgaacgcgaccgtttcgttgaggctcttaattcgggtccggttccttctcaacccgatccgatcaaaaccccacccgttacgccttctaatgttgattatctcttcggtctcgataaagccgttgctcctccaaatcttcctccgaacttcgcagcggttaaattccacgatccggtgccggaacctgtcgctccgacgccggtagagtatcaatcgagagtttccgatcgggttgttggatcggatccgaatgtgaattcgatggaaattcagagacagatgcagcaggagatgcagcgattgcagattgcggagaatgaatatcgtagaaggagtgaggatggatttgcaactggttatgctgctgcagccggaggagattattacatgcagaaggtgcaggagaaggttccgccgcagaatgcggcggtgccgcctccggcggcgtactggtcggagaagcagttttccggggagggatatcagacgacggtgacgacggcggctccgggaggaggtgaccagccgatgtatgttatggcggcgccggggacgttctatcaccactcgccggtgatgcgacctccggcggcggcgcagggatactacgctgtgcagaggatgggttctgatggctaccgtgaacagcaggcggtgtacggaggcgtggctgcgccgaaagcggcgttttcttcggcggggatggttaaggggccggcgtattcggagggatatagtggcggcgtggtgaggcctgcggggttgccggataatgcggcgtatgcgcaggtggcgtatgatagcgcgagtgggagacaggtttactatactgcgcagggagggatggtgcacgcgccgccgccgccgcagtaccagggggttccgcctcaggaattgaggccgggtggggtttcggtggggcaggatggtaaggtggttaacaaggttaaccaaggttctgtgtgattataatagctgtgattgagattgtcattatgttaattttgaaataaataatacactaaatatgttttgcttttttttttttttctcttcatggnttatatatatacactaaatattacgagtattgtttgctaataatttatgggtagtgctt

SEQ ID NO: 298 - DNA, 128 bp, Glycine max
  unsure (1)..(128): unsure at all n locations
  Clone ID: PAT_MRT3847_46867C.1
cgctactactagntccttcaactctcgctggcaacaacagcagtcctancattaagnngcgtttttccaaagtgcttttcnagcaattagcgatgggnatngcnagaggaggcttcnagggattcagg

SEQ ID NO: 299 - DNA, 1469 bp, Glycine max
  unsure (1)..(1469): unsure at all n locations
  Clone ID: PAT_MRT3847_47972C.1
ctgtctctgttatgtgggaagacgacagaaggggagaagaagagagagacagacagaacaatgggggaagcaaagggaaaggaagaagaagtgttagcctcagttcactcaaccgtgttcaaagaatcagaaagccttgatggaaagtgtgttaagattgagggctatgatttcaaccgcggcgtcaattatccgttgctactcagctccatggtcacaactgggtttcaagcttccaacctcggtgatgccatccaagtcgttaatcaaatgctagattggaggctagttgatgaacccgtagctgaggattgcagtgaccaagagagggatttggagtaccgaaaatctgtgacgtgtaaagtgtttctgggtttcacttctaatcttatttcttctggtgttagagatactgtgaggtttcttcttcagcatcgcatggttgatgtagttgttacaactacaggtggcattgaagaagatcttataaagtgcctggcaccaacatataaaggagatttctctttgcctggagcatatctgcgctcaaaagggttgaatcggattggtaatttattggtcccgaatgacaactattgcaaatttgaggactggattattcctatctttgatcagatgttgggggaacaaaataatgagaatgcgttgtggctgcgagaagacgacataagtggattgggaaaggaaataaaaaatgaaagctcttacctttactgggcatacaagaacaacattccagttttctgtccgggcttaactgatggctcattgggggacatgctgtacttccattccttccgcaatcctggtctgattgtggacatagtgcaagatataagggcaatgaacggtgaagcagtacatgcaagtcccaggaagaccggaatgataattttaggaggtggccttccaaaacatcacatttgcaatgccaatatgatgcgcaatggtgcagactatgctgtttttatcaatactgcacaagaatatgatgggagtgattctggagctcgtccagatgaagctgtttcatggggaaagatacgagactctgctcagactgttaaggtacactgtgatgcaacaatagcatttcctctgctggttgctgaaacgtttgcttcaagagtgaaacctccccattgatgaaggttaaagatgaatttactctgaagttcattttaattgtgtgtgtttgaggatcttgatggacaagttcggcattggtgttcaatttgactatcatttgattcctaagctcctcttagcagtggagacctttttgaccattcaaaggtaatccattaatcctgtcagtgaggaagtcaggaattatagatgtgaggatcattgtactaatatctttagggaaaataaggctaagaaaactaactgatcatatatggcatttttaatattttcccccananaaaaaaaaaaaaaaaaaa

SEQ ID NO: 300 - DNA, 422 bp, Glycine max
  Clone ID: PAT_MRT3847_48100C.1
gtgctgcacatgtgaggctgttgagatggttagaacccttgcgatgatcaagcccgatgggttgtcaggtaagtacacagaagcaatcaaggaggtcatcttggattctggatttcatatcgtcaaagaaaccgaggtccagcttgatgctgagagggcatctgtcttctatgcggagcattcccagagaagcttctttgacagcctagtcaagtacataacaagtggtccagttcttgctatggttctggaaagacctgacgccgttgcgcaatggcgcactgtgattggaccaactgatgcaaaaaaggccaacacctctcatccaaacagcattagagcaatgtgtgggctggactctgagaaaaattgcgtgcatggttcggattcaccagaatctgcagacagagagatctcatttt

SEQ ID NO: 301 - DNA, 112 bp, Glycine max
  Clone ID: PAT_MRT3847_4964C.1
accaggagaccagtttcgtgaccattggccaacgaattttggcaaatcctttaagggttcggtttcattatggccatcctgatatatttgacagactcttccacacaacata

SEQ ID NO: 302 - DNA, 195 bp, Glycine max
  Clone ID: PAT_MRT3847_504C.1
cgagaatgtactacctcaaggcagatttcattcaaagaacccaaatggcttctaataagattcctacatgggtagggggaaccaaacttattattttggaacctggatttggtccttaacaactagacctatttggtataaaaaaaacatattttatttctaaataaaaggtaaaacagaggggaaaaatggaaa

SEQ ID NO: 303 - DNA, 2190 bp, Glycine max
  Clone ID: PAT_MRT3847_50784C.1
accgatgaaaacgacaacatgcgactttgtttttttaacgatgaaaacgaagtgtattgagtaatactccgttccctggttcctccatcgcgaaattagggttcgctcacttgtcttcaatttcccagattcacctagcaccatccataaatccccctattaacgtgtctttcggaccgatttttctacgtgacgcatcgcaattcttcagcggtttcgtttagggaacccgcgaaaccgaatcagatagtgcggcacggaaactaggaattaaagcaatggcagaagatctggtgctggatactgcaatcagagactgggtgttgatccctctctctgtggttatggttctcattggtgtgctccgttactttgtttctaagcttatgcactcttcacaaacccctgatgccaaaattgttaaagaagggcaagtgattgttagagctcggaatttacgtgctggggcgaatttcattccatccaaggcatttcgcgctcgcaaaatttatttctggaacgaggaaaatggtctgttgttcctgaaacagggagaaggcctgatcccgcaagcacagatgttcatggatatgatgaagaaaaaccatacgatgataatacaccattctcttacttttgcttgggtgaactttttcttttctggatttgtagcagccaagataccctttccattgacacagaggtttaggtcaatgctacagaacggaatagaccttagcacagtagatgttagctatgtcagcagtcgctcttggtacttcctcaatctgtttggattaagaggattgtttagtctcatcttgggtgaagaaaatgctgtagatgatacacaacgtatgatgcaaatgggtggatttggatttgatccttcaaagggtctaagtgctgagaaagacaatcttgacataacccagcatgactgggccttaccgaattttgagcagcgtgctgaagctgtgttgaggaaagttgccagttaaccatgttatggagtaggaagcttcattgctagcattagcaggatacacttactttctattgttgcggtaggaggtgtacctttttgcagaaaagatatcaaagatcttgttgagactgtagtcttgagactgaacattttgcaactatcagaaaacattgttcggttttgttgaagctagaactgaaactattcattcttgcttatttttctgaatgaccattgccataaaaagcatgaaggcttcccaggaaacgttgagtcctgtaatgtgtttcaaggcctattcaactattctatctgtatcccacatcccactcctagaattgtcccctaatatgttaaattaagaaatattacattcgcatctcttattctgcttttgttgcagaattagaatgcaggtgaggtgcacttgattataatcagatgctaaaaaattgtgatgtgatgtaatgcatgctcaaattaccaaaagccgaaagaatgttttaaaatttgaattgagtgattaacaattacaaatatgagtggtttactctagatttttcataattttgaatatcaatcattgaaaattattgtatgattcacttgttgactctcctccccccaacccccgggcaataccagaaggaggtacaaatgatcttttatttcaatgaggtgctatgatgtaaatgatctttcaccaaggatgacagtcaggtgaaattggacacttctagtagaaataaacaaaatgtagaggcattctatccagtgtacaagaaaaggaaatagacgcagatttcaaacaccccgcaatccatttgatccatttggaactgaatcctgttctttccagcaaatataacagaaaattccaagacacagagtcataagccttctcgtagtctactttgaactcaaggcaaggttgactgcttcttttggcctcttcaatcaccttatttgcaatgaggacactatgtagtagatgtcttccttcaataaaagcagattgtgtctcatctacaataaaggacatcaccttcttcattcttttagccagcaccttagagacaatcttgtacatacaacctattaatgagatgggtctatagtcattcaagaattgagggtcagccaccttggggattaaagctatgaaggatgcattgcagccccttgggaacactccattagca

SEQ ID NO: 304 - DNA, 724 bp, Glycine max
  Clone ID: PAT_MRT3847_50935C.1
tcgggaatcgatcgaatatgtcgggaaaaggggcaaagggattgataacaggtaaaacctcagcttcagccaaagacaaagacaaagacaagaagaaacccgtttctcgttcttctagagctggtcttcagtttcctgttggacgaattcaccgtcttttgaagtcaagggtgagtgccaatggaagagttggggccacagctgctgtgtattctgctgctatactggagtatctaactgcagaggtgttggagttggctggtaatgcaagcaaggatctgaaggtgaagcgtattacccctagacatttacagcttgctatacgtggagatgaagaacttgacaccctcattaaaggaacaattgccggtggtggtgttattcctcatatccacaagtctctaatcaacaaatcctcaaaggagtgagggttaaaagaaaaatatttgaattaaccttggagatgagttttcctgtaaatttgatggtatcttattttgtggatattttgcttgttgtgttagtttggtagaagagacatcctgcagcagttctgatatctttatttgagctgtatggactgacatactggcttctgtgctctgttgctgcaagctagctacatgaaactagctgttaggatgtatattgaagcatggttaattattatgttcaacctattaatctatgatgtttcaatgttttgaactgtttggcgtgtgcg

SEQ ID NO: 305 - DNA, 765 bp, Glycine max
  Clone ID: PAT_MRT3847_51233C.1
ggctcgagctcgagccgaatcggctccccctggagccgatttccctgtctctgttctcttcaccattctctttcttctttgtttcaagtttcaacaacccagattcactctctctctcgtaattttctctcttattgaggctagaaaaagagagcaaaaaaactaaaaaatgcctgcggtcggaggtataaacaccggagggggcaaggagtaccctggaagcctcactctatttgtgacggtaacatgtatagttgcagccatgggtggtttaatcttcggttacgatatcggaatttcaggtggagtgacgtccatggatccgtttctgctcaagttttttccgtcagtgttccggaagaaaaactccgacaaaacggtgaaccagtactgccaatacgacagccagacactgacgatgttcacgtcgtccttgtacctcgccgctttgctgtcgtcgttggttgccgccaccgtcacgcgtaaattcggccggaaactctccatgcttttcggaggcttgcttttcctcgtcggtgccctcatcaacggtttcgcccaacacgtttggatgttaatcgtgggtcggatcttgctcgggttcggtatcggcttcgccaatcagtctgtgccactctacctatctgaaatggctccatacaaatatagaggagcattgaacattggctttcagttgtccatcactgttggtatccttgtggccaatgtgttgaactatttctttgctaaatcaaaggtggttgg

SEQ ID NO: 306 - DNA, 2086 bp, Glycine max
  Clone ID: PAT_MRT3847_51235C.1
gtttctttcactttcttcgaacctctttgcatatacttattttttcaactctgttctcttcaccattctctttcttctttgtttcaagtttcaacaacccagattcactctctctctcgtaattttcttctcttatttgaggctaagaaaaagagagcaaaaaaactaaaaaaatgcctgcggtcgtaggtttattgaatcttctcaccccagtttcactttctcattattttctctcctattgataaagaaacagagagagagagaaaaaaatgcctgcggtaggaggtattagcaacggagggggcaaggagtaccctggaagcctcactccttttgtgacggtaacatgtatagttgcagccatgggtgggttaatcttcggttacgatatcggaatttcaggtggggtgacatccatggatccgtttctgctcaagtttttcccgtcggtgttccggaagaagaattccgacaaaacggtgaaccagtactgtcaatacgacagccagacactgacgatgttcacgtcgtcgctgtatctcgccgcgttgctgtcgtcgttggttgcctccaccgtcacacgtaggttcggccgaaaactctccatgcttttcggaggcttgcttttcctcgtcggtgcccttatcaacggttttgcccaacacgtgtggatgctcatcgtgggtcggatcttgctcgggttcggtatcgggtttgccaatcagtctgtgccactctacctatctgaaatggctccatacaaatatagaggagcattgaacattggctttcaattgtcaatcacagttggtatcctcgtggccaatgtgttgaactacttctttgctaaaatccatggtggctggggatggagattgagtttgggaggtgctatggtccctgcccttataatcacaataggatcactagtccttccggacactcccaattccatgattgaaaggggtgatcgtgaaaaggccaaggctcagcttcggagagttcgcggcatcgacgatgtggaagaagagttcaatgaccttgttgcagctagtgaatcctccagaaaagtggagcacccgtggaggaacttgttgcaaagaaagtacagaccccacctcaccatggctgtgctgattccattcttccagcaactcactggaatcaatgtcatcatgttttacgcgccggtgttgttcagctccatcgggtttaaggatgattctgctctaatgtcagctgtgatcactggcgttgttaatgttgtggcaacttgcgtctcaatttatggtgttgacaagtggggtaggagagcccttttccttgaaggtggagttcaaatggtcatttgccaggctgtagttgcagctgctataggagcaaagtttggaattgatggaaaccctggtgatttgccaaaatggtatgcagttgttgtggttctcttcatttgcatttacgtatcagcatttgcctggtcatggggtcccctaggttggttggtgcctagtgagatctttcccttggagatccgttcggctgctcaaagtataaatgtgtcggtgaacatgtttttcactttcttgattgcacaagtcttcttgacaatgctttgccacatgaagttcggcttgttcatcttctttgcctttttcgtgttgatcatgacattcttcatctacttcttcttgcctgaaaccaagggcattcccattgaagaaatgaaccaggtttggaaggcacaccccttctggtccagattcgtggagaatgatgattatggcaatggtgttgagatggggaggggaactgctatcaaagaagtgtagttacttgtttatttttctcaatgactagcgttttagcttttgttggtaaatcatactattggtggtgtcaatgtattgaattgttcctataaattaaaaagggttattttcttatgtatcccctgcttcttcatatgaagcaagtttacaggatacttttctatattaatccaattgcacaaattgttatgcctttgaaaacaaaaagaaagatgtacactcatacctcatagccatccgatttcatatccttt

SEQ ID NO: 307 - DNA, 1832 bp, Glycine max
  Clone ID: PAT_MRT3847_5172C.1
gaacacaaccacctctcacctcaaatgacttcccattctctcttttgaaatcactacacaacaccaagaaatccaaatctaattcctcatctcgtttgatatcctgattcctactctcttagtttccactctattgtatggatgcatgtgatgaactgatgatatatgcatttgcttttatagtttgcttggccaccaagtaacgacaaagagaaacagtttctaactttttcttggctggttgtaaataatctctcttttctctattggatcatagctttctgcaccctcttcctcttaggttcccatatttttctctcttgtcgtggacctcaactttgtaggctcgccttagaaaaaaccttcttttctttttggtgggggtgagagttgctatcttattcctggtttcatcaacaagacactaacatctttgttgtttttagtttcagaattccttatactcacacaccaaaattctggtacaccatgatttttccaagattttgtacgaatctaaaaggtatggcttttatagattctcaagtttatcttgatcacacaggtaaaagattctgaaaatctgtgcaccttgtgaatcaaagctctataatttcttcctttccgtgtatctcttctgtgttttttgtgagcagccttttctagttcctctccatttccatctctttaggaacttaattcaactaagattttttgtgtgcttgtggcttgaggtatggaattggaaaccctctacaccccttgttatatgccaaactcaaattggtttgtgcaagagagcctcagcacagagtggactagagaagataacaagaagtttgaaagtgcccttgctatatatgacaaggacaccccagatagatggttcaaggtggccgctatgatccctgggaagactgtgtttgatgtgatcaagcaatatagggaactggaagaagatgtgagtgaaatcgaagcagggcatgttccgattcccggctaccttgcatcttctttcacctttgagctggttgacaaccacaactatgatggatgcagaagaaggcttgcacctgtcagaggctctgatcaagagagaaagaaaggagtcccatggactgaagaggaacacagacgttttctgatgggacttttgaagtatggtaaaggagattggagaaatatctctcgcaattttgtggtcacaaagactccaacccaagttgctagccatgcacaaaagtactacataaggcaaaaggtttctggaggcaaagataaaaggagacctagcatccatgatataaccactgttaatcttacagaaacttctgcatcagacaagaacaagcctcctgtgattgcaccacagcagaagctgaatagcatgtcaaaagtacagctggactggactagtagccactacaatgatggatcactcatggttttcaacccaaatagtgatgacttgtttgtgtcatcttcatctgatgtcacttccatggccctgaaaatgcaagggcaagatctctatgaatgtgccttacgtgaggcttatgccaaggtaaaagttccaggtttcagcatggctcctagagacttcaataatgaagctgtttttggtattcatgcactgtaattccaaccctgatgatgttaaagaaaaaattatagatcattgttctgtaggattaatgtagatgacctgaagctagcaagctacttcgttcatcattagtgaacatcctaaaagaaaactagactaatgtttcaatccttaaaaactgaatttggaatggacttcttttaaagttttcctcttttatcttttt

SEQ ID NO: 308 - DNA, 1900 bp, Glycine max
  Clone ID: PAT_MRT3847_5173C.1
ctaactcttactttcccctctgttactttctcgagccgattcggctcgagctacacaacaccaagaaatccaaatctaattccttatctcgtttgatatcctgatttctactctctcagtttccactctattgtatatctgtatatgtatgtatgtgatgaactgatgatatttgcatttgcttttatagtttgcttggtcaccaagtaacgacaaagggaaacagtttctagctttttcttggctgattgtaaataatctctctcttttctatattggatcatagctttctgcaccctcttcctcttaggttctcctatttttctctcttgtcgtggacctcaactttgtaggctcaccttagaaacaaaacttcttttctttttggcgggggtgagagttgctatcttattcctggtttcatctacaagacactaacatctttgttgtttttagtttcagaattcgttatactcacccacacaccaaaattctggtacaccatgatttttccaaggttttgtacgaatctaaaaggtatggcttttatagattctcaactttatcttgatcacacaggtaaaagattctgaaatctgtgcaccttgtgaatcaaagctctataatttcttcctttctgtgtttctgtgagcacccttttctagttcctctccatttccatctctttaggaacttaattcaactaagtttttgtatgcttgtggcttgagatatggaattggaaaccatctaccctccttgttttatgccaaattcaaattggtttgtgcaagagagccacagcacagagtggactagagaagataacaagaagtttgaaagtgcccttgctatatatgacaacgacaccccagatagatggttcaaggtggcagctatgatccctgggaagactgtgtttgatgtgatcaagcagtatagggaactggaagaagatgtgagtgaaatcgaagccgggcgtgttccaattcctggctatcttgcctcttctttcacctttgagctggttgacaaccacaactatgatggatgcagaagaaggcttgcacctgtcagaggctctgatcaagagagaaagaaaggagtcccatggactgaagatgaacacagacgttttctgatgggacttttaaagtatggtaaaggagactggagaaatatctctcgcaattttgtggtcactaagactccgacacaagttgctagccatgcacaaaagtactacataaggcaaaaggtttctggagggaaagataaaaggagaccaagcattcatgatataaccactgttaatcttacagaaacttctgcatcagataagaacaagcctcagttatttaatgcgtctcctgtgcttgcaccacagcagaagctgaatagcatatcaaaggtacagctgggctggactagtagccactacaatgatggatcattcatggttttcaacccaaatagtgatgccttgtttgtgtcatcttcacctgatgtcacttctatggccctgaaaatgcaagggcaagatctctatgactgtgctttacatgaggcttatgccaaggtaaaagttccaggtttcagcatggctcctagagacttcaataatgaagctgtttttggtattcatgcactgtaatgccaaccctgatgatgttaaacaaagaaaattccacgtcatagatcattgttctgtaggattaatgtagatgaccataagctagctagctactttgttcatggttagtgaacaacctaaaagaaaactagaataatgtttcaatccttaaaaactgaatttggaatgaacttattttaaagttttcctctttatgtctatttctttggtgacccgatcagatcgagtatggaaaaccattcaggc

SEQ ID NO: 309 - DNA, 147 bp, Glycine max
  Clone ID: PAT_MRT3847_51785C.1
ggctcgagtaaattcctcgtggaatattggaggagccatgtctacaggtgggcaagtcgtcaagtgcaaagctgcggtggcatgggaagcagggaagccactgtcaataggaaccatagaagtggcaccaccccagaaaagtggagt

SEQ ID NO: 310 - DNA, 888 bp, Glycine max
  Clone ID: PAT_MRT3847_51981C.1
tccggatacccgggtcgaagagcggactattccctcctccttcctttgcctctttcgcttttgctttctaggttttttttttttttttcttgctctttctctgtgtcgatggcgggaaaaggagggaaggggcttgtggccggaaaaaccacggcagcgaacaaggacaaagacaaggataagaaaaggcctgtctctcgttcatcccgtgctgggatccagtttcctgtgggtcgtatccataggcagttgaagcaaagggtgcaagcaaatggacgtgtgggggcgactgctgctgtgtacttggcctccattctggaatatctgactgctgaggtgctggagctggcggggaatgctagcaaagatctgaaggtgaagaggatcacaccaaggcacttgcaactcgctatcaggggagacgaagagcttgacaccctcatcaaagggaccattgctggtggtggtgttatccctcacattcacaagtccttgatcaacaaagctgccaaagaatgaaaatcaaatgcctctttgcttctcctattatgtgtttctttatgtttatgtagtgttagtaagtgtagtaggcctttgctactgtttaagaacagatgttgatgttattgtgtaaatggtcattctattggcttttaacttgcctgttgtgatactcctggaattgtaacgctgttggattttaagagttctttgtattagctttggtgcttgatttagttgttttttctggccatttatctcactgatattggcttgttttattttaattgacctttgctaaatgatccctcccagtgatttagtgaactgggaatatcaaaaaaaaaaaaaaaaaaaaaaaaaaaaaaacggccgctctagaggatt

SEQ ID NO: 311 - DNA, 286 bp, Glycine max
  Clone ID: PAT_MRT3847_51C.1
aaaaaaaaaaaaaaaaaaaataaaaaaaaaaaaaaaaaaaaaaaaaaaaaaaataaaaaaaaaaaaaaaaaaaaaaaaaaaaaaaaaaaaaaaaaaaggggcggcccttttaaaggatccaattttacttccccttgcttgcaacgaaataccttttttttagggccccctaaattaaattcacgggccggggtttaacaacgtggggactggaaaaaccctggcttacccaaacttaatcgctttgaagcaaatccccttttccccagtttgcttaataccaaaa

SEQ ID NO: 312 - DNA, 199 bp, Glycine max
  unsure (1)..(199): unsure at all n locations
  Clone ID: PAT_MRT3847_52241C.1
cgagactacctccggtccgggcagcgagtaaaccgcccggccggcgcgcgtcgttggatatatgatgagtggacgtgacagagtgtcncattatatcttaattgcgtcattttcctccttccttctaataagacttctctctcaccctcggccccaccttcacgtgtgattggaggtgtttgtcgcttttgtaataatt

SEQ ID NO: 313 - DNA, 981 bp, Glycine max
  Clone ID: PAT_MRT3847_52622C.1
gggattgaccatgcaagcttcttgcttgcacttcaaatggccgctgaagctggaatccatattttaggttgggttacaacagcttgggtgcatttgcaaccattaaccatctccactttcaggcatattacttggctctgccttttccaattgagaaggcccctactaagaaaattgccaagttaagcggtggagtgaaaatatctaaactgttaaactatcctgtcagaggccttgtctttgagggcggtcattctctagagggtttagcaaatgttgtttcagaagcctgcatctgccttcagcacaacaacataccttacaatatacttatttcagactgtggaaggcaaatctttctcttaccacagtgctatgcagagaaacaagcccttggagaagtgagtgccgagcttctggagacacaagtgaatcctgctgtgtgggaaatcagtggtcacttggtgctgaagaggaagaaggactatgaggaggcatctgaagccaatgcttgcaggcttcttgctgaggtctccctctctgaagagaggttccaagaagtcactgctcttgtttttcaagccattgcatcggttgagatgaatgtcaagcctcaattacttgaggaagttgatgctgttagcccaagcactcagcgtgccatggtggctggttcacatgaatgccttgttctccagtaacaaggctatgatgaacaaattcgtagtgattatggatatatattgtgttatgttacgtttcagttctaatacctgtagtacctgggttcagttactggagtttgaagtatttattatatgcatgttttaaggacttaaaaaattatgtggttgattgtccgtcgtgatctatgtggaaatacaatttaataactgttcttttgagccttattcagtgtttagtgtttgtggttgattaatgtgacatactcatcactctatctcttaattctcttcaacc

SEQ ID NO: 314 - DNA, 2271 bp, Glycine max
  Clone ID: PAT_MRT3847_52624C.1
tccacgcgtccgcacaactccccctaaatctctcatcatctcttatctttctctctctctcttataatacaagaccctagtcctctctcacgccccaaccaccaccatcaaccaaaccttcctctctcaatttcccttcaattcccttctgggctttgcaattcggccaattgggtccccaaatctgtaaccttttcctctgtctaacgcgaaacggaagagaaacacccacatagagaaagagaaaaaaaaaggagaggaagaaacaattttagggtgtggggttaaaacccggggttgaagcattgcagacatcacggctattcaaggagttcgccactctctttctcatgcccgttgtgtccgacgcaagggttgtgtgacggagagcaatccttcgccgcacggcgggcgtggcgctctgccttccgaaggtggcagcccctccgacctcctcttcctcgctggcggtggttcttcccattaacattctaaagtagtattagccattaacattacatcctacaccttcaaaagttctctctattagcggtttctggtttcttttgttcttcttctttggtagttgttaggtttggtgaggtctaagatgttgagcattaagagggttcccactgtggtttcaaattatcaaaaagaagagacaggggaggctgctgccggaggttgtggtcgtaactgcctcaaaagttgttgcattcaaggtgcgagactgcctttgtatgctttcaagaaggtggacaaggtttgtggaaatgaattgcctttgcttggatgcaaggagcagcaccctgtggcctttctggactcgcttgttcttggagagtgggaagatcgcatgcagagagggcttttccgctatgacgttacagcctgtgaaaccaaggtgattcctggggagtatggtttcattgctcagctgaatgagggtcgccacctcaagaagagaccaactgagtttcgtgttgataaggtcctccagccctttgatgaaaacaagtttaacttcactaaagttgggcaagaagaggtcctgtttcagcttgaggctagcaatgatggggaggctcaattctttccaaatgcacctattgatgttgagaattctcctagttttgttgccatcaatgtgagtcctattgaatatgggcatgtgctgctgattccacggatttttaagtgtttacctcaaaggattgaccatgcaagcttcttgcttgcacttcaaatggcagttgaagcaaggaatccatattttaggttgggttacaacagcttgggtgcatttgcaaccattaaccatctccactttcaggcatattacttggctcttccttttccaattgagaaggcccctactaagaaaattgccaagttaagcggtggtgtgataatatctaaactgttaaactatccagtcagaggccttgtctttgagggcggtcatacactagaggatttagcaaatgctgtttcagaagcctgcatctgccttcagcacaacaacataccttacaatgtacttatttcagattgtggaaggcaaatatttctcttaccacagtgctatgcagagaaacaagcccttggagaagtgagtcctgagcttctggagacccaagtgaatcctgctgtgtgggaaattagtgggcacatggtgctgaagaggaagaaggactatgaggaggcatctgaagccaatgcttggaggcttcttgctgaggtttccctctctgaagagaggcttctagaagtcactgctcttgtttttcaagccattacatcatcggttgagatgaatgtcaagcctcaacgtcttgaggaagttgatgccgttagcccaaacgcacagcatgccatggtggctggttcacatgaatgccttgttctccagtaacaaggctatgaacaaattcgtagtgattatgaactaaatattgcttgccatgttacgtttcagttctaataagtgtagtaccttatattatggtccagttactggagtctgaagtatttatgttttaaggacttgaataattgtggtttgtattttattatatggactcgctgtacggtgcttgattgtccttcgtggtctatgtaaaaatacaatgactgttcttctgagccttattcagtggttagtgtttctgtgtttgtggtttgattaatgtgacatactttcatatagtgaggcatgggaatgtgcaagtagcatttatataaatggtgcttgatctttttctattt

SEQ ID NO: 315 - DNA, 1694 bp, Glycine max
  Clone ID: PAT_MRT3847_52745C.1
acactacccactcaactcactccaaccatggcgtcgtggtggtgctcctctccctccgccaccctcaccgtctccaccaccaccacccgccacttctctctcctttctcacacttcccaatttcgcatccaaaccctcacattcccaccttcctcctttactcgcttcaccaccgctccaccttcgctccgatttagggttccatgctccaacaaaaccgccttcgaaaccgagcttccggaggacggcgtggattgcgtgggaacaggccaagacgtggaatgcctcgttaacacggaagagaaacaatcggaaccatcatcatcgtcatcatcatcatcatcatcgtcatcgatgctgtgtctcgcggaagcgctgtgggaaggggcggtgttggtgtcgccgttcttcttctggggcacggccatggtggcgatgaaggaagtgcttcccaaatgcggtcctttcttcgtttccgcttttcgcctcattccggcggggtttcttctcgtcgcattcgccgcttccagaggaagaactctcccctctggcttcaacgcttggctttccatcaccctcttcgctctcgtcgatgccgcgtgctttcagggttttcttgcagaagggttgcaaaggacttcagctggtttgggcagcgttataattgattcgcagcctttgactgtggctgtacttgcggctttgttatttggtgagtcaatcggagttgttggagctgctgggcttgtacttggtgtcataggacttgtactgctcgagttacctgccctatcatttgatgaaagcaacttctcactatggggaagtggtgagtggtggatgctacttgcagctcagagtatggcaattggcacggtcatggtccggtgggtctccaagtactctgaccctgtcatggctactggatggcatatggttattggtggtctcccacttgtgctattcgcagttcttaacaatgaccccgcagtgagtttgagtctcaaagagtacagttcgactgatatattggcactcctctacacatccatttttggaagcgcagtcagctatggtgtgttcttttatagtgcaactaaaggtagcttgaccaagctcagttcacttacgtttttgaccccaatgtttgcttcaatttttgggtttctctatcttggtgagaccttctctcctgtacaactagttggggccttagtcactgtggctggaatatacatggttaacttcagaagcacatctgaatgaattgtcatttttgcctggttctttcaacctaatccaatggaaaacaactctgggaattagatgttttccatgaactcaaattgggaacgataaaagcaagtttggacatggagaggagaaattgcagtgatatacaacttggagcccttgtgctcatgctagtgtaaatacaattttgttttgttagttaatttaggcctcgagcctcttcctatgcaatatataccaaaaacttgaagttacctgggcagaacacaagccttatatcggaataaattgtttccgtaaaggtttttttgttgtgtaagatggcttaagtgttacattatgactgaacaaaatgtatatattatgactggtttatggcaagtttcgtgtatagtaatctgttatgaaagaaatatacatctcgggccaatgactataaa

SEQ ID NO: 316 - DNA, 177 bp, Glycine max
  Clone ID: PAT_MRT3847_53506C.1
agcagctgacaatcaaactcaggtaggtatcaaggtgctacaaggcgagcgggaaatggctgcagacaacaaaatgcttggagagtttgaccttgttggtattcctcctgctcccagaggtctgcctcagattgatgttacatttgacattgatgccaatgggattgttacttgtct

SEQ ID NO: 317 - DNA, 1158 bp, Glycine max
  Clone ID: PAT_MRT3847_5356C.1
caagaactttgtgaacagtgaatccctatttaagagtcatcgtcagcagcagcacccttggatgagcccccagccttcttgggaagaagaaggttgtgaatgttaggcataacaccgccgatcactaggtcacacttcatcaatggcgggtagaggcaaaaccctaggatccagcgccgctaagaaggccacctcaaggagcagcaaagccggcctccaattccccgtcggtcgtatcgccaggttcctcaaggccggaaagtacgccgagcgcgtcggcgccggagcccccgtctacctcgccgccgttctcgaatatctcgctgctgaggttttggaattggctggaaacgctgcgagagataacaagaagactcgaattgttccacgccacatccaattggcggtgaggaacgacgaagagttgagcaagcttctaggagatgttaccattgctaacggcggtgttatgcctaacattcacaaccttcttcttcccaagaaggctgggggctcatccaagggtgctgctgctgacgatgactcttaaatagggattcactgttcccacgcgtctgggctgctgctgcagacgatgactcttaaatttgggttttttttccgtgaaaagttatcgaatttattctctttggattctctctgtttttgtagtttttcagtttttgataattgtgttctgtagatgtagttaggttttcagtcactgatgtgaatagagaacgctctttttcttcaagaaagattgttggaaatttaaatcattttaattcgtaaaaaaaaaaaaaaaaaaaaaaaaaaaaaaaaaaaaaaaaaaaaaaaaaaaaaaaaaaaaaaaaaaaaaaaacaaaacacaaaaaaaaaaaaaaaaaaaaaaaaaaaaaaagaaaaaaaaaaaaaaattaaatagacaaaaaataaaggggggcccgttttaaaaaaaccaaattttacccccctggattgccatgaaatacctttttttttgggcccccaaaaaaaaaataatggggcccgttttaaactccctaacagggaaaaacccgggggtatcccaaataaatcccctttaaaaaaaacccctttttccccggtgggtaaaatacaaaaaagcccccccatatctccttttccaaaaat

SEQ ID NO: 318 - DNA, 1898 bp, Glycine max
  Clone ID: PAT_MRT3847_5357C.1
gcgtccgcttctcttaaatttctcagtctccggaactcgtttctaccttcacttcgcacatctcgaaccctctctttccggcaactaggttaaagttcatcaatggcaggtcgtggcaaaaccctaggatccagcgccgccaagaaggccacctcaaggagcagcaaagccggcctccaattccccgtcggccgtatcgcccgtttcctcaaggccggaaaatacgccaagcgcgtcggcgccggtgctcccgtttacctcgccgctgtcctcgaatatctcgcagccgaggttttggagttggctggaaacgctgcgagagacaataagaagactcgaattgtgccgcgccacattcaattggcggtgaggaacgacgaagaattgagcaagtttcttggtgacgtcaccatcgctaacggtggcgttatgcccaacattcacaatcttctccttcccagaaggcccgtggcttatctaaggcaggaaaaaggaaaaaaggagcgaatcaaaaaaaaagaaatacatattctcttctcaaatttctcagtctccggaactcgtttctaccttcacttcgcacatctcgaaccctctctttccggcaactaggttaaagttcatcaatggcaggtcgtggcaaaaccctaggatccagcgccgccaagaaggccacctcaaggagcagcaaagccggcctccaattccccgtcggccgtatcgcccgtttcctcaaggccggaaaatacgccgagcgcgtcggcgccggtgctcccgtttacctcgccgctgtcctcgaatatctcgcagccgaggttttggagttggctggaaacgctgcgagagacaataagaagactcgaattgtgccgcgccacattcaattggcggtgaggaacgacgaagaattgagcaagcttcttggtgacgtcaccatcgctaacggtggcgttatgcccaacattcacaatcttctccttcccaagaaggccggtggctcatccaagggcgctgctgctgacgatgactcttaaatagggattcgcttttcttgatttttttattatcaaatttagattatcttttggcctctctgttttgtagtttcttttttagttttgataattatgctctgtagttgtagttaggttttcattactgatgtgaatagagaatgctcttgttcttcaagaaagattgttgaaaatttgaatcattttaatttgtaatttttcagtctcgatctagcacttgattcctggttgtaatctataatattcgaattcaaactgttttaaatttgtttccctgacctcatccttccatcaaaatgatatctatcactatataatggagcaaacccttgactttcccaatatcctttaaaagcagtctgatcctcccaagcccattcatcccaatcaacaccatgatcaattttgttttgaccttttgctagtgctttggaagttggagaatattcatcttcaaaaccaaacatttgatcggtgtcatcaaaaacatcactaataccattcccataataatgcatactaggcaccaatctcttgtgatttaaacggcttcttaatccttcaacatctgcttcatataaaacaacacctttcccatcagcagcaccaacagacctttttacaagattacgacccacgccaccgcccgttaaccatacatctgcacgccgattcatggcatcatatatgcgatcgaggatagaggtgacgcatgtctcgacaaaattctagcacgcctagttgggcgcagcctacagaggtgatcataagctagagtggccaacagcataagataaaagtagccatacccatggacctcgtcatgagaccttacgtagaaatcatagtccacttcaacggaat

SEQ ID NO: 319 - DNA, 1609 bp, Glycine max
  Clone ID: PAT_MRT3847_5358C.1
cccacgcgtgctcccacgcgtccggctgcgagacgacagaaggggagatatacattctcttgtcacagttttctgtgtcaccggaactcgtttctttcaaaacacttcaaacatctcgaacgctctctttccggcaactaggttaaagttcatcaatggcaggtcgcggcaaaaccctaggatctagcgccgccaagaaggctacctcaaggagcagcaaagccggcctccaattccccgtcggccgtatcgcccgtttcctcaaggccggaaaatacgctgagcgtgtcggcgccggcgcccctgtctacctcgccgccgtactcgaatatctcgcggctgaggttttggaattggctggaaacgctgcgagagacaacaagaagactcgaattgtgccgcgccacattcaattggcggtgaggaacgacgaggagttgagcaagctactcggtgacgtcaccatcgctaacggtggcgtcatgcctaacattcacaatcttctccttcccaagaaggctggtggatcatccaaggctgctgctgcagacgatgactcttaaataggggttttttttccgtgaaaagttatcgaatttattctctttggattctctctgtttttgtagtttttcagtttttgataattgtgttctgtagatgtagttaggttttcagtcactgatgtgaatagagaacgctctttttcttcaagaaagattgttggaaatttaaatcattttaattcattgcatgccctgttaggtagttccttacgcgccggctcgggttctcaagttttcgtcgggagcaacagccagaggggaaatatataacttcttctaggtgtccggaaatcgttcctatcatcacttctcaaatctcgaaccctctcgttcgtgccgatcactaggtcacacttcatcaatggcgggtagaggcaaaaccctaggatccagcgccgctaagaaggccacctcaaggagcagcaaagccggcctccaattccccgtcggtcgtatcgccaggttcctcaaggccggaaagtacgccgagcgcgtcggcgccggagcccccgtctacctcgccgccgttctcgaatatctcgctgctgaggttttggaattggctggaaacgctgcgagagataacaagaagactcgaattgttccacgccacatccaattggcggtgaggaacgacgaagagttgagcaagcttctaggagatgttaccattgctaacggcggtgttatgcctaacattcacaaccttcttcttcccaagaaggctgggggctcatccaagggtgctgctgctgacgatgactcttaaatagggattcactgttcacaaagttcttgaatttagattctatgtttgctctcttttttttttcctttttatttgtagttatgataattgtgccctttgtagtagtagttaggttttcagtcagatgtgtttaaagaatgctcttacgcatcaagaaaggttgttcaaaatttaaattattttaatgtcacctttgagtcttgatctagcaaaaaaaaaaaaaaaaaaaacccctcaaattttaatttaactgtttgatttggtcttgttcttc

SEQ ID NO: 320 - DNA, 220 bp, Glycine max
  Clone ID: PAT_MRT3847_53649C.1
tcgcgaagagaacgtctacatggcgaagctcgccgagcatgccgagcgctacgaagagatggtggagttcatggaaaatgtctccgccgccgccgacaacgaggaacttaccgtggaggagatgaacctcctctcctgtgcctacaagaacgtgatctgagcgcgccgcgcctcgtggctcatcatctcctctatctagcagatcgaggagagccgcgcg

SEQ ID NO: 321 - DNA, 134 bp, Glycine max
  unsure (1)..(134): unsure at all n locations
  Clone ID: PAT_MRT3847_5387C.1
ggattattgtattaatgnatttnntgatttcnagnncgcgttgcgcttggnatttacaatgtttcagtggattgtctaatgtgttttntggatgagangaatgtggtttagtgatttataantctttattgttg

SEQ ID NO: 322 - DNA, 691 bp, Glycine max
  Clone ID: PAT_MRT3847_54011C.1
gattgaaagctgatagaagctagctcaaccgagaagaagcaagggataatcattattagtcttctttctcttttggttactattgattgctccaatcatcgatactatgtctctaaaaatagcagcagaaatttatccaaaatcaccatcagagacagtgaaggagcctttggtggtggtaaaggaatatgatgaagatagacacaaggtcgctgtagagagacttgagaggctttgtgaagttgggcagagtggaaagccttctcttgtcactgacctcatgggagaccccatatgccgtatccgtcactttcagttgcatgtcatgctggttgcagaatatggagaagaaggagaagttgttggggtgataagggggtgtgtgaaaacagttaccagagggaattcggtttatataaaactagcctatatcttggggctcagagtctcccctcggcacaggagatttggcattggcacaaaactagttgaacatttataagagtggtgcaagcaaaaagggtctaagtatgcatatatggcaactgattgtaccaatgaaccatccgtgaatttgttcacaagaaaatgtggttactcaaagttcaggactctaaccatactagtgcaacctgtgcatgctcactacaagccaattagctccaatgttgctgtgcttcgccttccgcca

SEQ ID NO: 323 - DNA, 265 bp, Glycine max
  Clone ID: PAT_MRT3847_54023C.1
ttgggacccaaacatggggcattttagtttaagcaagaaacagcaatagggggtcgaattttaatatacaccaatcaggggctgaattataaaaagaatttggaccgaaaacacttttgtttaagttggcctttaatctgcactgcaaaatcagttttgggggggcctgtgggggcttaacctagtaataatattcaaatgcattgcgggtaggcatgctggatgaagaaaaacaaaaactttggggaattgagttcataaaact

SEQ ID NO: 324 - DNA, 1825 bp, Glycine max
  Clone ID: PAT_MRT3847_54836C.1
ggtattgcgatattcatttgataaaatagtttattaacttcgtgataggaatacacacataaaaagtacacgagagtactttgtagatgtttaggcagtgctacttcatggcattattatcagcattgcagattacagtggctggatgctttatttatattggtagatattatttccagcagattatttaattactcatggcaccaaattgggaaatcaaccatcaactttcatgtctgtctctggaagccaggggaatggcagtgttggtttagttgcttccagaagaacctcaatgggaatctttggtgcagatggcttcaatggtgttatggcgtgattatacttttgagggtttgcacagtaatcctgatctgcatgcatctttagcacaaattttttgaatatattaaaatttgatttttgcagtagatcatctgatagacgaaggtatgttactccgaacatgcttagttttggagggccattgttgttgacaccttgcggtcttgcattcagtatgatttggttgtaagctgtggcatcataccttggaagtgcattttctccagcaactctgatgtcttctctccaacctccactcaatacctgctgaacaagctcctgtggtccacttttggcatctgagggttgctctgagtccctcatctcaagacatgtaaagttcaaaatggcatgatggcgagacagcatccttgcaatggggcggtatccgtctctatcattaaggttgtaatatccagcagtaagctctgcagcatgattttcaactttgtaccaccagtgaattccagatactttgattgctaatttgactttacagcccaggaaagctttgttggcttcatctagtatttgatcaccatgattcagcaatttgttagaataccaggtcaagaagaacttccctttctcagtgacatacgtgccatttgatttgaagaatccagtagattctgggacatcattgtacttgcctgcgtcatctggcagttcccattcaggatggccagcccttgctacagctgctttgaaatctgccttcaaatatttgtcatagcactgaaattcgccaataccaggaaattcccatccttggctttgtggataagaggggtatctgagctctcctgctgggccaagcccaacttcaatgtctataataagtccagattctaaaaaatctgacatgttttctctgaaactcttcatgtagtcactgtatatctcaatggctgttcttccatggaatataggctcgttgtccacaccaacagttagatattccttgttccgggttcctgagcggttggtgtagaagatatcatgatttgattctccaatgtcaagcacccactggggaattgggatgttaactatatctcctacgttccctccacattgatggaatgacataatagcttgcagtgtcaagccacattcttgaaccagctgaaacaaactcctgtaggctctccaatcatactgcttaggccccttcagttctatgatcccccaccacacatcaaccataaccccgtcaacacccgcagctcgaagctgcaagagctgttctttaaggccatctgggtcttcaaaaacattgtcaacattgacaactccgagtgggagcatcacataaactggaacataatttagtagcatgttactgtcggaagtggccatcttgctgtttgcgtggtgttttttaaaaacctaagagagctgcagagttctctgatatctagaatggtggtaaaggagatgctatgtagaacggtagaagttgatccccttctgtcgt

SEQ ID NO: 325 - DNA, 364 bp, Glycine max
  Clone ID: PAT_MRT3847_54862C.1
cgcacgcgtgggacctcgggttccattggcccagccatgtccaaggcgcgtgtctacaccgttgtcaacgtactccgacccaaagagtactgggtttactagtgtctgaccgctcaatggggtgatcaagatgattatgaggttgtgcgcaaagagggaaggggaaagtacagagaggtttttgaaggcataaacgttcatagcaatgagcgctgtataatcaatattcttaagcctgtcaagagaaagactatttaaagagagatagaaatacttcagaacctttgtggtggtccaaatatcgtgaagctgcttgatattggcagagatcagcactgtaaaactcctagcttaatatccgagt

SEQ ID NO: 326 - DNA, 2086 bp, Glycine max
  Clone ID: PAT_MRT3847_55132C.1
cggctcgagcaacttctcgacgcagcgcaaaagctgcaactccgcttctcatattagaattcagacaaagcctcatccttcatagttcagatccattcttgctctgtattttgtttttcttttaaatttttctttaaatttctcaattgatcaaagatcttcagcaaaccggtcaagtttgtgtagtttggccagatgggaggtgggtttagagtgctacacttagttagaccttttctctcgttcctacctgaagttcagactgctgataggaaagtgccatttagagagaaggtcatatatactgtgatctctctgttcattttccttgtttgcagtcagcttcctctgtatggaatacactcaacaacaggtgctgatccattctattggatgcgtgttatccttgcttcaaaccgtggaactgttatggagctgggaatcacccctattgtgacatctgggctggtaatgcaacttttggctggatcgaagatcattgaagtggacaacaatgtacgggaggatcgtgcactcttaaatggtgcacagaagctacttggcatcttgatagctgttggtgaagcagttgcatatgttctttctggaatgtatggtagtgttggtcaacttggagtgggaaatgccatcctcatcatcctccagctctgttttgcaggtattattgtgatatgtttggatgagctccttcagaaagggtatggtttaggatctggaatttctctgttcattgccactaatatatgtgaaaacatcatatggaaagcatttagccccaccaccattaacagtggacgtggagctgaatttgagggtgctgtcattgctctattccatttgttgataactagaacagacaaggttcgtgcccttcgtgaagcattttaccggcaaaaccttcccaatgtgacaaatctgcttgctaccgttttgatcttcctaattgtgatatacttccaaggattccgtgtggttttgcctgtgagatcaaagaatgcccgtggacagcaggggtcgtatccaatcaagttattttatacctccaacatgcccattattcttcagtctgcccttgtttccaatctctacttcatttctcagcttctacacagaaagtacagtggaaacttctttgtagatctattgggcaaatggaaggagtctgaatatggaggtggtcagtctgttcctgttggtggtattgcatactacatcactgcaccttccagcttagctgatatggcagccaatcctttccatgcgttattctaccttgtgtttatgttgtcagcctgtgccttgttctctaaaacttggattgaagtctctggttcatctgctagagatgttgcaaagcagctcaaggaacaacaaatggtaatgcctggacatcgggagtcaaacttgcagaaagaactgaaccgatacattcccactgccgcagcatttggaggcatatgtattggtgccctgactgtgttggcagatttcatgggggcaattggctcagggacaggaatattgcttgcagtaacaatcatctatcagtacttcgagacatttgagaaggagagagctagcgagcttggcttctttggtttctaagctctgcttagcacattcactgttggtgacgcaattcggctctaccgcacccacagttttgttgtgtaatgaggactggttggtaggttgtttaacacacagtaagggagaacttagattagttttttttattacttttctcaaccgaggaagccctagtataatatcactgtaaacgttatggagtttctctgaatacacttgcgttaatttaagttgtcatagtctgatatcatgggctaaaagtgggatgatcttaattgatagcttagctctagaaattaccttctatttgatagtattagttttgtggacgtgcgttgcagtagtttttaacatgaatctttcaattgaaaggctgggctcgtataggctagagctgatgttaacgtgcaaagtctaatgttaggtttgtttcaagatatagcaaagaattcttctcaaaaaaagtgaacatttt

SEQ ID NO: 327 - DNA, 1879 bp, Glycine max
  Clone ID: PAT_MRT3847_5638C.1
gtttactcagaatagagattatattctatttctctctccttaattcccttcgtttctctctcttcgccattcattttcctccaacttgttggtctctctgtctctctctctctctaggatcccttccttaccattctttacttctccccttttacttgaccccttcaagttgaagtgatcatttagttatcctctaaagcagtattttgctggtgattttcatctgcaatggagttctgaatctatgatgatgagatttctcatttgaacccccagagatggacaagaaagagcatattgcaatttttactactgctagccttccatggttgacaggaaccgctgtgaaccctttgtttcgtgccgcgtatctcgccaaaagtggggaaagagatgtcactttggtgatcccttggttatctctgaaagatcaaagactagtatatcccaacaacattacatttgcttcaccctcagagcatgagaagtatatctgccagtggctagaggagagagttggatttacatctggtttcagcatacagttttatccaggaaagttttctagagataaaaggagcattcttgctgttggggatatttcagagattatccctgacaaagttgcagatattgctgttctagaggagcctgagcacttgacatggtatcaccatgggaaaagatggaagactaaattcagactagttatagggataattcatacgaattatttggagtatgtgaagagagagaagaatggagtcatgcaagcatttttgctgaaatatttaaacaactgggttgttagtatatattgtcacaaggtaattagattatctgccgccacccaggattacactggctccatcatctgtaatgttcatggagttaatccgaaattccttgagattggcaatacggctgcgagaagacgacagaagggagaacatgcctttaccaaaggtgcctactttattgggaagatgatatggagcaaaggctacaaggaactgctccaacttcttaaagatcatgaaaaggaattatctgctcttgaggttgatttatttggcagtggagaggactcagatgaagttcaaaaagctgcagaaaagttggaactagcagttagagtccacccagctcgtgatcatgctgatgctctatttcatgattacaaattgtttcttaatccaagcacaacagatgtggtctgcacaacaacagcagaagctttagcaatgggcaaaattgttgtttgtgccaaccatccctcaaatgactttttcaagcagttcccaaattgttggacgtacgacgacgatgacggatttgttaaactcacactcaaggcactggctgaacaacctgcccagcctactgatgctcagagacatgacctatcttgggaggccgccacaaaacggtttcttaaggcagctgacttagacaagccgttagagagaaaattgtcaagaacaacttcaaactttctggctgcctccttaaatttgcaagagaaagtagatgaagcatcagcatatgtgcatcatgtagcttctgggtttgaagtatcaagaagaatctttggtgccattccagatagcttgcagccagatgaagagctacgcaaggagcttgggttgactgatgcttccacgaaataaagttaaagaaaaatgatgttggaatgctgtgatgttaattaaaatttgtagagattctatcttctatacatatataactaattagttacccttgcatttgaacggttgtgcttgtctttacccatgtttaccttttattgttgctaaaatcaacatgtacatcatagtgattaaaacaattcattaactactaaaaaaaaaaaaaaaaa

SEQ ID NO: 328 - DNA, 398 bp, Glycine max
  Clone ID: PAT_MRT3847_56602C.1
acaaaaccggttccatggactgatagtaggcatattaagggtctcagaaggcgaaagcagcaactcatgtatcgaaggcaaaacctggagagtacatacattacgcctcacagaaggcgaaggaaacgaaggacaagacaatggaagacgctggagagtacactgattaagcgtctcagaaggctaacgaaacgaaggacaatacaatggtcaacgctagtgaatatacagattatgcttcgcactcacgcgaacagaagccaaggacatgacaatggggaagggacgggaatataaagactatactgcatcaaaggctaactaaggaaaagatgcaactgcgaataagatgggagagtctaaagattatacggcggataaagcttaatgggggaaag

SEQ ID NO: 329 - DNA, 2862 bp, Glycine max
  Clone ID: PAT_MRT3847_5686C.1
gacggtagctattaacattacaacacctttttattatttcacctctctctctctctctctcattgccatagatctgaaacacagatcacagggtccgcgctttttgacccttctctccattggtcattcccccgaatacgccgcacctataatctagcaccgaccggaccctccatacccgttttcgcgcggatctaggagctcaggtaatccccgaggaattttcaattgttatcggttgaatttcaacggttttcttctttttgaaatttagttgattaattcagctagggtttagtgtgtgagtgaataaggttgttgttggggggtttgcgatggctccgaccatcatcgacacactgtcttgactaaggctcgcgatcacagaaaaccgtaggtctcgtcttgaccttgcgctttgtgaattgcgcgtgagactgaggttgggtttggaaggcaagaactcatttcagccagcaacaggaaggttgtggtacgtaaatagtcataacctaacccttgcatttgcaagagaggtatcgttagcgagtgccagccacatgcgtggtgcgtgtcagactgaggttgggtttggaaggcaagggcttgtgttgtcacaatccaagagagaagtaatggcgaacatagacatcgaagggatcttgaagcagcagcagccttatgatgggcgcgttccgaagacgaagatagtgtgtactttgggccctgcttctcgatccgtagaaatgaccgagaagcttctgagggcagggatgaacgttgctcgtttcaatttctctcatggcacccacgactatcaccaggaaaccctcaacaatctcaagactgccatgcacaacactggcatactctgtgccgtcatgcttgacactaagggacctgagattcggactggttttctgaaagatggaaaacctattcaacttaaagaagggcaagaagtcaccataactactgattatgacattaagggggatccggagatgatatccatgagttacaagaagctgcctgtccacttgaagcctggaaataccatactgtgctctgacgggacgattactctcactgtcttgtcttgtgaccctgatgctggtactgttagatgtcgttgtgaaaacactgcaacgttgggtgagagaaaaaatgttaaccttcctggtgttgtggtggatctacccacacttactgagaaggataaggaagacattcttggatggggtgtacccaacaagattgacatgattgctctttcatttgttcgtaaaggctcggatcttgttaatgtccgcaaggttctggggccacatgcaaagaatattcagttgatgtcaaaggttgagaatcaggagggagtcctgaattttgacgaaatcctgcgggagactgatgcattcatggtggcacgtggtgatcttggaatggagatcccagtagaaaagattttcctggcacagaagatgatgatatacaagtgtaatcttgttgggaagccagtggtgactgctacccaaatgcttgaatcaatgataaagtctcccaggccaacccgagctgaagcaactgatgtagctaatgcagttcttgatggaacagattgtgtgatgcttagtggtgaaagtgctgctggggcatacccagaacttgctgtgaaaatcatggctcgcatttgcattgaagcagaatcatcccttgactatggtgccatcttcaaagagatgataaggtctaccccattgcctatgagtccattggagagccttgcatcatctgctgtccgcacagcaaacaaggccaaagcaaaactcattgttgtgctgacacgtggcgggtctacagccaagttagttgccaagtataggccagcggttccaatattgtcggtggtggttccagtgttgagcacggactcatttgattggacctgcagtgatgagacgccagcaaggcacagcctgatatacaggggcttgattcctatactgggcgagggatctgcaaaggctaccgatgcagaatccacagaggtcattctcgaagctgctcttaagtccgcaacagaaagggccctttgtaagcctggtgatgcagttgttgccctgcatcgtattggagctgcctctgtcataaagatctgcatagtcaaataatgcatgctcaactcaacgtgccgccaactaatgcagggttatgttttgccttttatttctttctttctgctgtttatccgtatcataaaatggaggatttagttactagctgtagatcgagtgttttttggtatactctgtttatattgcggagtacttctaaatcagattatcatggaaataatactcttaccttttaaaaaaaaaaaaaaaaaaaaaaaaaaaaaaaaaaaaaaaaaaaaaaaaaaaaaaaaaaaaaaaaaaaaaaaaaaaaaaaaaaaaaaaaaaaaaaaaaaaaaaaaaaaaaaaaaaaaaaaaaaaaaaaaaaaaaaaaaagggggggccctttttaaaggtccaaattttactccccggggttggaaaggtaaaattttttttttggggccccaaaaataaattcccggggccgggttttaaaacggggggggggggaaaaccctggggttccccaaattaaatcgtttggaaaaaaacccccttttcccaaggggggaaaaaaaaaaaaagcccccaccgattcccctttccaaaaattggccaccccgaatgggaaaggggacccccccttttaggggcctttaaaccgggggggggggggggttccccaaaggggaccctttactttggcaaggccctaaagcccggttctttgggttttttcccttttttt

SEQ ID NO: 330 - DNA, 470 bp, Glycine max
  Clone ID: PAT_MRT3847_56902C.1
ttaaacataacagtctcttcattaaaatcctgaaggatgattagaatacagccgcatgttacaaattctacattttccacttcaaggttgcccatttgcttatatcccttcttgcccacttacacaagttttttgccttacatctctgctgaatatcacacaaccgaacaaataacttatggagtaggaaggtgatcttcctccctttcctacacacagatgcttcttttaacactttaacgagaaccaagagacaaaatgaacagggtatgatgagacatcttacgaatcatacgggttagtaatcaaaagcggttgggaatcctcgttctgaccttgaggttcacattgcatggcaacttcctgctgttggtcaactaacctgctcatacgtattagcacctgcccctcctttgttttgcctctgtctggccattatgagccaattctaacagtggacccgccacccc

SEQ ID NO: 331 - DNA, 1032 bp, Glycine max
  Clone ID: PAT_MRT3847_57413C.1
agcagcactccctgcagacgacagacgggggcgtaggcaaggggggggagagaaaagcgttcatcttgtcggtcgaagagaatctatttgggcgtaggcaaagagagagagagaaaagcgtgaatcatgtcggacgaagagcatcacttcgattctcaggcggatgcgggagcgtccaagacgtatcctcagcaggctggtaccattcgcaagaatggctacatcgtcatcaaatccaggccttgcaaggttgtagaggtctctacgtcaaagacaggcaagcatggacatgcaaagtgtcactttgttgcaattgatatttttaatgggaaaaagcttgaagatattgttccatcatcccacaactgtgatgttccacatgtgaatcgcactgactatcagcttattgatatctctgaagacggctttgtgagtctgttgactgataatggaaataccaaggatgatctgaagcttcctactgatgaggcattgcttgctcagattaaagatggattttctgaaggaaaagatcttgtggtttctgttatgtctgcaatgggagaagaacagatctgttcactgaaggacatcggtcccaaaaattaatatgatgctatggctgtagctatagctgatagcacgctttttcttcttatgttgctaacaggtagtatattctccgatacatgtgtgcaaaataaacttcataagatggaaatttgcctgtgcttgaaactcaaatgcttgggatagaagaaattgagctaagtttagcttttgtccattaattaaggaacacaacggtcttgggtggatgaaattctcataaacatctcatattatttgtttttgttgagtttaatatataaccctatttgttctctgcactgaataatactgtactgaatttctgaaacacgtggttaaccggatattgcccaaagatttgatatgatgaatttagccatcttaatttgggatcagatggtaaaattttacggctttaactataatatgaggtgttattat

SEQ ID NO: 332 - DNA, 1339 bp, Glycine max
  unsure (1)..(1339): unsure at all n locations
  Clone ID: PAT_MRT3847_57838C.1
cccacgcgtccgtacggctgcgagaagacgacagaaggagattgcgtcgttgtttgttgtttcccttcatctattttttcttcgcccccttttgtgtttctttttttggttgtttgttctttcttctcgttcgtcgctttgtgatctctctctgcaaccatgtccgccgagaaagagagagagacccaggtttacttggccaagcttgccgagcaggccgggagatacgaagaaatggttgagtgtatgaagaaagtagcaaaacttgatcttgatctaactgtggaagaaaggaacctcctctcagtgggatacaaaaatgtgattggtgcacgaagggcctcttggcgcatcatgtcctcaattgagcagaaggaagagtctaagggaaatgagcacaatgttaaactgatcaagagttactgccaaaaagttgaggaggaactctccaaaatttgtggggacattctgactattatagaccagcatttgattccttcttccgcatcagcagaagctagtgttttctactataagatgaaaggtgattattttcggtatcttgctgagttcaagactgaccaagaaaggaaagaggcagctgaacagtcactgaaaggatacgaggctgcttcagccactgcaaacacagatcttccatcaacacatccaatccgtcttggacttgcactcaatttctctgtcttttattatgagataatgaactctcctgaaagggcctgccatttggctaagcaagcttttgatgaggcaattgcggagttggacaccctgagtgaagagtcatacaaggacagcactttgatcatgcagctgttgagagacaacctgactctctggacctctgatttgcctgaggatggaggtgaggacagcataaaagctgaagaaaccaaaccttctgagcctgagcattgatgtgattcaatagtcagaaatctaaggtactctccaagagggcatttttcagcttttcttgcaatggatttggacccggacaatagggactgtggttggtggccatttcataattcttatgctctcttaatatctttaccaaagctagaagatctgcaccctttttttttccttcaaacttttttcttattaccttctctctgttttaagtaaaatggtcagttaagcaatgaacaatttacatttacccttataagcatcttcattccttcgttcattatgtttggatttattttgtccaatttacatttacccttataagcatctgctttccttcgggccgggtgcttggaggggttccgctttccccgtttgggtttcctaanaaaaaaaaaaaaaa

SEQ ID NO: 333 - DNA, 943 bp, Glycine max
  Clone ID: PAT_MRT3847_58025C.1
gagccattcgtgagcctagagttgttgtacagactaccagcgaagtagatatcctcgatgatggttatcggtggcggaaatatggacaaaaagttgtcaaaggaaatcccaacccaaggagttactacaagtgcacaaatgcagggtgcacagtaaggaagcatgtggagagagcatcacatgaccttaaatctgtgatcactacgtatgagggaaagcacaaccatgatgttccagctgctcgtgccagcagtcacgtcaatgctaatgcttccaatgcagttcctggccaagcttctcttcagacccatgttcacagacctgaaccatctgaagttcacaacggcattggaaggcttgagaggccttccctgggctcattcaacctacccgggaggcagcaactaggaccttcccatggcttctccttcggtatgaaccaatccatgctatcaaatctggtgatgtcagggttgggccatgcgcaagcaaagcttcctgtcatgcctgttcattcattcttggcagcgcatcaacaacaacagcaacatcaacaacaacaaaaccaacaacaacgtgcggcaaatgatttgggtttcatgttgccaaagggagagccaaatgtggaggctattcctgaacgtggtggccttaacctgtcaaatggctcatcagtgtaccaagaaattatgagccgcatgcctcttggacctcatatgtaaaattttattccctgattctttaaataaaaactaatgtttacatcttttatatatatatatatatatatatatatatatatatatatatatatatatatatatatatatataatgccaaggcatacataggtggacttttcattattagactcttttgtatttgacattcttcaacacatgtcaaaggtatatgtagtttatttttctcatttattgcattc

SEQ ID NO: 334 - DNA, 453 bp, Glycine max
  Clone ID: PAT_MRT3847_58098C.1
tggtcaccggggtggagcaatgcagacaaggcattgacagcattcgtaaacggtgctttgatcgaatactcgaagaatcgcaggaaggcagacagtgccacaacctcatttctctcaccacatttgcactttggtgaggtgagtgtgaagaaagttttccaccttgtccgcatcaagcaagtgttttgggccaatgaaggaaacaaggctggtgaagagagtgtgaacttgtttctcaagtctattggcctcagagagtattcgagatacattagtttcaaccacccttatagtcatgagaggccccttctagcccaccttaagtttttcccttgggtggtgaatgaaggatactttaaggcttggagacaaggcagaacagggtaccctttggtggatgctggaatgagagagttgtgggcaactggttggttgcatgatcggatacgcgtt

SEQ ID NO: 335 - DNA, 1212 bp, Glycine max
  Clone ID: PAT_MRT3847_58517C.1
ctcgggcagtggcagcataaccagaaaaaggttccagaaattctggtaaggaacgaagcaaagcaaacgcagcgtttcgtttcgtgtcgctgctggttatggatggaatgtacggagtgccggcggagtacgccgacaaggctctcatgacgccggagaatctgattttcccgccggactaccaccacgacttcctcgccgccggccggattccgctgttcggatccgacgagttcttctcctcctccgccggaattcaccggcagcaggaagatgacgtggcagccaccactgtcatgaaggccaaaatcgcctctcaccctcactaccctcgcctcctccaagcttacatcgagtgtcagaaggttggggcgcctccggaaatcgcgcgcttgttggaggaaatccggcgagaaaatgacccgtgcaagagcgacgccgtttcttcttccacgtgctttggagccgatcccgagcttgacgaattcatggaagcctactgcgacatgttggtgaagtataaatccgacttggctcgcccttttgatgaagcaaccactttcctcaacaagatcgaaatgcagctcagccatctctgcactggtgcttccgtttccaacgtttctgatgatgggggtgtgtcttcggacgaagatttgagtaccggagatggtgatgctcaagatggccaattaaagggtgaagatcgtgagctcaaggataggcttttacgaaagtttgggagtcacatcggtactttgaaactcgagttttcaaagaagaaaaagaagggtaagcttccaaaggaagcaagacaagcattgcttcaatggtggaatgttcactacaaatggccttaccctacggaagctgataagattgaactggctaagtcaacagggctggaccagaagcaaattaacaattggtttattaaccaaagaaaacgtcattggaaaccatcagagaatatgcagttttctatgatggaaaattttaacggacggatccttgctgatgaatgaatgaggtgcatgtacatgatattttcaaatgtatatcccgattaattattgcttgtattttcttttttttgtaaattctgaattaaaagcagattactgacagtaaaatgcttattactttcccatgaaggaaaagggaaatgatcataatactattcttgataaataaccactgacattgtgaatt

SEQ ID NO: 336 - DNA, 419 bp, Glycine max
  Clone ID: PAT_MRT3847_5870C.1
taagaatctagaaatgtactttcttatttctgggaagccacaaacatcagacaaaaaactttattattgaagagaactcataagagatctaaaagatggcaccaccaatgatgggttgttggtataatgctggggggtttgacaaagcaaggtgcgtgaatggcaacccttgttgcagttgtcagagggagacagcgttaggcgcaatgtgctggtataacggccacaattgtggatgtgtcaatattgtttagggctcacaccatctagctggctgaacggtagtatttagatgctgctgtaaataaacacgagagttcaccgctgttaattggttgaatggaaaaaattgctgggggtaggcagcaaatagctgaatgaatggtacctgttgttgttgcaaataagaagcacacctc

SEQ ID NO: 337 - DNA, 3250 bp, Glycine max
  Clone ID: PAT_MRT3847_58755C.1
cttatctcagcagaagccgattaggttcccatctcattgaagaaaagaagatgacaggggagaggttgacaatggagtagaatgtgaggaggaatctgctgaaagtgatctgcattctatagagttaaatatggacaacaacaacaagagttataagtggacctaccctcctgaaagcagatttgatacaagaagatatccaattgaggaagaagtgaaaggtagtaggaggtctacctctgggaaagcttcaaggaaaagcacatcactgcaaaggagtatatcagatggaatggaatggggagtccaagctgataagattcaaaattcaggagatgggatagattgggaaagcttttatgaactgctaaaattaaattgtgcataaattaaaatcagctttttgaataagttaaatgtgttaaatttctccaaaaagctgactttaacttgtatataagctaactttaactttatgggagaaacttgtgaatgtgtttactctttcttatttttttctttttatcttacaagtacttatcctaatagagtctaagcatagcaatagtacaaacttccgcttcaaaaacatggctctaacacttcgttcttcaacttcttttattaatcagaaggaaaccaaagtcctcaaaacttctgacaatgcccctgcaatagttagtttttcaaaattcaagccatcatcatcattgttccggctccgggcaaaaaattccatgcaagaagctcatcacactcgtgagaaatgggagaaggtgctggctccgtcggtcgcacatagccacaatgattcaaagagagtacctgtgtatgtgatgttgccattagacacagtaacaatgggaggaagcttgaacaagcccagagcgatgaatgcgagtttgatggccctgaagagtgcaggggttgaaggtgtaatggtggatgcttggtggggtttggtggagaaagaagggcctttgaagtacaactgggaaccctatgctgaacttgtgcagatgctgcaaatgcatggcttgaagcttcaagttgttatgtctttccatcagtgtgggggaaatgttggagacaattgcagcattcctctaccaccatgggtgttggaagaaatcagcaagaaccctgagctggtttacacagacagatcagggaggaggaatcctgagtacatctccttgggctgtgattcggttcctgttctaaatggaagaactcctctccaagtgtactctgactacatgagaagctttcgtgacaaattcagagattactttggcagtgttatcgtggaaatacaattgggaatgggtccttgtggagagctcagatatccatcttatccagaaaccaatggaacttggaggtttcccggaattggagaattccaatgttatgacaagtatatgaaagcatccttggcagcagcagccgaagacattggaaagaaagaatggggaggaggtggaccccatgactcaggccagtacaatcaatttcctgaggatactggatttttcaaaagggaaggaacatggaacactgaatatggacagttctttctggaatggtactccggtaaattgctggaacacggtgagaggatccttgtatctgccaaaggaatatttgaaacaactggggtgaaactatcagggaaagttgcaggaatccactggcattacagagcaagatctcacgcagctgaactaaccgctggctactacaacacacgaaataacgatggatatctgcctatagcaaggatgctcgcaaaacatggagttgtcttcaatttcacctgcatggaaatgaaggacagagagcagccagactttgcaaactgctcacctgaagggttagttcaccaggtgaagatggcaacaacaacagctagagcagagcttgcgggggaaaatgcattggagagatatgatgcagatgcatatgctcaagttttatcaacaagtaagtcagaatccggcagtggattggctgcattcacatatctaagaatgaacaagaggttgtttgaagctgacaactggcggcacctagtggatttcgtaagaagcatgtctgagggtggtcggagagagagacttccggcagctgattcccatgggagtgatctttatgttgggcacatcaaagcaacacaggaaaagcacacacaagaggctgctcttgtgtaattgcatatttttgcaagttcaggcatcttggtatatagttaaaagcatcataagatatttttttatagaaaaagggaagctacagaaaaaaaggagaaatgacataggatcatgatacagaacactggcatatgtcatgccaacacctgagatgatcgagaagatattattttatttcatgtaatgtataactccaactacaatggagaaaaaacagtttatctgctgacgttataaacccaataatacagatattggtctctattcaacaagggctctattatatatttagagagaaattattgtatgaaaagcaagctcaaggaaaaggttatgcagatgaaatgcaaggctataaatcagtgaaaggtctaagggatcagatactggctggttctaggcttgcatcttccagaggttatgccagtccaactagacaattttcccagccatggccatcacgagatcttgcaaataacttccaggaaagacctgctacagcacagggcaatggtctaaaatcaaggttaggggaagccaggggtgagggccagaatgtaaggaagtccaaaaggtgagttaatgctcataacttttgagacaatgctttgtttgtgaaggtccatacccgtttgcttctgctaccatgatggctggtaaaaatgcagggcagcgattatcatagatccgctagccactaggtgaaagctgaaagaagcttttctcctttcaagttttatcttgttgatagcccatggctgcttaagttgcagcaatcgctgcttaaattttcgtttgaccctatgtgtaggtatgatcgtgttcgtagagttcagaacatgtgttatataagtataacaagcgagtttttgttttctcctgtagcatatgctgaagcccgaaggtgatcaagaacattttgtattttcttctttcggtatctaaggatactaccactgtctcccacaagggtgttaaatctaaaaaaaaaaaaaaaaagtagttttttatagtaagggtagggtgggggggggaag

SEQ ID NO: 338 - DNA, 806 bp, Glycine max
  Clone ID: PAT_MRT3847_58757C.1
gttctttcttataaatacaagcataccatcttgaacaattcctacatatccttccttcatcttcaaaatatggctctaacacttcgttcttcaacttcttttattaatcagaaggaaaccaaagtccttaaaacttctgatgatatccctgcgacagttagtttttcaaaattcaagccattggtccgtctccgggcgaaaaattcaatgcaagaagcgcatcacactcgcgagaacagcttcaatgaagcaagtagaagcgagaaatgggagaaggtgcttgctccatcggttgcacataaccacaatgattcgaagagagtacctgtgtatgtgatgctgccactggacacggtaacaatggaaggaagattgaacaagcctagagcaatgaatgcgagtttgatggccctgaagagtgcaggagttgaaggtgtaatggtggatgcttggtggggtttggtggagaaagatgggcctttgaagtacaactgggagccatatgctgagcttgtacagatggtgcaaatgcatggtttgaagcttcaagttgttatgtctttccatcagtgtgggggcaatgttggagacaattgcagcattcctctaccaccatgggtgttggaagaaatcagcaagaaccctgagctggtttacacagacagatcagggaggaggaatcctgagtacatctccttgggctgtgattcagttcctgttctaagaggaaggactcctctccaagtgtactctgactacatgagaaagcttcgtgacagattcaaagatacttgggcagtgttatc

SEQ ID NO: 339 - DNA, 288 bp, Glycine max
  Clone ID: PAT_MRT3847_58C.1
ctccttgggaggatgctttacatggctccttcagatggaaaatggggcgaacacgagttggattacctcctgttcatggttcgtgacgtgaagctcaacccgaatcctgaacaggtggccgacgtcaagtacgtgaaccgcgatcagctgatggagctgctcaggaaagctgatgctggggaagatggcgttaagatgtccccttggttcaggctggtggtggacaacttcctcatgggctggtgggatcatgtcgagcaagggactctgcagggggcagcggacatg

SEQ ID NO: 340 - DNA, 257 bp, Glycine max
  Clone ID: PAT_MRT3847_59173C.1
cacagatgatgacgcctaacatgatgtcaccattgacgatgccgagcatcttgtcaccaatggtcttgccgagcatgatgtcgcaaatgatgatgacacaatgtcactgcgacgccgtctcgcagattatgctgcaacagcagttaccattcatgttcaacccaatggccatgacgattccacccatgttcttacagcaaccctttgttggtgctgcattctagatagaaatatttgtgttgtatcgaataatgagt

SEQ ID NO: 341 - DNA, 419 bp, Glycine max
  Clone ID: PAT_MRT3847_59634C.1
gaaattgggagtccgtccaccaaaaggagtgctcttatatggtccccctggaactgggaagacactaatggcccgtgcatgtgctgcacaaactaatgcaactttcctgaagcttgcaggtccccagcttgtccagatgttcattggtgatggagcaaaactagtccgcgatgcctttcagcttgcaagggaaaaatctccctgcattatatttatcgacgagattgatgctattgggaccaaaagatttgatagtgaagtaagtggggatagggaagtacagcgcacaatgcttgagttgcttaatcagcttgacggcttcagcagtgatgaccaaataaaggtgattgcagcaactaatcgtgcagacatcttggatcccgctctcatgcgatcaagtagattggatcgaaagattg

SEQ ID NO: 342 - DNA, 615 bp, Glycine max
  Clone ID: PAT_MRT3847_59716C.1
ctcttttttttttttttttttatttttttttttttttttttttttttttttttagataaaaatgccaatggcattactagcatttactcttataaaacttagaccttacccctacaccaaggaaaacacatgtcccacaatgctacactgttagcaaacaaaataatttaaagaaaactggattttgggggccactttacaaaataagactggaaatctttacttttataggctacactgagttggacccatcagctttggggggaaaaaaactgcctcctggagcaaatgcctttttgaaaattgacccaacctggattcctgttttagcactctcctgaaaacttccttggccaaaattgccataagcttttagtcctttcctattcttagccttttgggcccaaccaaaaatggtttggtgaaaacgctcattaaatattgcccttttatagggagctcccatctgcgtaacaaatgcataccggggcagggggctgggactacatagcacctgaataaataccccaataacaagccttggaacaaagtatagaacttgtcccattatacagggggcaaaaccatatgggaccttctatggctgaatgcttt

SEQ ID NO: 343 - DNA, 269 bp, Glycine max
  Clone ID: PAT_MRT3847_60017C.1
ctctctctctttctctttctctctcatccagatcttgcaaaaaaaaaaaaacacaatggcagcgagcgctccaactccacgcgaagatttcgtgtaaatggcgaatctggcggaaaggccgagcgctacgaggaaatggtggagttcatggaaaaggtctccgcctccgccgagagcgaggagctgaccgtggaggagcgaaacctcctctcggtcgcctacaagaacgtaatcggtgctcgcagggcttcctggcgcatcatctcctc

SEQ ID NO: 344 - DNA, 814 bp, Glycine max
  Clone ID: PAT_MRT3847_60180C.1
taccggctgcgagaagacgacagaagggggttttttttctctcttgatgcagtggtagaagctgaacccgtttcgctttcaatcgaagggaagaacaaacattcaattcatggcagctgcaaagcttcaagctttatggaatcacccagctgggcctaaaaccattcacttctgggcacctacctttaagtggggcatcagcattgccaacattgctgatttctcaaaaccacccgagaaactttcctatcctcagcaaatagcggtcacagctactggaattatctggtctcgttacagcactgtaatcaccccaaaaaattggaacctgtttagtgtaaacattgcaatggcagggacaggcttataccaactctcacgcaaattgcggcatgattattcctctgaggcggaggcggaggtggctgtcacaaaagaatgatattaaatattttaaaagtccaagttattgtgtagttggaggcagatgcccaggctgtaatttccgttatataattgtattcttacttggtagttcatttgtactttcccaagtctcaaactgttaaagcattctcacttgtgtgtttgattgtggcaaaataagggaatcaagataagcgggcaactgaatatatctggccccttatggggcgtctttgatatttcttaccatgattataaatcataggtcttgaagcaatcacacttggagggcatttggcaccaaaaaaaaaaaaaaaaaaaaaaaaaaaaaaaaaaaaaaaaaaaaaaaaaaaaaaaaaaaaaaaaaaaaaaaaaaaaaaaaaaaaaa

SEQ ID NO: 345 - DNA, 1896 bp, Glycine max
  unsure (1)..(1896): unsure at all n locations
  Clone ID: PAT_MRT3847_60398C.1
cgatgaattttgaagtgaaagctcgataaatgggttttggaggaaggaagagatccttgtgttgtgggttgaggtgagaagggaagggatgtggagttcaacttcaagcacagcagcgattccctccgacgaggaacctagcgaatcctcctcctcgtcctccttctccacctctctcttcaatttctcttctggaaacccgagaatcgaggagacccgtggcctcatgcatctcttcccagacgacactccttctactctacccgttggacggaagcctctcgtttgcgttgtcggcgtcccaaatcacatgacctatgcggatttctgccagttctgtggttccttcattcagcacatgctagagatgcgcatagtcaggatggatgggatggaggatcagtacagtgttttagttcgctttgacgatcaagactccaccgacagcttctacaagcactacaatggccgccgtttctcttctctcgaggttgaggtttgccgtgttcttttcacattagacgtgcagtacactggctccattgaacatgcacaaccctccaatgctacttcaactgaactgcctacttgtcctgtttgccttgagcgattagatcaggacaccggtggaattcttacaactatatgcaaccattctttccattgttcctgtatttctaaatgggcagattcttcttgtcctgtatgccgctattgccagcagcaagctgaaaaatctatatgttttgtttgtcaaaccactgagaacctatggatatgtgttatatgtgggtatgttggctgtggaagatacaagggagggcatgctataatacactggaaagagacacagcattgctattccctagaagtggaaacaaaacgagtttgggattatgtgggagacaactatgttcatagacttattcagtccaaaactgatgggaagttgattgagctgaacactcagtgtgcgcatgcagacaatggatgtggaagttgcagctgtgaagataatgccatgaatgaggctatacttaatagtaaagttgaagctattgtcaatgagtacaatgaattgcttgctactcaacttgaaaaccaaaaattatattttgaatccttattacaagaagtaaaagaagaatctgagagaaaaatttccaaagctgttcagaaggctatcagtcttaaacagcagaagattcagtccaagattgacagatgtaagaaagagaagaaatttctggatgatcttaatgagaatcttgtgaaaaatgaggacatttggaaaactaagatacttgcgattgaagagagggagaaaaaaaccacgagactgatgggtgatagagtagcggacctggaaatgcagcttggtgatctcatggtttgtcttgagggtgggaggacggtagaacagctggcagcttcagatgagattaaagaagggattatcttggacaaatcaatagaatcctcgacaactagtggctctgacctggtgggaagagacgcataacagaagaatggttccttttaatgacagaagaatgattccttttaatggactacattgcacggactgacctataccatgtttataatcacagatttatagaaactacactcgtggatccacagttgacatgttttcactctaattttttcccatataaaactcccagtgtatgtatctgtttagatttgtaaataaaaagatttccaactaccagtataaattcttaatatttataaatgtaagtatcaggcaggaacttatagatnacccgagaaaaaaaaaaaaaaaaaaaaaaanaaaaaaaaaaaaaaaaaaaaaaaaaaaaaaaaaaaaaaaaaaaaaaaaaaaaaaaaaaaaaaaaaaaaaaggggggg

SEQ ID NO: 346 - DNA, 1307 bp, Glycine max
  Clone ID: PAT_MRT3847_60645C.1
aaaaaaaaaaagcattaaagagtggccaccagaacatgttgtttttcaattcaaactctctctctctctcctttctttctttctcccctgtcgatccgagttagcattccaaggagcgagtaagtgactcggtggtacaggcggcgttttctcgtttcgccgcgcatcattcgatttcgctccgttccgcaccataacgaatcgaatctcccgatcaatcacgagatattcgatctccttctcaacagtttcactccagattcaaactcacacgcacgcacgcacactctttttttttatcatcgcgttgtaagcgagatcttggagagctacgagctcgttcgttcgtttgccttatttatttttcgcggttgatctctctcgttgttccgagagagttctttgttgtggaaacatggttagcggcaacatttttcattgtagaaaaaattcgtggcctcctcaagagtatatcagtaaatccactttgcagctgtttgattatgatagttctgctccccctgaacaagcttggagaaggagattaaacagccatgccaatcttcttaaagaatttagagtaacttttacggaagctataaaaatggttcgattaggtatacgcatttggtcatatgttagggaagaggcttctcatggaaggaaagcgcctattgatcctttcactcgagaaagttgcaagccatctgcatctcaaggagtcccacttggagggatggggagtggcagcatatcaagaggatttagaggcgagttccgacaatggcaaattattcctagcttatgtgaagcatcaccagtcatgtcaaatcagttctctatttttataagcggagagggaggaaacaaaaattttgcatcagttttggctcctggccagcatgaaggtttaggatctagcaggaaacctgatgatcagggcatatcatcatggggttggaatctaagtggccagcactcaacctaccacgctttgtttccaagagcttggacagtttatgatggtgagccagacccagaactaaaaatatcgtgtcggcagatatcaccattcgtaccacataattatagagaaagcagtctaccagctgctgtttttgtttatacgttggtgaacactggtaaggaaagagctaaagtcagccttttgtttacttgggcgaattccattggtggaagctcacacttgtcaggagatcatgtgaatgaaccattcaaagctgaagatggagtctccggtgacttctattcacaagacagcaaaggaaccctctgtacttttgcat

SEQ ID NO: 347 - DNA, 2205 bp, Glycine max
  Clone ID: PAT_MRT3847_60792C.1
gccccaggtgtgctaacgcggacaagtttaccgggtgcaattttgcgtcagcgctgcttcaatttcgtaatataaatcatactcacttctcatccgctttctaaaaaataaaaaaaaaatttaaccctagcaattttctcttattgcctaaaaacatttcaatcactctactttaaacgatccgctaaaaaaaaacctctcgcaaaacccacactcccaagccaaatcgatgtcgtcttcggagtcccaagaccccgccgccgccgcagcatcgtcggaggcccaagtcagcaaaaaggcggctaagaaggaggccgcgaagctggagaagctccgccgccgccaggaaatcgccgccgcatccgccgccacggccaacctctccgtcgacgaggaggaccccctcggcggaaactatggcgacgtgccgctggtggagctgcagtctaagacatcggcagacgtcggcgagtggacgcgagtggaggcgctcggcggcgcgctggagaacaggtcagtgctgattcgcgggagggcgcaggcgattcgccccgtcgggaagaagatggcgtttctggtcatcagagagaacggcttcaccgttcaatgcttggtgcaagcgcagcctgatacggtgagcgcgcagatggtgaagtttgccgctgcactcagccgcgagtccatcgtcgatgtcgaaggcgttgtttcggtccccaccgctcccatcaaaggcgccacgcagcaggttgaaatccaagtgaggaagttgtattgtgtcagtagggctgtacctactctgccaattaatcttgaggatgctgctcgaagtgaagttgaaattgagaaggctcttcaggctggtgagcaacttgttcgcgttaatcaggatacacgtttgaactttagggtgcttgatgtgcgaacgccggctaatcaagggattttccgcattcagtctcaagttggaaatgcatttagacaattcttagtatctcaaggcttttgtgaaatccacactccaaagttgattgccggatctagtgagggtggagctgctgttttgagtctggactacaaaggtcaacctgcatgcctgacccagtcacctcagcttcacaagcaaatgtctatctgtggagattttggccgtgtttttgagattggtcctgtgtttagagcagaagactcctacactcacaggcatctgtgtgagtttacgggccttgacgttgaaatggagatcaagaagcattactttgaggttatggatttagtcgatagattgtttgttgcaatgtttgacagtttgaaccagaattgtaagaaggatctggaagctgtggggtctcagtacccatttgaacctttaaagtatctgcggaagacactacggcttacatatgaagaagggattcagatgctcaaggatgttggagtagaaattgaaccttatggtgacttgaatactgaagcggaaaggaaattgggtcagctagtcttggagaaatatggcacggagttctatatccttcatcggtaccctttggctataaggccattttatacaatgccttgctatgacaatccagcatacagcaactcgtttgatgtctttattcgaggtgaggagatcatttcaggagctcagcgtgttcatgtgccagaatttttggaacaacgtgcagcagcttgcggcattgatgtcaaaacaatatcttcgtacattgattctttcagatatggtgcaccaccacatggtggctttggagtagggttggagcgtgtagtgatgctcttctgtggcctgaataacattcgcaaaacatcactctttcctcgtgacccacttaggattgcgccatgagaaaatcatatcccaacagttaattgctcaaatattgagtcttttcaattttcattatatgacaagattttatttttttatgttgaatcccgaaaacattatttaaattctcagtcttggagctgatacttaaatccaccgtgataaaaacaaatgttttgactggctgtattgccactgtgtattgaattgacccactttagaaagtccatctttctcctctaatcagaaaccaggtgaatcaatgataaatttgatcccatgaacatatttcagctggacatttggaactgggaatgacttgtatgcattcaaatcaagtagcattttgttaaaaaaaa

SEQ ID NO: 348 - DNA, 2033 bp, Glycine max
  Clone ID: PAT_MRT3847_60871C.1
acaccgcatacgttgtttcccttgggcgacccacgcgatgggaataatttttttttttttttttttgtgctgagttgttttgtttattactatttcttctcttttccttgtgacacagacaaggaaaaagggagaaagaacagttttttttttcttttttttgaataagtctttctctaccctcagttgctctcatagactcttgactctttcagttgtttactaattaacactcatcacattcgttgtgtttggcttcttcactcgctttctctatttttttctcactaaaaagttccatcttttttttttttttttaatttctggggttattattgctttctgtgattctgtctcagttccattttggtatctttgagggaaattcattgggtttgcagggttttatcttgttagaatttagaccaattggctaacagataatagtcttcattgaacatcaatttcaagcattctctctgatttttttgatcaagtggctcttttctagattctgattcccttcaaaatgcttctggatttatccttagtattgattgtataaaacctccacttctgttatcattttctctctgccttatcttcctcagtttccactcatcaagtttcaatcttcctttgaataagcccaaatttgattgtatgaaccagtagcttttgcttgtaaattgaattgatgaagtgggaaagtataaccctttcttctcctacttcttgtactccaaactccaacaccaattggttggtggaaaataatagcaggagcacaaaatggacccctgaagagaacaagctctttgaaaatgctcttgcagtgcatgataaggacaccccagatcggtggcacaaagtggctgagatgattcctggaaagacagtggttgatgtgataaggcagtacaaggagttggaagtggatgttagcaatatagaagctggtttgattccagttcctggctatagtagcactgctatctcacccttcaccttagattgggtgaacactcctggctatgatgggtttaaaggatgtggaaagagaccttcctcagtgagacccattgagcatgaaaggaagaaaggagtgccttggactgaagaggaacataaattgtttctattgggtctgaagaagtatgggaaaggcgattggagaaatatttctcgcaatttcgtgattactagaactccaacacaggttgctagccatgctcagaagtacttcataaggcaactttcaggaggcaaagacaagaggagggccagcatacatgacataacaacagtgaatctcacagaaaccatcacaacttcttgttcagaagacaccaatagatccacttcaccacatgttctctcacagccgcagcagcaaaattctactcctactacccccagaactcattttcagtggactaatcagtctaacacaggagtagctatgactctcaaccctgctcatgaaagagtcttcatgtctccttatggtgctaactcctttggggttaaaattgagggacagaatcttcatgagtcttcttacttgggacctcagacacagaacatggttttccaaatgcaacagtcctcacaacactagttccatgcattagaacttgttgtagtgaattattaatgggtagaagtagaaccagaatcttctgtccatttcaataagtacggtgcttgagttgagctttttcctaagttcttatgtgaatatcctagattattggttagttattatgaacttgaaggaaggtacatagatttgtttctttaacaaataagaacttcctgaaaggagtggcaggcaaccaagtcccaaacgttggtcttggttggttttgttgtctgggaataatggatttcaagcaaagtgtataaataatggaatttcgacttagaggaaaagaggcacttctcgtgtcttgtcctctccggcatatatatttgtatgtggaggatactgttactgcaattgaattcaaagcaaactttttatagaaatc

SEQ ID NO: 349 - DNA, 266 bp, Glycine max
  Clone ID: PAT_MRT3847_60948C.1
cgcacacaactactacaagtacttccttactatcaaaaccaacaacgtctatggcaagttatcaaaagcactacgatgatcagggtcgcaaggttgacgagtatggccacgttgagaaccaaagcgacgaatacggcaaccctgtacatgctgatagtgacagctatgtagacaccagaactgctgctggtagatactgtgatgacatttataagcaacatgataccaccagtgcctacggtgtacacactggtagacaacattct

SEQ ID NO: 350 - DNA, 1276 bp, Glycine max
  Clone ID: PAT_MRT3847_6094C.1
caaccctgcttcccataaaagtttgtgcaatctttcaagtaaaataaaatccacaaacatacacaccaaaccaaaccaatcctcaattggctgaaaaccttgttctacatgctctcatagttcgtgtgttgaattgtgttgtgaatttggtgtgatgaagtgggaaatggagatcctccctcctgcatcaccttacatgtacaattccaattggcttcttgatgataacaggaccaacaacaccaaatggacccctgcagagaataagctgtttgagaatgctcttgccgtgtatgatagggacactcccgatcggtggcacaaggtggccgagatgataccaggaaagacggttatggatgtagtgaagcagtacaaggaattggaagcagatgtttgtgacatagaagcagggttgatcccaattccggggtacagtagtggtaccaccacaacctcacccttcaccttggattgggtgaacactagtcctgcttatgatgatggcttcaaaggaatcactgctaagagatcctcctctggaagaccccttgagcaggaaaggaagaaaggtgtgccatggactgaagaggaacataagttgtttctactggggctgaagaagtatggcaaaggtgattggagaaacatatcgcgaaattatgtgatcactaggacgccaactcaagttgctagccatgctcagaagtacttcatcaggcaactatcaggaggcaaggacaagaggagggctagcatccatgacataacaacggttaatctcacagaaaccaccagaacttcttctgatgaaagcaagagatctgcttcgccacaaaattccgcaatgctctcacgccaccagcagctgaattctaatgctgcctcatccggattgaatttccagtggagcgatcagccaaatgcaggggtagctatggcactcaaccctgcacatgaacaagtcttcatgtccccttatggccttaactcatacgggtttaagatgcagggccaaaatctgcacagaagttctcttcatgagtcttcttacttaggacctcagacaccaaacatggttttccaaatgcagccctcccaacactattcccatgcatgaggtggtggtggttgttgttttgaattattattactattattattattattattatttatggctagaaccagtgtcttttgctcagttcactagtacagtgtctgtgctttttaccatgttttatgtgaatatctttcattacactgttgaaacaaa

SEQ ID NO: 351 - DNA, 163 bp, Glycine max
  Clone ID: PAT_MRT3847_6220C.1
tgtccctgggtcctccaggaagcttccccttaatcttgtccataaaccctttcttctcgttctgaacaccatgaaattgggcatgctgacgatgttccttcctatatcccgcttaaccgtgcgcaccccccagggttgactcctaaccaggttcacttccata

SEQ ID NO: 352 - DNA, 1638 bp, Glycine max
  Clone ID: PAT_MRT3847_62243C.1
attatattatccgattcagaattgtgtggactggaaactcctctgtccccaaacagcacgatgcgtgaatttgattcatctgtactggtggtgttgtcatcgtttttggacgtgagcgtcaacactctaagcaaagcagccatgaagaagggcatgaatgactttgtattcatcatgtactccaatgccttcgctgcatgcctcctccttctcttagccttattcttttataggaaaagaacacttccgccactctcctgtaacacccttggcctattccttgttgttggcatgctcagttgcattaatcagtcgatcaagtttttcggcataggttacagctctccaactttggcctcagcactgtccgatttggtgcccgcctttaccttcatacttgccgtcatcttcaggatggaaaaattagattggaaagctaatagcactctggccaagtccattggcacagtggtatcgatcgctggggcattgttattgtctttgtacaaaggccaagtcatcataaataataatccaccttttaaattgttccctcaaaaacttgtctcatccatgcaatttgactgggtatttggggcactgttgcttgcagctcatagctgttttctctcaataaactacattcttctgacacggatagtgagagaataccctgcagaactggtggtggtactcagtcgcattgcattaacatctatactatctgttcctgctgcactgatttcagtaaaggatctaaaagctttgagactggggtttaatatggagcttatagctattggatgttcagcaatttttgtcttatcctttcgaggtgttatccatatatggatcatggggaagaggggccctgtctatgttgcaatgtttaagccactcgaaattgtcttcgcagtcatcttgggggttacttttcttggggactctctttatattggaagtgtgatcggagctgccataatagttgttggtttttatgctgttatttgggggaaaagtcaagagaaggtggaggaagattgtacagtctgcagctctgagtcatatgataatgaggtccctcttttacagaacaagagaacgggggaataaaatcttcaggaaatgatttatatactttctgcttgtaagcaaagaacgatggcagaaaaatttcaatattcttgtttcctctaaatctgtttccctgggcctgcaagaaatagatattggtcaccgaggacatgaatagaaagattgcataatttgcacaagatattgattttttgggtgccacttattccctacatccaccgagaagggtcagagcggattacaattttctgccattgctgagttgaatgcacacaaatatcaatcagtttgacctttccttctttatttggttcttgtggactttcggatttcacctccagttgttgtatagatcgtctaccaatattatggaatgtgctgtgaaataattaattttagttcttaacaagagaatctacaacaatgcataatttgttatgtatgtgaagtgttgtttttgttatcaattattgtagttattttatgtttattcattttaaaggaattaaaatgcatatgggtgtgtggggtttattgataatg

SEQ ID NO: 353 - DNA, 258 bp, Glycine max
  unsure (1)..(258): unsure at all n locations
  Clone ID: PAT_MRT3847_62711C.1
ctctctctttctctttctctctcatccagatcttgcaaanaaaaaaangcacaatggcagcgagngntccnantccangcnaaganttcgtgtacatggcnaagtggcggagcaggccgagcgctacgaggaganggtgnagttcatgganaaggtctccgcntccgccgaaagcnaggagntgaccgtggaggagcgnaacctcctctccgtngcctanaagaangtaatcggngctcgccgcgcctcctggngnat

SEQ ID NO: 354 - DNA, 725 bp, Glycine max
  Clone ID: PAT_MRT3847_63030C.1
ccgtacgcccgcgagaagacgacagaagggggatcgctctcacgcttctgattattcctcttcccattctagggttccgaaatggacgctggcggaaagatcaagaagggcgccggaggaagaaagggcggcggccctaagaagaagccggtttcaaggtccgtcaaggccggtctccaattccccgtcggaagaattggccgttatttgaagaaaggaaggtacgcccagcgtgtcggtaccggtgctcccgtttacttggccgcagttctcgagtacctagctgctgaggtgcttgagttggctgggaatgctgcacgtgacaacaagaagaacaggattattccgagacatgtgcttttggctgtgaggaacgatgaggagttggggaaattgcttgctggtgtcaccattgctcatggtggtgttcttccaaacattaaccctgttttgctacctaagaagactgagagggctcaaggaacctaaatctccatccaaggctaccaaatctcctaagaaagcttagatgtttttattttattttaatgaatatgtatatcagtgtttagatgctttttatgtaaaagaaaatattatctgttgcaaacactgtaattcttatcgtcttgcatgtaggagtttgctaaattaatgaaaatttcttattattttgggtcaaaaaaaaaaaaaaaaaaaaaaaacaaagcggccgctctagagaa

SEQ ID NO: 355 - DNA, 914 bp, Glycine max
  Clone ID: PAT_MRT3847_63031C.1
ttttccacgcgtccgaagacgacagaagggggatctcaccatcactctcgcacttgtgattattcctcttttaacaatccgcacccaaattctagggttccgaaatggacgctggcggaaagatcaagaagggcgccggaggaagaaagggcggcggcccaaagaagaagccggtttcaaggtccgtcaaagccggtctccaattccccgtcggaagaattggccgttatttgaagaaaggaaggtacgctcagcgtgtcggtaccggtgctcccgtatacttggctgcagttctcgaatacctagctgccgaggtgcttgagttggctgggaatgctgcacgtgacaacaagaagaacaggattattccaagacacgtgcttttggcagtgaggaacgatgaggagttggggaaattgcttgctggagtgacaattgcacatggtggcgtgcttccaaacattaaccctgttttgttgcctaagaagtctgagagggcttccaaggaacctaaatctccatccaaggctactaaatctcctaagaaggcttaattgacttattagtttattgttctctatttagtgtgcacaatgtaaatctgtgtttaggttcttttttctatcaccataattgtagttctcaaatcgttgtttattttttgcattttcactcaattagtcgaaacagcaagttctcagtaagggattaatttaattttcttatattcgtataattgtatcctttctcattctctctctcaatcgagatgttgtgaaatgttacattgttgaatttccatcataattattgtttggataggtgtatgtgtgatccaagaaagaaatggacgttgatagtatgttacttagcactattgtaggcagtgacaagagtttaatgtcaaattatgc

SEQ ID NO: 356 - DNA, 983 bp, Glycine max
  Clone ID: PAT_MRT3847_63035C.1
atattattcctcttcccattctagggttcccaaatggaccccacgcgtccgcccacgcgtccgcccacgcgtccgtacggctgcgagaagacgacagaaggggatccatttctcgcaacaacgcttaacctctctcattccccatttcctcacctccttcaaccgctgctaaattctagggttccgaaatggacgctggcggaaagatcaagaagggcgccggaggtagaaagggcggcggcccaaagaagaagccggtttcaaggtccgtcaaggccggtctccaattccccgtcggaagaattggccgttatttgaagaaaggaaggtacgcccagcgtgtcggtaccggtgctcccgtatacttggccgcagttctcgaatacctagctgccgaggtgcttgagttggctgggaatgctgcacgtgacaacaagaagaacaggattattccaagacatgtgcttttggcagtgaggaacgatgaagagttggggaaattgcttgctggagtgacaattgcacatggtggcgtgcttccaaacatcaaccctgttttgttgcctaagaagactgagagggcttccaaggaacctaaatctccatccaaggctaccaaatcccctaagaaagcttagattacttttttattttccatatttaatttagtgttgtatatcggtgtttaggtgcttttggtgtaacaggatattttatgtgtttcgaaaacactgtaattcttgtcccaatttgttgcttgtaggagtgagtttgcttcgttaatgaaaagtggaaacccccttgttttcaatcaacattctctctacctcctttttgtttttattatgagatgttgattcagttgcattgaagtgaagtaatttgtttagaagcggtgaataaactgaactttaagtagtttcgtgctgagttcctatgggcttggtgtagactgtaactttatttgaattaaacaatgtccg

SEQ ID NO: 357 - DNA, 1767 bp, Glycine max
  unsure (1)..(1767): unsure at all n locations
  Clone ID: PAT_MRT3847_63039C.1
gcgtccgtacggctgcgagaagacgacagaaggggacgtccagaattccccgccgtctcgctcttgcaattattcctcttctcgcaatccgcaccctaattcctaggctttggaaccgaaaggggtcaaatccttcaataccgatatgcgccccggcatgaagccgcggccgaaatctgaagggttacgaaatggccgccggcggaaaagaccaagtccgcgcgccggagggtagaaagggccggcagaccaaagaagaaggccagtgtcagggtgtcggccccggtgcagtacgttaacgttgtccgggacctcgtctccgaatccgccgtcgggagtgtttggcctgtatatggaagaaagggaaagaagcgctcagcgtgtacggtaccggtgctcacggatacctggaaacaacacattaaacctttctcattccccatctcctcaccttattcagccactgctaatttctagggttccgaaatggacgctggcggaaagatcaagaagggcgccggaggaagaaagggcggcggccctaagaagaagccggtttcaaggtccgtcaaggccggtctccaattccccgtcggaagaattggccgttatttgaagaaaggaaggtacgcccagcgtgtcggtaccggtgctcccgtttacttggccgcagttctcgagtacctagctgctgaggtgcttgagttggctgggaatgctgcacgtgacaacaagaagaacaggattattccgagacatgtgctattggctgtgaggaacgatgaggagttggggaaattgcttgctggtgtcaccattgcacatggtggtgtgcttccaaacattaaccctgttttgttgcctaagaagacggagagggctgccaaggagcctaagtctccatccaaggctactaaatctcctaagaaggcctagattatcctttttttttttttttttttaaatctagtgttgtatatcggtgcttagatgcttttggtgtaacaggaaatttgatgtgtttcttaaacattgtaattcttgtcccattgtgttgcttgtaggagtgagtttgctttattaatgaaaagaaaccgtggaaaccaagagaaaatacaaaaatggtgatgatgaaactcaagacaggaatacatcaagaaaacaagatgctgtgcaaacatcataacatgcacatttatgagaggaaagagagacgggtaaaggtgaagtctcataatgaagaattaacagcaaagaggagatgttcaagaagtcgagagcgtgaggatagaaggtccccttctttttcaccaagggagcaaaaacgtacttatcaagatggagagcgcaaagagttgtcaatgcattccttgaaagatagttctagaactaagaaccctgatattgatagaaatagagtatcaactaatggttcaagtggtcaccatcatcgacatggtgtctccacaagtggacttggtgggtattctccaaggaagaggaaaagtgaagccgctgccaagactccttctccatctaagcattctcttgagaagaaacgtgctggatgggatcttccccctgcagggacaaataatccttctgctgttgtttcttcaagttttccagtatcaaattgtgctgtgttgtctaatatgcatgatgtggtttcaactagttctcttgatctagcccttgtgaagcctctgcctgtgtcttttccaagtgatgtatcaacagggaagaataccannacattgattctgt

SEQ ID NO: 358 - DNA, 442 bp, Glycine max
  unsure (1)..(442): unsure at all n locations
  Clone ID: PAT_MRT3847_63148C.1
aatcagctccatgtgtcctcttctttgatgagcttgactccattgctactcagagaggaagtagtggtggagatgctggtggagctgctgatagagttctgaatcaacttctgactgaaatggatggcatgaacgccaaaaagactgtgttcataattggggccaccaacagacctgatatcattgactcagcacttcttcggcctggtcgtctagatcaactgatctacattcctcttcctgatcaggagtcccgttatcaaatcttcaaggcctgcatgaaaaagtcacctgtctcaaaagatgttaatttgggagcactagctgagtatactaaaggctntagcggtgctgatataactgagatatgccaaagagcatgcaaatatgctattagagaaaacatagaaaaggacatagagcatgagaggaagagaagaga

SEQ ID NO: 359 - DNA, 2093 bp, Glycine max
  Clone ID: PAT_MRT3847_63328C.1
gtgtgtgtgtgtgaaactctcgacttctcaacttagcaacgcttgaaattttagttcacaaaagtcactgcctcatagcaagccttgaatccatatttgagagacacccatcctcccattttttattttcttttcatgttgattgattgatcatgaacaaaatataactcataacttaatcctactatataaaaatagagggatctccttctcttatccagagaagcatatatagagaaagaaagaaggccctgccctatatagctgaaggcagtgtgcacaaactctgagactgcatattagagtttgagtcttcactctgaagcctaacttgggtttgtgtctctcatagcaagatgatggaaaacggtggcaaacagacatttgaagtctccaatgacacgcttcaacgagtaggttccaagagctttgatgatgatggccgtctcaaaagaactggaactatttggactgcaagtgcccacataataacagctgttattggttctggggtgctatctttggcttgggctattgctcagctaggttggattgctggtcctgtggtgatgattctattctctattgtgacttattatacctcaactcttctagctacttgttaccgttctggtgaccaactcagtggcaagagaaactacacttacacacaagctgttagatcctaccttggcggcttttcgtttaagttttgtgggtaggttcagtatgcgaacctttttggagtggcaattgggtacaccatagcagcttccataagcatgatggcagtcaaaaggtctaattgttatcatagtagcggagggaaaaatccatgcaaaatgaatagcaattggtacatgatttcatatggtgttgcggaaattatcttctcccaaattccagatttccatgagttgtggtggctctctattgtagctgctgtcatgtccttcacatactcattcattggacttggccttggtattggtaaagttataggaaacggaagaattaaaggaagcctaactggtgtaactattgggactgtgacagaatcccaaaaaatttggagaactttccaagcgcttggaaacatagcctttgcttactcctactcaatgatccttattgaaattcaggacacaatcaaatcccctccagcagagtcagagacaatgtccaaggctactttaataagtgttttggtcacaaccgttttctatatgctatgtggttgctttggctatgcttcttttggagatgcaagtccgggaaaccttctcactggctttggcttctataacccattttggctcattgacatagccaatgctggcattgttatccaccttgttggtgcataccaagtttactgccaacccctcttctcattcgtcgaatcaaatgcggcagaaaggttccctaatagtgattttatgagcagagagtttgaagtaccaatccctggttgcaaaccctacaagctcaacctcttcaggttggtttggaggacactttttgtgattttgtcaactgtgatagccatgctcctaccattcttcaatgacattgtagggcttattggagccattggattttggcccctcactgtgtatttaccagtggagatgtatataactcaaactaagataccaaagtggggcataaaatggataggcctacaaatgcttagtgttgcatgctttgtaattactatattagctgcagcaggttccattgctggggttattgatgatcttaaagtttacaagccatttgttaccagctactaattcaataggataattacttagtgatcatgatcaccattgtcagagatttcattagcaacaagaaaaaaaaaagaaggtaaattgttgcaaattgaaatcaacaggaaggtggtcttacttgtttattgcttagtaaccttgtatcttctgtatctttgtttttttttgtttgtgtgtgtgtgttctcttactttgtaacttgctctgtatccctaatttgcaatgagaaatggaggaaatgaagcagaggctttcaaattatcaaagcttttctctttgagtcaagccacttgcatt

SEQ ID NO: 360 - DNA, 887 bp, Glycine max
  Clone ID: PAT_MRT3847_63488C.1
gcacgaggattgaaggcgcatccccttctccctttcaaattttggtctccactacgaattcgcacaaaccctacccacatcttttttttttttttttcttttgcagttgctaggcaccaagatgaaagtcaacatcttgcaatgccagcatagatttacactcactccttccccatttcaaatcttcgtctccaattcgcgctcacataaaccctaccctcaatttccattcgcaatttttgttgctgctgagcacggaatcggagatgaaagtgaagatcttgcaatggcatgctattgcttcttggacttgggatgcacaggacgaaacgtgtgggatttgtaggatggcctttgatggatgttgtcctgactgtaaacttcctggagacgactgcccgctgatttggggtgtatgcaatcatgcgtttcatttgcactgtatcctgaaatgggtgcattctcagacatcacaagcgcattgccccatgtgccgtcgtgaatggcagtttaaaggatgagagcatttttttttcctttaagggcggccactgaccaatgtaaatcggtctagttgaagacacttcttctgcagttttaccacgcatataagatgcactggcttcttattagctattgtacacttcaatatattttattggttcggtaaggaggtgatcaaattcaaagtttctggatgtgaaattttattattgtcatgtgaatgacatcctcgttttttttcttctgatagtttgctgatgtcttactgctcatattttgtatcgatagtatgcttccgaagcatgacaatgtatgtaattggcttcacaagattgacctaaataaggttgcattattgaagttattattttttaaaaaaaaac

SEQ ID NO: 361 - DNA, 184 bp, Glycine max
  Clone ID: PAT_MRT3847_63655C.1
tttgccccgaagggtaaggaaggttggtagggtttcaatagcaatacccataatgagtcaccctatcccaacctctgatgatacccattcggtgcaaattattataccacacatacagatgggtctgaagtcaaacatgtacctattttgttgctcatatactcacattgctgctaccaaggga

SEQ ID NO: 362 - DNA, 179 bp, Glycine max
  Clone ID: PAT_MRT3847_63797C.1
gtgttatgcatccaatgttatttaccataggcccggctgcacatacccaccgacggctgattttcattgagtgagtcctctttttctgttactgctatgaatttttttctttttatcattgagaaagattttaatagccacactctaactggtgtggggttttttaacaaacagcataa

SEQ ID NO: 363 - DNA, 575 bp, Glycine max
  unsure (1)..(575): unsure at all n locations
  Clone ID: PAT_MRT3847_6427C.1
ggctcgagatggaggctacttcagcagccactgttccgacaaccttctacatgtccccttctcaatctcacttgtccaacttcggaatgtgttacggtgtcggagaaaatggtaacttccattctccacttacggttatgcctctcaagtctgatgggtcactttgtatcttggaagctctcaaaagatcacaaacgcaagtgatggtgccaacttcgtctccgaaattggaggactttctaggtggtgcaactatgggaactcacgaatatggaagccacgagagaggtttgagcctagacagcatctattataactcccaaaacgcagaggctcaacccaacagagaccttctttcacaacccttcaggcaacaaggtcatatgagtgtccaaacacacccttattactcaggccttgcttgccatggtttatatcaagcaccgttggaggaagaaacaacaaaggaaacgcacgtgtcggattgcagctccctaatgcctcanatgacagaaggcttgaaaaactgggtggctccaacaagggagtttttcactcaccagcaggttttggag

SEQ ID NO: 364 - DNA, 170 bp, Glycine max
  unsure (1)..(170): unsure at all n locations
  Clone ID: PAT_MRT3847_64305C.1
gnacacanctacnacaatnacntccttanaatcaaaannaacaacnactanggcaagttatnaaaagcactacgatgatcagggtcgcaaggtngacgagnatggcaacgtngagaagcaaaccgacgaatacggcaaccctgttcangctgctagtgncaccnnngnag

SEQ ID NO: 365 - DNA, 455 bp, Glycine max
  Clone ID: PAT_MRT3847_65269C.1
caaatgaggcgttaaggatcaatgttttattcagacacatacagaacatgttgtccagtcacaccactgtgattgctgaagctggagacacttggtttacttgccagaagctcaaattgccacaaggctgcgggtatgaatttcaaatgcagtatggatcaataggttggtcggttggtgcaactcttggttatgcacaggctgctccccataagagagtgattgcttgtattggcgatggtagcttccagatgacagtacaggaagtgtcaacaatgttacggtgtgagcagaatggcatcatctttctaattaacaatggtggatacactacagaggtagaaattcatgatggaccttacaatgtcataaaaaattgggactatgctggacttgtggaaagactagataatggtgaaagcaaatgctggactgccaaggtattgtgaggagta

SEQ ID NO: 366 - DNA, 1349 bp, Glycine max
  Clone ID: PAT_MRT3847_65615C.1
tcgttccgcgtggagaagacgacagaaggggggagacttaaatgaaaaggaaataatcttaagtggaaccttctgcgaaattagccttccttcgtcccttgattgaagtataaattaggggtgttgaaattcaaagccatatccgtcattaaccaaatttgtgtttctccgattgcaagcaatggactccttcaattccttcttcgattcaacaaaccgatggaattacgatactctcaaaaacttccgtcaaatttctccggtcgttcagaatcacctcaagcaggtttattttactctgtgtttcgccgtggttgctgcggctgttggggcttaccttcatgtcctcttgaacattgggggttttcttactacagtggcatgcgtgggaagcagtgtttggttactctcgacacctccttttgaagagaggaaaagagtgactttgttgatggccgcatcactgtttcagggtgcctctattggacccttgatagatttggctattcaaatcgatccaagccttatctttagtgcatttgtgggaacatccttggcctttgcatgcttctcaggagcagctttggttgctaggcgtagggagtacctgtaccttggtggcttggtttcttctggattgtccatccttctctggttgcactttgcttcttccatctttggaggctcaacagctctctttaagtttgagttgtactttgggcttttggtgtttgtaggttacattgtagtagacacccaagaaatagttgagagggcacacttgggcgatctggactatgtaaagcatgccttgaccttgtttaccgatttggtcgcagtttttgtccggattcttgttattatgttgaagaattcgactgagaggaatgagaagaaaaagaagagaagagattgattttcttaccaatctgctcgattaacacttcacctcgcttggtctgtaatacataaaacagccgtctatacagtgttttccactttttaagcttgctcctcctactgtgcagttaagtcgtttgtttaccaatagtccatattgacatgttttgagctctctaataagagaaatgtttacattacaaatgtttacattacatttgttttaaagatgaaaaggggagtggggaagaagtcgatggtgaaggtccctaataaattcttactcccaagactcagaatttttcttggggaggaagtggaattcagggaaacacttttttttcacacattagtgtataattttatactagactcgccaaatcacgaatttcattatctatttagcttcttttttttccccctgtaaaaaaaaaacaaaaaaaaaaaaa

SEQ ID NO: 367 - DNA, 314 bp, Glycine max
  Clone ID: PAT_MRT3847_65785C.1
ccacgcgtcctttttaatgaggatttagtggttgttcatgatgctcttgagtttggacattgtcgtttgtcccttgcggtacctaaggaaggcatttttgagaacatacatactatggaagatttgctaaagatgtctgaatggacagaagaaaggccactacgtgttgttactggatttggatatctaggcgataagttcttaagagagaaaggttttaagcatgtttcgtttttatctgccgatggagctcttgagtcatatcctcctgtgagtctgcttcctcttcatttgttttcctttctgtttccttg

SEQ ID NO: 368 - DNA, 2238 bp, Glycine max
  Clone ID: PAT_MRT3847_65831C.1
ccacgcgtccgcggacgcgtggggtagaatttggtagggagagaacaaacccactataaaatgcccacacccctgcctcgctgttctcacatcttcttttacgtattgaatctcagaattctctaaaagagatctttttctgctctttgaagaaagaagggtctttgcttgattttggagatgtctctgctctcagatctcatcaaccttaacctctccgataccaccgagaaggtgatcgcagagtacatatggatcggtggatcaggaatggacctgaggagcaaagcaaggactctcccaggaccagttagcgacccttcagagcttcccaagtggaactatgatggttccagcacaggtcaagctcctggtgaagacagtgaagtgattttatacccacaagccattttcagggatccattcagaaggggtaacaatatcttggttatctgtgatgcctacactcctgctggagaacctattcccactaacaagaggcacgctgctgccaaggttttcagccatcctgatgttgttgctgaagtgccatggtacggtattgaacaagaatacaccttgttgcagaaagatatccaatggcctcttgggtggcctgttggtggtttccctggacctcagggtccatactactgtggtgttggcgctgacaaggcttttggccgtgacattgttgacgcacactacaaagcctgtatttatgctggcatcaacatcagtggaattaatggagaagtgatgcccggtcagtgggaattccaagttggaccttcagttggaatctcagctggtgatgagatttgggcagctcgttacatcttggagaggatcattgagattgctggtgtggtggtttcctttgaccccaagccaattaagggtgattggaatggtgctggtgctcacacaaactacagcaccaagtccatgagagaagatggtggctatgaagtgatcaaagcagcaattgacaagttggggaagaagcacaaggagcacattgctgcttatggagaaggcaacgaacgtcgtttgacaggacgccacgaaaccgctgacatcaacaccttcttatggggagttgcaaaccctctctctccctccaccttaaccctctccccacgcgcccttctccctccctcacgcgcccttctctctccctcacgcgcccttctcactctcgccgctccttcgttgtcaaagcctcctccagcgagcttccgctggttggtaacaccgcaccggatttcgaagcagaggctgtgtttgaccaggagtttatcaacgtgaaactatctgattacattgggaagaaatatgttgtgctcttcttctacccgttggacttcacctttgtctgccccacagaaatcactgctttcagtgaccgacatgcagagttcgaggcactaaatactgagatattgggtgtttcagttgacagtgtgttctcgcaccttgcatggatccaaacagatagaaagtcaggtggccttggtgacttgaactatcctttgatttctgatgtcaccaaatccatatcgaaatcttatggtgttctcattcctgatcagggaattgcattgagaggattgttcattattgacaaggaaggggttattcagcattctaccattaacaacttagcaattggtagaagtgttgacgagacaaagagaactctccaggccttacagtatgtgcaggagaacccagatgaagtttgccctgctgggtggaagcctggggagaagtccatgaaaccagaccctaaacttagcaaagactactttgcagcggtgtagctaggataatagttaagagtggctatctgcatctgtatcaatcagtgaattgcaaaagggtcttgttttttttaatgttttgtaagtccttaaattttgagccgcagggtttggtaatatgcgtgctggtgtactggattttgaagtgtactatgtattaatttgcaatttctgttcattatgatctctgtaaaaaaaaaaaaaaaaaaaaaaaaaaaatttctgcggccgcgaattcttccacataatgtgtggaacgaagaatacttttatataaattgttttgcactattggcctctctgtttgatcctttaataattctgcattgcatgtgcatgcgtatcacacaggtgcaagcttatgctaacttgcattcgcattgtcgtttgcttttgtgggtgttgaacaaat

SEQ ID NO: 369 - DNA, 2773 bp, Glycine max
  Clone ID: PAT_MRT3847_66342C.1
cggagatatggctccgacccacgcgtccgcaatttcatccacggtgtcagtcgtcacgcgtccgattgaattaagtgattgaatggttccgaaatgcacttgctgtctttttctacttgactattacaccttccccattttgatttgatctgattgaattggcctcttgccagcaaaacagaatgtggaagctcaagttcgccgaaggagggaatccatggcttcggacattgaacaatcacgttggaagacaggtgtgggagttcgatcctaagcttggatcgccgcaagatctcctcgagattgagaaagctcgccagaattttcacgataaccgctttacccacaaacacagcgctgatctacttatgcggatgcagttcgcaagagagaacccaacacgtgaagtcttgcccaaagtcggagttaaggatattgaggatgtgacccaagagattgtgacaaaaacattaagaagggccgtaagtttccattcaactctccagtgccatgacggacactggccgggagattatggaggtcccatgtttctgatgcctggcttggtaattactctgtctatcactggggcgttgaatacagtcttaactgaagaacatagaaaggaaatatgccgttacctctataatcatcaaaacaaggatggtgggtggggtttgcatattgaaggtccaagcaccatgtttggctctgtcttgagttatattactctgagattgctaggtgaggggcctaatgatggacaaggggaaatggagaaggcacgtgactggattctagggcatggtggtgctacttatataacgtcatgggggaagatgtggctttcagtacttggagtgtatgaatggtctggaaataatcccctgccccctgagatatggctccttccatacatgcttccatttcatccaggaaggatgtggtgtcactgccggatggtctatttgccgatgtcctacttatatggcaagaggtttgttggtccaatctcaccaacagtattatctttgagaaaagagctttatacagtaccataccatgatatagattgggatcaggctcgcaatttgtgtgcaaaggaagatttgtactatcctcacccacttgtacaggatattctttgggcatctctacacaagttccttgagcctattctgatgcattggcctggaaaaagattgagggaaaaggctattatttctgcattggagcatatacattacgaagatgagaatactcgatatatttgcataggtcctgtaaataaggtgttaaatatgctttgctgttgggtggaagatccaaattctgaggccttcaagttgcatcttcccaggatttatgattatctatggattgcagaagatggcatgaaaatgcagggctacaatggaagtcaactatgggacactgcttttgctgtccaagcaattattgcatctaacctcattgaagaatttggtccaactataagaaaagctcatacctatattaagaattcacaggttttagaagattgtccaggtgatcttaataaatggtaccgtcacatttcaaaaggtgcttggcctttttcaactggagatcatggatggccaatttctgactgcacagctgaaggactgaaagctgttctattactatccaaaattgcaccagaaatagttggtgagccaatagacgtgaagcgattatatgattctgtaaatgtcattctctcactacagaatgaagatggtggttttgcaacatatgagcttaaacgatcttataattggttggagataatcaatcctgctgaaacttttggtgacatcgttattgattatccttatgtggaatgtacatcagcagcgattcaagctttggcatcatttaggaaattatatcctgggcatcgccgagaagaaatacaacattgtatcgataaagccactaccttcattgaaaaaatacaagcttcagatggatcatggtatggttcttggggagtttgcttcacttacggtgcttggtttggggtaaaaggtctgattgctgctggaaggagtttcagtaattgctcaagcatccgtaaagcttgtgaatttctgctgtccaagcagcttccttctggtggctggggagagagttatctgtcctgtcaaaacaaggtgtattcaaatctggaaggcaacaggtctcatgtggtcaacactgggtgggctatgttggctctcattgatgctggacaggctaagagagattcgcaaccactgcaccgggcagctgcatacttgataaattcccaattggaggacggtgactttccgcagcaggaaataatgggagtcttcaacaagaattgcatgatcacatacgccgcatacagaaacatattccccatttgggcgttgggagaataccaatcccaagtattgcaatctcgttaatcgagccttagttagggtgtcatcctaattatttcgacctgtggacagtaaaagaaataataataataacctatttttcttttatttccatggctctcttaaaatgtttgtgactaatgagtttagtagtcagctaaaaaaaaaagcaaacacgtggagaatgcctgtaagttttttctattactcatagacgcctctcttgctttccctgcagcagaggaattaaatatatacataaatagagatataaatgtttatgtcacttcttttgggacgaagaacgcaattctttctagcaatcgattcaaattgtttac

SEQ ID NO: 370 - DNA, 478 bp, Glycine max
  Clone ID: PAT_MRT3847_6668C.1
aattcggctcgagtggcagtgtctcttccctggcttggtttatgtcaaatcaagaaacaagctttgtcacaattggtcaaagagttcttgcaagaccactgaaggtgcgattccactatggtcatccagatgtttttgatagaatttttcacataactcgaggaggaatcagcaaggcatcttgtggcatcaatctgagcgaggatatttttgctggattcaactcaacactaagacgcggaaatattactcatcatgaatatatccaatgcggaaagggtagagatgttgggctcaatcaaatctcactttttgaagcaaaagtggcttgtggtaacggagagcagacattaagcagagatatctacaggctgggacatcgttttgactttttccgcatgctatcatgttatttcacgaccattggattttatataagctcaatgattgtgggcctcacatgttatgcattcctata

SEQ ID NO: 371 - DNA, 177 bp, Glycine max
  Clone ID: PAT_MRT3847_66759C.1
ccacttcaccttacctaaaatccactttgcagtgcaagattgcaccctccaaggctcgagcctcgtcctgctcgcgaaatcgcaacacgtcgagtctctgttccccgacctcattggctccgtgaccacctctctgaaagtcatgcctctacaacagctccacttgtgcaccgaagt

SEQ ID NO: 372 - DNA, 1295 bp, Glycine max
  Clone ID: PAT_MRT3847_66975C.1
gccctttcgtcgttctccgtctccctcatttgttcactttctctctctaaatccctaaaccagatctcgcactcgcgctttctctctctaggattcgacaatggcggccgctccctcgcctcgcgaagagaacgtgtacatggcgaagctcgccgagcaggcccgagcgctacgaagagatggtggagttcatggagaaggtctccgccgccgccgacaacgaggagctcaccgtcgaggagaggaacctcctctccgtcgcgtacaagaacgtgatcggagcgcgccgcgcctcgtggcgcatcatctcctcgatcgagcagaaggaggagagccgcggcaacgaggaccacgtctccgtcatccgcgactaccgatccaagatcgagtccgagctctccaacatctgcgacggtattctcaagctcctcgactctcgcctcattccctccgcttcctccggcgattccaaggtcttctacctcaagatgaagggagattaccacaggtacctcgccgagttcaagaccggcgccgagcgtaaggaggctgccgagagcactctctctgcatacaaagccgctcaggacattgcaaatgccgaactgcctccaactcatccaattaggcttggccttgcacttaacttctctgtattttactacgaaatccttaactctcccgatcgtgcctgcaaccttgcaaaacaggcttttgatgaagctattgctgaattggatacactgggagaggagtcatacaaggatagcactctgatcatgcaactccttcgtgataacctcaccctttggacctctgacatgcaggatgatggagcagatgaaattaaagaagcagcaccgaaacaggatgaccagtaaaaatattttactgctaattagaattgaacttctcctccatatctttttgaagggagaaggtgtttgttgctaatatctctttggtactgagattttaggcattcatgtttgttatgattgtggatgtactgggccgtttttagtttgtccttccattttcaagtgttttgccaaattgcctattttattaaggacgctgaagtttttattatatggaattggaattttaagattcttctcttctatctagtaaacttgatgtcacccgcttatattgtgaggattagatatatttgtattctttttgaagcctcgatatttaaatttagtttgattggaattgggtttgttctcgttgaactattttgagcattgtacacttcattctgatagaagtttctgctgttcgagatc

SEQ ID NO: 373 - DNA, 644 bp, Glycine max
  Clone ID: PAT_MRT3847_67765C.1
tggaggatagtttgcccttctcccattatagaaacccgcaataacaacctggaaatgcaatcagtaaataacaaatctctcattgaagagcttgataagcttcttgagcgattgcgtgtcccttctgagtatgccacaaatttgactggaggttcatttgatgaagctcgaatgcttcaaaatgtagaagcatgtgaatggttgaccagtgccttgcgtggtcttggagtgcctaatctagatcctagttatgcaaacatgagaactgttaaagagaagcgtgcagaacttgaaaaattaaaatctacttttgtcaggagagcctctgaattcttgagaaattattttgctagtttggtggacctcatgataagtgataaaagttacttttctcagcggggacagttaaagaggcctgatcatgctgacctgcggtacaagtgcaggacatatgcacgtcttctgcaacatttgaagagtcttgacaagaattgtttgggtccattgatcaaagcttattgcagttctctaaacttgcttcttcgcagagaattgttttcactttgtttcctattttgaaagctttgagaaaagttgatttccctgtttcttatacaaatatttgaaaatcttaaagtataaac

SEQ ID NO: 374 - DNA, 180 bp, Glycine max
  Clone ID: PAT_MRT3847_68206C.1
cttgaaggcatctatccccacaaccatcaacagtggtcgtggtgctgaattcgaatgggctgtcattgctctgttccatctgttgattacgagtaccgctagagtccgtgctcttcgtgaggctttctaccgccagaaccttccctatgtgaccaatttgcttgccactgtcttggtatt

SEQ ID NO: 375 - DNA, 1013 bp, Glycine max
  Clone ID: PAT_MRT3847_68258C.1
gagaactgtaagttcccacgcgtccgcccacgcgtccgtacggctgcgagaagacgacagaaggggatcatcaaatcaaaaaccctaattcccaaattctctcatttttcaagtttcaaccaagaaaagcagcaacaatgtcgggtcgcggaaagggtgggaagggtttaggaaagggaggagcaaagaggcatcgcaaggtgctccgcgacaatatccagggaatcacgaagcccgcgattcggagactggcgagaagaggtggcgtgaagagaatcagtggtttgatctacgaagagaccaggggcgtgctcaagatctttctcgagaacgtgattcgcgatgccgtgacgtacacggagcacgctaggagaaagacagtgacggccatggatgtcgtttacgctctcaagaggcagggaaggactctctatggtttcggaggctgagggtttggccttctttggtggctttggtttgtgtaaatggaaggaatttgtgttttgtagtgattatatatgtacttggattatcttctgctcggtacatgctcaaggttcttctgttttttttttttaattctactagtaattgcatcctaattgttttgaattgaagtaaatttagtgaatgatgaatgttggatgttctatttctcacatttattattgttagtagtggtgtgggagagataacttttaagtgggttgttaatgctaatattaatttgttccttttttgctttcttacaactgggattgatgtggagaagtttgatagttgattcttgtggtgttattttgaaacattgttttgtgttctttatcagcgaagaattgatagtttagttctgaagtgggtgtgttgagaatttgaactttttgctgaatttaacttattcaaacgcactttgttgttgttcaatgacgagaatggggcctggcttaagtgcagtcgtgttagttgaaaagtaatgtttttttcccatgggaattaacttgaagttcaatcta

SEQ ID NO: 376 - DNA, 912 bp, Glycine max
  Clone ID: PAT_MRT3847_68261C.1
gcagaatttgtccaaggaggaattcgtacatatactgcgtcgccaaagtactggtttctcaagaggaagctctaaataccgaggagtaacactccacaagtgtggccggtgggaagctcgaatgggacaatttcttggcaaaaaggcttatgacaaggcagctatcaaatgcaacggaagggaagcagtgaccaactttgagccaagtacttatgaaggagagctgaaatctgcagccattaatgaaggaggcagtcagaatcttgatctcaatttgggcatagcaaccccaggacctcccaaagaaaattgggggcaacttcagttcccctccttcccttacaatacacatggtggaagaagttcaatgatggaaaccaatgttagttctggaattggtaatccatctttgaaaaggatggttgcaactgaagatcgtccttcattatggaatggcatgtctcctaatttctttcccaatgggcaggaaagagcagagagaatcggcgttgatccttcaaacggactccccaactgggcgtggcaaacacatggccaggtcaatgctaccccagtaccaacgttctctgctgcagcatcatcaggattctcaatttcagctacctttccatcggctgccatctttccaacaagttctatgaactcaattccccagagtctctgttttacttcatccagcatgcctacccgcaatgcatctgaatattattactaggttaagcccccacaggcaccaccatagctgattttgcagtacagattaaagacaaactaaaacaaaagtgttttcggtccaaattctttttataattcagccactgattggtgtatactgagattcgacaccttattgctgtctcttgcttaaactataatgccccatgtttggat

SEQ ID NO: 377 - DNA, 368 bp, Glycine max
  unsure (1)..(368): unsure at all n locations
  Clone ID: PAT_MRT3847_69342C.1
attntnanattaattgaattagaagaagtttttttttgttgtttatatgcattaaaatagataatattattttaaaattttaaaaaaagttatttaaaaaaaaggttataatgatacaatttaaattntatttatgttgttttttgggattaatttagaaaaatatatagaggggattattatttaagggttcctaaaagcataccaatttaaaatataataagtcttattaaaggttggtgttatcatgaaaatagctattatatgtgtgaaattgctatccgctcacatattccacacaatatattatccggaaacataaaatttaaatcctggggttccttatgaaaaaaataacttacatttat

SEQ ID NO: 378 - DNA, 2052 bp, Glycine max
  Clone ID: PAT_MRT3847_69622C.1
tgaccaccttgaccgcactatctattcttctgttgctggcctgaggaggagggcatttggtttaccttgaaattggagatggcatattacaggaagtaaagcatgcccagctagagtatgagatttcatgcctggacataaatcccattggtgaaaaccccaatcacagtaatctagcagcagttggaatgtggacagacataagtgttagaattttttctcttcctgatctgagtctcatcacaaaggaacaattaggaggggagatcatacctcgttctgttcttctttgtgcctttgaagggatatcgtacttgctatgtgccctcggtgatggccatctcttaaactttatgttgaatactagtaccggtgaattaacagataggaaaaaggtatctctagggacacaacctataacactacggactttctcctccaaaaatactactcatgtatttgctgcatctgatcggccaactgtaatttatagtagtaacaaaaaattactttatagtaatgtgaatctgaaggaagtgagtcacatgtgtcctttcaattctgctgcttttccagacagtttggcaattgcaaaagaaggtgagcttactattggcactattgatgatatacaaaaacttcatattcgctctattccgctgggggagcacgcacgacgtatctgccaccaggagcaatctaggacttttgctatttgtagtttgaaatacaacccagctagtggtgaagactcagaaatgcactttgtccgcttgctggatgaccagacttttgagttcatatcaacttattctcttgacacttatgagtatggttgcttcataattagctgctccttctcagatgacaataatgtgtattactgtgttggaactgcatatgtactgccagaggaaaatgaaccaaccaaaggaagaattattgtttttgctgttgaagatggaaaactacagctaattgccgagaaagagacaaaaggagctgtttattgcttgaatgcatttaatggtaaattgcttgcagctattaatcaaaaaattcagctgtataagtgggtgctccgggatgatggtactcatgaattgcagtctgaatgtggacatcacggacacatcctagcactttatgtgcaaactagaggagattttattgtagttggtgatctgatgaagtcaatttccttgttaatctacaagcatgaagaaggtgctattgaggaaagagctcgtgactacaatgcaaattggatgtcagccgttgaaatcgttgatgatgacatatacctaggtgcagaaaacagttttaatctgttcactgttcggaaaaatagtgaaggtgctactgatgaagagcgaggtcgtcttgaagtggttggtgagtatcacctaggagaatttgtcaatcggttccggcatggctcccttgttatgcgcttgccagattctgatgtgggccagattccaactgttatctttggcaccattaatggtgttattggggtaattgcgtctcttccacatgagcaatatgttttcttggagaaacttcagtcaaatttgaggaaggtaattaaaggcgttggagggctcagccatgagcaatggagatcatttaacaatgagaagaaaactgttgaagccagaaactttttagatggagatttgatcgaatcatttctggatcttaaccgcagtaagatggatgaaatttccaaggcagtggacgtttcagtagaggagttatgcaagagagtagaagagttgacaaggttgcactgattttatattaatctgtgtagcttcgttgtttgtttgttttttttttcttatttaatattgttcttccttttttttttgaggggttgggtgggggttaaaataacattatatgcttgtattttctccccgctttttaccttctgtttgcattttacaatacatggatcacaaatggtgtatgaaatggatgtcatgttctaagtttctatttgacacttttggacacgctatcattttcctaaaaaacaacacc

SEQ ID NO: 379 - DNA, 315 bp, Glycine max
  Clone ID: PAT_MRT3847_69723C.1
cccggggtcgacccacgccgtccgaaaaaaaaaaaaaaaaaaaaaaaaaaaaaaaaaaaaaaaaaaaaaaaaaaaaaaaaaaaaaaaaaaaaaaaaaaaaaaaaaaaaaaaaaaaaaaaaaaaaaaaaaaaaaaaaaaaaaaaaaaaaagggggggccgtttaaaagaaccaaacttaaataccccgggcttccaacgtaaaatttttttattagggcccccaaaattaaattcctggcccggcttttaaaaacgcggaaatgggaaaacccttggggtacccaaataaaatccccttgaaaaaaatcccctttt

SEQ ID NO: 380 - DNA, 1601 bp, Glycine max
  Clone ID: PAT_MRT3847_69851C.1
aattcggctcgagaccaaaccccgcaagaaatacatggaaaccgtttcttttgtgtaaaaataaaattaaaaaagatcaattgcagctattcttgtcaccgtttctttaatttgtctcttacttcacgcaagttgttcacggctcctctttatatgtacacgtactatctctcatgcatttcattcatcacatacaacactctctccaaagttcaaattaagactgaggggtgagaaagagagaattgatatgggtgccggtctagttgcgttcctcttaatggttcttgtgcaattggtctatgcagtgatgaacattacttcaaagcttgcaatagaatctggaatgagccctcttgtccttgttgcttatcgacaactctttgctactgtgtccattgctccctttgcttattggctcgagtggaatacgcttcccaggattacacagcgtcttatgattcagatattattttcgtccctgaccggagttacaggaaatcagatgctttattttgtggggctgaaatattcatccgctacaattgcatgtgcactgacaaatttgctcccagctttcactttcatccttgcagttctcttcagacaagagaatttgggaatcaagaagagggctggtctagcaaaggtattcgggacaatattgtgtgtgagtggagccttgcttttgtcattttaccatggaaaaaccattggtttaggccaatcaagtattcactggagatatgctgagaaaatggaaggaactagctcttctggcaaaggaaacatgttcctaggccctttggtcgtaattcttagcacccttgtttgggcagcatggttcataattcaaaaagacataagcaagacatttccagctccttacacgagcactggcttaatgtgtttcatggcaagctttcaatgcgtgatcattgccgtgtgtgtcgaccacagggcctcagcttggtcactccacaatgctatgagactttcctctgccctttatgcgggaatattttgcactggattagcctattgcctcatgtcgtggaccattgagagaaaaggtcctctttatgtctctgtatttacccctttgcagcttgtcctcactgccattttgagctgggctttgcttcgggagaaattatatgttggaactgccgtagggtctctcttgatagttttgggactctattctgttctctggggaaagagtgaagaggtgaataagggagacggtattgaagaagatgcagttaaagaagcagtcaaggattcgaagaatgacatggaattgcaatcatatgtgccatccaatggtaataatggtcgtgttattgcatgaagaagggacgcggcagagtgagattcctcgcaagatgctagtagctaaggattgagaaagtttcggttatttgtctttattctatttttgctccctaccagtaaatttgaattttgatatgtgtaatcttgtgtcacatttgaaagtggtccacaactctttgcagttgcattgaagacatgtattaatattattattattattatttatatattaataaacccggaatcagttattcctttaaaaa

SEQ ID NO: 381 - DNA, 2548 bp, Glycine max
  Clone ID: PAT_MRT3847_71429C.1
ccacgcgtccggcatctgattcgttcgttcactttcactttaccaactcctaacaatttctctctgtttccttcttcaccgcatcaatggagttggacggcgttctcctcggcatgtgcaaccctctcctcgacatctctgccgtcgtcgacgacgctttcttgcaaaaatacggtatcaagttgaacgatgcgattctcgctgaggataagcacaaacctatgtatgaagaattggctaacaatcctaatgtggagtacattgctggaggtgctactcagaattcaatcagggttgctcagtggatgcttcaagcaccaggtgccacaagttacataggttgcataggaaaggacaaatttggagaggagatgaagaagaaatgtacacttgatggtgtaaaggttaactattatgaaatcgacaatacacctactggaacttgtgctgtttgtgtggttggcggtgaaaggtcccttgttgccaacttatcagctgcaaattgctataagtctgagcatttgacgagaccggaaaattgggcattagttgaaaaggccaagtatttctacatttctggctttttcctcactgtatctcctgattccatacaattagttgctgaacatgcagctgcaaataacaagttcttcatgatgaacctttctgccccatttatctgtgagttcttcaaggatgcactgaataaagttctgccatatatggactacgtttttggtaatgagactgaagcaagaacattttctaaagctcaaggctgggagactgataatgttgaggaaatagctttgaagatttctcagttgccaaaggcatcggaaacacataaaaggattacggttatcacccaaggtgcagatcctgtttgcgttgccgaggatggaaaagtgaaaatttaccccgtgataccgttacctaaagagaaattagttgacacaaatggagcaggagatgcttttgttggaggatttctttcacaattggttaagcataagcccattgaagaatgcattagagctgggtgttatgcagccaatgttatcatccaaaggcctggctgcacatacccaccgacgcctgattttcattgagtgattcctctttttctgttactgctatgaatttttttctttttatcattgagaaggattttaatagccacactctaactggtgtggggttttttaaccccccggctagggaaaacagcgtgaaaaagttgcagcaagagataaaacttgaataagttcatatatttgaagtccgatcaagcatcaattctcatattgctgtttgtgatcttttttcattttcattttttccaccttttcttctttttattacagtttatgctgtatttgtacccctatcaaggcacatgtatcttaattatgctgttcgtgatcccaaccttcaagcaacacacggcaacaagtggaagaaaattgcagcacaagtccctggtcgcacagcaaagaggttagggaagtggtgggaagtgttcaaagagaagcagcaaagggaaacaaaggggaataactgcaccattgacccaattaacgatagcaagtacgagcatatccttgagagttttgcagagaagctagtgaaagaaaggccttcaacatcaacatcaacatcatttgttatggctacttccaacagttcttttctgcatgctgatgcaccggctcctgcaccagccttgcttccgtcttggctttccaagttccaatggcactgcacctgtgaggccaccctccccttctgtgactcttagtctttctccctcgacggtggcagcgcctcctccatggatgcagccccccgtcagaggacaggacaatgctagtcctcttgttttggggaatgtggcgcctcacggggccgttctagcatttggtgagaacatggtgatgtctgagctagtggagtgctgcaaggagttggatgaagtgcatcatgctttggccgggcataagaaggaggcagcatggcggttaagcagggtggagctgcagttggagtctgagaaggctgggcgaaggagggagaagatggaggaaatcgaagcgaaaatcaaagctctgagggaggagcaaacggctgcattggatagaattgaagcagaatatagggagcagttggcagggctgagaagagatgctgaaagcaaggagcaaaagttggctgaacaatgggctgcaaaacacttgcgacttactaagtttctagaacaggtagggtgcagatcaaggctcactgaaccaaatggaagatagagtgacatcaatcattcacaaattgggaaaatctagtttgcttttacttattattatgtcttgaatttatatgatatgaactttatagtcatagtagttttgttcctgtcatttttctaaaatatgttgttacatatggttattgatatcatccctatcttttcatacaacttgaggacttgcattagcggttgagttatgtttaaatataacatcctttatgaatatgaactttgttgttattc

SEQ ID NO: 382 - DNA, 158 bp, Glycine max
  Clone ID: PAT_MRT3847_71501C.1
ctagcaacatagaaagcacaatattgtaccaataatggcagcctaaatattttgcctcattatgctccttggtgcttctgcaagtgctgctacggcgagcattttcccgcaatgctcacaagctcctatagcttcccttctcccccatacctctcacc

SEQ ID NO: 383 - DNA, 132 bp, Glycine max
  Clone ID: PAT_MRT3847_72097C.1
ggtggaaagggttggaaaaacgtccatttaacttttaacaatttgaaaataaccctactttcccaaactaaacccactgcaaaaggcaatgtttgtgaacccccaacaaagcttttggacgggaaaaagttc

SEQ ID NO: 384 - DNA, 148 bp, Glycine max
  Clone ID: PAT_MRT3847_72935C.1
cttcactcagggtgttcaactccgcaattgcctcatcaaatgcttgcttggccaaatggcatgccctctcaggagagtttcatatctcataataaatgactgagaaattgagtgcatgtccaataccgattgtatgtgttgattgaag

SEQ ID NO: 385 - DNA, 1499 bp, Glycine max
  Clone ID: PAT_MRT3847_73198C.1
tacggctgcgagaagacgacagaaggggataaaaggagatccaaagtaaagaacacagatggcatgacaccacgaaaccaaattaaaaactgcgccttctctgtctctgtttgttcttctcactttatattctctctctgtgtatatctcttcactcttattattccttctcttctcaacgacgatggaggacccatcagcagcaacaacgttgttgctgaacagcgaatattcgaggctgttcgtcgaggacacggacttgtacaatcgcattgtgttgggaaccctcttgccgcacttcgtgtggggcccactcccgcacttcctccagacgtggcttcgcaattacctcggcggcgtcctcctctacctcctctccggcctcctgtggtgcttctacatttattattggaagcgcaacgtttatgttcccaaagatgctattccctctcgaagagccatgctcttgcaaatatctgttgctatgaaagccatgccttggtacactttgcttccaactgtttcggagtacctggtagaaactggctggacaaagtgctatcctagattatataatgttggttggcttgcataccttgtgtatttagcaatttatctaagtattgtagagtttggtatttattggatgcacagagaactgcacgacataaaaccgctttacaaatatcttcatgctacccatcacatctacaataaacagaacactctctccccttttgctggtttggcatttcaccctcttgatgggatacttcaggcattacctcatagcctttgtttgttttttatgccaatccattttactacacatttagtcctcatattcattgagggcatttggactgctaatattcatgattgcattcatggaaaattgtggcctgttatgggtgctggttaccacaccattcaccacactacatatcggcacaactatggccactacaccatatggatggattggctatttggaactcttcacaaccccgaggaggacgagggcaaggctatgtgatgaaatgcagacttgctttggcagtcattgattatcatgtttggattgttgaaatgtcgttacttgcatgtatagcataaatgcgtgagctatatttttctgatgtctcatcacaaggtgatggctctatattagagagacaggggttaaagtggagcttccctgtctcaaatcccattgttagtgtatgtggttgaggttattttctttctcaaattatgtggtagagttgagatagtaatgcagttttctcttttttgaaggtaatgcagttttctctgatgtgacaatagatggtctccctattaatgctttgttttgtttcattttctttccttctatgtttatagaataaagcacactctctaagggtgtgtttggttgtaaagagaaaagttgaagctgtgactagtgaggaagaactattctctcaaaaaaaaaaaaaaaaaaaaataaaaataaa

SEQ ID NO: 386 - DNA, 800 bp, Glycine max
  Clone ID: PAT_MRT3847_7340C.1
cggtccggaattcccgcggtcgacccacgcgtccggggttctcttatttgtttgcggcgaagagtaatgaggagcttacatcaattaagagagcagcatacctcaccaccagtgtgatgaaaaactttgtggttactaaacttgagaatgtaatagatgaggagaagaaaatctctcattcaacgttgatggaggagactgagaaagttattctggaaccttcaaaagtcaattgtaagctaaaggcagataacgttgatatttgttaccccccaatttttcagagtggtggagagtttgatctgaagcccagtgctgtcagcaatgatgagttattgcattatgattctgccagcgtgattatatgtgcagttggagctcgatataagagttattgctcaaacatagctcggaccttcttgattgatgcagaccctcttcaaagtagggcttatgaggttcttctgaaagcccatgaagctgtcataggttctatgaagcctggaaacaagttaagtgttgcataccaagctgcagtttctgttgtggaaagggatgcacctgacttgatttcatatttgacaaaatctgctgggacaggcatcggcattgagtttcgtgaatcaggattgaatcttaatgcaaaaaatgaacagataattagagaaggcatggtctttaatgtgtcacttggtgttcagaaattacagtgtgagaacagtaagtctaagaacaagcaattctctttgttgcttgctgacacagtcatcatcaccaaagataagacagaaattgtgact

SEQ ID NO: 387 - DNA, 296 bp, Glycine max
  unsure (1)..(296): unsure at all n locations
  Clone ID: PAT_MRT3847_73437C.1
cacatacttttttctataatatatacncacttttcaccaaaggcaataaacattacacggcataaagttcatatctaagtccaagaaatttaaaaaatcaaatgatcccaccaccaaaaacattgaaaaatggtcaaagactcaggttttgttttggccctgaccctaaccatggcgggcactagagctaccaccagaccattttttaaaagtgctaagtcgatgaaatccttgtatgcaaaagccctaaccttgacgaactagaccgatagctcctcattgtagccgttgaaatt

SEQ ID NO: 388 - DNA, 1662 bp, Glycine max
  Clone ID: PAT_MRT3847_73498C.1
gaccacttcctactacacaagaactagctataggcctcaattagttattatattaatttggtctaagtagttgttattacttgtgtagtagttcttctccaatggctgatttaggttcagcctcttccaagagaatgtggtgttccgttccagaaagaatgcagcttcacttggccatgttggccttgcagtttggctatgctggattccatgttgtctcaagagctgcacttaacatgggcgttagcaagcttgttttcccagtctatcggaacatcattgccttgcttctgctccttccctttgcctacttcttggaaaagaaggataggccagccatgactttaaacttcgtctgccagttctttcttctggcacttgtcgggattacagcaaaccaaggtttctacttgctagggttggagaacacatcccctaccttcgcatcagcaatacagaactcagtcccagccattacatttctcatggcagccatattaagaatagagcaagtgagattgaaccgaaaagatgggttgggtaaggtggcgggaacagtgctatgtgtggttggagccaccgtgatcacactatacaaaggtccaacaatatatagcccaacaactggtgtgaacataaacaacacaagagtgacacaagtgtttgaattggggtcagtgtcactgggagatgcaaaggggaagaactggaccctagggtgcttatacctcattggacactgcttgtcgtggtctggttggcttgtgttgcaagcaccggttctcaagaagtacccggctcgcctctctgtcacttcctacacctgtttctttggactcttgcagtttctcgtcattgctttgctccttgaaagagacgcgcaggcatggcttttccactctggtggagaagctttcactattttatacgcgggagtggtggcatctggaattgccttcgctgtacaaatatggtgcattgacagaggtggtcctgtgtttgttgccgtctatcaacctgttcagacttttgttgtcgccatcatggcttccattgctttaggagaagagttttacttgggcgggatcattggtgccgtgttgattgtagcgggactgtaccttgtcttgtggggtaagagtgaagagaggaagtttgcaagggagcagcttgcgattgcatccactgagcatagcatcataaggcccgcaagccacgccaaagcatcacttgctcagccactcctttcttcatcaacagagaatgtttgaacaagatcaaaattccaacttcaaaccacacaccatttttttggtgagaagaagtaaaagaaaaaaggggaaaaaagataccagctataccttactagttactactgctactactacattatgtcagcaagtttgtgtgtgttggaaccggttttcatcttttcctttctttttttttttatttaattcaaatgcttttttagtaggtcatttagaatatgagagaattgtgggaatggttgtaatggtggatgccactttaagtggggctagagcctgaaatccccccatatgcttttgtatgtcaattaatttatggtttgatttaagaaatgaatttttgttttttgggtcaaaaaaaaaaaaaaaaaaaaaaaaaaaaaaaaaaaaa

SEQ ID NO: 389 - DNA, 472 bp, Glycine max
  Clone ID: PAT_MRT3847_73499C.1
cacaaaaactatagttctaggcctccgtttggtctaagtagtagttgttacacacttcttcattcattctccaatggctgatttaggctcagccccttccaagagaatgtggtgttccgttcccgaaagaatgcagctgcacttggccatgcttgccttgcagtttggctatgctggattccatgtcatctcaagagctgcacttaacatgggcgttagcaagcttgttttccctgtctatcggaacatcattgctttgcttttgctccttccctttgcctacttcttggaaaagaaggagaggccagccatgactttaaacttcgtcggccagttctttcttctggcactcgtcgggattacagcaaaccaaggtttctacttgcttgggttggacaacacatcccctaccttcgcatcagcaatacagaactctgtgccagccattacattcctcatggcagtcatatta

SEQ ID NO: 390 - DNA, 196 bp, Glycine max
  Clone ID: PAT_MRT3847_73971C.1
cgtactaatttactactgaatattgggggctggggcaccagtgaaaagggattgggtaaaaagaaaacggcttatatacacataaattagaaataacaatttttatttttaggcccgcctttttcttattctgagaacagtttcttaattaattagctatcttgaattgggactaatgggcaggagccaccgaatt

SEQ ID NO: 391 - DNA, 2084 bp, Glycine max
  Clone ID: PAT_MRT3847_74475C.1
cgctgcaggccgcccaacacaacttccttgtgcagccaccattattgttgttattggagatttcaattctttgtctttcaaactcctcaagttgggtttatgtgatgatggctctcaacatctcttctccagctgaagtcaagtccatttttttcgctgattccttcaagtctaactgcctcacagcaaaattctcaggtgggtttgcttttaagagaaaagagcgtagagcagcatctggaggacgggtttattgctcagtgcaggcaacaccaccaccaccagcctggccgggacgagcggttccggaacaaggtcgcaagacttgggatggaccaaaacccatttcaattgtggggagtactggttcaattggaactcagacactagatattgtggcagagaatccagataagtttaaagttgtggcacttgcagctggttcaaatgttactcttcttgcagaccaggtaaaaagatttaagcctcaacttgttgctgttagaaatgagtccctaattgctgaacttgaagaggccttgcatgatgttgaagaaaaacctgagatcatccctggagagcagggaatcattgaggttgctcgtcacccagatgcagttagtgtagtcacaggaatagtaggctgtgcaggactgaagccaacagttgcagcgatagaagcagggaaagacatagctttggccaacaaagagacattgattgctggaggtccttttgttcttcctcttgctcagaagcataatgtaaaaatacttccagctgattcagaacattctgccatctttcagtgtatccaggggttgccagagggtgcacttaggagagttattttaactgcatctggaggtgctttcagggattggccagttgataaactgaaagatgttaaagttgctgatgcattaaaacatcctaactggaatatggggaaaaagataactgtggactctgctaccctttttaataagggtctagaagtaattgaaactgcatctggaggtgctttcaactatgatcatattgagattgtcattcatccacaatcaatcatacattcaatgattgaaacacaggattcatctgttcttgcacaattggggtggcctgatatgcgtttgccaatcctctatacattatcatggcctgacaggatttattgttctgaagtcacttggccacgccttgatctttgcaagcttggttcacttacatttaaaactccagataatgtaaagtatccatccatgaatcttgcattttctgctggccgtgctggaggcacaatgacaggagttcttagtgcagcaaatgaaaaagctgtagagatgtttattgatgaaaagattagctatttggatatattcaaagttgtggagctaacatgtgagaagcatcaaaatgaattggtatcctctccttcccttgaggaaattattcactatgacctgtgggcgcgaaaatatgctgctagtctgcaagactcttccagcttcactcctattcttgcatgaggatgattaaactagggatgtggctgatgcttcccaattgcctgctttcaccataatttcttcgggcattgaacaatgtagaatggtgcattccacagatgttgaaaattaaataggttttttgtttatggaatgttggtgttttaacacctttcaattgatcttatagttttgtcgtaatttcatggaaaacgatgtctttttaatagtcaataggagcctaggaggttggttggttgcctatgaatgtgtcaaagtcaagaaggggaatggattttctcatattcaaaatttacatgatgtggtcaactagaagttttgtatttctctttttctaatagaattaaataggtggagtcttacaaaaattaacagagatagacacaaaagttgaccaatcaccaatcactttcataaaaggattccttttctttttcctcagcacacattcgttggctgatattattatatgaaattggtattatttggatatcatagctattacccttggagaaaagaattattgactctgcttgacggttttgcttttct

SEQ ID NO: 392 - DNA, 344 bp, Glycine max
  Clone ID: PAT_MRT3847_74488C.1
agcaaatcaccaattcctccgagttcgagcgaccatgtcggggcgtggcaagggcgggaagggtctgggctaaggcggcgccaagcgtcaccgcaaggttctccgcgacaacatccagggcatcacgaagccggcgatccggaggctggcgaggatgggtggcgtgaagcgcatctcggggctcatctacgaggagacccgcggcgtgcttaggatcttcctcgacaacgtcatccgcgacgccgtaacctacacggagcacgcccgccgcaagaccgtcaccgccatggacgtcgtctacgccctcaagcgccaaaggggcaccctctacggattcggcggct

SEQ ID NO: 393 - DNA, 298 bp, Glycine max
  unsure (1)..(298): unsure at all n locations
  Clone ID: PAT_MRT3847_74583C.1
cacacacaantactanaagtgcttccttacaatcagaaccaacaacnactatggcaagttatcaaaagcactactatgatcngggttcgcaanggttgangagtatggcaacgttgagaagcaaaccgacgaatacggcaaccctgttcatgctgctngtgtcacctatgtagccaccagaactgctgctggtggttacagttntgacnttaanangcaacgtgatnccaccaatgcctacgncgtaganactggnagacagcattctagtggnggtacgatggtgacactaataaac

SEQ ID NO: 394 - DNA, 674 bp, Glycine max
  unsure (1)..(674): unsure at all n locations
  Clone ID: PAT_MRT3847_75107C.1
cccacgcgtccgcccacgcgtccgacggctgcgagaagacgacagaagggggaaaagaggcgagggtagctcatgacatgttccttgaaggaaaaaaaacgcagttgaaagattgaagctcgagatgtcggggaaaggcgcaaagggtttgataactgctaagaacccttcttcctctaaggacaaagacaagaaaaaacccatttctcgctcctcaagagccggtcttcagttccctgttggacgcattcatcgtcttctgaagtcaagggtgacagcacatggaagagttggggcaacagctgcagtttattctgctgccatcctggagtatttaactgcagaggtgttggagttggccggcaatgcgagcaaagatctgaaggtgaagcgtattacccctagacatctacagctcgccatccggggagatgaagaacttgataccctcatcaaaggaacaatagctggtgggggtgttattcctcatatccacaagtcccttatcaacaagtcctcaaaggaatgaggagggtttatacattatttgaatcaagaaattgactgtaaatttggctatatcttttgatatggataatttgctccctgcattagtttggttgaactcaacttcaaaagaaatatgaaaatgtcttatttcttcatttgccnaa

SEQ ID NO: 395 - DNA, 397 bp, Glycine max
  Clone ID: PAT_MRT3847_75209C.1
cggactcgtgggccaacacctggctcaactcatgggctcactggctcaaggctgaccccagaaagtacctcaagatgaaggagaggcttgtcggcgtctctgaggagaccaccactgttgtcaagaggctataccaaatgcatgagaccggcgccctcctcttccctgccattaacgtcaacgattacgtcaccaagagcaagtttgacaacctgtatgggtgccgtcactcgctccctgatggtctgatgatggccactgacgttatgatcgccggtaaggatgctgcggtctgcggatacggagatgtactcacgggttgtgctgctgccctgaagcaatgctgagcccgtgtcattgagaccgagatcgaccccatctgtgccgttcaggctct

SEQ ID NO: 396 - DNA, 581 bp, Glycine max
  Clone ID: PAT_MRT3847_7526C.1
atcaccactggctacggcgcggctgtcatcaccgcaggacgcggcggagtcgagaagggatcgcaggttgccattttcggcgccggctgtgttggtctttccgtcatccagggagctgtcaagcagggcgcttccaagatcatcgtggtcgatgtcaacgactcgaagaaggagtgggccaagaagttcggtgccactgacttcgtgaacccagccaaggatctgaaggagggcgagaacatccagagcagactgatcgacatgaccgacggaggatgcgactacactttcgactgcacaggcaacgtccacgtcatgcgatctgctctcgaggcctgccacaagggctggggagagagcatcatcatcggtgttgctgctgctggccaggagatttccaccagacctttccaactcgtcaccggtcgtgtatggaagggttgtgctttcggcggtgtcaagggccgcagccagatgggcagcctcgtgcaagactacatggacaacaagctcaaggtcgacgagttcatcacgcatcgacagccgttgagcggcatcaacgatgctttccacgacatgca

SEQ ID NO: 397 - DNA, 822 bp, Glycine max
  Clone ID: PAT_MRT3847_75496C.1
ccacgcgtccgtctctgcttcggctcataattgggggtggtatgcacaagtttctcatgtcacttgaatccggccatagtagctgtccacaatgttttctcgcagatcaagtggaagagtggctagtggtagagttgcattagaaaatggagtcccattaccactgttgcctgatcctaaagcaaatttacaatgggatgaggttaaaccactttcaggaaaaccatactggcatagtgttctttcgcctacaaatcttcaaccccgttataacttgatgccggggatgaacttgcggtcaaaacttccttctaatgaggtccctactattctcatctatgggggcaagagctgggacatggtgtattatggacaaagcaaacagaaggcttttggtgtcacaggctggaaaaaatttgttattgataattgtttgagggttggagatgcttgcatttttgagctcatggaaagcagtgacaagaaagtcatacttgaagttcaaattcttagaggtgacatcccatctgaatggcttggaaatgaaatgatcataggtcaagggaatgaaatgatcataggtcaagagaatgaaatgatcataggtcacagtcgggaaaatccaattgtccttaactagtattctaaccatttatgtatttcattttccttttcattctgcgatggttcagggttattggataactttagtatgttagtatatggatgttgtccctgcctcaacttgttaggagtagtgaatttacgtgctatgttgaatgtctaaattctaaataccagttgaattttattattgtcatc

SEQ ID NO: 398 - DNA, 487 bp, Glycine max
  unsure (1)..(487): unsure at all n locations
  Clone ID: PAT_MRT3847_75960C.1
gaatagaggaaaacatgtaaaaacctttagggagataaaactaatgacatcaagacctcgattgagagacttgtcactttgatactatatgagagaccattcgtccatgcttgacaaacagcagcgttacaagaacatcatctcaacctagtctgcatattcacgggcttatctacacgcttattcaaaagacactcgatgatgccggcgccagacctgcggcctgggcgcatctccgcgtcctccggcccgccttttactcctagtccatgccgtcctcgtcctcctccatgatcctcatcttcttgacggcctgcgcagcgtcgttcctggtggagctgttggggacctggatcaagatgtccgacttgatccccgtctaagcgttcaccagaccgccgctccggtccaccctgtanaccatctcgtccttgccgggcgcggcgtgaatgtaaaccgtgcagttctcgtagatctcctcctggat

SEQ ID NO: 399 - DNA, 4044 bp, Glycine max
  Clone ID: PAT_MRT3847_76010C.1
ggctcgagattcgtcattcatcttccatcatccatccactttcctcaatcttccattccagatctctcaccttcttcttcttcctctgtgccacccttttgttccatgattgttttttgtgtctgtatcagcttgatctttttttttttgttttccttgttgtaaaaacatttcaatctccaaggtatgtactgggttcttgtttgaattgttcttccatcttttcatgccacaaagtatttgaatttttagattgtctgattcagttatggctcgagtacgaaatgatagtatcaaggagatattcacatgacagttattgaggaaaagaagatcgcaactcaattaatgtgatttggacacgtgcaaagaagtccactcgcattggggaggagaggttgtggtaaaggatctaaaaggacattggacaaaattattaagggagcaacacccactccttcttcctatatttcataactctcatcattcattcattcattcgtcattcatcttccatcatccatccactttcctcaatcttccattccagatctctcaccttcttcttcttcctctgtgccacccttttgttccatgattgttttttgtgtctgtatcagcttgatctttttgtttttttccttgttgtaaaaacatttcaatctgcaagataattattggcagcttcactaatatcttttaagactacatactttagctaggcaatcacatttcttgggataatgttgggaggcaacaacggaaattgcttgcttcctgttttcttggacgaaactcaatttcagcatcaaactaatgtgtcaaatcaattgcagttgtttggaaatttacaagctggatgtagtgttgacccagttaattactttggaaatgagcatatcagctccatgattcagcctaataaacgaagcaaggaaatggaagatatatcaaaacaaaggcttcagatttccttaaactacaatgttcatcaagatgatgccgaacgattagcaagtattccaaatcctaaccccgtgtcaacaggattgaggctttcatatgatgatgatgagcgtaactcatctgttacttctgcaagtggaagcatggctgccacaccgtctatcatattgtctcttgggacatatcagaactgagcttgataggcagcaagagtgagtatgttaaacttcaacaactcaagggagtgaggtccacatgcgcttagcccaagtttttttttttttttttttaggtccccaatatattcgggtgcaatgaaagcatattctgtccagaactaaatacactggccttttgttctcgtgtcaatttctaaatccaccaccacaccctctcttctattctctattattattatctccacacccttcactctctctcactcttctctcgaatcttccaccgcaatggccaccgctgccgagaaactctccgctctcaaatccgccgtcgccggattgaacgaaatcagtgagaatgagaagaacggattcatcagcctcgtcggccgctatctcagtggcgaagcgcagcatgtggaatggagcaagatccagacgcctacggacgaagtggttgtgccttacgacactttggcgccaactcctgaaggttcttcggaggtgaagaatctattggacaagcttgtggtgttgaagctaaatggaggcttgggaacaactatgggttgcactggtcctaaatctgtaattgaagttcgtgatgggttgacatttctagatttaattgtcatccaaattgagaatctcaattccaaatatggaagcaatgttcctttgcttttgatgaattcattcaacactcatgatgacactcaaaagattgttgaaaaataccaaaactcaaatattgagattcatacttttaaccagagccagtatcctcgattggttgttgaggactttttgccattgccttccaaagggcatactgacaaggatggatggtaccctcctggccatggtgatgtcttcccatcattattgaacagtggcaaacttgatgcactattgtcacagggtaaagagtatgtgtttgttgccaattcggataacttgggagctatagttgacttgaaaatcttgaatcatttgatccagaacaagaatgaatactgtatggaggtgactcccaaaacattggctgatgtaaagggtggcactttgatttcttacgaaggaagggttcagctcctggaaattgcacaagtccccgatgaacatgtcaatgagttcaagtcaatagagaagttcaaaattttcaacacaaataatttgtgggtgaacttaaacgcagttaaaaggcttgttgaagctgatgctcttaagatggaaattattcccaatccaaaggaagttgacggaataaaagttcttcagctggaaactgcagctggtgctgcaataaggttctttgacaaggctattgggattaatgttcctcgatcacgattccttcctgtgaaggcaacttcagatttgcttcttgtccagtctgacctctacactttggaagacggatttgtcattcggaacaaagctagggaaaatcctgaaaacccttctattgaactgggaccagaatttaagaaggttagcaacttcttgggccgcttcaagtcaattcctagtatcgttgagcttgacagtctaaaagtggctggtgatgtatggtttggagctggtgttatcctcaaggggaaagtcagcattgtatcaaagcccggtgtaaagctggaagttcccgacggtgttgccattgtagacaaggaaattaatggcccagaggacctgtgaggaagacagatgactttaactaaagaatgaattgtatcagaccgtatcttatctatctatatggtctagtgtttttactactcccatgtttgataggtaaagaaaataagaagtctttttgttgagaggatgtcttggtgtggatctttactccattgtcttggaattctgtttagaacagcaaaaaaatgacaagtttggtgataagtttcatgtcatttggtacaggtgtccccctgtcgaacaaatcaaggcctagaaaaaagaagtgttctcacaaggagctgaacaggggaaggaagggtttggagacagtgaagttgatgatgatgcctcatatatagatcctaataacttcctgaacattctggctgcgcctataaactctactcccaagagctaccaagatatggagaatctgacttgtagagcatgcaaggtgaagacagtttcgatgttgttgatgccttgtaggcacctgtgcttgtgtaaggattgtgagggatttatcaatgtttgtcctatatgccaattgataaaaactgcaagtgttgaggtgcatctgtcttaacttacaaagaacgggatataagtcactgttttctttgtgatttatctgcctaatttcttaatgttcagctcaaaataattttctctataacaaaaatcgactatatctaaggatattattatgtcctctttctcagtgacttttacctgattattgatgatgacattcatattattactatcatgatgaaatagagaaattggggaatataatgagaagtatgaaatggaattgtgtgaattgttcttccttcttgtcatgccacaaagtttttgactttattggtagtggattgcgttgcagttttccatttcctcctctcgtgaccatcaaaacacatgtccctgaacatcaagatagctttttgttgacatgttctgttctgtatctcaccatttaattagttttattaatctgagtgaaatttttgagtgctttcatatttacaaatttatatatcacttaagaattaagatcttcatcttggtattatgcatacatgtaacctttgattactcattttgtcttggcgatgtcgtagatgcgatcaaattctaatgaacattcctcaaatatatttgggaaggctatggcttccatttcatgctatactgttcaaaaaaaaaatta

SEQ ID NO: 400 - DNA, 1512 bp, Glycine max
  Clone ID: PAT_MRT3847_76330C.1
atgaacagtaataatttttttcatcccaataaaaatatttttttaactttaaatgctgtatttttgtttcttcttttttcctgtttccgtagtttgggtctgtttttgcgttgcagacatcccacacacaacacattcacaacacaacatttgatttctctcttttgtcatcctcaaaatccacaatctttcctccttaatatctccgaccccaacaaaaagaaacaagcaagccatggattcccagatccatggcttgtcctcgtaaagtcaacccctttaccagaagaagatcaaatcgaagaaggcttaaaaaaaatgaagggttcgaacaaccggttcttcacggtggcgctggtggcggcgtggtactcctcaaacattggggtgcttctcctgaacaagtacttgctcagcaactacggcttcaagtacccaatcttcctcaccatgtgccacatgacggcgtgctccttgctcagttacgtcgccatagcgtggatgaaggtcgtgcctttgcagagcattcgatccagggtgcaattcttcaagatctctgctctcagcctcgttttctgcgtctccgtcgtgttcgggaacatttccttgcgctacctccccgtgtcgtttaaccaggctattggcgccaccacgcccttcttcaccgccgttttcgcttaccttatgaccttcaagagggaggcttggctcacttacctcacccttgttcctgttgttactggagtcatcattgccagtgggggggaaccgagtttccatctgtttggatttattatatgtgttgcggctacagctgcaagggctctgaaatcagtgctacaagggattttgctttcttctgaaggagagaagctgaattctatgaaccttctcctttacatgtctccaatggctgtggttttccttcttcctgcaacacttataatggaagagaatgtggttggcatcacgttggctcttgccagagatgattccaagatcatttggtatctgctgtttaattcagcacttgcatattttgtcaacctgaccaactttttggtcacgaaacataccagtgctctaacccttcaggtactaggaaatgctaaaggggcggtagcagtagtagtttctattctaatattcagaaacccagtgtcagtcactggaatgatgggttactcactcacagtctttggagttatactctacagtgaagccaaaaagagaagcaatgaaaggacaacctttagttataccctacaattacaacatttagttttcgttactgcacagtcaacctcaagatttctgaaggaaaatttgtttagcatgctagtgatcagaatccagagttttctgactataatatacattttttttacccacacgccagacctcattgaacgagtttctcgttgtattagcaatgatcgatgcagaaatagcccacagaacaaaattgctataaatgatgtctctctactttacctgtgttgggataattga

SEQ ID NO: 401 - DNA, 1757 bp, Glycine max
  unsure (1)..(1757): unsure at all n locations
  Clone ID: PAT_MRT3847_76332C.1
tcggaatncggctcgagataaaacctaaacaataattaatagtagttgatcggctntaaatgctgtatttttgtttcttcttttttcctgtctccgtagtttgggtctgtttttgcgttgcagacatcccacacacaacacattcacaacacaacatttgatttctctcttttgtcatcctcaaaatccacaatctttcctccttaatatctccgaccccaacaaaaagaaacaagcaagccatggattcccagatccatggcttgtcctcgtaaagtcaacccctttaccagtcaaacttaaccccccttctctccccctctgaaaccgcaggaagaagatcaaatcgaagaaggcttaaaaaaaatgaagggttcgaacaaccggttcttcacggtggcgctggtggcggcgtggtactcctcaaacattggggtgcttctcctgaacaagtacttgctcagcaactacggcttcaagtacccaatcttcctcaccatgtgccacatgacggcgtgctccttgctcagttacgtcgccatagcgtggatgaaggtcgtgcctttgcagagcattcgatccagggtgcaattcttcaagatctctgctctcagcctcgttttctgcgtctccgtcgtgttcgggaacatttccttgcgctacctccccgtgtcgtttaaccaggctattggcgccaccacgcccttcttcaccgccgttttcgcttaccttatgaccttcaagagggaggcttggctcacttacctcacccttgttcctgttgttactggagtcatcattgccagtgggggggaaccgagtttccatctgtttggatttattatatgtgttgcggctacagctgcaagggctctgaaatcagtgctacaagggattttgctttcttctgaaggagagaagctgaattctatgaaccttctcctttacatgtctccaatggctgtggttttccttcttcctgcaacacttataatggaagagaatgtggttggcatcacgttggctcttgccagagatgattccaagatcatttggtatctgctgtttaattcagcacttgcatattttgtcaacctgaccaactttttggtcacgaaacataccagtgctctaacccttcaggtactaggaaatgctaaaggggcggtagcagtagtagtttctattctaatattcagaaacccagtgtcagtcactggaatgatgggttactcactcacagtctttggagttatactctacagtgaagccaaaaagagaagcaagtgatactataatgcatcatcattcatgctctcggctgcagtgaaaggacaacctttagttataccctacaattacaacatttagttttcgttactgcacagtcaacctcaagatttctgaaggaaaatttgtttagcatgctagtgatcagaatccagagttttctgactataatatacattttttttacccacacgccagacctcattgaacgagtttctcgttgtattagcaatgatcgatgcagaaatagcccacagaacaaaattgctataaatgatgtctctctactttacctgtgttgggataattgagtactttttgtcatttattcttggaggaaagagttgtaaaattggatatctacacatctattgttcaactctatttacattcgtttattaatgatagaattcatacttttgcccatcgtccatcaaaaaaaaaaaaggacggcccgcccgcagtag

SEQ ID NO: 402 - DNA, 1919 bp, Glycine max
  Clone ID: PAT_MRT3847_77498C.1
ctcgagccgtaaattctcaacagattacaatcggtgggaagaagagattgagaaatggcagaatcctattcttaaggatgagacactacctgaatggtacaaatttacattgtttaatgaactctactttcttgttgctggaggaacaatttggattgactctcctgtgctatcttcgaatatgcggaatgaccaggatcgagtaagggagttagaaagtgcagttgtgaaagaaactgaagataaaatgagcgaccgaaaaaggacagttgtggagagtacaacggatagtacctatgattctgctgttattacaggacatgatcgtgcagatgaaaaattgtatgaagatgatgatgatgttggaagattcttgtacttggaaggagtggaatatatcatgtggtgtacatatgatgtgcacttctatgcctcatttgcccttcttgagctctttcctaggattgaattaaatatacagcgtgactttgctagagctgtcttgtgtgaagatggaagaaaagtaaagtttctggcagagggaaactggggcattcgcaaggtttatggagcggtgccacatgatttggggacacatgatccatggcatgaaatgaatgcctataacatccatgatactagcaagtggaaggacctgaacccaaaatttgttcttcaggtgtatcgagattttgctaccacaggtgatttggaatttggagtggatgtgtggcctgctgtccgtgctgcaatggagtacatggaacaatttgatagagatggggatggtcttattgagaatgatgggttccctgatcaaacatacgatacatggacagtccatggtgtgagcacttactgtggttgtctttggcttgctgctctacaagctgcagctgcaatggcccttgatttaggtgacagagaatttgcggaaaaatgcaaacggaagtttttgaaggctaagccagcatttgaagaaaaactgtggaatggtacgtattttaactatgacagtggatcaagtggtaacagtaaatccattcaagctgatcaattggctgggcaaaggtggcatgcatcctcaggactgcccccactttttgaggattcaaaaatcaaaagtgctctccggaaggtttatgatttcaatgtaatgaaagttaaaggaggcagaatgggtgctgtaaatggcatgcatcccaacggtaaggtggacgagacctgtatgcagtctcgagaagtatggacaggtgtgacctatggtcttgctgctacaatgatacttgcgggaatggaagaagaggccttcgcaactgccgagggaatatttctagcaggctggtcagaagatggatatgggtactggtttcagacaccagaggcatggacaatggatgggcactacaggtcccttatgtatatgaggcccctagctatttggggcatgcaatatgcaataaatcggcccaaggcaattcttgaggcccctaaaataaatataatggacagaatccacttatctcctgttattggaggatactctcataatgaaacaggtgtgagaaagattacaacaaaagcaagatgctttaacaattctgtatttcattgtgcttgctgatagttaacaagtaagaacataaaatttttgtataggtaacttttttcccattgtttcttacccaaccctcacctagagaagctgttaataatggcggtcaaagtctggggaaaaatgttttagaaataagcagagttcgattgtaacttttaatttatatagccacttaataggttacccactctatggcctttgctgtaactgttgtactgtacattcttatttatttgagctctcaagatataatattaattagcacattccagcttttaaaaaataattaaattatttatag

SEQ ID NO: 403 - DNA, 2256 bp, Glycine max
  Clone ID: PAT_MRT3847_77871C.1
cgacgctctaaaaaactcgaaactctgaaaaaagtacaaaccgctgcgaacaatggcaacgatcaaggccgtgaaagctcgccagatcttcgacagccgtggaaatccaaccgttgaagttgacgttattctcagcgatggaaccttccacagagctgctgtccctagcggcgcttcaacaggtgtttatgaggctttggaattgagggatggaggctcagactacctcgggaaaggtgttcttaaggctgtggagaatgttaattcaattatagcacctgctctgcttggcaaggacccaaccaagcagactgaaattgacaattttatggtacagcagcttgatggaactgttaatgaatggggatggtgtaagcagaagcttggagctaatgctattttggcagtgtcacttgctgtctgtaaggctggtgctgcagtgaagaaaattcctctgtacaagcacattgctaatctggctggaaacaagactttggtactacctgtgccttcattcaatgttatcaatggaggctcacatgcaggaaataagctagcaatgcaggaatttatgattctccctgttggggcatcttccttcaaagaagccatgaaaatgggcgtagaagtataccatcatctaaaggctgtgattaaaaagaaatacggacaggatgctactaacgttggtgatgaaggtggctttgctcctaatatccaggaaaacaaagaaggtcttgaacttctgaagactgccattgctaaagctggttacactggaaaggttgtaattgggatggatgttgctgcttcagaattttacgataacaaggataaaacctatgacttgaattttaaggaagagaataatgatggatcacagaaaatctcaggagacagcttaaagaatgtgtacaaatcatatgtgacagattacacaattatgtccatggcgattccattattccaggatgactgggagcactatgcgaaattaacagctgaagttggccagcaagtgcagattgttggtgatgatctcctcgtcaccaacccgaagcgtgtggagaaagcaatcaaggagaaggcttgcaatgcccttctgttgaaggtgaatcaaattggtagtgtaactgaaagtattgaagctgtgagaatgtctaaacaagctggttggggtgtcatggctagccacaggagtggtgaaactgaggataccttcattgctgacctatcagttggattagcaactggccagatcaagactggagctccctgccgatttgaaaggcttgccaagtacaaccagcttttgaggattgaggaggaactgggttctgcggctgtctatgctggtgccaaattcagagccccagtggaaccctattgattgtttagcccaagatcattaagcaacatttgaataagattctattgatgactgcatggcgcatgtattttttgcgaaaattaaacttgactactatcaagagaacataggtttttcgagcgtggaattttgaagcgagaaaataggggcagtagccaataaatgtgtctatggtttggcttgttataacaattatcatgtgtagtacaaattttggatgaattacgtctaaattgattttcctgcaaattactaattgtgaaatcgaaggcctatgctgtcgatcatgtggtgatctaagctctgctcgttcctcctttgaagtttatgtttgtcatcaattgacgcctaacttatttgctttgaaagaaacggaaaagaaggtccaggagctcaagtttcagcgcaagtagcttaggcctcatgatggaataataaactttgctgcgcccccttccgggggaaaaggaaatattgtagtaacttgataaaactttgttccaatcttttcgttattgtaaatgtcaataaattggtttcctagttgcttcctaattatatgttgtagttatcccaaagataccaatagaatagtagatgtgaaaagtctgtacaaaaatatcatgttctttgaacagaaatgcttattcagagggatcagaatgaataaagcttgaaggggaagaaagaaatgaatgtgatcaattcacacgactcccttatattgcctttaagtgggttccacaactgtatttgtaatttgtcatgcgttacgttatgatggcccacaataataaccatttaccgtgtcagatgtacaaataattaataattccctctcattcgttcttaaaaaaaaaaaaaaa

SEQ ID NO: 404 - DNA, 470 bp, Glycine max
  Clone ID: PAT_MRT3847_78078C.1
gttaaaagctttttttttttttttggaacgggggcaaaacactttttaacaaattagtattaacttaaacaaaggcgggtttaaacttaacaggggtaaatattgggcccccacccgcacaacaaattactttttggtttggaaattacgctatcattgggcacttccggcaacataaggggaccggattactatggaaattttcttttctataaggcaacacaaaggggttggtatttattatttgggaagggaattggaagccgcattgtttctgtttcttttgggggggcgggggaagacccgtcatttttatagtctttggcttttccccaccccccagagtataaacccactgggattatgatgcccccaatgatgcttcccaaggggaggggtttttctagaagggaggggcccaaagttgtaacaatgatcatgcaaagaggattgaaagatgttacaaaccc

SEQ ID NO: 405 - DNA, 291 bp, Glycine max
  Clone ID: PAT_MRT3847_7831C.1
gaaaaaactactgtacaaaatcatactcctctagatcagatgctggttccagaatactcggaagcttttcctgctcaacatgccgcttcaaagacaccaggtgccatattatcttattctgaaagcggctatgccgaggtacatacttgatcaacggtgactgatcatgtcacgaacaaaacaatttctgagcaccttgattccaacaaatcaaagggtagatatccggttgaccgttcctcatgtggctccaacacggcctataactgggatgtggaaactgatgcgcta

SEQ ID NO: 406 - DNA, 2174 bp, Glycine max
  Clone ID: PAT_MRT3847_7877C.1
ttcccgccccacgcgttcctgtaccggcttgcgccgacagaccgaacagacatgggggctcgagcagactcatcgagccagctgcgtttgttccttcttcagttgggtttgattgcgagtgagtgacgatgggcgcgagcagcgaccctacccaagacggttccgacgagcagcagaagcgttcggagatctacacctacgaggccccctggcacatctacgccatgaactggagcgtccgccgcgacaagaagtaccgcctggccatcgcttccctcctggagcagtatccgaaccgcgtggagatcgtccagctcgacgactccaacggcgagatccgatccgatccctccctctccttcgagcatccctaccctcccaccaaatccatcttcatccccgacaaggactgccaccgccccgacctcctcgccacctcctccgacttcctccgcgtctggcacatctccgaatcctccgttgaactcaagtccctcctcaacggcaacaagaacagcgagtactgcggccccctcacctccttcgactggaacgaagccgagcccagaagaatcggcacctccagcatcgacaccacctgcaccatctgggacattgagaaggaaaccgtagacacgcaactcattgcgcacgataaagaggtctacgacatcgcctggggcggcgtcggagtcttcgcctccgtctccgccgacggctccgttagggttttcgatctccgcgacaaggagcactccactataatctacgagagctcggagcctgacacgcctctggtgcgtctcgggtggaacaagcaggacccgaggtacatggcaacgatcatcatggacagtgcgaaggtggtggtgttggatattcgttttcccacgctccctgtggtggagctgcagcggcaccaggcgagtgtgaacgcggttgcgtgggccccacatagctcgtgccatatatgcacggccggggatgattcgcaggcgctgatttgggacctttcttccatgggtcaacccgtggagggtgggcttgaccctattcttgcgtacactgccggagcggagattgagcagcttcagtggtcgtcttcgcagcctgattgggtcgctattgctttctccaccaagcttcagattcttagggtttgaaatttgatttctctgaaacttctgtttccctgtatgtgcaaacgaaaattggggatactttagatttgaaaacaaaacacagttgtattgttgtttctttttattgttgaaactaatgctaaccccttggtaatttctggctttgggacgaaagtagttttgattagggtttagggcgtaaaactagccttagtttgtttctgctaagttagtctgcaagtattttaaagaaattttccgtcacatcaatattggcttcaatgtcgaggtttttggattatctgtggctgcattgtgaaggattgaggcgaaactgcgactgatattttgcagtttcgccgcaattgcgggaaattgtggacaaatatggctttagagagtctaaaaccttgatattgttgtttgtcgcattcttgtttactaggaaatggaatgaccttgtatgtaaatgtttttgcttcggttttgtccatgtttcctatgtgactctttaactcaaagaaattcacttatgatgcaccacaactgtccacaagattcgtgttgtgtttgatgctgtctaaaaccttgatgttgtttggcgcattcttgtttgtcgcatttgttgcattcttgtttaataggaaatagcctttgtatgtaaatgttgtgacttttgtccatgtttccactgtgcctcattaactcaaagaaattcacttatgatgtgccacaagggttgtgttgtgtgtttgacattgactatttgtggtttggattttgatggtttttgcctgagctgtccggtgattgaatgttatggtgcagatccattgtggctgactccacctagtgggaaaaggtttggttcttgttggtgtttgttgcttaagctgttttgtgttggtttgtctggatgatggatgcacttgtgtgtgtgtgtggatgctctgatatcttaattgtttaatcttttggggggggggggctgattacgagaaagctgatccaagagtggtgtcattggagtac

SEQ ID NO: 407 - DNA, 1417 bp, Glycine max
  Clone ID: PAT_MRT3847_78923C.1
ccggctcgaggcacacccccacttcaccaatttagctcctttttcttaaaaatccttgctttctctgttgggtctgtttcatttcatcttctggttttggatcattcagcgccacacagacatacatggctcttgagtcagctcctgcttcagctgacatcagaggagttcacactcatggtggaggctatgttcagtataatatctatggaaacctctttgaggtctctaggaagtatgtccctcctattcgccctgtgggaagaggagcatatggaattgtttgtgctgctgtaaatgcagagacgcatgaagaagttgccattaagaaggttggcaatgcatttgacaacagaatagatgccaaaaggaccctacgagaaattaaacttcttcggcacatggaacatgaaaatgtgatagcccttaaagacattattcgaccaccacaaaggtataacttcaatgacgtgtacattgtttatgagttaatggatactgatctgcatcaaataattcaatccaatcaacaattgactgatgatcattgtcggtattttctgtatcagttgttacgaggactcaaatatgtacactcagcaaatgttctgcaccgtgatctaaagcctagcaacttgctactgaatgccaactgtgatcttaagattgcagactttggtctcgctagaactacatctgagactgatttcatgactgagtatgtggttactcggtggtaccgagctccagagttacttcttaattgctcagaatatactgccgccattgatatttggtctgttggttgcatccttggtgaaatcataacaagacaacccctatttctggggaaagattatgttcatcagctcaggctgattacggagctcataggctcacctgatgacactagccttggatttctacgaagtgataatgctcgtagatatgtgagacagcttccacaatatccaaggcaacaatttgctgctagatttccaagtatgtctcctggtgctgttgatttgttagagaagatgcttgtctttgatccaaataggcgcatcacagttgaagaagctctgtgtcacccatacttggctcctcttcatgatattaatgaggaacctgcttgcgttagacctttcagttttgattttgagcaaccatctttcactgaagaagatatcaaggaactcatctggagagaatctgtgttattcaatcctgatccacctatttattgagatttggaatttactatcatatgtgcatagtgaaatactttttgactggattacaacactaccgaggagttgttagctctctacagaagtatttaacatattggatatactgagattcttttggtaaaaattatttgaaatttaatgaggttgtcttccatttgattatt

SEQ ID NO: 408 - DNA, 133 bp, Glycine max
  Clone ID: PAT_MRT3847_7958C.1
ggaattaggcccgaggtagctgaatgcattgataagattcgtgtaaaccctggaaattttgctgatagacgggctcaattatgaacattagagtacgcagaagcagactatcagaacgaacttgagccatatt

SEQ ID NO: 409 - DNA, 2117 bp, Glycine max
  Clone ID: PAT_MRT3847_79740C.1
cggaaggaggtaaggctgggtcgacccagatctagttgagctcaccaactcccgctcccatttccttatttatagacagagtctgattgtttcctcaccactccctccactctctttctctagtcctgttatttctcagcgcgtaaagcatggctttgttggtggagaaaaccacgagtggtcgcgagtacaaggtcaaggacctttcccaggccgacttcggccgcctcgagatcgagctggccgaggttgagatgcccggcctcatggcctgtcggaccgagttcggcccctcccagcccttcaagggggcccgcatcaccggctccctccacatgaccatccagaccgccgttctcattgagaccctcaccgcccttggcgccgaggtccgctggtgctcctgcaacatcttctccacccaggaccacgccgccgccgctattgcccgcgacagtgccgccgtcttcgcctggaagggtgagaccctccaggagtactggtggtgcaccgagcgcgccctcgactggggccccggtggtggacccgacctcatcgtcgacgacggtggtgacgctacccttctcatccacgaaggcgtcaaggccgaggagctctatgagaagaccggcgaactccccgaccccaactccaccgacaacgccgagtttcagatcgtgcttaccatcatcagagatgggttgaagaccgatcccaccaggtaccgcaagatgaaggagcgtctcgttggggtttctgaggaaaccaccactggagttaagaggctctatcagatgcaggcgaatgggactcttctcttccctgctattaatgtcaatgactctgtcaccaagagcaagtttgacaacttgtatgggtgccgtcactctctccctgatggtctcatgagggctaccgatgttatgattgctggaaaggtggctgttgtggctggatatggtgatgttggcaagggttgtgctgctgcaatgaagcaggctggtgctcgtgtcatcgtgaccgagattgatcccatctgtgcccttcaggctctcatggaaggccttcaggttctgaccttggaggatgttgtttctgaggctgatatctttgtcaccaccaccggtaacaaggacatcatcatggttgaccacatgaggaaaatgaagaacaatgccattgtttgcaacattggtcactttgacaatgagatcgacatgcttgggctggagaactaccccggcgtgaagcgcatcaccatcaagccccaaactgacagatgggtcttccctgagaccaacaccggtatcattgtcttggctgagggtcgattgatgaacttgggatgcgccactggacaccccagttttgtgatgtcctgctccttcaccaaccaggtcattgctcagcttgagttgtggaaggagaagagtaccggcaagtacgagaagaaggtttacgttttgcccaagcaccttgatgagaaggtggctgcacttcacctgggcaaacttggagctaagctgacccagcttagcaagtcccaggctgattacatcagtgtgcctgttgagggtccatacaagcctgctcattacaggtactaagtaattgagattatcaacggaaagtgagggaaagacaaaatcggttttatgaatcggattgattgtttaattttcctttttttgaatttttgttgttagacttttcagatttgaggtagaagaagtttagctttttttatttttaatttccgtagaatttctgttcgagtgggtgggacgggtaaggaggaagacatcctgttggtttctgtgatatgaaaccaatttgggttgaataagcatgttttgtttggggaatgtgtgtgcattttgcttttgctttattaaatactaaattatgtgtttctgtccaccttttcaatatatcaaaagaaaataagagaaaatgaaaaaattcctacatgtatccagtttcataacacatgtattgtgtattatttggtgcttctgcaatattttttaaaaaggctatcagggtaattaagtaattttattatgtaaacttttttttttttttatggaagttcagttgaaatcttctcttttttt

SEQ ID NO: 410 - DNA, 515 bp, Glycine max
  unsure (1)..(515): unsure at all n locations
  Clone ID: PAT_MRT3847_80400C.1
ccacgcgtccgagggcgcgccggccgtctccattgcccggcggatcctgcgatgcgagctggaccgagagggaggagcgagggagcgcgcgggtagagaaggcggggcggggggaggaaggaaggaaggagcgccggccggagcagacgtcccctcggggccctcggtcggatgagatcgacgatgaaggcgcagcacgccaacgggcgggggagcaggagccccttcctgacgtcctacgcgctcacgctcgccttcatcaccttcgtctccgtgctctactttaaggacttctcctccacgctgcaccgccccttcctccaccgcccccgccgncacgccgncccagacaaaagccaggcggggcgccgcgcggcggcggagcggctgccgttcgcggtgggcgcggcgccggcggggtgtgacgtcgggcgaggggagtgggtgtacgacgacgcggcgcggccgtggtaccaggaggaggagtgcccctacatccagccgcagctcacgtg

SEQ ID NO: 411 - DNA, 2309 bp, Glycine max
  Clone ID: PAT_MRT3847_8046C.1
gcccccaaaacagagcaaaacagaggatccactccaccactactcctaatggatcctccacccctctctgccgccactcaaaaaaaccatcccgaatcggtagagtccttttctccatgtttccgcgttgcggaaacgtggactgatgagactctaccggcggttcctggtgccaagctgcgcctcatgtgcagctacggtggccacattatgccacgccctcacgacaaatctctcagctacatcggtggcgacacgaggatcgtggtggtggaccgccactcgtcgttgaaagatctatgttcacggctttcccgaactatcctcaatggaagacccttcacactcaagtaccagcttcccaatgaagaccttgagagtcttatcactgtcaccactgatgaagaccttgacaacatggtggaagagtatgatcggataatggcaaaaggttcggcttcttcgcggctcagggtgttcctgttcttcaccaaacctgaggccacagtttcaatggggtcactccttgatgatgccaagtcggagacatggtttgttgatgcactcaacaactctggcatgatatcaagagtggtgtcagattctgctgccggggattcttttgttaaccttgatggtgttggtgttggtggtgttagtgctagtggttcaagcaacaacttggagtctttgcctgatgctaacaaggttaagaattttcctgaagtggtgcaagtgcaatcaacacctggttcgcctatgatggagaacagttcttcttctccttctttctctccttctctggttaatctgcctccaattcgggttcatgttgatgacaatggtagtaggcttcagcaagagaataaggttggtttggtggtggaggagcaatttgctcagatgacaattgcaagtggggtgaagccagatgatggattggtgaatgttgtttcttctgcagtggctgtgcctgtaattcctgcatctgtgactatggcatcagctggggtgattactactagtgataatgtgatgaatagagttgtttgtgaggatgacagatcagatcccgggtttcagaagccccctttaccattgcagcttgtgcagccaaggactagtggtggtgtgggtttgccttcacctgattcagttgcaagtgatagtagtattgcagctgcaaattctttctccaagactgtttactaccaagatcaagtccaagctgcactactagacaacaaaattgttgctatgccaaatgccaagagtgaaatatctgatcagatgattcaggtccaaggacaacttcaagattctggctacacattacccccacaattggatccaaacaagcaacatttccagcagcagaagccatttgtccatgccagcactcactacatccaccacccagcagccacaggtccagtgccagtttcatcatactacccagtttatgccccaccacaacctcaacaacttcaccctccaattggtcaacaacagtacccagtttatgtaatgccagttggacctacacaagtaacacaaccctacaacatggcattgcagcccaatatagctgatcctaatgtggtagcttcaagcaggtcattaatgccacaaagtattgttacctcagcagcatacaaagatggtactccacctatttaccccaccaagtcagttagctctactatggcatcaaattctggatatgctccaatacctaccaaccaatttcaaccacagtatgtgggtttgcatcagttccatcatccaccacagtccattgctgtggctccttctagtactactactaataataattatggttatgaatatggtggccatgtgcaagaccaagcttactacactcaacaaaccaccactgctccattgcttcctcagtaccaatccatgaccccagctgcagctgctgcagcactatcagatgcttcaaaatagtttcctgcagacaacattcagcagccaactagagcatcacaaccagtatgaatcaaaaagtggagaaaaatgaatgaatgagtttggtggaggcatgttggggaggggtggggtgaggggcaattagactttactttcattttttaaccatgaacatatgcaccctaatttctacagaaaaaaaaaaaaaaggaaataaggagtaaagcataggttatttcttttttatctataatgaaatgaatgacatgtaagatcatattctgcaaacttagctttttctggtcgtcacagtttactcagttgaataaagcaagttgttgccattagcttaa

SEQ ID NO: 412 - DNA, 268 bp, Glycine max
  unsure (1)..(268): unsure at all n locations
  Clone ID: PAT_MRT3847_80550C.1
gnttgattcanttcantgggttcagtaatgctcagtggnatgaaaagctnactctnagaancctaacngggaacggttaggtttcnatggttcggatttgcacggtaagaattgccaagagtgagtttcgctgntancactagtggtnaagttcnaactttagacgcatagtagtanccangtgtagtgtntcggcttccnggccaagntcgcgccaaggttcnttcagcaccacccgcggnctttggttccataggttttctcattg

SEQ ID NO: 413 - DNA, 151 bp, Glycine max
  Clone ID: PAT_MRT3847_80955C.1
cctatccgccgcatcttccgagagtaaagtgttgtaccttaaattgaatggtgattaccacaggtaccttgacgagttcacgactggagcagagaggaaagacgcagcagagagtactttgcttgcttacaaatctgctcacgatattgct

SEQ ID NO: 414 - DNA, 2260 bp, Glycine max
  Clone ID: PAT_MRT3847_81594C.1
gcagaactacaaaaaacgggcatcgtccgcagcctttgctcaaagggtccacggcttgaagggatcagcgctgcagctcgagccgggcacatagcatcggatctgatattggtctgaagatgggtgtggctgctgagtctgagtcaaatgacaacatcccgctgttactcacccaatctgcttaccctctcaaaaggacagggacggtgtggacagcagtggcacacatagtgacaggggtgataggatccggagtgctgtctctgccatggagcactgcacagcttgggtggcttgcaggccccttctccatccttctcattgcttccaccactctcttctcttcttttcttctatgcaacacttatcgccatccccatcccgaatacggtcccaacagaagtgcctcctaccttgatgttgttcatttgcatttaggaataagtaatggacggctcagtggccttcttgtcagtattagtttgtatggttttgcaattgccttcgtcattacaacagctatcagcttaagaacaatccaaaattcattttgttaccacaacaaagggcctgaagcagcatgtgagtctgtagatgcatattatatgctactttttggggctatccaaattgttctctcacagatacccaacttccataacatcaaatggctgtcggttgttgctgcaattatgtcctttacttattctttcataggaatggggctttccattgctcaaatcatagaaaaaggacatgctgagggtagcattggaggaatcagtacctctaatggagctgaaaagctatggctggtttctcaagcacttggtgacatatcattctcatatccgttctccacaattcttatggaaatacaggatactttgaaatcgcctccaccagaaaaccaaaccatgaagaaggcctcagtaatagcggtcagtgtcacaacattcttgtacctcagttgtggaggtgctggatatgctgcctttggtgataatacaccaggaaaccttttaacaggtttcgtatcctccaagtcttattggctagtgaactttgctaacgcttgtatagtggttcacctagttggttcatatcaggtgtatagccagccactttttggcactgtggagaattggttccgttttagattcccagatagtgaatttgtgaatcacacatatatcttgaaactcccgttgcttccagcctttgaacttaattttctcagcctgtctttccgaactgcttatgttgcatccacgccggtgatcgcaatgatatttccctacttcaatcagattttgggggttctgggtagcatcattttttggccgttgaccatatattttccagtggaaatatacttgagtcagtccagtactgtatcatggacgactaagtgggtactgcttcggactttcagcttttttggctttttgtttggattgttcactctcattggatgtattaaaggaatagtaactgaaaaaataagctgagaagctttgagacctctccaaggaattagactcagatagccttcttttttttctccacttttctcctttcaagacccacaaataatgaggatcatctgcaatgtcttttccacatattcactcaattactaacttggaaccattacataaagatcggacatctatctcagtaaattagacataaaacacgtatttgagatccgaactgtccgatctttattcaatggttacaaatgcactaactgtgtgagggcaaggaataggagactgcaccgaatccagttggacaataaacatgcagattctctcatattttcaataggaatagtgattctgtatttgttcacctgctgaaggtatccactgctgaaatgaatgagctcaacactcctacttcctcggttcttccactgttatacaaacaaattgaaagtggacattattattttccgtgggaaaattttcagttctatttgattattgtttgaagtcttatcgatactatttagattaagccaactttggtataaatataagttcctcacaagtgacctctcaatgttgttgaccttttacttcagtaactttgctgcaacccgatcttcgctttggataggattccctattgtaaaaaaatacagtatttaatgtagtaaatctatttacatccatgtctctgcatttccattcagggcataacaaaattggagaatttaaagaaacatgaagcattcgtgttttgattaccc

SEQ ID NO: 415 - DNA, 1658 bp, Glycine max
  Clone ID: PAT_MRT3847_81676C.1
gcacgcggtttcggtccggaattcggctcgaccgcaaacgcaactcagctttccttcgatccctgaatctggacgttactaaagcagcccagccatccacgcaccattttaaaagccaacacagaaagcacagaaccaccacatcgttgccttcctctaaacgataaatttttgggattctgaaactagtgatacattttcttgcatgaaggcagcgtattgaggaattcagttagtgtattggaagatctagttcaacatgtcttctgtaagcaagggtgataggaaggcttccattgatgcagcatcatggctgttcaatgtggtcacgtctgtgggaattattcttgtcaataaggccttgatggctacatatggttttagttttgctacaactttaactggtctccattttgccacgacaaccttgttgacactcattcttaaatcgttgggatatatccagacctctcatcttccattatctgatataatcaaatttgtcttgtttgcaaatttctccattgttgggatgaatgtgagtttaatgtggaactctgttggtttctatcagattgctaagctgagcatgattccagtatcttgcttcctggaggttgtcttggacaatgtacgatattcaagggacacaaagcttagtattgttttggttttgctcggcgttgctgtctgtacagtcactgatgtcagtgtcaatgcaaagggtttcatagctgctgtaatagcagtttggagcacagccctgcaacagtattacgtgcattttcttcagaggaagtattctattgggtcatttaacttgttgggccatactgcaccagcacaggcagcaagtttacttctagtaggcccctttatggactactggttgactggcaaacgagttgatgcctacggctatggtttgacatccacgttgttcatcattctgtcttgcactatcgcagtagggacaaacctcagccagttcatctgcattggtaggttcacggctgtaacgttccaagtccttggtcacatgaagactatcctggtcctgatcttaggattcattttctttggaaaagagggtctcaatctacatgttgttctaggcatgatcatcgcaatagcaggaatggtttggtatggcagtgcttcttccaagccaggggggaaagagcgtcgtagcttttccctccccaaaacacaagattatagttcactacctgtgtcctctgaaccagatacgaaggaatagaaaataatagaaactaattagagaaaaagtgatgaaacttctggtgaactgcatgaaaaaaatcaggtgcccattaggcgagctggttcattttctttataccaggagtgaattcccaattatttatagatcatggttatatcttttcttatgtgttaatgaattgtttgggaaagaaatgagaggaaacagcgttaagggatggaaaaatctacgttatgttcctttttttttatgacagaaaatgttactgttacttttatagtaaaagtttaattccatttttcccattagggttggttccgttgttaccttctactcatgacaactattagcatgtttggattacctagttatgaaatgttttactctataaaatacttttgaaagttttaat

SEQ ID NO: 416 - DNA, 1745 bp, Glycine max
  Clone ID: PAT_MRT3847_8188C.1
cccacgcgtccgattattgtcctcatagtgagtagaaggcagagagactagagcggggatagcaacccgggtcgacccacgtcgtccgacctggtcttactgtgtggtgactgtgctctgctctcatctcattcatattcatttcaatggcaactcaaggtcaagtcattacctgcaaagctgcggtggcctgggaacccacaagcccttaacctccaatcatttcaatggcaactcaaggtcaagtcattacctgcaaagctgcggtggcctgggaacccaacaagcccttaactgtccaagacgttcaggtggctccgcctcaggccggcgaggtccgtgtccaaatcctcttcaccgctctctgccacaccgatgcttacacttggggcggcaaggatcccgaaggtctcttcccctgtattcttggccatgaagctgcagggattgtggagagtgttggagaaggtgttactaatgttcagcctggggatcatgtcattccctgttatcaggctgagtgtggggagtgcaagacttgcaaatcagggaagacaaacctatgcggcaaggttcgttccgccactggagttggggtcatgctcaatgatgggaagagtcggttctcgattaatgggaagcctatttatcatttcatgggaacatccacttttagtcaatacactgttgttcatgatgttagtgtagctaagattgacccgaaggcacctctggagaaagtttgtcttcttggatgtggtgtttcaactggccttggagctgtctggaacactgcaaaagtggagtcagggtccattgttgctatttttggccttggaactgttgggcttgctgttgcagagggtgctaaaactgctggtgcatcccgggttattggcatagatattgacagcaagaagtttgatgtagcaaaaaactttggagtcactgagtttataaatccaaatgaacatgataaaccaatccagcaggtcataattgatcgcacagatggtggagttgattatagctttgagtgtattggaaatgtctccgtgatgagagctgcgttggaatgctgccacaagggctgggggacgtcagttattgtaggtgttgcagcatcagggcaggaaatatcaacccgtcctttccagttggtgagtggacgagtctggaaaggaacagcttttggtggcttcaagagcaggtcacaggtgccttggcttgtagacaagtacttgaagaaggaaatcaaggttgatgagtacattacccatactttgacactttcggagatcaacaaggcttttgatcttttgcatgaagggggatgccttcgctgtgtgctttctacacaagaatgaggtgatctgtgccagcctgcctggttttgtgaggaatggatgtgttgtgttgcttttccctcttgtagtggttgtagtttgaacttgaaataaatctcgagtggctatattttgtaagtaagatcattttggtctataatatggaattatggatgttatcttccgagtcttttggcaaacttgtgttcagaaagaaggtctttgcaattaatacttaaaagcatcccttttgagttatgactggtattcttccattttacctgtcaagaatcatcatcacctctccatcctttttgggtgccagacaccatagctgtttttacttttgatatgttacggtgctgtcaataagttccgaagccaggttgtgcgattttc

SEQ ID NO: 417 - DNA, 306 bp, Glycine max
  unsure (1)..(306): unsure at all n locations
  Clone ID: PAT_MRT3847_82083C.1
tttcacttcantgacncnaagggatcgtcgcaccctatnnttcccggcggttcanccatagcgancnatttctccgncgacncttgtcacctctctaatcactctctcncaatncntntgcaatttccaancccantcattccncacccaacgaaggaacgccagggaaacaatacgncanatnagcattgtcttaatgtnccttcnagnaattcgactantcnccanctccantatcctctctttggcggaactccantncacnttacgaaanatccacttnntattgcaagattgcaccctcca

SEQ ID NO: 418 - DNA, 1191 bp, Glycine max
  Clone ID: PAT_MRT3847_82249C.1
aggaaatgctgtttcattagatggatagaacccacaaattcaactggcttatcaccttcactattggtattactcctcggtggctcttcccagcgccatgaaaaattccaattaatgggtggtgctactagtttgttgaaagagcatcttttttcaacctcttgatttcatgagtcactattttgattgaacaagagatgagatttatgcccctttccagattaattttccgtctccctcgtcattatacacatgggcctttgcaatctcgtgccttacagactgattctgttcttaaagatcctcaggctaagccaataaagtacaaaattcctcaattctatgatccctatggccccagacctccaccctcagaaaaaatcgttcagcttgcagaacaaattgaagcactatcagaagaagaacgtggtcaaattatgcccactttgtcagaaagattaaagcttccaaagttgcagccaatttccacagatggcatggacatgggtacagaaggtggtggtgctgctggactgaaggttgaggagaaaaaggcagagaaaacagcttttgatgtgaagttggagaaatttgatgctgctgcaaagatcaaggtgattaaggaggtaagagcatttaccaacctaggattgaaagaggccaaagatcttgttgaaaaggttccagttgtgctaaaacaaggagtcacaaaagaggaggcaaatgaaataatagaaaaaataaaagctgctggaggagttgcagtcatggagtagaattttgattgttggttgagatcacaattcttcatttccaatatgtttttaagttgccatacgcgtggtgaatgactgttggaagaaaattataaaggcacgaagcagatttaagggttaataaccaattgttgaataatctatttgaatcaattttttcttagttgagttttctggttaattactgtatcacttagaactgctgtgttggtttgacatttgtaacactcgttttgcctatcctctgctcaaatattttcttccagagtgaaatatttctgggatcatagggaaaattactttatggaatttcttttagttatttgagattcctgtgcttgatatactaaacttggtggtcttctttggactggtgcctggtggacctcttatgaagtattgggccccctttttt

SEQ ID NO: 419 - DNA, 1347 bp, Glycine max
  Clone ID: PAT_MRT3847_82360C.1
aaaggataatagcttttgacctagctaatagcacacaataatgggaagatccccatgctgcgatgagaatggccttaagaaaggtccctggactcccgaagaagatcagaaactagtccaacacattcagaaacatggccatggaagttggagagccctccctaagttagctggtctcaatagatgtggaaaaagttgtaggctaaggtggactaactatttaaggcctgatatcaagagggggaagttttctcaagaagaggagcaaacaattctgcatctccattccatccttggaaacaaatggtcagcaatagcaacccaccttccaggcaggacagacaatgagataaagaatttctggaacactcacttaaagaaaaagctgattcagatgggctttgatccaatgactcaccagcctagaactgaccttgtttccaccttgccttatctgctagctttggccaacatgacagacctcatggaccatcagacattggatgaacatgctataaggttgcaagcagaggcagtccatctggcaaagcttcaataccttcattatctaatccgatcctcaaactccttgagcaccaacaagtcctatgaccaaagtgccaccaccaacatggaacctgcagctttcagtttgttgaactcaatctccaatgtgaaagagaatccagtcatgttgcaaccagctgatgatactcctgctgcctcattgtctcatggcattgttagctctcaaccactccaccacccaaacgtgctacctcatcaccttttagagccacaagtctctttcagctctcaatcatgtttgaatagtgagattggtcaaggtactaactttgcaatcataagtcaaggggatcacacgcttgatcttgactcttcctggattattccatctattactcctccaaatgcaatagggacctcagctaacaatccaggagatgccagcagcagcacttctagctatggaggaggaccctcttcttattggtccgaactactttttgaggaccccatcttgcatgagctatcttagtatttaatttgaaagaggtcccattatggtgtgtgcatgttatgccttgtttgcttcttgccacttaattaattagcccatatatatgctctagtataggtacatatagatatatatatgcccttttacatatatacgtattcacgtatcaatacatgttttgtacataactccgggacagtttcatcgagctagtttgaatgtcactatgacagtatcgttttcagcagttatatatctaaattttctttgctcaaataaaatttgtttttacgttttttattttt

SEQ ID NO: 420 - DNA, 1839 bp, Glycine max
  Clone ID: PAT_MRT3847_82686C.1
gaaaaaaggaaaccgtatagaaaaagcttctccaaagaatttgaaggagaaagattcattcatgttcattttttccttttccccttcgtccccatcaagtttctgattctctcttttcacttcctttctctttcttcattcttctttctcttttcaactattttctttacatttttttctttttctctcgcttttttcgcgttcactttctctactctgttttacgcattttatttattgttttgttagttaattttgcgattcgagtaattggtatgcttgtgttttctagaagacgatattttcacgacgattaagctgcgttttcgccggtgtcgttttaccgcaagatggtgtcgttttcggaaatatgcaaaaagggttgaagttctttcttcagcattgaatctttgattacataggttggtttctttagaactcgattcaatttcaaataattggtcctccctttttgtggaactcaattctattaggttagtggaaagagaaaaaaaaacatggttgaatcaattgctgcaacttcactccttggccaccgtccaatttgtggtggaaatttaaccagggatgtatctgttaaacgcaaatctttgaatactgttcggttcccaacaactgagtttcttggtggtggaaggattgtggtttctctggctttgcctaaatctgataagcaagataggtttgtgttttcatcaattaaggccttggctgtggagttaacaagagaagcacatgcttatagggaagagaaattgcccaacagggataccaagattgatcgtggatttgatcaaaggcctgattcgtggcctcctgcgaatagggcagataaaccgtcgcttcggaatccactactccgtcatgagaggatgggatgtggttggttgggtgctatatttgagtgggagggtgttctaattgaagacaaccctgatttagagaagcaggcttggctggcactctctcaggaagaaggcaaaccctctcctcctgcttttatcctcaagagaatagagggcatgaagaatgaacaggcgatttcagaagtgctgtgttggtctagggatccggcacagttgagaagaatggctaatagaaaggaagaaatctaccaatctttgcagggtgggatatataggttcttgtctggatccaaggagtttgttagtgttttgatgcattataagataccaatggcattggtttccacgcggcctaggaaggctcttgagtctgctataggggagattgggattgaggacactttcagtgttattgtagcagcagaggatgttcataggggaaagcctgatccagaaatgtttgtgtatgctgcacagcttttgaacttcatacctgagaggtgcattgtgtttggtaactccaatctaacagtggaggctgcacatgaagcgcggatgaagtgtgtggctgttgctagcaagcatcctgtatatgagcttggggctgcagacttggttgtcaggcgcctagatgagctttcagtggttgatttgaagaatcttgcagacattgaaatgactgaatttgggtctgtggagcctgagatggagctggaggtggaaaaagattatggctcatcatcagttgatgacaatttctggtaaatcctataaatgtacagttgattgaacctcatctgattgttgatgatattagttacaggttagttacttgtgtatatggtaatcagaataaatggggggaaaaaatgataagtggtatgcattgaacattgatgttactactaatgcattttctgttcatatacattcacgaatttttagatttgaa

SEQ ID NO: 421 - DNA, 2456 bp, Glycine max
  unsure (1)..(2456): unsure at all n locations
  Clone ID: PAT_MRT3847_83093C.1
ccacgcgtccgtacggctgcgagaagacgacagaagggggagcggaagcatattcctaaaactttcttcaaaacagcgttgtgtcacgcacgccactgctcatccaacttcttcttcttcttcttcgctctctgtttctgcgtgtgcgcgaaaaaaaaaagcaaaaatgcattccagtcacttacttctcgaagaacccattcgcatggtttccatcctcgaaccatccaagcccaatttctttcccgcaatgacgaagatcgttggtaccctgggtcctaaatctcggtcggtcgaggttatttctgcttgtcttaaagctggaatgtcagtggctcgtttcgacttctcttgggatgaccctgaatatcatcaggaaactttggagaatctgaagaatgctatcaagactactaagaaactctgtgctgttatgctggacaccgttggtgcagagatgcaggttgttaacaaaagtgagaaagcgatctcgcttgaggccgatggtcaggttgttctgactcctgaccgaggacaagaagcatcgtcgcagatactgcctatcaactttgatggactggcaaagtcaatgaagaagggagacaccattttcattggtcaatacttgttcacaggaagtgaaactacttctgtatggctagaggtatctgaagtcaaagggcaagatgttgtttgtattataaagaacacagctacattggctgggtcattgttcactttgcatgcctctcaaattcatattgatttgcccactctcactgagaaagaccaggaggttataagctcctggggtgttaaaaacaaaattgattttctgtcattgtcatatactcgacacgccgaagatgttcgccaggctcgtgaatttctttcaaagttaggtgatctcagccaaactcaaatttttgcaaagattgaaaatgttgagggattgacccattttgatgagattctacaagaagctgatggtattatcctttcccgtgggaatttgggtattgatcttccaccagagaaggtttttttatttcaaaaatctgccctttacaagtgtaatatggctgggaaacctgctgttcttacacgtgttgtggatagcatgactgacaacttgagaccaactcgtgctgaagcaacagatgtcgccaatgctgttttagatggaagtgatgccattcttctgggtgctgagactttacgtgggttgtaccctattgagactatatctactgttggcagaatttgttcagaggctgagaaagttttcaatcaagacctttattttaaaaggacagtcaagtatgttggagaacccatgactcacttggaatctattgcatcctctgcggtacgagctgcaattaaggtgaaagcatctattataatttgttttacttcatctggaagggctgcaagattgatcgcaaagtataggccaacaatgccagtactatctgttgtgatcccccgacttaagacaaatcagctaaagtggagctttagtggagcttttgaggcaagacaatcacttattgtgagaggtctctttcctatgcttgcagatccacgacatcctgctgaatcaacaagtgcaacaaatgagtctattcttaaggttgcccttgatcatggaaaagcattgggagttattaagtcacatgaccgggtagttgtttgccagaaacttggtgatgcatctgtggttaagattattgagcttgaagattaaactattaaagcgcattcaaccaactacagttttagtgttatttatttatttttacaactttgcctagttatttaaagatgcaggtcgttctgccacaagtagaagttatctctacttggttttgatgaaacaaattttgatgcaaattattaatggctgtcaaacataaaatcaaggcaatgtgcccttgatgccaattttttgagtttaagattcatactagaacacagttcgaaaatgtgattattgaattggattaccaatctaatgaagctaatagcttgttatttcagacaaaaaaaaaatataagcatatttttattgtctggtctttgtggtctgcagcccgggggatccactagttctanagcggccgccaccgcggtggagctccagcttttgttccctttagtgagggttaatttcnagcttggcgtaatcatggtcatagctgtttcctgtgtgaaattgttatccgctcacaattccacacaacatacgagccggaagcntaaagtgtaaancctggggtgcctaatgagtgagctaactcacattaattgcgttgcgctcactgcccgctttccagtcgggaaacctgtcgtgccagctgcattaatgaatcggccaacgcncgggganaggcggtttgcgtattgggcgctcttcccgctttccttcgctcactgactcncttgcgcctcgg

SEQ ID NO: 422 - DNA, 3552 bp, Glycine max
  unsure (1)..(3552): unsure at all n locations
  Clone ID: PAT_MRT3847_83345C.1
tcgagacggctgcgagaagacgacagaaggggacgatcgttaagtctcactctcaacaccttcgaaccctagcacagccccgtgccgtcaactgtcaaccaccctccgtccaccgcacgcgcacctcgccaccaacatccagcaactcgcaccagaacagcacctcccatcgttgacgcacaaagtagcaggccgtcgcactcgcgccctcccgtccacagtcgcagtcggaccagccaccagtgatgggaaagatgtgcaagaataagaaacaagctggtgggcatggacctccaagagagcaaactgatacacaggaacaagaaatggacataaggaagattatgaaagatgttgaaaattttagctactcacatatgtcatggaaagaacgcaaaaagattgaaaataggaatgttgtttctcttggtgggaaggtgaggactattgttgatgttctattttgcttgccatgtgctaatgcataaggatgctcaggaaacaaatttcttactgtttgtcattttcccatatttagccccaaaagaatcagagattacctttaagtgtggctcgactaatgatgaagaaacaactggagagttttctttcgcccgatttttagcaatgcaccatgtgtgtccttgtccttgtttctttgcagcagcactatccagtctttccagcgctgcttacccaatttttaacgtatttgagcttatgctctgaacgcttggggctaagcaagcataaaatccattatgtgggcctgtccactatcagatcttcataatgaaacctgtgccatcggaagattgcaggcaagttattatacgcacgtctccctttgagagatgggagttactacccctatactatatcttgtgcccctctatgtcgtaagatactgacctggagcagaaaatgcttcaggaccgtttgattcctggacaatttgggggaaagctcgtcgctagcatcaaaagatctgctgggaagcacaagccagggaacaggggtctgaaatcaagtgaaggtcattttataaatggcatactcaatgaaccatttgttaaattcagcaccatcaagagatcgtgaaactggaactaatatgtccaatgcatggaaagggaaaggtggtacggctgcgagagacgacagaaggggatcgcagaggcagagcataacaacacaagagtcgcatctcaagcttttgtctttctctacttttctgctttctttcttcttctgtgtatcgtatcgcgtattggttggttgaaaaacaaagagtgtgtgttgtgtggtgtggtttggtttttcacttttgttcatcgttttgcgagaagacacacacagagagagagatggctacgacgagggtggtggcggaacagaagccgaagacgaagattgtgtgcacgctgggccccgcatcgcgctctgtcccaatgatcgagaagcttctgcgggcgggcatgaacgtggctcgcttcaacttctcccatgggtcccacgagtaccaccaggaaaccctcgacaacctccgcgccgccatggagaacaccggtattctctgcgccgtcatgctcgacaccaaggggcctgagattcgaactgggtttctcaaggacagtaagcctatccaactgatacaaggtaatgaaataaccatttccactgactatgacctaaagggtgatgagaagacgatttgtatgagctacaaaaagctgcctgaggatgtgaagcccgggatggtcatactctgcgcggatggcaccatatcatttacagttttatcatgtgacaaacaagcaggtttggttcaatgccgatgtgagaactctgccactcttggtgagaggaagaatgttaatttgcctggagtgatagtggatctcccaactttgacagacaaagacaaggaagatatcttggcctggggagttccgaataaaattgacatgattgctctttcttttgttcgaaaaggttctgacctggtggaagtcaggaaagttctgggaaaacatgctaagaacattatgctcatgtctaaggttgaaaaccaagaaggggttgcaaattttgatgaaatccttgcaaattcagatgcatttatggtggcacgtggtgaccttggaatggaaattccaatagagaagatatttctcgcacagaaagtgatgatttacaagtgcaacatccaaggaaaaccagttgtcactgcaacccagatgttggagtcaatgatcaaatctcccaggccaaccagggccgaagctactgatgttgccaatgcagttctggatggcacagactgtgtgatgcttagtggtgaaaccgctgctggagcctatccagaccttgctgttcaaacaatggctaaaatatgcattgaagcagagagcacccttgactatggtgatgtgttcaaaaggattatggagcactcaccggtacccatgagcccattagagagtctagcttcttctgctgttagaacagccaactcggctagagcggctcttatcttggttttaactagaggagggagtactgcaaaattggtggctaaatacaggccagggatgccaattctttccgtggttgttcccgagcttaagaccgatacctttgactgggcatgcagtgatgaggcccctgcgagacatagccttatattccgcgggttggttcccgtgttgagtgcagcttctgctagagcttctcatgctgaaacaacagaagaagcaatagaattcgccatgcaacatgccaagtccaagggtctctgccacaacggggattcagtggtggcactgcatcgtgtgggcactgcatctatcatcaagatcttgactgtgaaatgatcacccccattacaaggaattcttctgctgtttttggcaaattttttggatggtgcaaaagaggtctcgttatacctcttcatatctacattggatgcaaacttcaatcaaaagcatttatcaggatgggttacctgtttttcacatatcttatattactggttttttttttttttgttacatttgccttatcattgtggcgagcagccacctgctttcatttgttaagattttgtatgaggcttttggtgaaccaaaaaactagccacttctggattttgaattctacggtctaaagttgttttaattgagaagtgtatgccttttcgtagcattggcaaaaaaaaaaaaaaaaaaaaaagaaaaatagtaacaagggtggtggtaaaaagcaccgttgagcacgtccttgtgaataacgtgttttaggaatattcaggagtcattttttaatatgtatgacctttataaatctagtatgacccttgggtaagcttttcattttgacagtgaaatggatagaatagaaaacaggacaattatgtcttgtgctttctggtaattatacaatattaaactttcatctgtcattttatgattatatattagtttataattattagaatgccctgtatttttagttcatacagaaattcttaaccttttgtcatnnggg

SEQ ID NO: 423 - DNA, 418 bp, Glycine max
  Clone ID: PAT_MRT3847_83406C.1
ccttgactctcgtcttattccatgctttttctccggcgattccgaggtcttctacctcatgaggaagggagatgacctcaggtaccttgcctagtttaagaccggggcccagcgtctggagggtgcggagagcactgtctttgcatacaaagccgcacaggacattgggaatgccgaactgcctcctactggtccaattatgcttggccttgctcttagcttttctgtattttactacgaaatccttaattctccggatcgtgcctgcaaccttgcaaaacaggcttgtgatgaagctattgctgaattggatacactgggagaggagtcatacagggatagcactgtgatcatgcaactccttcgtgataacctcacactttggacctctgacatggcagacgatggagcagatgaa

SEQ ID NO: 424 - DNA, 833 bp, Glycine max
  Clone ID: PAT_MRT3847_83528C.1
ccacgcgtccgcttcttcgtttcatctttaaatcgtttctttgttttactactttttgcattttttataggcaaattaattgttaggattgttagtttttttttttttagcagaggcgatccgaatcgtgactattttttgcattctacatgtttttgtctttaaaccttacccacatcttctttttgtagttgttttttttcttcttcttcttcttcttcttcttcttcaaattttcgtgctttcattttcagcctaattcttgtcaatataacgagaattgggtgtttgtggaaaaggaaaagaaaatgtttttcttgactaaggtctctacttggatatctgctgtacttctaaaaagaatggcatgctgttgcttcatggacttgggatgcccaggatgaaacctgtgggatttgtaggatggcctttgatggatgttgtcctgactgtaaacttcctggagatgactgcccattgatttggggtgtatgcaatcacgcatttcatttgcactgtatcctgaaatgggtgaattctcagacatcacaagcgcattgccccatgtgccgtcgggagtggcagtttaaaggatgagagcaaaattctcttttttttgaagtgtgatcacagagagcaacattataaattggtatggttaaattgaggacctttcttcttcgacttttccatgcatacaagatgtattttccttattagcaaatctgtatcttcattgtaacttgtaaggagatcgaaatcaaagtttctgtaaagtgcaagtttattttttccactaatgactaatgataatgtccttttcttttgttttc

SEQ ID NO: 425 - DNA, 622 bp, Glycine max
  Clone ID: PAT_MRT3847_83529C.1
tacggctgcgagaagacgacagaaggggggtctccactacgcattcggacaaaccctaacttctttttgctgttgttgggcaccaagatgaaagtgaacatcttgcaatggcatgctgttgcttcatggacttgggatgcccaggatgaaacctgtgggatttgtaggatggcctttgatggatgttgtcctgactgcaaacttcctggagatgactgcccactgatttggggtgtatgcaatcacgcatttcatctgcactgtatcctgaaatgggtgaattctcagacatcacaagcgcattgccccatgtgccgtagggagtggcagtttaaaggatgagagctcaggttttcattttctttttcgagtgtgaccagagagcaatgtaaattggtatggttaattcgaagatgtattgtttccttcatgttaaatctgtatcttcattgtaacttgtaaggagatcgaaatcaaagtttctgttaagtgcaagtttattttttccattaatgactaatgataatgtccttttcctttgttttccccaaaaaaaaaaaaaaaaaaaaaaccaaacgaaaaaaagatcattaagaaagccctaagaataacaataaaagat

SEQ ID NO: 426 - DNA, 1314 bp, Glycine max
  Clone ID: PAT_MRT3847_83932C.1
gagttaacgtagaaaagcttcgtctcttgtcttcgcttctttcaattccttctcctttctagctctctctcttcttatatttccacattccacgtgaaccttctagaactataatagacttatattccatggctccgccgctcgaacacaacggcgtttccaccagcggtgactctctgagatctattccgacgccgtttctcaccaaaaccttccaactcgtcgacgatcacaccatcgaccatgtgatttcgtggaacgattctggatcgtccttcatcgtctggaacaccaccgctttcgccaaggatttgcttcctaaatatttcaagcacaacaacttctccagcttcgttcgccaactcaacacttatggattcagaaaagttgtacctgaccgctgggagttctcgaacgagtatttccgaagagacgagaagcggctcctctgcgaaatacagcgacggaagatcctcccggcaacgccgccgacccgagcgactgcgaccgcggcggttctatctccgctgccgctatctacgattccgccggcgaagctgatcgtgtcgccgtcgaactcagcggaggagcaggtgatttcgtctaactcgtcgccggcggagctgttggatgagaacgaccggctgaggaaggagaacattctgttaacgaaggaattggaggagatgagatcgctctgcaacaatatattcaatctcatgtcgaattacgctaacgttcaagcggacggtggttccgcgggggtggcggcgcggtgcttcggcgaggatgcggtggaggagatgaatccgaagctgtttggggtggtgattggtacgaagcgagcgagagaagagaatgatacggttttgagtctgcatcagccgttccatgcggacgtgaaatccgaagcgttggatttcgcaagacgtggcgaaaataaaaaaacgccgtggctaaatcaatgtcatagagcaaatcagagagtgtgtaattgacacacgacgttgtaacagcagctaggaacacgttaggttaagctaggggcgtcgcagagaatcagagtcctgagcacggagacgcgcgtggcaaatgtacgtcgttaaccgtttgggactttttttcgtagaagcttctcagaagaaaacgatactttcgcgttcatttccttttgatgtttctattttttatttttttaagttaagggcatatattggacttggcatgtatatttgccttggaagggaaaaaaataattatttctctatcatattttgttttctttccaactgaataaataaataaaatacacag

SEQ ID NO: 427 - DNA, 516 bp, Glycine max
  Clone ID: PAT_MRT3847_84011C.1
ccacgcgtccgttttgagtagcagagtgggagcccttctctgccgcagctgaacatggagaagatacagatttccagttctcggtggatatgctaggagaatacagtgatgtagtgcgatcaccaaggttcaatggctcaggttccaaggtgtccagtttcagaagccctttgtctaagctcgtcgagagcgtcgacgagggcagtgacggccatgaagatcaaaacgagtctgatcgagtcttgtatgctggatggaatacatccagcgttcctagcaaagctatgggccatagtggcaatgcctcaaaaagtgcaatgaacaggagtgccgatgaacaacttccatcaagtatgtgttttgtcaggctgtcggatatgagtgcagatgagtgggatgtattcctcgaaaaattccaggagctgctgaaagaggcactgcacgagagcgcaagggcagcagcaggtcaaaggatgaagcagcggctgggcactttatgcaagttttgagcagggc

SEQ ID NO: 428 - DNA, 160 bp, Glycine max
  Clone ID: PAT_MRT3847_84065C.1
gcaagagttcctggattacgtgcatgccgagattgatgaaacacttgcctccaaaggagcgtgtactaggtgagttgtaaagtagaggtgaagacaaaaatacatgtgtactagtatgtgatgaaagagctcaaatcttcctatccttggtggtgaaaaa

SEQ ID NO: 429 - DNA, 2231 bp, Glycine max
  Clone ID: PAT_MRT3847_85713C.1
gaatgcgggtggagggcatttttcagttgtaagaaagcattgcataagataagataagtaagaaacacttccattgggcagagcaaccagcaccatgaattatgagctgctacagatagttgcactgctgacagtgatagcatttggaggagcattaaggaaagcaacaggagcatgcggttcagatgacttggaaggtttgatgggcttcaagaatggcattcagatggatacatctggcaggttggcaaagtgggtgggtaggagctgctgcgaatgggaaggtgttgtgtgtgacaatgcaaccactagagtgacacagatcaatctcccaggtctcattgaaaaagacttgtttcaaacccaaatggttggccagctttctccttccataacactcctcacttcccttgaaatccttgatcttggtggcttagtaggcctcactggattggctcgagaaacaattggcttgcaaatgccaaacctccaaaagctttacctttatggcaacaatttaactggaccagtaccagaaagcattggtgacttgccaagactccaggaactggcactgcatgaaaataagatatctgggtcaatcccttctaccattggaagcttaaaaaagctcaaaagtttgctgctttactcaaaccaaatttcaggtacaatacccttctcacttgggaatttgaccaatttggtagaattggatgttcatgataatgccattatgggtcaagtacccaatagcataggtcagatgcaggctctggagaagcttgatctttcaagcaatatgcttagtggaagcataccttcttcactaaccaatttaactgccatttcagttttgtacatggacaccaactatcttgagggaaccatcccatttccctcaagatctggtgaaatgccttctctgggtttcttaagactccacaataaccacctgagtggaaatataccccccagttttggctacctagtttctcttaaaagagtttcattatcaaacaacaaaattgaaggagcattgccttcaagtttgggcaatttgcattctttgacagagctttacctaagtgacaactccttttctggccaaataccaaaatcaataggccaactctctcagctcataatgttgaacatttccagtaatttgattgaatggccattgcctcaagagatatcttcccttcaaaaccttcaaacccttgatctctctttcaaccctttgaacctctcttccattccaccctggctaacaagcatatcatcgctttcccgcatatcccttgctggctgtggcatcaagggccaaattccagactcattgcaaacaacacagagtccaatacaagaactggacttatcagggaaccttctcagtggatccataccatcatggataggatcactcagtcagctctacttgctaaacctctcaagcaattcacttgattcacacatacctgaatccctcacaaacttgcctgatcttggtgttcttgatcttcactcaaataagttaacaggctcgatagctggagtatttgacactgaacaaggtacactaacatacattgatctttctgataacaacttctcaagtggagttgaggcaattggtgtgggagagcagttaaacattcagtacctgaatttgtctcataaccttctgaagggtacattgccaagttctcttggaaaactgaattccattcacagcttggatttgagcttcaatgaattagcctccaacttgccagagatgctggcaaagttgaccttgttggagagactgaagctgcaaggcaatcacttcagtggtaaaataccaagtggatttctcaagttgaaaaagctgaaggaattggatttatcagataatgtgcttgaaggggaaattccagagggtaagcctctaactgactttcctgggagcacttattctggaaacaaaggtttgtgtgggaagcctcttaatccctgtaaagagtaaactttgagaattgtaagatatgattggaaacccgtgaaatcaattgagttttggctgcatatcattgtgaaatatttgcttctattttcgtggtgtaaaatcataaagtaggacattcactagtttcatttcactatggaaagtagagaatctcatgtgttccttaacctaaaaacttgcatccctctagaaatagaaacttgtgagttgtgacaacccc

SEQ ID NO: 430 - DNA, 2429 bp, Glycine max
  Clone ID: PAT_MRT3847_8643C.1
ttgtttattttttttggaatactctaacaaaccattacatttaatttaaatgtcatacaatgggaatatgggataatgtctgtccccacaaatgaaaagttttcttgtgtatttttcttggtgtaaaggatagaaaaactggcaagacagttcagtgcactaaccatggtccttgaatctaaaaaggatagaagtacaacaaggagttggagctttaggatattctgctgaaacatattctgatcctttcctcagtacatctcaacatatgattatccaagaatctgagatgagactgaaatgaaagaaacctacaacaagttcagtgaatctcagtatctccaatatgtttcatatcttgtgtccgctgcaacttgactctaacaaaccattacatttaatttaatttaaatgtcatacaatgggaatatgagatactgtctgtccccacaaattaaaagttttcttgtgaatttttcttgatgtaaaggataggaaaaactggcaagaacagttcaatgcactaaactatggaccttgaatctaaaaagaaggatagaagtacaacaaggagttggagctttaggatattctgctgaaacatattttgatcctttctttcctcagtacatctcaacaatatgattatccaagtatctgagatgagactaaaacgaaagaaaccttcaacaaactcagtgaatctcagtatctccaatacgttttcatatcttctgtgcgctgcaacttgccaagtagtggtcataaaatgtatatattagtcatcagatatttcactaaacatatatggttgcaggattgaacttcacagattctctccagatgagttccttgatgtcttcttcagtgaatgatggttgctcaaagtcaaaactgaaaggtctggtgcaaacaggttcctcattgatgtcatggagaggtgacatgtatgggtggctcaacgcctcgtcaactgtaatacgcctgtttggatcaaagatgagcatcttctctatcaagtcaaccgcaccaggagacatgttgggaaatctagcagaaaagttttgttttggatactgtggaagctgttttacatatctacgagcattatcacttcgtagaaatccaaggctggcatcatcgggcgaacctatcagctctgtgataagtctcagctgatgaacataatctttgccaggaaagagcggttgtcttgttatgatttcaccaagtatgcaaccaacagaccatatatcaatggctgcagtatattctgagcaattaagaagtaattcgggagctcggtaccatcgagtgaccacatactcagtcataaagtcagtttcagatgtagttctagcaagaccaaagtccgcaatcttaaggtcacaattggcattcaatagcaaattactaggctttagatcacggtgcaaaacatttgctgaatgtacatatttgagccctcgtaacaattgatacagaaaataccgacaatgatcatcagtcaattgctgattggaacgaattatttgatgcagatctgtgtccattaactcagaaacaaggtacacatcattgaagttttccttctgtggaggacgtataatatctttaatggacataatatttgcatgatccatgtgccgaagaagtttaatttcccgtaaggtccttttggcatctattctgttgtcaaatgcattgccaatcttcttaatggcaacttcctcacctgtctctgcatttacagcagcgcaaacaataccataagcacctctaccgacagggcgaataggagggacatactttctggaaacttcgaagagattgccatagatattgtactgaacatagcgtccaccatgagttggtactcctctgatgttgttgtgttcagctgactcaacagcagacatgtcttgtgtgtgtgtctatgacctcttcttttcttctcaactcaattcaacaccaacaccaacaccaaaaacaacttggaaggaagaagaaagatgagagacccaaaataaatagggtgattcagagtggaaaagaagcaaactttccgacacttgagtttggaggacaaagtgagagagagagagacggacgaatagccgcggcatgttgcactacgaagttagattgatcatttggagcgacagtacatctcaacaatatgattatccaagtatctgagatgagactaaaacgaaagaaaccttcaacaaactcagtgaatctcagtatctccaatacgttttcatatcttctgtgcgctgcaacttgccaagtagtggtcataaaatgtatatattagtcatcagatatttcactaaacatatacaacataaatacaaaatctcagtagcctggtggaacaggattgaacttcacagattctctccagatgagttccttgatgtctt

SEQ ID NO: 431 - DNA, 1982 bp, Glycine max
  Clone ID: PAT_MRT3847_86591C.1
ggaggcacaacagctactccagctcttttgcattgcttgtagcagaagctgctgttgcatcatagtaaaagaaagaaagcctccaagacaagatggttgagatggatggcgttggcagcaagtatcatcaacaaacacttaacgtctccatcgacattcatcaacaaggaatctctaagtgtttcgacgacgatggtcgccccaaacgaaccgggacggtgtggactgcaagtgcacacataataactgcagtgattgggtctggggtgctgtctctggcttgggctatagctcagcttggatggattgctggtcctattgtcatggttatcttttctgccatcacttactacacttccactcttctctctgattgttatcgcaccggtgatcctgtaactggcaagagaaactacacttacatggacgctattcagtctaactttggtggaaatggctttaaggtcaagctgtgtgggctagttcagtatattaaccttttcggagtggccattggttacactatagcggcttccactagcatgatggcaattgaaagatctaattgtttccacaagagtggagggaaagatccgtgccacattaacagcaacatgtacatgatttcatttggtatagtggaaattcttttctcacaaattccgggcttcgatcaactgtggtggctctccattgtagctgctgtcatgtccttcacatactccactattgggctaggccttggtattgggaaagttattgaaaatggaggagttggaggaagcctaaccgggataacaattggtaccgtgacccaaactgataaagtttggagaaccatgcaagctcttggtgacatagcctttgcttattcatactccctcatccttatagaaattcaggacacagtgaaatcccctccatcagagtcaaaaacaatgaagaaggctagtttcatcagtgttgcagtaactagcattttctacatgctttgtggttgctttggttatgctgcttttggagatgcaagccctggaaaccttctcactggttttggcttctacaacccatactggctccttgacatagctaatgctgccatagtgatccaccttgttggttcataccaagtttactgccagcccctcttcgccttcgtcgagaaacacgcggcgcaaatgttcccagatagtgattttctgaacaaagaaattgaaattccaatccctggtttccatccctacaggctcaacctcttcaggttggtttggaggacaatatatgtaatgttgagcactgtaatatcaatgctcctcccattcttcaatgacataggtggacttcttggagcatttggattttggccccttacagtgtatttcccagtggagatgtacattattcaaaagagaataccaaagtggagcacaaagtggatctgcctccaaatacttagcatgacttgccttttgatgactataggagctgcagctggctctattgctgggattgccattgatcttcgaacttacaagccattcaagaccaactattgattaaactatgattgccattgatagagatttcagaaaccaaatttcatttcttggtcatattcttatgaagccaaggatatatggtgatcttgtttgtttatggcctagcagccctgtgtgttccacttctttctactgtgtatctgttactctctagctcgttctgcaacctaattcaaaatggaagaaatgaagtaaaagcacataaatctagtgtaattataatcatattttcattttttcccttctgttttacttttatttaagaataaaatatgttttttttataccaatataggtctagttggtaaggaacaaattcatgttccaaaattatgagtttggttcccactatccatgtaggaatcttattaggagtcatttgtgttctttgaatgaaatctgtcctgaggtagtacattctcg

SEQ ID NO: 432 - DNA, 476 bp, Glycine max
  Clone ID: PAT_MRT3847_86809C.1
cggctcgagcaagcacacaataataatatctaccttaatgagcttctctgcaatttgcactgtggtaccaaccaacaccattcacaacatcacaccatgaggaacaacaagccacagttatggctttctctttctctcatcatcacatgcttctcgttccacacttcccttgctgctttgaccaccatctcagcaaaccaatctctctctggggatgaaactcttgtctcccaacatggaaacttcgaattgggtttcttcaacacaggtaacaactccaataaattctacataggcatgtggtacaaaaagatatctcaaagaacctatgtttgggtagcaaatagagaccaaccagtttctgataagaattctgccaagttaacaatattggagggtaatttagtgcttttagaccaatcccaaaatctagtttggtcaaccaatttgagttctcctagctcaggttctgctgt

SEQ ID NO: 433 - DNA, 1652 bp, Glycine max
  Clone ID: PAT_MRT3847_87205C.1
ggggtggtggtggttgggggtttttgggttgtgggggtttttttgttcacttattttttttctaacatgaataaaataataattttcctattaatctcagggttaggcctagaatatgccattttccttgcgtatacccatcataattctatctcctttgccctccttttctcttctataaaaactatgatgcttttaatttaactacacagtatacacaatgatccctccacatgatgctatatgtgttcacacaagagcaacctcttgagcttgttcttgctgcttctgaattcctgtgatgtgtccaacgtaaagatgagtcccacaagaatcagattctggaagcctttgtctttttccaccttcagacatgcttttcacaaactccacaaagagcctccaattgtctccctcaaatagaaagatttttcatttttctctttaaagagtttgaacatatgattggaacaaattaacaaacgaattcatgtgaaatacaacataagatcaattcgcgggaattaaccgcacagcacttattggatttctaacatgaaataaaacaatatttttcctaatgatctcagggtttggtctagaatacgccattttccttgcgtatacccatcataattctatctctttttctcttctataaaactatgatgcttttaacttaactagacagtatacacagtgacccctccacatgatgctatacttattcacacaagagcaacctcttgagcttgctcttgctgcttctgaattcctgtgatgtgtccaacataaagatgagtcccacaagaatcagattgaggaagcctttgtctctttccaccttcagacatgcatttcacaaactccacaaagtgcctccaattgtctccctcaaacaacctcctattcattctcagataagtgaatgcagccaatccagaaccagagttacttgttgacagaacttgagaaaatgcacctgcatcatatctctcaagtgcattctccccagcaagttctgctcctgctgttctggctgccatcttcacttgatgaaccaacccctcaggggaacaatgctcatgttgctctctgtccctcatttccatgcaggtgaagtttaacacaactccatgttttgccaccatttgtgctattggtaggtatccatcgcgaaaccgcgtgttgtagtagcctgcagttagttcagccgcgtgtgacctagtcttgtagtgccaatgaattccagctactttggcagatagtttcaccccacatgagttgaatatgcctttggctgatacaaggattttctcaccatgttcaacaagtttggtggagtaccagtcaaggaagaattgtccatattctgtgttccatgtaccttcccttttgaaaaatcctcaggaaattggttgtattggcctgagtcatgtggtccattttttccccactctttcttcccaatggcctcagttgatgcttccaaggaagctctcatatacttgtcatagcactgaaattctccaattccaggaaacctccatgttccattgctttctggataagatggatatctcagctccccacaaggacccatccccacttgaatttcaatgataacactgcccaaatagtctctgaatctg

SEQ ID NO: 434 - DNA, 1203 bp, Glycine max
  unsure (1)..(1203): unsure at all n locations
  Clone ID: PAT_MRT3847_87237C.1
ccacgcgtccgcagaaattgcgaatggccacttcaccattatcacaactactactatctctgattctcctccagaattttcaccattcacattccttctccctctccgttgagaaccacaatgaagacgtcatagtttcatcacccaatgccacattcaccgcaggtttttaccccgtcggtgaaaacgctttctgcttcgcaatatggtacacccggccacctcgtaccgtcgtttggatggccaaccgggaccagccggtaaacggaaaacgctccacgctctcccttctcggaaccggtaacctcgaactaaccgatgccggtcagttcatcgtgtggtccacaaacaccgccaccccatcgaaacaaaacccccggttacatttgtacgacaccggcaacctcgtactaatagcaatcctcgacaactccgaagatcatgttttgtggcaaagcttcgattttccgacggacacgcttcttcctaaccaacctctgagcaagagcaccaacctcgtttcatcgagaagtgggaccaactattcctccgctcaccgtccgctcttcttcgacttcgagaatgttctgcgtctcatgtaccagggtcctcgagtttcgagtgtttactggccttacgcttggcttcagagcaataacttcggtaatgggaatggtagatccactttcaatgatagcagggttgttgtgctggacgatttcggcaaactggtttcttctgataacttcactttcactacaattgatagcggaacggtggtgcttcgacgaagattgaccctcgatcacgacggaaatgcgagggtgtatagcatcagagacggagaagataattggaaggtgacgggaatattccggccacagccttgttttattcacgggatttgtggacccaatagttattgcagtaataaaccaactactggaagaacgtgttcctgccttccaggatatagatgggttgatagtcaagactggtctcaaggttgtgaatcaagtttccagctttggtgcaacaacactgagaaagagtctcacttcctacgcttacctgaatttgattnttacggatacgactatggctattatccaaaccacacgtacgaacaatgtgtgaatctgtgcttggagttgtgcgaatgcaaagggtttcacacagcttctcagagaaaagtgactctac

SEQ ID NO: 435 - DNA, 263 bp, Glycine max
  Clone ID: PAT_MRT3847_87591C.1
ggatattgctcttgctgatctggctccaacccaccccatcaggctcgggcttgctctcaacttctcagtgttctactacgagatcctcaactctactgaccgtgcttgcaaccttgcaaagcaggcctttgatgaggcaatctccgagctagacagcctgggagaggagtcctacaaggacagcactctgatcatgcagctcctgcgtgacaacttgaccttatggacttccgacaccaacgaggaccgcggggatgagatca

SEQ ID NO: 436 - DNA, 666 bp, Glycine max
  Clone ID: PAT_MRT3847_8787C.1
gtacaccacgtcacaatccctaattccccaaaattttctctgaagaagaagcaacaatgtctggtcgcggaaagggaggcaagggtttgggaaagggtggagcgaagaggcatcgcaaggtgctccgcgacaacatccagggaatcacgaaacccgcgattcggaggctagccagaagaggcggcgtgaaaagaatcagcggcttgatctacgaggaaaccaggggtgtgctcaagatcttcctcgagaacgtcattcgcgacgccgtcacctacaccgagcacgctaggagaaagaccgtcacggccatggacgtcgtttacgcgctcaagaggcagggaagaaccctctacggtttcggaggctgagggcttgggctttttctgggcctggatttgttcttcgctgggctttaaaatgttgttgggaatttgtgttttgtttaatggttatgtatattatcttctgctcggtaatgcaagacttactcaagtttcttctattattctaatttctactaataattgcatcctagttagtgtgaatttgaagtaaatttagtgaatgacaaatggttatatgaatttcgtgtgttgaatactttctatttggattttcgttgtatgtgataattcggctactgtggattaagttgaagttcaagct

SEQ ID NO: 437 - DNA, 457 bp, Glycine max
  Clone ID: PAT_MRT3847_88032C.1
agcgtcttgtcatccgccttcaagcaaaatacgggaacaaatggaagaaaatcgctgcagaagtcccagggcgcactgctaagcggttaggcaagtggtgggaagtcttcaaagagaagcagcagagagagaaaaaggatgtcaatagaatctccgacccaattaacaatagtaagtacgagcacatacttgagagttttgcagagaaactagtgaaggaacgcccttcaccatcatttttaatggctgcttccaatggggcatttctgcacaccgatacaccagcacctgcatcatccttgcttccttcttggctttctaattctagtagtcctgccgctgatgggccaagttccctttcggtgacactaagtctttcttcctcaatggtgatcgcgcctccattttcatggttgccacccaagagaggaccagacaatgctccttttgttttggg

SEQ ID NO: 438 - DNA, 1592 bp, Glycine max
  Clone ID: PAT_MRT3847_88033C.1
ctcgagccgcccgtccccatatcctctctctcttccctgtcttgtctattctcattttctctctctgtctctttgctccatttcagtgctctgtcttctcccccaccaccgcactctctcagatattatcatttcatatcacacattcacatcctatcatcatcgacaacacgctatccccattgcttcttctcttctccctctctcgtttcctacttgacggcgccgtttcgttctccagaagatgcttctgagtacttcgcgctgcaactagacatgatgagttcaagtttcaagacatgggctgtgggatttgcacttggaaatgaaggagaggcaacgttggagagctgaagaggatgctttattacgttcttatgtcaaacagtatggtcctagggaatggaatcttgtgtctcagcgcatgaacacatatcttaacagggatgctaagtcgtgcttggagaggtggaagaactacctcaagcctggcatcaaaaaaggctctcttactgaagaagagcagcgccttgtcatccaccttcaagcaaaatatggaaacaaatggaagaaaatcgctgctgaagtcccagggcgcactgctaagcggttaggcaagtggtgggaagtcttcaaagagaagcagcagagagagaaaaaggagatcaatagaattgccgacccaattaacaatagtaagtacgagcacatactcgagagttttgcagagaaactagttaaggaacgcccttcaccatcatttgtcatggctgcttccgatggggcatttctgctcactgatacaccagcacctgcatcttccttgcgtccttcttggctttccaattctagtagtgctgcagccatcggcccaagttccctttctgtgaaactaagtctttcttcctcaacggtggccacacctccattttcatggttgccacccgagagaggaccagacaatgctccttttgttttggggaatgtatcagcgcttcatggagctattccaactctaagtgatagcatgcatatgtctcagatggtggagcactgtaaagagttggaagaggggcatcgtgctttggccacgcacaagaaggaggcagcttggaggttaagtcgggtggagttacagttggagtcagagaaggccaaccgaagaagggagaagattgaagaatttgaagcaaagattaaagctcttcaggaagaggagaaagctgctttaggtagaattgaagcagaatacagagaacagttagctgcattgaggagagatgctgaaaacaaggagcaaaagttggcagaacaatgggatgcaaagcatttacggtttactaggttactagagcaattaggatgcagagcagggctccttgagccaaatgcaagatgaagatatattttggcaaaatggatattggtgctcttctgactaaaattatatgcagtttgtgatcttggtatatttttattttagacgtgtatgaatttcctatctattcatacaacttgagtaacttccgttaacagttgaattacctgcatatggtatcacatccgagtttataaacttagttatattcctg

SEQ ID NO: 439 - DNA, 1638 bp, Glycine max
  Clone ID: PAT_MRT3847_8803C.1
ctcttgaatacaagtactatacgacgacagaagggggattcaattgaaattcgagtttcctttttaatcacctggtttttttttttaaatttgaaggagatccaatccaaatgcatcgaatgccaatcacctgaaattccgccagatctctccctcttacacgctcttgataaaccgaaacgaagcaatagctatagcatcacacacacacaccaccgctagggttagggttagggttgggggtgttccgaagtaacaacaatggcggtctccgacggcgtcgtgaagaaaatcgtcctctcctacacctacgtcgcgatatggatcttcctcagcttcacggtcatcgtgtacaacaagtacattctggatcgcaagatgtacaactggccctacccgatctcgctcaccatgatccacatggcgttctgctcctccctcgcgtacattctcgttcgcgtcttgaagctcgttgaaccggtttcgatgtcgcgtgatctctacctcaaatccgttgttccaatcggtgcactctattcactttccctctggttttccaattccgcgtatatatacctctctgtttcgttcattcagatgctcaaggcgcttatgcctgtcgcggtttattcaattggtgttattttcaaaaaagaggcctttaagaacgagaccatggcgaacatggtttccatctcgctcggtgtagcggttgcggcttacggcgaagccaaattcgatgcatggggtgttaccctgcagcttatggcggttgcgtttgaggcaacacggttggttctgattcaaattttgctcaattcgaaggggatttcgctgaaccctatcacctcgctttactacattgctccctgttgcttggtgttcttgtccgtgccttggattatcatggagtacccttcgttgagggacaactctagcttccatttggatttcgcgattttcggcacgaattcggcttgtgctttcgcgttgaacctcgcagttttcttgctggtgggaaagacttcggctttgacaatgaatgttgctggggtggtcaaggattggcttttgattgcgttctcttggtctgtgataaaggacactgtgaccccgattaacttgattggttacgggttggcgtttttgggggttgcgtattataatcattgcaagttgcaggctttgaaggcttcggaggcgcagaagaaggctctgcaggctgatgaagaggctgggaggttgttggagcagaaggatggagaagggactggaaggaagaacgacaaccagaactgattcaagtgctgatctcattatttggtcactctcttcgattaatgttggatgacgcaggttttgtttttggttttgttctgtaatgtactctgctattaggtaattattattatcgtcgtcgttattgttattatcgttataattatattattattatgatgttacatgttacttctcacagtttaattttcatacccatatttagttatgtattggaggctgagattgacttttgttccttatattactgattcgtgtttatgggtagctaatgaaattgcattatgatttttaataatttattaatgtcctgcaagtttatagtggaacagctaagtt

SEQ ID NO: 440 - DNA, 110 bp, Glycine max
  unsure (1)..(110): unsure at all n locations
  Clone ID: PAT_MRT3847_88136C.1
ttttatctatctccgcncctttnntgtngttccttctactcanttcgtngctttgngatctctctctgcaaccatgtccgtcgagaaagagagagagacccaggtntact

SEQ ID NO: 441 - DNA, 171 bp, Glycine max
  unsure (1)..(171): unsure at all n locations
  Clone ID: PAT_MRT3847_88256C.1
ctcnagaaaaccattgntggcactcccttcactccatctntgcnttagccaccacactgcacactctcctncgccaacaaccaaaccccagaaagttaacccctttcccttttnctcgaaccanaagacacgattttnaacgaaacaaacgcgacccagaagcagangaag

SEQ ID NO: 442 - DNA, 103 bp, Glycine max
  Clone ID: PAT_MRT3847_8838C.1
aatataaggaacaaaagacaatctcagcctccaatacataactaaatatgggtgtgaaaattaaactgcgggcagcaacctgttgcatcctaataataatata

SEQ ID NO: 443 - DNA, 121 bp, Glycine max
  Clone ID: PAT_MRT3847_88927C.1
gggtaattggggcctgctttacatcacatcacaattttttagcatctgattataatcaagggccccccacctgcattttaattttgcaacaaaagcaaaataagacggccccgggggcccc

SEQ ID NO: 444 - DNA, 117 bp, Glycine max
  Clone ID: PAT_MRT3847_89506C.1
ctacagggtccaacaggcaatcgcagctggcatcttacctttagcacctctgttgctccagcgatcatcaggcgtattcgaacagttacctttggtgcattgattggtacaaaacat

SEQ ID NO: 445 - DNA, 307 bp, Glycine max
  Clone ID: PAT_MRT3847_89565C.1
cccacgcgtccgcccacgcgtccggaaaaaaagcaactacatcagtccatggcaacccccaaccctaccagattctcccttgccatggagagaaccgggcaatgggttttctccccagaaatcccaaccgatgttattgttgcagttggagaatccactttttctctccataagtttattctggcggctaagagtaactacatcagaaaagtgataatggaatcagaagagagtgacctaacaagaatagagatttccaacataccttggaggacaagaagctttttaagaaagccgcgaaattttg

SEQ ID NO: 446 - DNA, 599 bp, Glycine max
  Clone ID: PAT_MRT3847_89776C.1
acttcccccactccgcatcttcaacgcgtctcatcgtcatctacacaacatcgcgacaacgcgtcacattcatctcttttcatcaagactttatcaccttaatctatcatcatgactggacgtggcaagggcggcaagggtctcggcaagggtggtgccaagcgccaccgaaagatcttgcgagacaacattcagggaatcaccaagcccgctatccgacgtctcgctcgtcgtggcggtgtcaagcgtatttctgctatgatctacgaggagacccgtggtgttctcaagaccttccttgagggtgtcatccgtgacgctgtcacctacactgagcacgccaagcgcaagactgtcacctccctcgacgtcgtctacgctctcaagcgacagggacgtactctctacggtttcggtggttaaacggttttctcccttgtttggtggctcgctcttgagaaggattattcagctgcgcttatacggcactgggatggatgtatttgactaaggcgttggggaaacggatatgatattaccatgggcgtcatggaagacgaccttgcaaatgaataccacattgaacattgaacacttgc

SEQ ID NO: 447 - DNA, 1250 bp, Glycine max
  Clone ID: PAT_MRT3847_89886C.1
cgccaccttaaatataacaaatacttgtctggtaaatgtaagttttatcctcctatcctcttcacaacacttgacaaagtgatgatgagaacaccaataagcagtgatgaaagtggtttgaagaaggggccatggagcccagaagaggacaaaatattagtggatttcattgagaaacatggtcatggaagttggagagcccttccaaggcttgcaggcttaaacaggtgtggaaagagttgcagactgaggtggactaattacctcaggcctgacatcaaacgcggaaaattctctgatgaagaagagcaactaatcatcaatttacattcagttctcgggaataagtgggcggctatagcatctcatctgccagggaggactgataatgaaataaagaatttgtggaacacgcatttaaagaagaagctaatgcaaatggggttagacccagtgactcaccgtccaagaactcatcacctaaaccttcttagcaacctacaacagatattggctctaattaggttacagtcagatgctaataaactccaattattgcaaaacatatttgaagcctcaaactcagacccactgccagattcttcttattctttgctaaatgatgttttgggggggttgaataatcttcactccaatgatctccataacctttatgatggtaattcactttctgtccaaaactttgatcagaacttgaatggtggcagaaacgctgagccttcaccgtcatcaaactcgcttccaaatctggtttcagcctcacctgatcgttccccagttgttaaggaagcacaaaacatattggtaaactcgaaggacttttccacctccgcttttgagttaacgtggggagatttcatggatgaagaagaaacaaaccagacttattggaaaggttttatggaccaacattctaaccagacatggtcgactttcccatgatcacggaatttgagagctatcacagcaataacgggatttattcgctgttctatctataataaaaaaaaaatatactgttcatttagttatatataatggttggtttaatttgtatgtattatttgacgatggattgatttcagatccaaatatagaaagctcttgtattgtatattaaatgtacaacgtggaaattaaatcaatcatagaatagaggcctatgatgttctttttctttgtataaactatactataaaataaaatgctgtttgtaggctttccttctt

SEQ ID NO: 448 - DNA, 528 bp, Glycine max
  Clone ID: PAT_MRT3847_9026C.1
gccgtgacttttgtagcagctggtctttcttcaggaaaaattggttccatagcatatgcttgttccattcactgtattgggagccactttgatggataagtctggaagaagaccacttataacggcttcagcaagtgggacatttttaggctgctttatcactggagttgctttctttctcaaggatcagagctgattgcttgattgggtaccaatattagcagttgctggcgtgctgatctacgtaggggcgttttcaattggaatgggaccggttccttggataataatctctgagatctttcccatacacgtcaagggaactgcaggaagcttggtggttttggtgaattggctaggatcttgggtagtttcatatactttcaactttctaatgagttggagctctcctggtactttatttttgtatgctggatgttctcttttgactattcttttcgtagcacagttagtcccagaaaccaaaggaaaaacactggacgaagtcaagcatgcatcaattcatag

SEQ ID NO: 449 - DNA, 466 bp, Glycine max
  Clone ID: PAT_MRT3847_90691C.1
ggctcgaggatgatgatcgatatctagctgaatttaaggcatgcaatgacactaatgaagctgctgatcactctatcagagcatatgaatctgctgcccttgcagtacatgctgatacacctcccacacatcccatgcgactgggagtagctggaaacaactctgaacgctattatgagatcctgaactcccctcggagagcctgtcatcttgctaagcaggcttttcatgaatctatttctgagcttgacaccttgcatgaggagtcatgctaagattgcaccttaagcatgcaccttctgagggacaacctaactgtgtggacttctggcatcccagaagatggagaagatgcccctaaagtgaatggcactggcaagcttggtagaggtgaggatgcaccgtgagccctatggatgatggaatgtatcctatgagtcgagcatgcgatggagaatgaaacatg

SEQ ID NO: 450 - DNA, 269 bp, Glycine max
  Clone ID: PAT_MRT3847_91167C.1
tccatagacgatggctaatttgaacttgctggacactctacagcaagtggtacatcatcattatccaagctaaaggttagagcgtgaatctgtagcatgtgggaaagggcttgagccatatcaaagatgcatatctgatgtgacagctactgatagagatgagcaatgtatacatcgtttcttgtagcttatacctcactggattcttgcttgaaaaagtgttcactttgagatgattagctgtaatggatgccttggttgctgctgga

SEQ ID NO: 451 - DNA, 315 bp, Glycine max
  Clone ID: PAT_MRT3847_91658C.1
tacggctgcgagaagacgacagaaggggataaaaggagatccaaagtaaagaacacagatgggatgacaccacgaaaccaaatgaaaaactgcgccttctatggctatgttagttcttttaactttatatactctatctgtgtatatatctctactctaattattgcttctcttcttaacgacaatggaggacccatcaacagaaacaacgttggtgctgaacagcgaatattctaggctgttcgacgaggacacggacatatacaatacgcattgtggagggaaccctattgccgaactttgtgtggagcccac

SEQ ID NO: 452 - DNA, 1117 bp, Glycine max
  Clone ID: PAT_MRT3847_91852C.1
tgcaaacgcattgaatgttaacagcttaaggatgctattgcataggtcatctacacctcaatcatctaatgcaattcaacgaatccaaagctcagatattgaatattcacattttactcggtcattggtaaggaaagtcctagaggaaagtctactgaaattgaaggaagaaaccactagacacagtaagtctatcagatgggagcttggggcatgttgggtacaacatttacaaaatcaagctactgggaaaactgagccgaaaaaggaagaagaggctaaagttgaaccagctgttaaaggccttgggaagcaaggtggattactaaaggaattaaagaaaaagattgatatcagaaactcgaaagttgaagtaggaaaagatatttcgccatgtaatggcaatgacataaacaagccagaagccactaaacaggaattagagagacaagatgaagaaaaggaaattatatggaaaaaactgctatctgatgctgcatatacacgccttaaggaatctaaaactgatcttcatctgaagtcacctgatgaattgatggaaatggcacataaatattatgttgatactgcacttcccaagctgttggcagattttgggtcccttgaactctcacctgttgatggaaggacgttgactgatttcatgcatactaggggcttgcaaatgtcttccttaggacgagtggttgagcttgcagataaacttccccatgtgcaatctctatgtatacatgagatggttgttcgagcctacaagcatatcttgcaagcagttgttgcagcagttgataatgtttctgagttggcttcatctatagcatcatgcttaaatatattattgggaacaccatcacctgaaactaatgatgaagttactagttgcgctgatgtagaaacccttctacgatttttgggagaatgctaaccagtgcccttagggcattggtcaaggaatcaaaagttgaaagtttttataggaaagtgtaatgttttatgctacaaaagctccccccaacttaatttccaatggaaaacctatttattccttaaccagttccttaggatactggtgaataaactttttattttaatattt

SEQ ID NO: 453 - DNA, 664 bp, Glycine max
  Clone ID: PAT_MRT3847_92215C.1
tacggctgcgagaagacgacagaaggggaccaagttagtttaatttgagtgtatattcagagagaaaaacgaagaaaacatcgtgaagcatgtctggaagaggaaagggagggaagggtctaggaaagggaggagcgaaacggcaccgtaaggttctgagggataacattcagggaatcacgaagcccgcgattcggcgtctggcgcgacgtggtggcgtgaagcgtatcagtggtctcatctatgaagaaactcgcggtgttctcaagatcttcctcgagaacgtcattcgcgacgctgtcacctatactgagcacgctcgccgcaagaccgtcactgctatggacgttgtttacgctctcaagaggcagggcaggaccctctatggtttcggtggttagagatttggggagtggattagggtttctcatcaatttcgttgttgatagttctttagctcttcttgtttgcctttgagttgtagctatgagaaattttaatatgtttatctgattaacttggatatatatatttatatcgtggcctgggtagattcattgttttctcgttattttgcttgtgccaaactgaatttaattgcaatgtttgttctttcggctaagttgaatttgattgttcaatttaattttgagtcattgcccgc

SEQ ID NO: 454 - DNA, 665 bp, Glycine max
  unsure (1)..(665): unsure at all n locations
  Clone ID: PAT_MRT3847_92216C.1
gtttcggnccggaattcccgcacctgacccaaatcgcgtcctctatattcattttggcatcgaggttgaatctcatcggagagagaaaaaccataaccatgtctggaagaggaaagggaggcaagggtctcggaaagggaggagcgaaacgacaccgtaaggttctgagggataacattcagggcataacgaagcccgcaattcgccgtctcgcgagacgtggcggcgtgaagcgtatcagtggtctcatctacgaagaaacccgcggtgttctcaagatcttcctcgagaacgtcattcgcgacgctgtcacctacactgagcacgctcgccgcaagaccgtcactgccatggacgttgtttacgccctcaagaggcagggcaggaccctctacggtttcggcggttagagaattaccgatttctgcattgcgtcgtggattagggtttcttatagtgtcagtcaatttcgctgttgatattatgcaacggttctttagctgtagcttgagatttaacgattgttctttgagtcgtagttatgagaatttttagtatgtcaatttgattatatttatgccttcttggtactcagcatgcaacgctaaactgaaatttatttgcaatggtcctatgccccaaaaaaaaaaaaaaaaaggccccct

SEQ ID NO: 455 - DNA, 1059 bp, Glycine max
  Clone ID: PAT_MRT3847_92218C.1
cccacgcgtccgtacggctgcgagaagacgacagaaggggacctatcaagttaatttgcgtctatattcattttggcatcgaggttgaatctcatcggagagagaaaaaccataaccatgtctggaagaggaaagggaggcaagggtctcggaaagggaggagcgaaacgacaccgtaagggtctgagggataacattcagggcataacgaagcccgcaattcgccgtctcgcgagacgtggcggcgtgaagcgtatcagtggtcttatctatgaagaaacccgcggtgttctcaagatctttctagagaacgtcattcgcgacgctgtcacctacactgaacacgctcgccgcaagaccgtcactgccatggacgttgtttacgccctcaagaggcaggggaggaccctctacggatttggcggttagacaattggggatttcagcactgcgtcctcgattagggtttcttatagtgtcaatttcgatgtttatatcctgcaatagttctttagctgtagcttgaggtttagcaactgctcttgtttcgctttgggttgtagctatgagaacttttaatatggtaatcaagattaacttcaactttttatgatgtggcctggttaaatgcattgtttatttatgccttctcgttatttaaaaaggccgcagaagcagagaaagaggacaaaaaatgaggtccttgagaagacagtttgtaattcatattatagttgtgagaaaattttgtttgatgttctgcccccttagctttatggagatcatgagttttaaaaccccgctattgcatttttttttttgaactcaagtctgttaatttaattagcactctggtctgttttgattatttctttggttttgtccttggttgttcaagttgtcttttttaattgttagcatgcacgctttccaggcattgaacttgatctttcttagctatattggggggggatcgctaactaatttcacgacattatagctggggacaggaaattgtgtgagtagagttgaaggcatatgatgaatcgtcgtgtggtt

SEQ ID NO: 456 - DNA, 1747 bp, Glycine max
  Clone ID: PAT_MRT3847_92219C.1
cttaaatgctttcattcaacaagagccaagagccagccgggccgcgaggcctggaaagcgtgcatgctaacaattaaaaaagacaacttgaacaaccaaggacaaaatcaaagaaataatcaaaacagaccagagtgctaattaaattaacagacttgagttcaaacaaaaattgtaagggtggtgctttaaaactcatgatctccataaagctaagggcgcagaccatcaaacaaaaatttctcacaactataatatggattacaaactgtcttctcaaggaccttatttcttgtcctccttctctgcttcagcagccttctttaggcgggcaccatggtggcgtttgttggtgcgttcaagacgaagcttatagtatgctttgaaggccttcatttcatctgttaccttaacaaggtcaacagttggcttctccctcacaatgggcaagaatggaccctggacttgagtggcatttgccagctcttcaaggctagaatcaccagccttgaccttgtgtgcccttcttgggaacacaaccaacttagccttgtaggttttgagcctctgcacattggcctgcagactctccaaagaacgattctttctgcggtgatcaacagaaatcccaatagttggagcaagtttcttgggaattcctgcagccttcaattcttccagtgaaaatcctctcccggctctgactttcatgttgtatttcagagtctggccatgaacaataggcctgagagatccagcagtaggcctggggaaaatcttgacagccttcttctgccgagccaaccgtcttctggtctttcgggctggttgattaaaccaagtcttcacatagttttgccagtgtttccggaagtgcccattggggataacattattatgcttaaccattgcttacctgcggatggctcttcagctgaaacggcgaagaagtgtggctgctgcggagagaggtttcctgccgttcctattcggggataacttttttatgctttaccatatcttacctgctggtggcctcttgatgctgaaactggcgaagaaggctgctgcggtagtgataaaatgaatatacaatcatttcaccagtggcagccgctatcataaaaagttgaagttaatcttgattaccatattaaaagttctcatagctacaacccaaagcgaaacaagagcagttgctaaacctcaagctacagctaaagaactattgcaggatataaacatcgaaattgacactataagaaaccctaatcgaggacgcagtgctgaaatccccaattgtctaaccgccaaatccgtagagggtcctcccctgcctcttgagggcgtaaacaacgtccatggcagtgacggtcttgcggcgagcgtgttcagtgtaggtgacagcgtcgcgaatgacgttctctagaaagatcttgagaacaccgcgagtttcttcatagataagaccactgatacgcttgacgccaccacgtctggccagacggcgaatcgcgggcttggtgattccctgaatgttatccctcagaaccttacggtgtcgtttggctcctccctttccgagacccttgcctccctttcctcttccagacatgcttgtcgatgtttctttttctctgagattcaaccttgatgctaaaatgaatatacacgcaagcaaacttggttccccttctgtcgtcttctcgcagccgtacccttctgtcgtcttctcgcagccgtaaaa

SEQ ID NO: 457 - DNA, 2173 bp, Glycine max
  Clone ID: PAT_MRT3847_92419C.1
cactgtcggagtaacaccttctgatcctcgaaaatcacttcctcaatggggtcttcatttcctctcctacactcacaggctcaaccagattaagaaaaggtcaagtggggtatatgcatcactatccgagagagagagaggagagtattattcccagagaccgccaactccgctactagacaccgtcaactatcctattcatatgaaaaatctctctaccaattgtttctagaactgggggccatttgggctcaagtcttggtgtggtggaactcaccgttgcactccactatgtctttaatgcccctcaggacaagatactctgggacgttggtcaccagtcttacccgcataagatactcaccggtaggagggacaagatgcataccatgaggcagacaaatggcttgtctggcttcaccaaacgttccgagagtgaatttgattgttttggcactggtcacagctccaccactatttcagccggacttggaatggctgttgggagagatctgaagggaagaaagaataacgtggttgctgttataggtgatggtgccatgacagcaggccaagcttatgaagccatgaacaatgctggatatcttgattctgacatgattgttattctaaatgacaacaaacaggtctctttaccaactgctactcttgacggacccataccacctgtaggagccttgagtagcgctctcagtagattacaatcaaataggcctcttagagaattgagagaggttgccaagggagttactaaacgaattggaggtcctatgcatgaattggctgcaaaagttgacgagtatgctcgtggcatgatcagtggttctggatcatcactttttgaagagcttggactctactatattggtcctgttgatggtcataacataaatgatcttgttgccattctcaatgaagttaaaagcactaacacaaccggtcctgtattgatccatgttatcactgaaaaaggccgtggatacccatatgcagaaaaggcagctgacaaataccatggggttaccaagtttgatccaccaactgggaagcaattcaaatccaaggctaccactcggtcttatacaacatactttgctgaagctttgattgcagaagccgaagctgacaaagacgttgttgcaatccatgctgctatgggaggtggaactggcatgaatctcttccatcgccgtttcccaacaagatgctttgatgtggggatagcagaacagcatgctgttacatttgctgcaggtctggcttgtgaaggtcttaaacctttctgtgcaatttactcatcattcatgcagagggcttatgaccaggtggtgcatgatgtggatttgcagaagctgcctgtaagatttgcaatggacagggctggattagttggagcagatggtcccacacattgtggttcttttgatgtcacatttatggcatgcctgcctaacatggtggtgatggctccttctgatgaagccgaacttttccacatggttgccactgcagcagccattaatgatcgacctagttgtttccgatatccaaggggaaatggcattggtgttcaactaccaactggaaataaaggaactcctcttgagattgggaaaggtaggatattgattgaaggggaaagagtggctctcttgggctatggatcagctgttcagaactgtttggctgcagcttccttagtggaacatcatggtttgcgtgtaacagttgctgatgcacgtttctgcaaaccactggatcgttccctgattcgcagcctggcaaaatcacatgaggttttgattacagttgaagaaggatcaattggaggatttggttctcatgttgctcagttcatggcccttgatggccttatagatggcaaattgaagtggaggccaatagttcttccggatcgttatatcgaccatggatcacctgctgaccaattgtctttagccggtcttacaccatctcacatagcagcaacagtgttcaacatactaggacaaacaagagaggcactagaggtcatgtcttagaaatattaaggggttcaatttttcactttacacgatgtacaatgcataacatgattcaccacgtgtaatataatatgaaaaagtaatgtaatactgtgaaattttgaagt

SEQ ID NO: 458 - DNA, 2377 bp, Glycine max
  Clone ID: PAT_MRT3847_92420C.1
atttattttctttctgcttctcatggatctctcctcactctcttcataccgcactgtcggagtaacaccttctgatcctcgaaaatcacttcctcaatggggtcttcatttcctctcctacactcacaggctcaaccaggttactgccatttatgaatgcaatgcctcctcttttataactacctttgtttattgctgaattagtcaatgggtgtatatatatttagattaagaaaaggtcaagtggggtatatgcatcactatccgagagagagagaggagagtattattcccagagaccgccaactccgctactagacaccgtcaactatcctattcatatgaaaaatctctctaccaatgagctgaaacaactcgcagatgaactgcgttctgatgttattttcagtgtttctagaactgggggccatttgggctcaagtcttggtgtggtggaactcaccgttgcactccactatgtctttaatgcccctcaggacaagatactctgggacgttggtcaccagtcttacccgcataagatactcaccggtaggagggacaagatgcataccatgaggcagacaaatggcttgtctggcttcaccaaacgttccgagagtgaatttgattgttttggcactggtcacagctccaccactatttcagccggacttggaatggctgttgggagagatctgaagggaagaaagaataacgtggttgctgttataggtgatggtgccatgacagcaggccaagcttatgaagccatgaacaatgctggatatcttgattctgacatgattgttattctaaatgacaacaaacaggtctctttaccaactgctactcttgacggacccataccacctgtaggagccttgagtagcgctctcagtagattacaatcaaataggcctcttagagaattgagagaggttgccaagggagttactaaacgaattggaggtcctatgcatgaattggctgcaaaagttgacgagtatgctcgtggcatgatcagtggttctggatcatcactttttgaagagcttggactctactatattggtcctgttgatggtcataacataaatgatcttgttgccattctcaatgaagttaaaaatactgaaacaactggtccctgattgatccatgttgtcactgaaaaaggccgtggatacccttatgcagaaagagcagcagccaagtaccatgtggtatctaagtttgatccagcaactggagaacaattcaaggccaaggccaccaccaggtcatattcaacatactttgcagaagctttgattgcagaagcagaagctgacaaagacattattggaattcatgctgcgatgggaggtggaactggcatgaatctcttccatcgccgtttcccaacaagatgctttgatgtggggatagcagaacagcatgctgttacatttgctgcaggtctggcttgtgaaggtcttaaacctttctgtgcaatttactcatcattcatgcagagggcttatgaccaggtggtgcatgatgtggatttgcagaagctgcctgtaagatttgcaatggacagggctggattagttggagcagatggtcccacacattgtggttcttttgatgtcacatttatggcatgcctgcctaacatggtggtgatggctccttctgatgaagccgaccttttccacatggttgccaccgcagcagccattaatgatcgacctagttgttttcgatacccaaggggaaatggcattggtgttcaactaccaactggaaataaaggaactcctcttgagattgggaaaggtaggatattgattgaaggggaaagagtggctctcttgggctatggatcagctgttcagaactgtttggctgcagcttccttagtggaacatcatggcttgcgtgtaacagttgctgatgcacgtttctgcaaaccactggatcgttccctgattcgcagcctggcaaaatcacatgaggttttgattacagttgaagaaggatcaattggaggatttggttctcatgttgctcagttcatggcccttgatggccttatagatggcaaattgaagtggaggccaatagttcttccggatcgttatatcgaccatggatcacctgctgaccaattgtctttagccggtcttacaccatctcacatagcagcaacagtgttcaacatactaggacaaacaagagaggcactagaggtcatgtcttagaaatattaaggggttcaatttttcactttacacgatgtacaatgcataacatgattcaccacgtgtaatataatatgaaaaagtaatgtaatactgtgaaattttgaagtggaaaatgcagattgccc

SEQ ID NO: 459 - DNA, 3106 bp, Glycine max
  Clone ID: PAT_MRT3847_92633C.1
tgcgcgcgtaaacactttcgggcgagtgtgtgtgtagcagtttctggttctgtttttggtttcgtttcagcaaaacctctcttcttcttctgattgattccacctcgcgatttttcgattttcgtttgttttcttctttttcggtttctgatctgaactcgattcgattcgctattgccggaaaatgagtcctccggcaagtgtccggtgatgatcgctccctcgagaggttgttgaggttatcgttgttgttcttcgaagtcatggtttcgatctgaggttttggcgctctcgagttcgttttgtactgttttacgtgtgacatgtgaattggaatgcttattccagcttatacaaaacagagacggatctcttcctattgttctcgctttgtttcttttgcagtagcatcatcatcatcaccataccttgttcagattctgctcactttcaccacaacggctttactatttaccgcgtttcgttttcgtgtcaccgcaaataatgaaaggaggtgttccctgtatccactcctcgtcagggaagatctgaagcagtgctagctgctcacgtcctgtaatggacgcatactcctccggcgaagaagtggttgttaagactagaaaaccatatacaatcactaagcaaagggaacgatggacagaggaggagcataataggtttctagaagctttgaaactacacgggcgagcatggcagcgcatagaagagcatataggaacaaagactgccgtgcaaataaggagtcatgcacagaagttctttacaaagctggagaaagaggcccttgtaaagggtgttccaattggacaggctcttgatatagacattccccctccacggcccaaaagaaagccaaacaatccttatcctcggaagaccaggattggtaccacatcattacatagtggagcaaaggatggaaaactcaatttagttgaatcttcacatgttaatcaagcactggacttgaaaaaagaaccacttccagagaaacatgatttagacgaagggctaacaactgtaaaagaaaataaggatgagaaccacgcaaaagtatttactcttctccaggaggtaccctgttcctctgtatcttcagcaaatgagagttcaataacaatgtctgtgccactgggaaatccatgtgccttcaaggagattacaccttccgtgaaagaggtaatagcacgagatgaaaaaactgaatcttttgtcactgttgaacctgaaaatgggaagttggagatcaatgatggaaaacagactaatggcactagtaaagactccaggttagaggattctgatgctttacatatgaaattggttcaaaatgagaaaccagatggtcttgattgtgaattaacaatagatgggatgcaaggcaatcagaattaccctaggcatgttactgtgcacgttgttgatgggaaccttggaacaaatactcaaaatccatcacaagatatgttgtttcgagattccatgtttcagccaataggaggggttaacgggcaacgaaatgtttttaccaatacagctccatcgaacacaagtgaaagtcaaaataacactgcacgatcttctgttcatcaatcatttcttccttatcctcccttcacacaacacaaccaagacgattaccaatcatttcttcacatgtcttcaacattttcaaatcttattgtctctaccttgatgcaaaacccagcagctcatgctgctgcaagtttcgctgctacattttggccgtatgcaaatccagaaacttcagcaaattctcctaggtgctcccaaggaggttttacaaatagacaaattggttcccctccatgcgttgcagctattgcagctgctactgtagcagctgcaactgcatggtgggcagctcatggattgcttcctttgtgtgctcctcttcatacttcttttgcctgtcctgcatcagtgactacagttccatcaatgaataccggtgaagcaccggctctgaaggcagagcaagaaaaaactactctacaaaatcctcctcttcaagatcagatgctggatccagaatactcggaagctcaacaagctcaacattcagcttcaaagtcaccagctgccattttatcagattctgagagtggagatgccaagttaaatacttcatcaaaggttactgatcatgagacgaacaaaacaatttctgagcaccttgattccaacaaaacaaagggaagaaaaccggttgaccgttcctcatgtggttccaacacggcctctagcagcgatgtggaaactgatgcactagagaagggtgagaaagggaaggaagagcctgaaatacctgatgctaaccaattagccattgagtttagtaatcgtcgtagaagcgttagcaaccttactgattcttggaaagaggtttctgaagaggggagactggcctttcaggctctgttctccagagaggtgttgcctcaaagcttttcacctcctcatgctttgaagaatacggatcatcaaatggacaacgccaatgataacaagcaaaacatagatgacaaagatgaagatcttgacggcaagaaatgcagttctaattatgaagcgatgcagaaaaacctgctatttgtagaaaataacgagggactgttaaccatagggcttggacaaggaaagcttaagactcatcgaacaggttttaaaccctacaaaagatgttccatggaggccaaggaaaatagggttggagcaagcagcaatcaaggtgaagagcaaggttgtaagagaatacgtttggaaggggagacttcgacttgaggtttgatatatgcagtaacataaaggcaacctttggtttttgcatatcatttctttatccctccaacggtgtacctatattgtatgtttatttctaattctgcagctcacgaaacttgtcgtgtagatgtgtgtaccgtattaaattactgtgtacgctcttttactatctttgtatgatgttaatgctgtttaaaactccgctaaatagacttagataagaaacattaagtattgtttgagccatgaacatcaagtaatttatgatccttcattc

SEQ ID NO: 460 - DNA, 263 bp, Glycine max
  Clone ID: PAT_MRT3847_93042C.1
gtccaaagccgcgagaggcaggggcgcagaaaaccctagccgccttcctctccttttcctttcataaaccctcagccgcgccgcaatagctcgccccctcgttcgccgcctctcctgctcctaccgcagctctccctcagtttagtgttcgcaatggcggccttcaacaagcttggtggccttctaaggcacagtgctctggtgcccggtatcactggtggctcttctcctgcagtgttcaatgctgcacggctcatgtctac

SEQ ID NO: 461 - DNA, 461 bp, Glycine max
  Clone ID: PAT_MRT3847_93101C.1
tacgcctgcggtaccggtccggacccccgggtcgaacccacgcgtccgtctccacgctgggggtctgctctccccttgtgtactgtgtgtgttggtgacttcttcctctctctctcttaagatctgaatagtttcagggtttaaaaaaaaaaactacatcctttgcagtttgcccataagctgagggattatgaattttccttgcgttttggaaagaaagcttctttttgttataattattattatttttttccagattccttaggttgtggctgtgtgaaaagggtagcagattccttgcaaatgcttcttgattatatgcttcttagcagctccactagtccactactcttcatcacatcttctctctctttgaactttcttcaaagagagtgtgtaactagtaataactgtgtatttgtgtgtatgtttttatgatcatataataataaatatgtttt

SEQ ID NO: 462 - DNA, 565 bp, Glycine max
  Clone ID: PAT_MRT3847_93738C.1
ttcggaggcttttcgcactctcttgatgtggctgtgcaggtacaagcacgtggaagacgcagaagctttgtttcacaattcggtgaagaagggtttgagggctgatataaagatgtggaacgtgatcctgaatggttggtgtgttttggggaactcgcatgaggcaaagagggtgtggagagacatagtggcttctccatgcaagcctgatatatttacctatgccaccttcatcaaggcattgaccaagaaagggaaacttgggacggcactgaagttgttccgtggcatgtgggacaagggtggtaaaccggatgttgtgatatgcaactgcatcattgatgctctttgtttcaagaagaggattcctgaggccttggagattttctgtgatatgagtgagcgaggttgtgaaccgaatgttgctacttacaattcacttattaagtacatgtgcaagatacagcggatggagaaggtttatgagctggtggatgagatggagaggaagaaggggagttgcttgcctaatgctgttacatattgttacttgctcaagagcttg

SEQ ID NO: 463 - DNA, 259 bp, Glycine max
  unsure (1)..(259): unsure at all n locations
  Clone ID: PAT_MRT3847_9385C.1
gtccacggngaaggagagagagacccatgtttgcgtggccaagctctctgagcaagccgngagatatgaagagatggttgaatgcatgaagacaattgcaaaacttgatctagaactgactgtggaagagaggaacctgctctcagtgggatataagaatgtgattggtgcaagaagagcctcttggcgcattatgtcatcaatcgaacagaaggaagagtcttaaggaaatgagagcactgcgnaactgctcaaaaat

SEQ ID NO: 464 - DNA, 101 bp, Glycine max
  Clone ID: PAT_MRT3847_94325C.1
cgtcgatcagggtcgcaagtatgacgagtatggcttcgttgagaagcaatccgtcgaatacggcttccctgttcatgcttttagtgtcacctatgtagcca

SEQ ID NO: 465 - DNA, 277 bp, Glycine max
  Clone ID: PAT_MRT3847_94669C.1
gagcgctcccactacacgcgaagactacgagtacatggctaaactggctgatcaatccactcgctacgaggagatggaggagttcatgaataaggtctacctctccgcttagagctacgagctgaccgtggaggagcgtaaccttctctccgtcgcctacaagaacatgatcggcgctcgccgcgcctcctgacgcatcatctcctcaatcgagcagaaggaggagagccgcagcaactaggaccactgtcccgtcatacacgactaccggtcaaga

SEQ ID NO: 466 - DNA, 1771 bp, Glycine max
  unsure (1)..(1771): unsure at all n locations
  Clone ID: PAT_MRT3847_94687C.1
ctttcacaacataacatattgctttctaattattcgtgttgtcagtgtctctttgaggccattttgctagctatttaataatggcaattgagaagcatgaggatgttgagagtggatatttgcacgagcccttcattcaaccagaggatgctgctgctgcttgtaaagaaaatggatcagataagagtgtgaaaaatggatccattggaatggtttttcttagcacacttgttgctgtttgtggttctttcacatttggaacttgtgtgggctattcagcacccactcaagcggctatcagggcagatcttaatctatctcttgctgagttttccatgtttggttcattagtgaccattggtgcaatgcttggagctataacaagcggccggattacagatttcattggccgcaaaggggcaatgaggatttcaacaggattctgcattactggatggatagctgtcttcttctcaaagggttcttactcccttgacatgggaagatttttcacagggtacggcattggagttatctcttacgtggttcctgtatatatagcagaaatagcacccaaaaatcttcgaggaggactagcaacaacaaatcagcttttgattgttactggagggtcagtctcattcttattaggaagtgttataaattggagagaacttgcattagcggggctagtgccttgcatttgcttgctggttggtttgtgctttatccctgagtcccccagatggctggctaaggttggccgtgaaaaagaatttcaactagctttaagtagacttcggggtaaagatgctgatatttctgatgaagctgctgaaattctggattatattgaaactcttcaaagtcttcctaagactaagctgttggatttgttccaaagcaaatatgtgcactctgtagttattggggtcggcttaatggcatgtcaacaatctgttggaattaatggcataggattctacacagctgagatttttgtagcagctggactttcttcaggaaaagctggtaccatagcatatgcttgtatacagattccatttacattattgggagccattttgatggacaagtctggaagaagacctcttgtaatggtttccgcagctgggacattcttaggttgctttgttgctgcctttgctttctttctcaaggaccaaagcttattgcctgagtgggtacctatattagcatttgctggcgttctgatctacatagcagcattttcaattgggctcggatcagttccatgggtgataatgtctgagatatttcccatacatttgaaggggactgctggaagcttggtggttttggtggcttggctaggagcttgggtagtttcatatactttcaactttcttatgagctggagttctcctggtacattgtttttgtatgctggatgttccctcttaactattctatttgtagcaaaattagtcccagaaaccaaaggaaaaactttggaagagatccaggcttgtattagttcatagagataaaagatcaaaaacgcactgcaggacccagtcaaaccattaccaccatttttcaaattcttttacatccatttaggaccgtcaaggcataaaataacataatgttgccatatcgatccatttttgttgttgtataataataataataataataataatgtatcattagcttatttgataagaaaaaaatcattctgtaacactgtgcctctgcctgtnctgatttttnnnatggannnngc

SEQ ID NO: 467 - DNA, 409 bp, Glycine max
  unsure (1)..(409): unsure at all n locations
  Clone ID: PAT_MRT3847_9479C.1
caaaaaaaagcttaagtttaggatgacccaatgcaggaacatgcagggggatctaatagattatgtccccggattccctaaagaatccgacatgaacattgttgaatgcaccatattattgaatgtgccacaaggttacagtgatgtcctgataaaaaatctctacttgtcatgtgatccatacatgcgacttctcatggccaaagaccgtgctttcggagatggctacttcacccttgactatccattgaaaggatatggtgtgtctcaagtgctggaatctggacgttcagattacatgaaaggtgacttaatgtgggggattactgaatgggaagagtatagccngtggccgtcatctatcatacatttcataattgagcacactgatgntccactttgctactac

SEQ ID NO: 468 - DNA, 2609 bp, Glycine max
  Clone ID: PAT_MRT3847_95346C.1
ggctcgaggagaaacacgcgaacaatgaggggagtgcatcatgcaagcctctgcaattttttctttcagcagctcgaccttccttttgtgacataagaggttgagtggagttgccccatctgcataaagagaccgagaaatgattgctttttgtaacttatgtgcagtaacaaaataattctgtgatttatctgaaataggtagttggatgattttatgtcttgctttttctatctaaatatggctttggaaaggaaaattgcaaagttgtgtttctgttgattctaagggaaagagtgagtatggctgttgatagaggtgagatatggctacactgacggggcagtaacagtccaaatatatgattttaaattggattgggcggtgtagtacgaggcaggaatttgctggctttatcaccattttcattgaataagtaatactactttatagctcccggggattttgatcaatgaaccaaacctcctcctcctcctcccctcctcctcttcttcttcttctttaccctttcttttctctctgggtctttttcatcactagcaaaacttgaacttggaattggagttggctcaaaaagggaaacttggatctcagtcatatgaggataccttcaactctcgtggaagtgcttctggtacttgcattgttctgttgtagcccatggacagtgtggagcagcaacactctttgccaacagacgaacgaggaagttcgacctcacagtgtcagcatcactgaatttggtgcagttggcgatggggtcactctcaacacaaaagcatttcagaatgccatcttctacctaaattcctttgcagacaaaggtggagcaaagctttttgtcccggcaggccggtggttaactggtagttttgatctcatcagtcatctaactttgtggttggacaaggatgcagtaattcttggatcaacgaaccctgaagattggccagttgttgatcctctaccgtcgtatgggagaggaagagaattgccaggtggaaggcataagagcctcatttatgggcacaatctgactgatgttatcataacaggtaataatggaactatcgatggtcaagggagtatctggtggaacaggttttggaacagaagtctggattatacacgtccccatttggtagaattgatgaattcaacaggggttctcatttcaaatttaaccttcttgaattctccattttggacaatccatcctgtatattgcaggtttgtcccccactgaaagattgagtttatatattattccttgttttccgtagttcaagtacttccattgcctttttaaaactgtgcaatagaggagctttcatgagtagggggagatttgagactgtttttatggatgaacagccaagttacagttcagaatgtcaggatccttgctcctcatgattcgccaaacacagatgggattgatccagattcttctgacaatgtatgcattgaagactgttatataagcactggtgatgatctgattgccatcaagagcgggtgggatgagtatggcattgcatatggtcgcccaagcacaaacattatcatccacaggctagttggtaaaactcaaacaagtgggattgctattggaagtgagatgtctggtggtgtatctgaagttcatgcagaagatattcaattctatgattcatataatggaatcagaataaagacttctcctggcaggggtggttatgttagaaatatctatgtctctaacgtgagcttggctaatgtagatattgctatttggttcactggttcatatggggagcatccggatgatgcttatgacccaaatgctctacctgtaatagaaaaagttacaatcaaggatgtggtaggagaaaatatcaaaactgcaggtcttatagagggtatagaaggtgacaattttgtcaacatttgcctgtcaaacattatccttaacgtgacctcaaactatccatggaactgctcctacgttaaaggatattctgacttagtccagccagaagcttgtgagcctctcaaggagagaatattccctgatcattgttcagattgttactatttgacaaatcaaattcagagttcgaatagtcaaaatagagcaggacaaacttcaggtgacataagaggttgagtggagttgcccaactgtgagccatctgcagaaagataccgagaaatgattggtttttgtaacttgtgtgcagtaacaaaataattgagtgatttatcagaaataggaagttggatgatttcatgtcttgctttttctagctaaatatggctttggaaaggaaaattgcaaagttgtgtttctgttgattctaagggaaagagtgagtttggctgttgatagaggtgagatatggctacactgacataattccctcttgccaaaaatgttatcggacacaggagattttgcagtagtacgaggcaggtgcttgttggctttacaccccttttcattgaataaggaatccaataaataaacttcctagataggtggaattcactcaattacatacatgcctcttcttttacgctcactacatgaatagagttactatttt

SEQ ID NO: 469 - DNA, 1330 bp, Glycine max
  Clone ID: PAT_MRT3847_95870C.1
cggacgcgtgggcggcacccctgacttgaacctcttaccgtgcgcatcttctcaatccataacaacttcgccaccgttgcaccgaaaccaatcgccacaaactcgggatctcagattcgacgcgccaaaccatgtcgaaggcgcgtgtctacacagatgtcaatgtccttcgccctaaagagtattgggattacgagtctctcacccttcaatggggtgatcaagatgattatgaggttgtgcgaaaagtgggcagggggaaatatagtgaagtttttgaaggcataaatgtcaatagcaatgagcgctgtataatcaagattctgaaacctgtcaagaaaaagaagattaaaagagagataaaaatacttcagaatatttgtggaggcccaaatattgtcaagcttcttgatattgtcagagatcaacattcgaaaactcccagtttgatatttgagtatgtcaacagtacagattttaaagttttgtatccaaccttgactgattatgacatacgctattacatatatgagctccttaaggctttggattactgccattctcaaggcattatgcatagggatgtcaagcctcataatgtcatgatagatcatgagttacgaaaacttcgcttgatagattggggtcttgctgaattttatcatcctggaaaggaatataatgtccgtgtggcttcaagatactttaaggggcctgaacttctagttgatttgcaagactatgactactcattagacatgtggagccttggctgcatgtttgctggaatgatatttcgcaaagaacctttcttttatggtcatgacaaccatgatcagcttgtcaaaatagctaaggtgcttgggactgatgaactgaatgcatatcttaataagtatcatctggagcttgatcctcaacttgatgcacttgttggaagacacagtcgaaaaccctggtccaaatttatcaatgcagataatcagcatcttgtgtctcctgaggcaattgattttcttgataagctccttcgatatgatcaccaggacaggctaacagctagagaagcaatggcacatccatatttctctcaggtaagggcagctgaaagtagcagaatgaggacacagtaacttgatcacatatggatccataaacttgagttaatatatttgggattgttttatgataccctaacacgcacctccgttaccttctgtttattacagagattagttttcctggggagtgtatcgatattatgttttcagttgaggaataatgccattgccagttattgaaaattgaaattgtcttgaaagttgtgact

SEQ ID NO: 470 - DNA, 262 bp, Glycine max
  Clone ID: PAT_MRT3847_96578C.1
ggcggccgctccctcacctcgcgaagagaacgagtacatggcaaagctcgccgaccaggccgcgcgctacgaagagatggtggaaaccatggaaaacgtctccgccgccgtcgacaaccaggagctcaccgtcaaggaaaggaacctcctctcgcccgcgtacaagaacgtgatcggagcacgccgcgcctcgaggcgcatcatatcctcgatcgagcagaaagacgagagccacaccaaccaggaccacgaatccgtaatc

SEQ ID NO: 471 - DNA, 331 bp, Glycine max
  Clone ID: PAT_MRT3847_9664C.1
ctcaagccgttcgacccgcgaaaaaaccaactccttaagttcatggcaccccccaacccaaccgaattttcctttgccatggaaagaaccggccaatgggttttttcccaaaaaatcccaaccgttgtaattgttgcagttgaccaaaccaatttttctttccacaggttatttctggcgggaaagagtaactacgtcaaaaaaagtgataatgggaatcagagggagagtgacctaacaagaaatagagatttccgacataccctggaggatcagaaagctttgaaaaaagcggcgaaattctgtttacggcgttaaacttcgagaatca

SEQ ID NO: 472 - DNA, 993 bp, Glycine max
  Clone ID: PAT_MRT3847_96842C.1
aaaccaactgttttaaatggaggagtgtgagtggtgaggaccctctcaccacccctttatctccatgcttcttcaagaaccatggatggatgtttgccaacaaagctccatatttgctcaccagattcaggacttgatagattggtttagagggtgtgtccaaagggctttacacagaaaaactaggttttttttttttttttttttttttttttttttttttttttttttttttttttttttttttttcgttaaaacagtttctgtcacatccataaacacagttgataacttccatgactccgaggcttaacaagatcatacaaaaatatataactttgcttaaatgaaaacaacaaactacaagcaattgaggctagttctttggcccaatatccttcagggcacaaatctgctcctcacccattgcagacataactgacacaacaaggtccttaccctcagcaaacccatcctttatctgagtaagcaaactctcatcagtaggaagcttcaggtcatccttggtgttcccattttcagtaagcaagctaagaaatccatcctcagcaatgtcaatcaactggtaatcagtacgattcacatggggaacatcacagttgtgagaagagggcacaatatcttcaagcttcttggcagtgaaaatatcaatcccaacaaagtgacacttggcatgaccgtgcttaccagtcttggaagtagaaacttcaacaaccttgcagggacgacccttgatgacgatgtaaccgtttttgcggatggttccggcttgttgaggataggtcttggaggctccagcatcggccttggattcgaaatggtgttcttcgtccgacatggttcgactcggtcactgactcacaccgattcaactcgaccgactcagagagagtgtgtatggagggtgggtgagtgggggcggagaagacagagactaggaaggaggaaatggatttatataattctcgagcc

SEQ ID NO: 473 - DNA, 856 bp, Glycine max
  Clone ID: PAT_MRT3847_96843C.1
tttatttattttagttagaatgcaaaatacgttaaaacaaaaataatttgatagtcgtattttatcaaaaaaatatcaagacaacatcgaaacagagaaatgttaaacagtttctgtcacatccataaacacagttgataaaactagtctgacttagagtctccataactccggggtttaacaagatcatacaaaaatatataacttttgcataaatgaaaacagcaaactaccagcaattgaggctagttctttggcccaatatccttcagtgcacaaatctgctcctcacccattgcagacataactgacacaacaaggtccttaccctcagcaaacccatcctttatctgagtaagcagactctcatctgtaggtaacttcaggtcatccttggtgttcccattttcagtaagcaagctaagaaatccatcctcagcaatgtcaatcaactggtaatcagtacgattcacatggggaacatcacagttgtgggaagagggcacaatatcttcaagcttcttggcagtgaaaatatcaatcccaacaaagtgacacttagcatggccgtgcttaccagtcttggaagtagaaacttcaacaaccttgcagggacgacccttgatgacgatgtagccgtttttgcggatggttccggcctgctgaggataggtcttggaggctccggcatcggccttggattcgaaatggtgctcttcgtccgacatggttcaactcggtcactgactcaccgattcaactcgaccggctcggaggagtgggagagtgtgtatgtaagtggggtgggagagtgggggcggagaagacaaagactttgggggaggatatggattta

SEQ ID NO: 474 - DNA, 289 bp, Glycine max
  Clone ID: PAT_MRT3847_97352C.1
ctcggatttaggtagagctcgagccgtatcagctcgagcagggttaagcggtgtgattttcgaatctgagaaatgggctattcttctcgggaggagaacgcttacatggagaaattggcggagctctccacacgtttcaatgagatggttgatttcatgtaaaatggttgcaatagactgtggaggttgaggagttgacagtggaggaaaggattctcctctctgtggcttacaagaacgtgatagactcgaggagggcttggttgatgatcatattcttcattgagca

SEQ ID NO: 475 - DNA, 230 bp, Glycine max
  Clone ID: PAT_MRT3847_97372C.1
cacacaactactacaagtactttcttacaatcaaaaccaacaaccactatggcaaggtatcaaaaacacttccatgatcaaggtccccagggtgaccaattttgcaaccgttataagcaaaccgaccaataccggaacccctgttcatgctgctaagtgcacctatgtagccaccaaaactgctgctggtggttacagtgatgacattaataagcaacattgattccacc

SEQ ID NO: 476 - DNA, 444 bp, Glycine max
  Clone ID: PAT_MRT3847_97721C.1
cggacgcgtgggaacagattgagagcctacagcgtcctattacaatggaagcaggctcgattgttctaatggatttattatggtctgatccaacagaaaatgatagtgtggaagggttgcgaccgaatgctcgaggtcctgggttggttactttcgggcctgatcgtgtcatggagttctgcaataacaatgatcttcagttgatcgttcgagctcatgagtgtgttatggatggctttgagcgctttgctcagggacatttaatcacccttttctcagcaactaattattgtggtaccgctaataatgctggtgcaatcttagttttgggtagagatctagtggtagttccgaaactcattcattctttaccccctgcaatgtcatccccagaagcatcatcggaacgtcttatataggatacatggatgcaggagctgaatg

SEQ ID NO: 477 - DNA, 321 bp, Glycine max
  Clone ID: PAT_MRT3847_97804C.1
ggctcgagatacagtcgttaatcctagcttcttcaactcctcgctggcaacaacagcagcactaccatgagccgtgttcttcaaacgtgactatcgagaattaccgatgggaaatgaaagaggaggattcaagggattcatgagcgcttggagcgtgccgaccaatccgtgcgatacctgcaagctggcctcggcggcactcttctgccgccccgaactcatgatttctgtgcgtcggctgcgagtccaacattgactggacgatcaaactcgcgacgagccaccagcgcatgttgatgtgttaagagtgccagcactcac

SEQ ID NO: 478 - DNA, 911 bp, Glycine max
  Clone ID: PAT_MRT3847_98128C.1
cccacgcgtccgacggctgcgagaagacgacagaaggggagatacagaaaagaaaaaggaaaccctagctggataggtcaaacatcatcatgtcggacgaagagcaccatttcgagtccaaggcagacgccggtgcctccaaaacctaccctcagcaagccggtaccattcgcaagaacggctacatcgtcatcaaaggacgcccctgcaaggttgtggaagtttcgacttccaaaactggaaagcacggtcacgccaagtgccactttgttggaattgatattttcactgccaagaaacttgaggatattgtgccctcttctcacaactgtgatgttcctcatgtgaatcgtactgattaccagctcattgatattgctgaggatggatttttgagtctgcttactgaaaatgggaacaccaaggatgacctcaagcttcccactgatgagagtctgctcactcagataaaggatggatttgctgagggcaaggatcttgttgtgtctgtcatgtctgctatgggtgaggaacagatttgcgccctgaaggatattgggccaaagaactagcttttggtgctggcagcctgttgtttctatttaagcaaagatccttttgtaagcctttatattggtttgttcaagacctggcttatggcttatagattctagtcagactagtcttaacaatggtgtttatggatgtggtcacagaaactatatcacattttttctggttttctatgctgtcctatgactttgttataaaggaggagtcaaatgtgggaaggtttttttttggtatgatatgatgagattttcattgcctgcattgatgaaaacttacattctaatgtcaaattacacacagcattatcagacctgatgcaaataaaccaattgtgtatg

SEQ ID NO: 479 - DNA, 851 bp, Glycine max
  Clone ID: PAT_MRT3847_98129C.1
tacggctgcgagaaaacgacagaaggggagagacgcagatatctgtaatttgtgtctgctcactcgctcttctccgccacttctgaatctattgaatcaacaatcatgtcggacgaagagcaccatttcgagtccaaggccgacgccggagcctccaaaacctaccctcagcaagccggtaccatccgcaagaacggctacatcgtcatcaaaggccgcccctgcaaggttgtggaagtttcgacttccaaaactggaaagcacggtcacgctaagtgtcactttgttggaattgatattttcactgccaagaaacttgaggatattgtgccctcttctcacaactgtgatgttcctcatgtgaatcgtactgattaccagctcattgatattgctgaggatggatttttgagtctgcttactgaaaatggtaacactaaggatgacctcaagcttcccactgatgagagtctgctcactcagataaaggatggatttgctgagggcaaggatcttgttgtgtctgtcatgtctgctatgggtgaggaacagatttgtgccctcaaggatattgggccaaagaactagcttttggtgcttgttgcttgttatttctattttctatttaagcaaagatatttttgtaagccttttatattggtttgttcaagacctggcgtatagattctagtcagactagtcttaacaatggtttttatggatgtggtgacagaaactattatcacatttttctggttttctttgttgtcctgtgattttattataaaggaggagtctattgtgggaagcttttttttggtatgatattatggagatttcattgcctgcac

SEQ ID NO: 480 - DNA, 1184 bp, Glycine max
  Clone ID: PAT_MRT3847_98366C.1
tttggaagttttttttttttttttttacttgcaaaaaaaaaaatccaacgttgttctcgtcaataaaaaagaggcaactacatagcaacaataaaaaatttataaatcactaaaccaccaagccacattgttctcgtcaataaaacacatacacgactgaaacattgtaaatctcaagcgcaacccgcaattgaaatcacgaaactcattaatacacagttccactatggcaagccacattggatgtatattatcggtaatacatatcccatcaactactgccatcgcctattcacctggttgttgcttagatgtttccttgatctcatctccagcatcgtccgtgatgtctgatgtccacaaagtcagattgtcacggagaagttgcatgatcaacgtactatccttgtatgactcttcacccaatgtgtcaagctcggaaattgcctcatcaaatgcctgtttggcaagattacaagcccgatctggcgagttaaggatttcataatagaagacagaaaagttgagagcaagtcccagcctaatggggtgagtgggggccaagtcagcaagagcaatatcctgagcagatttgtaagcaagcaaagtactctctgctgcctctttcctctctgccccagtcttgaactcggcaaggtacctgtggtaatcacccttcattttaaggtaaaacactttactctcgggagatgcggcggatgggatgaggttggactcaaggaggttcaaaatcccgtcacagatcttgctgagttcagcctcaattttgcccctgtactcctttataatggccacatggtcctcattgcccctgctctcctccttctgctcaatggaggatatgatcctccacgaagccctcctcgcaccaatcacgttcttgtaagccacagagagaagatttctctcctccaccgtcaactcctcaacctccacagtctttgctaccttctccatgaactcaaccatctcctcgtaacgctcggcctgctccgccaatttcgccatgtaaacattctcctcccgagaagaatccgacatttctcagattcacgaatctcaccgcttaatcctaaaaaatggaagatgcagatctggaaaggagaaacaaaaaggaaaccctaaaaggagaagaaagtgggacgatgaaccccgaggccgaa

SEQ ID NO: 481 - DNA, 1525 bp, Glycine max
  Clone ID: PAT_MRT3847_98379C.1
atcctcccgcttctctctctctctctctctctctaactctcttctaaaacttaccaacacatccatctacacttccttcatttccatccccttctctcttttaaacctcacgcacaacgaaatcgtgattctgttgttcttttgaaatggaaaacgctccggtggtgtgtaaggaagatgatcagatggatttgcctcccggatttcggttccacccgactgatgaagagcttataagccattacctctacaagaaggtcattgacaccaagttctgcgccagggctattggagaagtggacctcaacaagtctgagccttgggatttgccatggaaagccaaaatgggagaaaaggagtggtactttttctgtgtgagagacagaaaataccccactggcttgagaaccaacagggccaccgaagctgggtactggaaggccacaggaaaagacaaagagattttcagaggaaaatctttggttggaatgaagaaaactcttgttttctacagaggtcgagcacctaaaggtgaaaaaagcaattgggtcatgcacgagtacagactcgaggggaaattctctgttcacaacctcccaaaaactgcaaagaacgagtgggtgatttgcagggtgtttcagaagagttcagctgggaagaaaactcatatctcggggataatgaggttggactcttttgctgatgaattgggttcttctgctctgccacctctctcggattcttcgccttctatcggtaacactaaacctcttaatgatacggcttacgtgccctgcttctccaatccaattgatgttcaaagaaaccaagaaggtgtctttgattccttcaccaactctatctatgcggtttcttcaaatcctatgggcattcttcccagaatgccaccttctggctccttctactccactcaaggtgttcaagctgcgcctaatttggcatttcctggttctgtttacacccttcaggatcacaccatcctgagaaccttatgtgaaaacaatggttacaagccagagagggacatgatcagtgtttcgcaggaaacgggtctaactactgatatcaacgctgaaacctcttcaaattttgatatgggtaggaggccctttgagaatcacaatcatgcatctgtttctgttgccccattggatcttgatggtttgtggaattactaaaagtttaaataaaaggatcaattacagtgaaaagtgaaattaaccccacttttgagctgaaaggaagaggaaaaagaagagcctcggatggggttgatgctattgttgtaatttctctgaatagattttatctaagacatgtatttactgaagcatatgttgttaagtgtaagaaatgttgtggaatgaattaggctggtttggtctgttgacactttaggcttgtgcgtggctggcatgagcatgagcatgagcatgagcatgattaatttgtttcagtttggattaaaaataatagtagaatgggactggtggattaaaattag

SEQ ID NO: 482 - DNA, 1583 bp, Glycine max
  Clone ID: PAT_MRT3847_98380C.1
gcgtacgtaagctcggaattcggcctctctcgctcacgctcttctaaaacttaccaacacaacaaaatcgagtttccaataaagagttttgttgaaatggaaaacgttccggcggtgtgtaaggaagatgatcagatggatttgcctcccggatttcgattccacccgacggatgaagagctcataagccattacctctacaagaaggtcattgacaccaagttctgcgccagggcaattggagaagtggacctcaacaagtccgagccttgggatttgccatggaaagccaaaatgggagaaaaagagtggtactttttctgtgtgagagacagaaaataccccactggcttgagaaccaacagggccacagaagctgggtactggaaggccacagggaaagacaaagagattttcagaggaaaatctttggttggaatgaagaaaactctggttttctacagaggtcgagcacccaaaggagagaaaagcaattgggtcatgcacgagtaccgactcgagggaaaattctctgctcacaacctcccaaaaactgcaaagaacgagtgggtgatttgcagggtgtttcagaagagttcagctgggaagaaaactcatatctcggggataatgaggttggactcttttgctaatgaattgggttcttctgctctgccacccctttcagattcttcgccttctattggcaacactaaacctctgaatgattcggcttacgtgccctgcttctccaatccaattgatgttcaaagaaaccaagaaggtgtcttcgattccttcaccaactctatgtatggggtttcttcaaatcctatggacattcttcccagaatgccaccttctggctccttctactccactcaaggtgttcaagctgcgcctaattttgcatttcctggttctgtttacactcttcaggaccacaccatcctgagagctttgtgtgaaaacaatggttacaagccagagagggacatgatcagtgtttcgcaggaaacgggtctaactactgacatcaacgctgaaacctcttcaaattttgatgtgggttggaggccctttgagaatcacaatcatgcatctgtttctgttgccccattggatcttgatggtttgtggaattactaaaagtttaaataaaaggaacaattacagtgaaaagtgaaattaaccccacttttgagctgaaaggaagaggaacaacaagagcctcgggtggggttgatactgttgttgtttctctgaatagattttatctaagacatgtaattactgaagcatatgttgttaagtgtaagaattaagaaatgttgtggaattaggctggtctgatcttttgacactttgggcttgtggttggcatgaacacgagcataattattttgtttcagcttggattaaaaatcatagtagattgagcctggtggattaaaattaaaatttaaaaagtcatgatgatgattatgtaccgtagcttgttgatcttgcttttctggattggattatcagtccacgccccatccagctaatactgagaccatgaccaagagcttgattcggtt

SEQ ID NO: 483 - DNA, 1836 bp, Glycine max
  Clone ID: PAT_MRT3847_98690C.1
ccggggtgtgttccttctctcgagacgatccggagggatgggaggtcctggtggccctggatttcctcttgcttttggtcaatccaaagccaagtttcaaatggaaccaaacaccggagtgacatttgatgatggtgctggggtggatgaagccaagcaggactttatggaggtggtggagtttttaaagaagcctgagaggtttactgctgttggggctcgcattcctaaaggagttcttcttgttggtcctccaggaactgggaagaccttgttagccaaggctattgctggtgaagctggtgttccatttttctctatatcaggttctgagtttgttgagatgtttgttggtgttggtgcttctcgtgttcgtgatttgttcaagaaggcgaaagagaatgccccttgcattgtctttgttgatgaaattgatgctgttggaagacaaagagggactggaattggtggagggaatgatgaaagagagcagaccctcaaccaacttttgacagaaatggatgggtttgagggtaacacaggtatcattgtcgttgcagcaactaacagggctgacattcttgactcggccttgttgagacctggccgatttgatagacaggtgacagttgatgttccagatataaggggaaggactgaaatcctaaaggttcatgctagcaacaaaaagtttgatgctgatgtttctcttgaagtgattgcaatgagaacacctggctttagtggagctgatcttgcgaatctgttgaatgaagctgctatattagctggtcgccgtggaaagacagctatttcatctaaagaaattgatgattctattgataggattgtggctggaatggaaggaacagtgatgacagatgggaagagcaaaagtttagtggcatatcatgaagttggtcatgctatttgtggaactttgactcctggtcatgatgctgtgcaaaaggtaacactagttcctcgcggtcaagctcgtggacttacatggttcattcctaacgatgacccaactctgatctccaaacaacaactctttgcaagaattgttggaggactaggtgggagggctgcagaagaaattattttcggtgagcctgaagttacaactggagcagctggtgatttgcagcaaatcaccagtttggcaaaacagatggtgaccacatttggaatgtctgatattggtccttggtcacttatggaaccatcagcacaaggtggggatgtcatcatgagaatgatggcaaggaactcaatgtcagagaggcttgcagaagacattgatgctgccatcaagaggatctcagatgaagcatatgaaattgcactggagcatataaggaacaaccgtgaggccattgacaagattgtggaagtccttctggagaaggagactctgagcggagatgaattccgtgctatattgtctgagtttgttgaaattccagctgaaaaccgtgttgctccttcaactccagtaccagccactgtttgaatagcctatatatgtaacatctttcatatgtattatcttagaatacagaatgccctctgcagcctgctccatatttgtgaatgattaaagattctaccttactttttcattttttgtagtgttgacaaatgacaacagagagtatgtataaaagagaaactgtttttagtgtaaaaatttgtagtttctttacgtctataatacagtgtaactttaataaacctttatttttaaatgtagagttgtaacgggtgagacacaatgtttagtttttttttataaatggaaatgaaaaaaaatactaacttaaatacttt

SEQ ID NO: 484 - DNA, 1479 bp, Glycine max
  Clone ID: PAT_MRT3847_98960C.1
ctcctccatccagaacgaacaaaaatggataaacatttttgatcttccttcctctgaaacaagaaccaaaatggagaattcgaccgaagaatcccatctccgatcggaaaactccgtcacttacgagtccccttaccctatctacggcatgtcattctccccctcccacccccaccgcctcgccctcggcagcttcatcgaagaatacaacaaccgcgtcgacatcctctctttccaccctgacaccctttcggtaactccccacccttctctctccttcgaccacccttaccctcccaccaaactcatgttccacccccgcaaaccctccccttcctcttcctccgacctcctcgccacctccggcgactacctccgcctctgggagatccgtgataactccgtggatgccgtctccctcttcaacaacagcaagaccagcgagttctgcgcccccttaacctctttcgactggaacgacatcgaccccaaccgcatcgccacctccagcatcgacaccacctgcaccatctgggacatcgaacgcaccctcgtcgaaacccaactcatcgctcacgacaaggaggtttacgacatcgcctggggagaggccagagtcttcgcctccgtctccgccgacggctccgttagaatcttcgaccttcgcgacaaggagcactccaccatcatctacgagagcccccaccctgacacccctttgctccgcttggcttggaacaaacaggacctgaggtacatggccaccattttaatggacagtaataaagttgtgattttggatattaggtctcccactacccctgttgcggagttagagaggcaccgtgggagtgtgaacgccattgcttgggctcctcatagctccacgcatatttgttctgctggtgatgatactcaggctcttatttgggaattgcccacgcttgcttctcccactgggattgatcccgtctgcatgtactctgctggctgtgaaattaaccagctgcagtggtccgccgcccagcccgattggattgccattgcttttgccaacaagatgcagcttttgaaggtttgaggtcagaacaaacaattacacattctagccacttcattgtggcatagacatagcaacttctgatcacttgagtgactgagttatatatattattgtagttgtgcaaactagtttgccctcctcatgttttacttgtggcgaaattaacgatgttcaatttgtctgttaaagatggatttttaacctgttgtgaagtaagatttcttgtctgtgatgtggaagccatagctattagtttcttagttaacatgagaaatcacatgtagtatgtggaatcaattaccacacatccagattataggtcgtaaaatcttcagtgtttgtattcccatttgattttaaacaccctacctctgatatgtatggactatggatctgtattcttgagcttttgccat

SEQ ID NO: 485 - DNA, 1252 bp, Glycine max
  Clone ID: PAT_MRT3847_9915C.1
cccgacgcactcactctatctcttttctccagcagcaccaaaaccacccaacactcgaactcaatatccattattaccaaaaaaaaagaaaaaaggatatcaaacacccttttcatcattaaaactctcagttccctctttccctatcaaaaccctttcccacaacactactcactccagtacaagaaaccctttttcaatttggtttcaacagcacacacacacacacatatatatatatatagcatgtttaccttgaatcattcttctgatttgtaccatgtttcccctgagctctcatcttccttggacacatcctcgccggcttcggagggctctcgtggcgtggcattttccgacgaggaggtgcggctggcggtgaggcacccgaagaagcgggcaggtcggaagaagttccgggagacgcgccacccggtgtaccggggggtgaggaggaggaactcggataagtgggtgtgtgaggtgagggagcccaacaagaagaccaggatttggctggggactttccccacgccggagatggcggctcgggcgcacgacgtggcggcaatggccctgaggggccggtatgcctgtctaaactttgctgactcggcctggcggttacctgttcccgccacggccgaggcaaaggatatacagaaggcagcagcagaagctgcccaggctttcagaccagatcaaaccttaaaaaatgctaatacaaggcaggagtgtgtggaggcggtggcggtggcggtggcggagacaacaacggcgacggcacaaggggtgttttatatggaggaagaagagcaggtgttggatatgcctgagttgcttaggaatatggtgctcatgtccccaacacattgcttagggtatgagtatgaagatgctgacttggatgcccaagatgctgaggtgtcactatggaatttctcaatttaataatgtgttttggtttggtttttgttgttagttttttggagtgaacagtgtctgtactggttttttattagtagtacggatactagttataggtggaaagattgcgagggaccaaaaggaattttcttttgaacccttttttgtcaatgtaatcaatatcacgtatatcatgaagtgaatcccttcaagtttatgtataaattaaataaaagaaaaatctagttttggttatgaatctttgttaaagtagaaaaaaatctttaaagagtctgcaggccaatgtgcataggctcaaaacagg

SEQ ID NO: 486 - DNA, 540 bp, Glycine max
  unsure (1)..(540): unsure at all n locations
  Clone ID: PAT_MRT3847_99178C.1
gctttcagnnattcatccgagaagttcaagaaagcaggagcagtggttgttggaataagtggtgatgatgctgcctctcacaaggcatttgccagcaagtacaggcttccatttactttgttgagtgatgagggtaccaaggtgaggaaagaatggggagtgccaggtgatttctttggatcattgcctggaagagagacttatgttcttgacaaaaatggggtggttcagctcgtctacaacaatcagttccaaccagaaaagcatatcgatgagaccctcaaaatacttcagagtctttgaggattctgattcttttgtttgctatctcagctggcttgattcagagtcagacaagtatgtaactatgaattgtaagtttgtaatcactgtaattatgtagctgattttggagcctttgatcacattcacatgggggtgatgatgcctctccagatggaaataatgccttcatttgccacaaatacagtcagattatatatgtatcttttgcacatcgtaagtttagcgtccgttggc

SEQ ID NO: 487 - DNA, 1005 bp, Glycine max
  Clone ID: PAT_MRT3847_99180C.1
ctcccgtccgggaaatcctctctgtatctttggttcagcagccattagcgatttcccttatctctctccatcttaactccaagcacaagaatcatcttcccatttcgtttctgaccaatggcttccctcactgtcccaaaccattgtgttcccactttgcttcgcactcactctctcaactacccatcttcccaaaacctcccacttccttccgcgccatcaaattctcaattttttggcctcaagctatctcattcttccttttccacaattccctcttcttcttcttcactcaaaggctccattttcgccaaggtgaataaaggttcaaagccaccgaattttacgctaaaagatcagaacgggaagaatgttagcctctccaacttcaaaggaaaaccagtaattgtgtatttctaccctgctgatgagacccctggctgtaccaaacaggcttgcgctttcagggattcatatgagaagttcaagaaagcaggagcggtggttgttgggataagtggtgatgatgctgcctctcacaaggcatttgccagcaagtacaaacttccatttactttgttgagtgatgagggtaacaaggtgaggaaagaatggggagtgccaggtgatttctttggatcattgcctggaagagagacttatgttcttgacaaaaatggggtggttcagctcgtctacaacaatcagttccaaccagaaaagcatattggtgagaccctgaaaatacttcagagtctttgagacattctgattcttttgttggctatcttagctggcctgattcagagtcagacaagtatgtaactatgaattgtaagtttgtaaccactgtaattatgtagctgattttggagcctttgatcacattcacatgggggtgatgatatgtattctcctatagagagcaaacatttataacctctccggatggaataatgccttcatttgccacaaatacaatcagattatatctgtatcttttgc

SEQ ID NO: 488 - DNA, 801 bp, Glycine max
  Clone ID: PAT_MRT3847_99342C.1
aactcaccccccaacattgattaatatatatacataaaaggggataaattaccaacatataaagaaataaatattgtgaaagtcaagacaaagagttagtaggagaagcaagggaacagtatgccatcttttctttgttaaatacaggcaatgacattctttcttttcttttctttattttataataaaagtgcattaacctgaatctctcctcagcttttcaggcaaatctgaacccgctacctgctgtacaaaagtgtgagactctgaaccaggagcatttgagtcaattgcagaaggattgagttggtaatgaactgaaattaaaccatcctctgattcacctgctgatacaggagatccctggaaacttgccactgaggttttaccagatgacatgccttggagtattatcacaacaaagaagacaacagtgaaaatcatagccaaaaggctgctggcattggaagatgatggtgctgatgatttagcaattttccggacgcgcatacgctccatcctcgcgcgcttcaacatggcaagttcagatatctccctgattagcttatggtcagctgcatccaatgatggagcctttgggggtcttggaggtttgggagcctttttattactggcctttttccgtttctccctcactggggtttgttgtgcacggtttgccgaatctctccccatcattggtttgtttgttactctcatcacatccgcatatacttcacttaaacttggttcattgcagcataaacttggcccatcatcacctttaacagaacctccagc

SEQ ID NO: 489 - DNA, 768 bp, Glycine max
  Clone ID: PAT_MRT3847_99499C.1
tttttttttttttttactaaaattttttttaatttatttacgaaaaatgagatgttgcacaacacaataaaatataggtcaaggattcccaaataaagccattcaagtgttaccacatcttgtaagaatggcacaaactttggctgatttagtatacaaacccacataaaagtgaaaaataaaaataaatacaatatataatctcaattccaaatctattacttggggccaatatccttaagggcacaaatctgctcctcacccatggaagacataacagacacaaccagatctttgccctcagcaaatccatccttgatctgcgtaagcagattttcatcggttggaagcctaaggtcatccttagtaccaccagtctcagtctgcagactcacaaacccatcctctgagatgtcgatgagctggtagtcaatgcgattaacatgaggaacatcacagttatgggaagatgggacaatatcctcaagctttttcccagtgaatatgtcaattccaacaaagtgacactttgcgtgtccatgcttgccagttttggaagtggaaacctccacaaccttgcatggcctgttcttgatgacaatgtaaccatttttgcggatggttccagcttgctggggaaatgtctttgatgccccagcatcagcctttgactcgaagtggtgttcctcgtctgacatggttatggttaataacacgcatcataatgtgtgatgcgtctgccccttctgtcgtcttctcgcagccgta

SEQ ID NO: 490 - DNA, 1932 bp, Glycine max
  Clone ID: PAT_MRT3847_99501C.1
tccatgcgtccgcggacgcgtgggtcaatatccaccagtagttggatactggtcgtgctagctagcgggccaaagtagtgcctaagtcttcctcatatcttccaccctttggcttattagtgggagcaatacatatcattcattcagaggcaacaaaggagttgtaaattaagagcatggctgcacaagctcttgtatcatcatcatcatctcttaccttctcagccgaggctacaagacaaagtcttggaccaagatcactccaatctccatttggcttctcaagaaaagcctcctttcttgttaaggcagctgctactccccctgtcaagcaaggatcagacagacctttgtggtttgcatcaaagcaaagtctttcctacttggatggcaggtaaatttcatcctagttcatcaatagcttaacataacgatatgatcatgtctggatatataaacttctcatgagcacttgaagaataaaaaggtaaaatgaagtttatttcatgagttaaaacataattaagttaatttatagtagctctttcgcttaatttctccaataaacttatgaaagaaacttaattcattttattccgttcctgggaaccttgttcgaataacactagtgtatctatgcaatttagaagagaagtaaataattagttactatgctggtgctgaaattgactttatctggcatcatgtgcattgcagccttccgggtgactatggatttgaccctctgggactttcagaccctgaaggaacaggagggttcattgagccgaaatggctagcatatggtgagataatcaatggtcgttatgcaatgttgggtgcagttggtgcaatagcacctgaaattctaggcaaggctggtctgatccctcaggagacagcactcccatggttcagaacaggtgtattcccacctgcaagaacctacaactactgggcagactcctacacactgttcgtgttgaagaaaggtcctcctggataagctggctcaccagaacctccaagacccttctctagtcctaggaagtattgtttgcccatagagcctggtttggcccagtcttggaatcttctgtgctctgcctggtgccgaattcggcacgaggtcagacgaggagcaccacttcgagtcaaaggctgatgctggagcatcaaagacatttccccagcaagctggaaccatccgcaaaaacggttacattgtcatcaagaacaggccatgcaaggttgtggaggtttcaacttccaaaactggcaagcatggacacgcaaagtgtcactttgttgcaattgacatcttcactgggaaaaagcttgaggatattgtcccatcttcccataactgtgatgttccccatgttaatcgcattgactaccagctcattgacatctcagaggatggatttgtgagtctgctgactgagactggtggtactaaggatgaccttaggcttccaaccgatgaaaatctgctttcgcagatcaaggatggatttgctgagggcaaagatctggttgtgtctgttatgtcttccatgggggaggagcagatttgtgcccttaaggacattggccccaagtaatagagttgtgtcagttgaatatctggaaagcagaagttgaaactgagatgataaatagtatttattattattttttcacttttatgtgggtttgtatactaaatcagccaaagtttgtacctttcttacaagatgtggtcaaacttgaatggctttatttgggagtccttgacctactatatttttaaacgtgttggatcaatgctagaaccatattctgttaaatggtgtgaagttatattggtcactggccattaaatctatttatacgcttagaagaccttataacctttataataaatttttcttcattatgatgtttctt

SEQ ID NO: 491 - DNA, 226 bp, Glycine max
  Clone ID: PAT_MRT3847_99856C.1
cacccaacaaacactctctttggtaccaagcggttgattggtaggcgctttgatgacgctcaaacacataaggagatgaaaatggttccattcaagattgttaaggctccaaatggagatgcatgggtggaagccaatgggcagcagtattcccctagtcaaattggtgcctttgttctcaccaagatgaaggaaactgcagaagcttatctaggatagtcaattt

SEQ ID NO: 492 - DNA, 2020 bp, Zea mays
  unsure (1)..(2020): unsure at all n locations
  Clone ID: PAT_MRT4577_100006C.1
caaactgatctacaatacatcaaatagntataagttctgtggagagactagggcagaattatatcgcacaaaagaaaggtactccatgaagctgcgcatgcttttagatgagcctactgcgcaaaaaatatggccctctcctatagacaaagctagctgtcgctttcttcccaactctcggacaccacttagtggattatgtccaggaactttacagaataagaagcttgatttgaaagctcaagtaagccatcaaggatttcaaaggagagatgctctaacttcttctgatcctcctaattccccacgaggatacaatcgggtaatgttattgctaggaagagacgagttcaagcacagttcaatgagcttcaagaatactacctgcaaagacgtcgtactggagcacaggcacgcagacaagaagaaagagatatcgttgcaatgaatagagaaggctatcatgcaggtcttcaggatttccagtctgtgctaacaacgttcactcgatacagtcgtctacgtgtcattgcggaactaagacatggagacttgtttcactctgccaatattgtatccagtattgaatttgatcgtgatgatgaactatttgctactgctggagtctcgaaacgtattaaagtcttcgaattttctactgttgttaatgaaccatcagatgtgcattgcccggttgttgaaatggctaccagatctaaacttagctgcctaagctggaacaagtactcaaaaaatattattgcaagcagtgactatgagggtatagtaactgtgtgggatgttcagacccgtcagagtgtgatggaatatgaagagcatgagaagagagcatggagtgttgatttttctcgcacagactcttcaatgctagtatctgggagtgatgattgcaaggtgaaagtgtggtgcacaaatcaagaagcaagtgtgatcaatattgatatgaaagcaaatatttgctcggttaaatataatcctggatcaagcttctacgttgcagtcggatctgctgatcaccatattcattactttgatttacgtaatccaagttcgcctgtccatattttcggggggcacaagaaagcagtatcatatgtgaaattcttatctaacaatgagcttgcgtctgcatcaacagatagcacattacgcttatgggatgtcaaggataactgcccggtacggacattcagaggacacaaaaatgaaaagaactttgttggcttgtctgtgaacaatgaatatattgcttgtggaagtgagacaaatgaggtttttgtttatcacaaggctatctcgaaaccggcagcaagccatagatttgtatcttctgacccggatgatgccgatgatgatcctggttcttatttcattagtgctgtctgctggaagagtgatagccctacgatgttaactgctaacagtcaggggaccataaaagttcttgtacttgctccttgatgttatggagggcgttcaagaggttcacagtactgtccagttgtttcctttcgtgtcattatattcccccaaaattgggaacgggggcataattgatctccggttagggaatgaagttttgcagatggtcagctgacgtagggttttgaggtatcagaatgtgcatagtcatgtttatgttgtataggtgtaattgtgtaaagcagccaagttattggttacaagtgtaacacgagaaatacacattaacaaaaaaaaaacctccagctcgtttgtacagagattgtgtttgaacccagaaccttatgtggtaattgcgattagtaatatatctacctgatatgatcagcaaaaaaaaaaaaaaaaaaaaaaaaaaaaaaaaaaaaaaaaaaaaaaaaaaaaaaaaaaaaggggggaagaaaataaaggaaaaaaaataagggaggcgggcatgcaaagaaataaattttttataagggggggggggcctttttaaatggccaaatttttaccccgtgggtacggaaaaaaccttttt

SEQ ID NO: 493 - DNA, 311 bp, Zea mays
  Clone ID: PAT_MRT4577_100058C.1
ccgcccttttttttttttcttgtgtccaacgtaagtgtcagtgcatcccatgatggcatacatacatattttgcgtacatacacatcacatgactggataaatacatatgtccaacgtattagtcagtgcaccccatgatggcacacatacatattttgcatacagtagacacatcacatgactggcaaatcaggcatagatctctcatctcattctcagtcagtatcaggaactatgaagtaggcctcgtcgactgagtcaggcacctcgatgcgtgacttcgtgaacaggcgcgctccgattctcgtgg

SEQ ID NO: 494 - DNA, 954 bp, Zea mays
  Clone ID: PAT_MRT4577_100095C.1
cgtgtcccccttcatcccacctcctcggggctccaggaagcgtctccagcccagatcgacaccgcctcccccttctccccccaccgccgcgcgatcccatctgacgccgccccggccgacgacccccgcacgccggccgccatggcgcacggcgaccgcatgaccaccttcgaggagggcgagcgcgagagcgagtacggctacgtccgcaaggtctctggacccgtggtcgtggccgatggcatgggcggtgccgccatgtacgagctcgtccgtgtcggccacgacagcctcatcggggaaatcatccgtctcgagggcgattcagctacaatccaagtttacgaggaaacagctgggctaacggtcaacgatcccgtgttgagaacgaaaaagcctctttcatgtgagttgggacctggtattcttggaaacatctttgatggaatccagcgccctctgaaaactattgctattaagtccggagatgtctacattccacgtggtgtttcagtccctgctcttgataaagatcagcagtgggagttccagccaaataagctaggtgttggagataatatcacaaatggagatctatatgctaccgtatttgagaacacattgatgaagcaccatattgcgctccctcctggtgctatgggaaagataagttacattgcccctgcgggtcagtacagtctgcaggacacagtgctggagttggagtttcagggcatcaaaaaggagttcactatgctccacacatggcctgtgcggacaccacggcctgttgcgtcaaaacttgctgctgacacgcctcttctaacaggacagcgtgtacttgacgcactgtttccctcggttcttggaggaacatgtgctattcctggagctttcagatgtggaaaaactagtattagacaggtgctctcacagtattccaattccgacact

SEQ ID NO: 495 - DNA, 321 bp, Zea mays
  Clone ID: PAT_MRT4577_100187C.1
ccgacggggaaagcaagttatacatattcgacaactaacttgctcctagcgtttacaaatgataatgaaattaggagagtcaacaagacaaaactgtttctggcaaagcacattgactcaccccatccgaatacaccattattcttcacgaaaagcaaacagttacttctcctgccacctgagttcatgcgattaccataagaaaacctgctacgctactgcctatatgataatgcatatgcatgcaaaagataactgacaggccagtgcagcgaacttcatagcacacaacggcccgagtgagctggaagccgggtgcct

SEQ ID NO: 496 - DNA, 192 bp, Zea mays
  Clone ID: PAT_MRT4577_100196C.1
gagaaatcaagttcgaaagcaactgtttgcatacatcaccatagagccggttggttttctgttcatcgcatgctcatcgcacctccagatgcaccacgaccatcacacacactcatgttttgtcatcacaagctaaacacactcccagcccagatgcacgtaaagaacacctgttgactgcccaacaaacct

SEQ ID NO: 497 - DNA, 1594 bp, Zea mays
  Clone ID: PAT_MRT4577_100216C.1
cccacgcgtccggcgtcccacgttgccttggttcccccaccctgctgtctccctccctccttccttccttccccgccactgcgcagcgcgagtgcggcgacagccagtcacacactcacactccctcgaccgctctcggccccgtccgcgtcgccgcagggcgaggaggcaatggcggcgggcgggaatggcgccggcggggacaccagggcggccttcgcgcggatctacaagacgctcaaggaggagctgctcaccgacccggccttcgagttcaccgaggagtcacgccagtggatcgaccgcatggttgactacaatgtactcggaggcaagtgtaaccgtgggctctctgtggtcgacagctacaagctgctcaagggcgctgatgctctgggcgaggaggaaacgttccttgcttgcaccctcggctggtgcattgaatggcttcaggctttctttcttgtgcttgatgatatcatggatgactctcacactcgtcgcggccagccttgctggttcagggtgcctcaggttggcttaattgctgcgaatgacgggatcatccttcgcaaccatatctcacggatccttcggcgccactttaagggcaaaccttactatgctgatctccttgatttgttcaatgaggttgagttcaagacagcttcaggtcagctgctggaccttatcactacccatgagggagaaaaagatctaacaaagtataacataacagttcacggtcgaattgttcaatacaagacagcctattattcattttatctgccggttgcatgtgccctgctgctctctggcgagaatttggacaattatggtgatgtagagaacatccttgttgaaatgggaacatactttcaagtccaggatgactatctggattgttatggtgatcctgaatttatcggcaagattggaacggacattgaagattacaagtgctcatggctagttgtgcaagcccttgagcgtgctgatgagagccaaaagcgcattctatttgaaaattatggcaagaaagatccagcctgtgtggcaaaagtgaagaacctctacaaagaacttgacctagaggcggtatttcaggagtacgagaatgagagctacaagaagctgattgcagacattgaagcccagccaagcattgcggttcagaaagtgctgaaatccttcttgcacaagatctacaagaggcagaagtagggtgctcttggataaacgagctcaggagtcgttactccttcgcatgcttgacataaccggacttcctcacctggttgctctagtatgatgtggagcgtctagttaaaaaaaatcgatgtagtatgaagcaccttgctgctctgaatattaacaggcaattaaggcaaggtgctgtttcggtttggtggaccgcatgttgcagataataaattagttgttttgtcaaaaaaaaaaaaaaaaaaaaaaaaaaaaaaaaaaaaaaaaaaaaaaaaaaaaaataaaacgctctgaagaaatgttcaaagaaaaaacgatccctctctatctctctctgtcgctgtcgctgccggccttccttgccttttctgtt

SEQ ID NO: 498 - DNA, 670 bp, Zea mays
  Clone ID: PAT_MRT4577_100218C.1
cacgtgcaatgctgatatatgaaatttctctatctccctcccttcaaacagatggttgactacaatgtactcggaggcaagtgtaaccgtgggctctctgtggtcgacagctacaagctgctcaagggcgctgatgctctgggcgaggaggaaacgttccttgcttgcaccctcggctggtgcattgaatggcttcaggctttctttcttgtgcttgatgatatcatggatgactctcacactcgtcgcggccagccttgctggttcagggtgcctcaggttggcttaattgctgcgaatgacgggatcatccttcgcaaccatatctcacggatccttcggcgccactttaagggcaaaccttactatgctgatctccttgatttgttcaatgaggttgagttcaagacagcttcaggtcagctgctggaccttatcactacccatgagggagaaaaagatctaacaaagtataacataacagttcacggtcgaattgttcaatacaagacagcctattattcattttatctgccggttgcatgtgccctgctgctctctggcgagaatttggacaattatggtgatgtagagaacatccttgttgaaatgggaacatactttcaagtccaggatgactatctggattgttatggtgatcctgaaatta

SEQ ID NO: 499 - DNA, 2070 bp, Zea mays
  Clone ID: PAT_MRT4577_100294C.1
ggccggccgggtgtctccgagggagtgcatctccgtgttcgcgattcagcgccgtgctcgacgcccctcctcccttcagaagtcagcgccgcatctccggttgcagagacttgcgctgccacctctccgcttttcgtccttcagttgctcgacgcccctcctcccctcagaagtcagcgcagcgtctccactctccacgccgtcgcgtcggcgacgcgggtccttcgaataagacggtttgttctcgcatcgggcgtcagccggattcgagggacatagatgatggaagtcgatcttgggtgccaccacgtcgaagcggcttgtgctgtgtagatccggcgaaagcgcgcaggcaaagcccgggtctgcgtcgtcattggcctcatgatcttcgtattgccatcgcgctaaagggaacgaaggcgacgaggtcttaaactttgattgatatatgcggatatgaaaatgcatgcaactacatgctagaagtctgtcttggttgtgttggagaaaaattctttgttacgtttttgttgatagtgttgagtgccaaaaatggagcttctccctgttgaagtcgttggcaacattctttcccatcttggtgttgcgcgtgatgttatgattgcctctgcggtatgccgcaagtggcgagatgcatgcaggaggcatctccgtttgctgtccttcaactccaatgactttccacgggacatgactacacgtcagttggagattgtcatcacacagactatatttcagactattgggctgcaacgcctttcgattcacattgataacacccatgagttctctgcagcaccagtgattgcatggctcatgtataccagggagaccctccgaagcctgtcttacaatgtcaggacaatacccaatgtaagcattcttgaaaagtgtggtaggcaaaagctcgaagtgctagatttggaattggaccataacaccatcacaggtgttgaaccaagctatcagaggttcacttgtctgaaatccctttccctgaggcatgtcagcattttggccttggatttgagccttttagttgctgcttgcccaagaatagagtcattagcacttgatgtccttgaggttgtcacttcagaattacagtctacgatggagctcacaagccatacattgaaaagtctatttgcaaaatcggtaggtgtagataagatcatacttgatgcagataatttggaagttctgcacctgaatgctttaaatctcgatctgtttgagcttaacgggaaaggaacactaaaacattttaagattgatgatgtcagtgttactcatttggatattggggacaatactgatcatttagaggcagtagacgtgagcaacttcacaatagtctggccaaaattctatagcatgatatccagggcatctaatttgcgtatgctacgattttggggtgttgtgtttgatgacgaggatgagatcgtggattcagaaactatagctgtttcatttcctcttcttaggcatctttcattgagttatgaattacgagatgggttacttcactacagccttcagggatcatcattactggagaatgtctcagttctggaacttggttggacagtaataagtgagcactttggaccctgggtatttggtatgattggaaggtgtccaaatctcaagaaacttgttattcatggtgttctttctgagacaaaaacgcgagaggatcgccagatgttagcaagctttacctcattcatagtctgtgtcatgaggaagtatgtgcatgttgatgtacaatttgagtatgagtgacagctactaggttgggtgggcatcttgtcattgttcagatgaagctgtgccatcagttgcttgatactgggttcttccacattgatccacatctaggcaatatgatcagaacacctgacggagattatgttgcagaactgtatcaactccctctaattttatgttatattatatttggtaggaatttctactgggtctgaaacttgtaacatacagttttctgaagatctacgaaagatagtggatacttatcag

SEQ ID NO: 500 - DNA, 4442 bp, Zea mays
  unsure (1)..(4442): unsure at all n locations
  Clone ID: PAT_MRT4577_100586C.1
aattcggcacgaggcgagaccagagttggcagagccgtcatcaaacccggagtcacctcctgtggcaagatcagaagcgaagacaacagcaacatcggcagcagcagaaagcggcaccagcaccacccctgcggctgcccaacctgagacttcacgagagtcagagaaggcggaggaccgtggtagaaacagagactcagagctccggcccaacgaatcagatcggcgagatcacaggttggagagccaggctgtgccgccgtcgccgttgccgttgccgttgccagagcctccagtcaagccggatgctgaagcaaagccggtgagctccgaggccaggaacggcgaagctactgccacgacaaagattgagctggcatcggatggcgctcggcatgacaagaggttttccattgatctcatggctccccctcctgggaagctatctgatgatatagatggctcctccgaccctgatgcagataagaagggattggattctgagatggacatgttggggagaggaaattcggaaaagaaggctagtgaaaggactcggagaggactggatattgatttggaggaccagaaggtgcgaagaattccagtcgatgagttcgcgccgaagaagctcacactgcagttggatttggagaagcccagtctcggtgatgaaaagtcgccatcagagagacggcagccgcagccgcagccacaacaattgcagcagcagaagccctcaaaggctgagataaagcacgagaaatctgctatgcctgctgctgttacaccacctatgcctatacctgttggaggctggcttgggaatttcccaccgtttggttatctcagtccagtcccaggcctatcagcagctggtcttcatcatcccatggacgtgaaaccagggtcatctagtggattacatcattctgcattgcttccaccgccatcacgctcaaagagatgtgctacacattgctacattgcacaatttatccagcaccagcagcgagttgcaaagatgaactctttctggccgccaactgctgctgctgcagccgccgccgccgccaatagaccaccggggccattctttggtgcaaggccattcagcatgggtgttgtgccacccacggatgccgcctctatgcttgtgaacccaatgcagggaagctaccctgttagggcgcacactccgatgcaagaagcaaaggctcctatggctacatcaccattccaggggagtctctcgaaggacaaaacactaggcaatgctgctggtgctgaatcaagccagaggaaacaaccaccttctcatgaaacactgcagtccactcccttgccaaacatgctgcaagccccggcattcatctttccattcaatcagcagcatgctatggtggcagctgcaaatgctgccaaccgagcaggggatgcaaaatcatctggtgccggcaatacattgccgccatctgccagtgctcacactttggcaacaaactctggtgccgcggccatgaacttgagctttgccaacatgcaaccggctgatgcccagtttttggcaatcttacagaatggatacccgttccaggttgctgcccatcctggagggcctccatatcgaggcatggcaccgccaggcccagctgttccattcttcaatggtcatgtgtattcctcccccatgctgcacccatcacagcagcaaggtgcgcagtcacaaagtcatcagaagacccaaatgccaaacttgcccagttcatcacagaagcatcagccacaacagtcccaagggctattgggatatgcaccaaatgctaacgcagcagcagctgctagtaattcgcagaattattcaagtggcaatcagcgccctgtccttgcgcaccgacaggagagtgacaaaactggagaagatggtctatcgagtgatgacaagccatctcactctcagaagagtgggtatgaacacaattttgccgttccagtccatctaccgaattttgcaatgatgccagccgctcaacctgctgtcagtcagagtgagaagaagttaagtgaccaccaccaccagcagcagcagccacaagtcagccgaggccagggtgtgaggattgatcttgcctcttctcagccttttgtgatgccctttggctccattggtcctcctggatctaccccaagtggtcttgacttttcggcattggcgcagaaccatgcagttttccagagccatcaagatgcagcaaggcatggttatccccagcttaattttgctgcagctcaatccacgcagcacaagccccagcatggagaaacaaaatctgtcgctggggattcatccttgacacacattgccggagacagccagagaaagaaatcaacttctacaaagtattctggtgattcacagcagcattcgctgtccttcaccaggacagaaagcaagaatcatgtgcctcctttccttagtggcagcacaaatgaaagttcgtcccgaaccctaagccttattggaacagaatcttcaaatacatttatgggaagcaaatccacaaattccaccactcctgcctcaacaccacctgcagcttcgtctagcatttctcagcagcaccagcatttccttcagatgcaagtgcagcataagcatcagcatcagcagatgattcagcaccaccatttgaatcggcctagatctgccgcaccaagtacacaaaatagtgcaggtgggtacccagaccgtctcaatatggcgagctttcagaatatgatgtacccaccaaatgctgcccaaggccaagggagagttcaatccccccagttgaaggcatcctcagggagagggacaccttcatctactgctaccactccccctgctgctgcaccccctaatttgattgtgatgaagacaagtagtctccacccgcaacaagcaaagattcctatgcaggctctctccactcctggtcaccaatcccagagttctctaagcatgagttcatcaaaaatggctcctgtaactaacctttctactggaggaggggatctatctcgatcttcaaatgcccctgttgcttctggttcaccatccaattcggtgtccaaaagcactggtggcagcccgcctgccacaggaaatgcaaagggtgttcagcagcctgtccaattgccatcaccacaacagcagttagccaagaactctgtgtcgacgtgtggctccaagtctactcctgcaaaccatttcagtatggctatgccatctatccttggccaacagcctaattcatcgcctggttctaataccgggagcaagcagcagtcacatatgtcatcgtcaatgaaacagcagccgttccctcaaggccatttcttcatatccagcacgtatgctcctcaggctccaggagccggcggtgctgctgcccttggcctataccagaagcgaccaggcgacaagacacagccacaggcaccacaccagcagaacgccttgtcagccgctgctggcagtaacatgaaatcgcttcatccttcgtccggtggatttatgcatctcgcagcggcaacccagtctgcaggtggtggcatgccacacacccacatgcccgcggcgcaactgagtttcggaacaatgccggtgcctttaaaaccctcaagcgaccagaagcccgctgctggaaaataaacagagcccaggtgaccatgcgtcggagtggtaatctgagctggcgagctcaagtgcttatccagcggaagccccaaatggaggaggaaagatacaatgagaagagaaaagcaggccacagctcgaagaacctgcttttggttgctgctgtggtgatcaggaagggggaggaggggcactgcgaggacacgccttgctaacttaaaaggttgttcgggtctgggaatggctgatgtgagtgaatacttttgtgtagttttggctggttatccatcctcccatcccatggtgtaaaggtcggaggagtgcatagaatctgtctcgtagccccgttttttgtgcatggatggatgtcgaaggctgttctctccctctattctcttgtagcttctccagttcctcgtttcttttgggtggggggtctcagctttaaccggaggaggaaagattcaatcagaatgcagatctcaggtaactttgttatgcaactgatgctcccattacacactgtctgtcgatacactctgactggattgttttagtaccagcaagaagaggagaaaacaaaatctattccaactaaaaaaaagaaacttcccgccatgattggcgggggacaagatttggggtttggtgttgaaagaagctttggcaggggggtgggcgaaaggaaattaattaattaattcgaagtgcctttttctggnaccccccccaaaaaagaaaaaagaaaaaaaaaaaaaaaaaa

SEQ ID NO: 501 - DNA, 532 bp, Zea mays
  unsure (1)..(532): unsure at all n locations
  Clone ID: PAT_MRT4577_100678C.1
aaagaacaaagctccaanatggcacgaccatcttcagtgttggtgcttaaatttccatggccgggtgactgtcgcctccgtgaagaacttccagcttgtggccacagccggctctggtggtccatggggcgttggagacgaggaaacggtgatcctgcagtttgggaagatcgaggatgatgcgtttacaatggactaccggcagcctctgtctgctttccaggcgttcgccatctgcctcaccagctttggcacgaagctggcttgtgaataagtgattgccttgtttaccaattatatgttggggatcaaattgtaggggatagtctgaactagttgccctgagcccctgagatgggagaaaactggcgacaagaaacgggcagacgttgcccctagcttgacttcttgtgatcgcctaaacgattgatttatatgatgtgcgtctatgtgatttatatgatgtgcgtctatgttgttgaagagatgacgatgacttattgttgtaaatgacattcactcataatgcctt

SEQ ID NO: 502 - DNA, 849 bp, Zea mays
  Clone ID: PAT_MRT4577_100772C.1
cagggtatcatagagatggaaacggaggaagcctatgagatggtacttaatgatgtcctggggttcatgttgctctccaccccacgtgtcgactctcaactcccaaggtccctttttttttctcgatctggaagcgccgcagtagcagccatggacgtgagcggagcaggcggtaaggcgaagaagggcgcggcggggcgcaaggccggcgggccgacgaagaagtcggtgtcgcggtcctccagggccgggctgcagttccccgtcagccgcgtcgggcggtacctcaaaaagggccggtacgcgcagcgtgtaggcacgggtgcccccgtctacctcgccgccgtcctggagtacctcgcggccgaggtgctcgagctcgccggcaacgcggcaagggacaacaagaagacgcgcatcatcccgcgccacgtgctcctcgccatccgcaacgacgaggagctcggcaagctgctggccggcgtcaccatcgcccacggcggcgtcctccccaacatccacactgtgctcctccccaagaaggtggccgagaaggcggccaaggagcccaagaaggccgccaagtcccccaagaaggcgtagagtgatctcctgtcttagaacaatattaccattagcaatcgtgcagttagactagatcatgtttagtgtagatccgcaatgttcttgtccctgcagccatctggaacggtttatctagtacatccgtgcactttccttgctaattgcaaaaaaagcggtctaatcttttgtttaaaaaaaaaaaaaaaaaaagcggcctatgctcgttaatacacttatttaatatacaaaaaaaaaagcgcggcc

SEQ ID NO: 503 - DNA, 1660 bp, Zea mays
  Clone ID: PAT_MRT4577_100776C.1
ggcggagatcgagtcgagcgcccgccacggcgatggcggctagagtcctgccgccgccgctcactctcgtactcctcctgctgctgctcccgctctcagcccgggacaccgtcgccgcgggcgaggatttcccacgcgacgggcgggtgatcgacctcgacgagagcaacttcgaggcggcgctgggcgccatcgacttcctcttcgtcgatttctacgcgccatggtgcggccactgcaagcgccttgcgcccgagttagatgaagctgcaccaatgttggcagggttgagtgagcccattgttgttgccaaagttaatgctgataaatacaggaaacttggatcaaaatatggagttgatgggttccctaccctcatgctttttatccacggtgttccaattgaatacactggttcgaggaaggctgatcagcttgtccgcaatctgaagaagtttgttgcgccagatgtttctatccttgagtcagattctgcgataaagaactttgttgagaatgctggtacaagctttcctatgttccttggttttggggtgaatgactcattcattgctgaatatggaaggaaatataagaaaagagcatggtttgctgttgctaaagatttctctgaggacgtcatggtagcctatgaatttgacaaggttccggcgctagttgcaatccatccaaagtataaggaacaaagcttgttctatggcccatttgaagaaaatttcttggaagatttcgtacgacaatcccttctccctttggttgccccaatcaatacagagacgataaaaatgttgaatgatgatcagaggaaagttgttctcacaattatggaggatgattcagatgaaaattctacacagctggtaaagattttgagatctgctgctagcgcaaaccgtgatttggtgtttggatatgttggaatcaagcaatgggatgagtttgtggagacttttgatgtttccaaaagctcacagctgccaaagctacttgtgtgggatagaaatgaggagtatgagctcgtggatggttcagagagattagaagaaggtactgaccaagcatctcaaataagccaatttcttgagggatacagagcaggaagaacaacaaagaagaaaattagcggcccttctttcatgggtttcctgaattctctggtcagcttgacctcgctgtacatccttatattcgtcattgcccttctgtttgtcatggtgtactttgctgggcaagatgatactccacagccaagacgaattcatgaagagtgatggaagcttggggagcttcttgcacctgaagtgtaaagatggctaatgtaccaggagatgtagctcagaggttatagatttcaaactttcaacggacgcaagtcttgaagagtggatttggctattgatgctgagattcttcaatttctattggccacaccaacttctacatcctgcctatttatgtttctgttttgtgcccttcaatttgttctttaatttagagcttagaaattagcctctgcctgtgtattttagaaattgtccattccagagtccatttctgtgaaaatatatttattatcatactctgctactgaacgtttgtacaattaatacatgatgtatagactgttctggtgctcgct

SEQ ID NO: 504 - DNA, 2416 bp, Zea mays
  Clone ID: PAT_MRT4577_100777C.1
actgtgcggcgctcgccggggcgttcggctagttcattttcaccttgcaacagccgccgcatcgctggcgtctgggcgcttggtgtccttttcctttctctgtttctgttgttgcaccgcagtgagctgctctctgtgtattttcttcactaggaaactgagaagccaagtgtctgtgctgtattcttgccaccgtgatgcacatggacaagaaacagctcttggtctctattccttctctcttttcctgtgtttggccgaacgtctattcgttctctatttttttttgtttatttcttctttggttctagcagttggccgtccatcagttcaaaaaaaaatgagcactgtgggtgagtgatggctcaaaaaaaaaaaaagaaaaaaaaaaaaaaaaaaaaaaaaaaaaaaaaaaaaaaaaaaaaaaaaaaaaaaaaaaaaaagcgagcgcccgccacggcgatggcggctaaagtcctgccgccggctctgctctctttcatactcctcctgctgctctcgctctcagcccgggaagaaggagttccgtttccatacttccggcgcggcggagatcgaatcgagcgcccgccacggcgatggcgactagagtcctgccaccggctctgctctctttcatactcctgctgctgctctcgctctcagacctcgaggccggcggggggcccggggaaactagtcaagttcagtgcccccatacttccggcgcggcggagatcgaatcgagcgcccgccacggcgatggcgactagagtcctgccgccggctctgctctctctcgtactcctcctgctgctctcgctctcagcccgcgacaccgtcgccgcgggcgaggatttcccacgcgacgggcgggtgatcgacctcgacgacagcaatttcgaggcggcgctgggcgccatcgactttctcttcgtcgacttctacgccccttggtgcggccactgcaagagacttgcgcccgagttagatgaagctgcaccggtgttgtcagggttgagtgagcctattgttgttgccaaagtcaacgctgataaatacagaaaacttggatcaaaatatggagtggatgggttccctaccctcatgctttttatccatggtgttccaattgaatacactggttcgaggaaagctgaccagcttgtccgcaatctgaagaagttcgtttcgccagatgtttctatccttgagtcagattctgcgataaagaactttgttgagaatgctgggataagctttccgatattccttggttttggggtgaatgactcattgattgctgagtatggaaggaaatacaagaaaagagcctggtttgctgttgctaaagatttctctgaggacatcatggtagcctatgaatttgataaggttccagcactagttgctatccatccaaagtataaggaacagagtttgttctatggcccatttgaagaaaatttcttagaagattttgtacggcaatcccttctccctttggttgtcccaatcaatacagagacactaaaaatgctgaatgatgatcagaggaaagttgttctcacaattttggaggatgattcagatgaaaactctacgcaactggtaaagattttgcgatctgctgctaatgcaaaccgtgatttggtgtttggatatgttggaatcaagcaatgggatgggtttgtggagacttttgatgtttccaagagctcacagctgccaaagctacttgtgtgggatagagatgaggagtatgagctagtggatggttcagagagattagaagaaggtgaccaagcatctcaaataagccaattccttgagggatacagagcaggaagaacaacaaagaagaaaatcaccggcccttctttcatgggtttcctgaactctctggtcagcctgaactcgctgtacatccttatatttgtcatcgcccttctgtttgtcatggtgtactttgctgggcaagatgatactcctcagccaagacgaattcacgaagagtgatgaaagcttgttgggcttcttgcacctaaagatggctaatctaccgggagattagcttttgtattaattgtacaaaagcttcaactgacgcaagtcgtgaagagtggttttggcaatttggccattcatgctgagtttcttcaatctctattggcgacatcaatttctgcatcctgcctatttgtgtttctgctttgtgcccttcaatttgttctttaatttagagcttagaaattagcctctgcctgtgtattctggaacctgccattccagagtccatttctgtgaaaatatatttattattatcatactctgctaccgagcttttgtacaattaatacaggatatatagactgttctggtgctcgctaaaaaaaagaaaaaaaaaaaaacccta

SEQ ID NO: 505 - DNA, 476 bp, Zea mays
  Clone ID: PAT_MRT4577_101009C.1
attcggctcgaggtggtctcaagcggttggtttccgctggagggagctgcaatcctgtgtgcgcacttgaagacggtgcctcgagacgatggcccggtccaacttgcgacttgatatacatggtggtaggaaatgtgaaggatgaggccttgacattcaagacctgtctcacgatggatgctggggctagcttaaaacctctggaaccttcaacccgagcaagggatgcacactctgcgacctacgtcgactggtggatgcgcgggtcgctcaaaaagtccatcttcaagaattcatgactgatgcggttgccgcaaagtgtgtatgcactttcgaggaccgtgatcaaagctaggatggaatgcataatggacggcgagcatccaacgatcgacgtggtggtaaggcttgctggcatcacgattgaaatgctggccaaactgatagcgaaaaccaggaaagtacggtacatgcac

SEQ ID NO: 506 - DNA, 366 bp, Zea mays
  Clone ID: PAT_MRT4577_101107C.1
acgactccgcgccgcgtgcggacccggagggtcttcggggctcgggttcgcgggggagcggactcgagatggcgagggtccgatgttgagaaccggtggttgcccggcggcctagcctgcgccacggacgaccactccctccacaacgccttcagcacctacggcgaggcactggagtccaagatcattctcgatcgggagacgcagaggtcccgcgggtgcggcttagccaccttcttcacggaggaggcgatgcggaacgccatcgagggcatgaacgggaaggagctggacggtccgaacatgaccgaaaacgaggtccagtccctctgcgggcgtggaggcggcggcggtgggtacggtggt

SEQ ID NO: 507 - DNA, 1113 bp, Zea mays
  Clone ID: PAT_MRT4577_101123C.1
gttccttaatatggcccagtggtttgtgttattagttaggtgtttgaggtgctgggttcaatccttccttgggcctttttaaaaaaaaaaaaaaaaaaaaaaaaaaaaaaaaaaccgcaaggatccaccacaacagcgaaggagaaagcagaccaacctagccacccagggagaaagaggccaaaagggaggggagagtgtcgtcatggcttccattgtcgcttccaggagggccgttcctctagttcgcgctctggagaagctcatcgcagcgtcctccgcgcccgggactggctccgccctcaggccggtggcagtcgccggcggcctccgtggctacaacaccggcgctccgctccgacgctacgagggggccgagtcggaagacgatagcgtccgcgagtacgatgggcggcacggcggccgggactacgccgtgcccagcctgttctcaggtaatattttccgtgatccgcttagtgcgccgcacagcattggccgcctgctgaacctgatggacgacttggcggtggcggcgccaggtcgtgcggtgcgccgtggctggaacgcgaaggaggacgaggaggcgctgcacctgagggtggacatgccgggcctggggaaggagcacgtcaaggtgtgggcggagcagaacagcccgcctccgagatacagcggtcgcatcgagctcgcgccagaggtttacaggatggacaagatcaaggcggagatgaagaacggcgtgctcaaggtggtcgtgccgaaggtgaaggagcagcagcgcaaggacgtgttccaagtcaacgtcgagtagatgtttccaaatagaagcaagtgccggtacgggatggaggattggagcctggaggggcactgccaaactaggattcctctctctcaatctgatctggattctggaatcagatttctcttctttcatttttctcgtctatcttctatcagtatgaaataagcaacgtcgcttcagttttcgtgtcaaggccggtggagtcgcctatgtttattttattttctttgtatttcctacctggacacacgttctctatgccgtgtttggtttccgcagatttttaaaatatgcatgttcaaacc

SEQ ID NO: 508 - DNA, 1188 bp, Zea mays
  Clone ID: PAT_MRT4577_101127C.1
gctcgaattccgttgctgccgcaacagcgaaggagaaagcagaccaacctagccacccagggagaaaggccaaacattgggtacctcgaggccggccgggaccgcaaggatccaccacaacagcgaaggagaaagcagaccaacctagccacccagggagaaagaggccaaaagggaggggagagtgtcgtcatggcttccattgtcgcttccaggagggccgttcctctagttcgcgctctggagaagctcatcgcagcgtcctccgctcccgggactggctccgccctcaggccggtggcagtcgccggcggcctccgcggctacaacaccggcgctccgctccgacgctacgagggggccgagtcggaagacgatagcgtccgcgagtacgatgggcggcacggcggccgggactacgctgtgcccagcctgttctcagatattttccgtgatccgcttagtgcgccgcacagcattggccgcctgctgaaccttgtggacgacttggcggtggcggcgccaggtcgtgcggtgcgccgtggctggaacgcgaaggaggacgaggaggcgctgcacctgagggtggacatgccaggcctggggaaggagcacgtcaaggtgtgggcggagcagaacagcctggtgatcaagggcgagggcgagaaggaggatagcgaggacgaggccgcccccgcctccgagatacagcggtcgcatcgagctcgcgccagaggtttacaggatggacaagatcaaggcggagatgaagaacggcgtgctcaaggtggtcgtgccgaaggtgaaggagcagcagcgcaaggacgtgttccaagtcaacgtcgagtagatgtttccaaatagaagcaagtgccggtacgggatggaggattggaggggcactgccaaactaggattcctctctctcaatctgatctggattctggaatcagatttctcttctttcatttttctcgtctatcttctatcagtatgaaataagcaacgtcgcttcagttttcgtgtcaaggccggtggagtcgcctatgtttattttattttctttgtatttcctacctggacacacgttctctatgccgtgtttggtttccgcagatttttaaaatatgcatgttcaaacccaaaaaaaaaaaaaaaaaaaaaaaaaaccaaaaaaaaaaaaaaaaa

SEQ ID NO: 509 - DNA, 899 bp, Zea mays
  Clone ID: PAT_MRT4577_101162C.1
ctcaacagcaacagctaagcctctcccacaagacagcaacatggctgaggaggaggccaagaaggtggaggtggaggtcaccaaggagcccgccgccgccgccggccgacgactccaaggccctggccatcgtcgagaaagttgcagatgaacctgctcccgagaagcctgcccctgcgaagcaagggggctccaatgacagggatctcgctcttgcaagggtggaaacagagaagaggaactctttgatcaaagcttgggaagagaatgagaagacaaaagctgagaacaaggctgctaagaaagtatccgctattctttcatgggaaaacacaaagaaagcaaacatagaagctgaactgaagaagattgaggaacaactggaaaagaagaaggctgaatatgcagagaagatgaagaacaaggttgcaatgatacacaaggaagccgaagagaagcgagcgatggtggaggcaaaacgcggtgaggaggtcctgaaggccgaggagatggctgccaagtaccgggccaccggccacgctcctaagaagctcatcggttgcttcggagcctaagaagccttccaagtcagaccgagcagaaagtgaaaacgtcagccagtgattgcttggtcctctcgctctatcaagtgtgtagtgtgtcttcgaaagtttgtaaagcctactgctgctgctgtatatactgatatcgcttccaaggcaggcgtttggtggtgtacatgttgaatgcttgacgagaaacattcttgtgtgtagttaagaggtcacgctgttgttgttgttgttgacattcaagcagacattttgttctattctggtgttattgtttttgtgcccgtctctttgttccttgccgcggatttaagtttgtagtattcc

SEQ ID NO: 510 - DNA, 2335 bp, Zea mays
  Clone ID: PAT_MRT4577_101166C.1
aattcggcacgaggcagccactctctcctgtcatcctgtgtcctcgtcctttccacccaaaatccccgatcctcgaatcgattaaaccctaagcggcatggcgggtagcgactactgccggccggcagtgcgcccgcgcgacttctgagccaccggaagccgcccttgtcccggctccactgtcgccccacccatcactgggggagtgggagttcagagccgcagacgctgggcaaccgggaggacgcgaaggtgtggccgcaaccgcaagacgcaggcaagaggcaatcaactcaccgatgtctcagtcaccgggaggacgggaaggcatatattacagcaggcagaggaaaccttcggaacgcaacggcagtgtatttacacccatagctgcaacgtatcccagcggtcacgcacttcctgatgcaaacaggaaccacggtttggtatttggcggtacgagcaaggactgggacaacatccgtcagttcattgctagtctggaacgcgcctctgaaaactcctctgcgatagccagcaaaatcggaggtggcaaatcgaccaaccattccgtggagccagccgaacaaaaaggaaagggtgacataatagttctcgattcagatgatgctctccagttcaggcgtccagcttcgcccagagtccagacacggccaacagttaaacgcgccaccgccaccacgctcgcacgcacgccccacaggtacagctagacgcaaagacacacacccacgcacacacacactcaacagcaacagctaagcctctcccacaagacagcaacatggctgaggaggaggccaagaaggtggaggtggaggtcaccaaggagcccgaggcggcggcgaaggaggacgtagccgatgacaaggccgtcatccccgcgaccgacccgccgccgccgccgccgccggccgacgactccaaggccctggccatcgtcgagaaagttgcagatgaacctgctcccgagaagcctgcccctgcgaagcaagggggctccaatgacagggatctcgctcttgcaagggtggaaacagagaagaggaactctttgatcaaagcttgggaagagaatgagaagacaaaagctgagaacaaggctgctaagaaagtatccgctattctttcatgggaaaacacaaagaaagcaaacatagaagctgaactgaagaagattgaggaacaactggaaaagaagaaggctgaatatgcagagaagatgaagaacaaggttgcaatgatacacaaggaagccgaagagaagcgagcgatggtggaggcaaaacgcggtgaggaggtcctgaaggccgaggagatggctgccaagtaccgggccaccggccacgctcctaagaagctcatcggttgcttcggagcctaagaaaccttccaagtcagaccgagcagaaagtgaaaaacgtcagccagtgattgcttggtcctctcgctctatcaagtgtgtagtgtgtcttcgaaagtttgtaaagcctactgctgctgctgtatatactgatatcgcttccaaggcagaagaaaaaaaaaaaacgatggtgagcaaaacgcggtgaggaggtcctgaaggccgaggagatggctgccaagtaccgggccaccggccacgctcctaagaagctcatcggttgcttcggagcctaagaaaccttccaagtcagaccgagcagaaagtgaaaaacgtcagccagtgattgcttggtcctctcgctctatcaagtgtgtagtgtgtcttcgaaagtttgtaaagcctactgctgctgctgtatatactgatatcgcttccaaggcaggcgtttggtggtgtacatgttgaatgcttgacgagaaacattcttgtgtgtagttaagaggtcacgctgttgttgttgttgttgttgacattcaagcagacattttgttctattctggtgttattgtttttgtgcctgttgttaaaaaaaaaaaaaaaaaaaaaaaaaaaaaaaaaaaaaaaaaaaaaaaataaaaaaacgagtgagtacaacttgctctgcttaattctccctctgtgtagtggaaggcttgcgatggaaaggtggtgttggcgtactggtttctgctctaagaattctgagaagctttcctcctccctactctatgctttggttcgtggtctctgcacttcctggtagctgtacagtgggagtactaggtaggtactcagcacttgtgatccttgacagttggtttgcctttttcttttcatgggtttctggtttgttgttggccaactcatttggtccgactacttttcgcagaaaacaaaaattttcttctt

SEQ ID NO: 511 - DNA, 1914 bp, Zea mays
  Clone ID: PAT_MRT4577_101168C.1
tttggtgggtgtaccacaaatactagaagaatattcagttttgtagtcactagttttctttaaaattattttacattaactatgctggtgagtggtgacctggtcatggatcttcagaagaccaaccactttcattttctgaacaaaaagacaagagctctgccactctttgagaagaagagcagaagactgaccattgaatacttagaagttggaacactatgtcatcatttggtaattccttcctgaaagatctagagaggtttctatggttactatcaatactatctattgctttgtagttcgtgtagtgtagaataagattaatcctacgcatgcaagagtgtactactcaaataagagaaaggaaatctacaatctttctcactgaacaagctatgtaagcagaagttacgcaggacctggatatggacacaaataagttgaggattgcaaactcaagtgcatgctcctgcaaagataatagtatagcgacataaattacattttgctctgtgatgctaatgggttggattggatcattgatcagcatacaaccacttgctagcttctttcttccatataaaatttcagcaaaaactgtttatgaatctgaatttagtttttgcaccaaagcaggcataaattctctattttttttctccagccacgcgtccgaccaaagctagcctccgctccctccccttccagcttcgtctagacagagtccagcagacacggccaacagttaaaaccggttgctattagtacgcgccaccacgctcgcgcagacacacacacacacacacactcaacagcaacagctaagcctctcccaccaccagacagcaacatggctgaggaggaggccaagaaggtggaggtggaggtcaccaaggagcccgaggcggcacccgcgtccgccgcggaggcggcggcgaaggaggacgtcgccgacgacaaggccgtcatccccgcgaccgacccgccgccgccgccggccgacgactccaaggccctggccatcgtcgagaaagttgcagatgaacctgctcccgagaagcctgcccctgcgaagcaagggggctccaatgacagggatctcgctcttgcaagggtggaaacagagaagaggaactctttgatcaaagcttgggaagagaatgagaagacaaaagctgagaacaaggctgctaagaaagtatccgctattctttcatgggaaaacacaaagaaagcaaacatagaagctgaactgaagaagattgaggaacaactggaaaagaagaaggctgaatatgcagagaagatgaagaacaaggttgcaatgatacacaaggaagccgaagagaagcgagcgatggtggaggcaaaacgcggtgaggaggtcctgaaggccgaggagatggctgccaagtaccgggccaccggccacgctcctaagaagctcatcggttgcttcggagcctaagaaaccttccaagtcagaccgagcagaaagtgaaaaacgtcagccagtgattgcttggtcctctcgctctatcaagtgtgtagtgtgtcttcgaaagtttgtaaagcctactgctgctgctgtatatactgatatcgcttccaaggcaggcgtttggtggtgtacatgttgaatgcttgacgagaaacattcttgtgtgtagttaagaggtcacgctgttgttgttgttgttgacattcaagcagacattttgttttcttctggtgttattgtttttgtgccccaaggcaggcgtttggtggtgtacatgttgaatgcttgacgagaaacatttttgtgtgtagttaaggagtcacactgttgttttcgttgttgttgacatttaagtcgatttttttgttgacagtatgtttctcaccttttccgatccccctgaatcgtct

SEQ ID NO: 512 - DNA, 1183 bp, Zea mays
  Clone ID: PAT_MRT4577_101170C.1
cccacgcgtccgcggacgagtgggaacacaccaaagctagcctccgctccctccccttccagcttcgtctagacagagtccagcagacacggccaacagttaaaaccggttgctattagtacgcgcccgccaccacgctcgcacagacacacacacacacacacacacacacactcaacagcaacagctaagcctctcccacaagacagcaacatggctgaggaggaggccaagaaggtggaggtggaggtcaccaaggagcccgaggcggcggcgaaggaggacgtagccgatgacaaggccgtcatccccgcgaccgacccgccgccgccgccgccgccggccgacgactccaaggccctggccatcgtcgagaaagttgcagatgaacctgctcccgagaagcctgcccctgcgaagcaagggggctccaatgacagggatctcgctcttgcaagggtggaaacagagaagaggaactctttgatcaaagcttgggaagagaatgagaagacaaaagctgagaacaaggctgctaagaaagtatccgctattctttcatgggaaaacacaaagaaagcaaacatagaagctgaactgaagaagattgaggaacaactggaaaagaagaaggctgaatatgcagagaagatgaagaacaaggttgcaatgatacacaaggaagccgaagagaagcgagcgatggtggaggcaaaacgcggtgaggaggtcctgaaggccgaggagatggctgccaagtaccgggccaccggccacgctcctaagaagctcatcggttgcttcggagcctaagaaaccttccaagtcagaccgagcagaaagtgaaaaacgtcagccagtgattgcttggtcctctcgctctatcaagtgtgtagtgtgtcttcgaaagtttgtaaagcctactgctgctgctgtatatactgatatcgcttccaaggcaggcgtttggtggtgtacatgttgaatgcttgacgagaaacattcttgtgtgtagttaagaggtcacgctgttgttgttgttgttgacattcaagcagacattttgttttcttctagtgagcaaaaaaaaaaaaaaaaaatttgcggagtgtgggcggccctcgcgagcttgtactgcccccggcgcctgcggtatatactgatatcgcttccaaggcaggcg

SEQ ID NO: 513 - DNA, 569 bp, Zea mays
  Clone ID: PAT_MRT4577_101249C.1
ccgctgctgagcggggtggcgtacgcgcagcgggtggtgcacgccgacagggagggcttcgagcgccaccaggggtggatcatcaagaccatgaagcacgagccgtccccggcgcaggacgagtacgcgcccgttgtatactcgcaggagaccgtctcctacatcgaggggctcgacatgatgtccggcgaggaggaccgtgagaatattttgaggtcaagagcatcggggaaggcagttctcactcgaccattccggctcatgtcgaatcacctgggtgtcgtattgacttttcctgtctatcatgcggatcttccttctgatgccaaggaggaggatcgtgttgctgccaccgcaggataccttgggggagcatttgatgtagaatcattagtggaaaatttgttgaggcagctagctggcaatcaggaattggtggtaaatgtttatgatgtcacaaacatttcgaaccctcttgtcatgtatggatcagaagttcctcttggcaacccctcatcatcgcacatctgcatgctagattttggtgatccattcagaaagcatcatat

SEQ ID NO: 514 - DNA, 517 bp, Zea mays
  Clone ID: PAT_MRT4577_101312C.1
gcccagtcgttcgagacggtggactcgctgagcgtcttccgggcgaagaactacgacgccaccatcgagttctactgggcgccgatgctggccgagtccaactccgcctcgtcctaccgtggcggcacgagccgggagatgctgcgcgcaacggaggaggtgctggccacgtcgcgggtgcccgtcgggctggtcaacatcacgcggctgtccgagtaccgccgggacgcgcacacgcagacctacaagaagcagtgggtggagccgacggccgagcagcgcgccgaccccaggagctacgccgactgcacgcactggtgcctccccggcgtgccggacacgtggaacgagctgctctactggaagctcttcttccccagcaacgatcaggtcctctgatggtgaattggtgcctgcatacatacgcctggaaaccaactgctaggggctagcccaaagaaaatgtgtctagatgaacaaagacatggggttcaaatgttttgttttgatttcggat

SEQ ID NO: 515 - DNA, 1864 bp, Zea mays
  unsure (1)..(1864): unsure at all n locations
  Clone ID: PAT_MRT4577_101314C.1
tgggaccctcgaggccggccgggnaaaantactcgtcctgcccacgcgacgcgagagcgggagcggtgggtcgagggacgagctggaccccgccgctagtcccctacccctgcctgctcccccccgcctgccccgtgtttatatctgccgcgccgcacagggagagagtcgagtccagctcggcaggtcagtcagtagtggatagctccgctcgcggtcgcgggcggctcgagtcgcaccccagatcccaatgcgccccgccgcgccgctctaggccgcggaacggaagctaggtgcgtcacacgccggggccggtcgcggtcaccggaccggacgcacaggggcgccgtacgtgcagtcatcggccatgaaggtcctcgtcctcgccgtgctggcgctcgtcgccgccgccgccgccgggtcagggcgaggaggggggcgggccgccgctgccgttcgcgttgggcgcggcgccggcgggctgcgacgtcgcgcagggcgagtgggtgcgcgacgacgacgcccgcccatggtaccaggaatgggagtgcccctacatccagccgcagctgacgtgccaagcgcacggccgccccgacaaggcgtaccagagctggcgctggcagccgcggggctgctcgctgcccagcagcttcaacgcgacgctgatgctggagatgctgcgggggaagcggatgctgttcgtgggtgactcgctgaaccgggggcagtacgtgtccctcctctgcctcctgcaccgggccatccccgacggcgccaagtcgttcgagacggtggactcgctgagcgtcttccgggcgaagaactacgacgccaccatcgagttctactgggcgccgatgctggccgagtccaactccgacgacgccgtggtgcactccgccgacgaccgcctcatccgcggcgcgcccatggacaggcactccagcttctggaagggcgccgacgtcctcgtcttcaactcctacctctggtgggtcgccggggacaagatccagatcctgaggggcgccgacaacgacccgagcaaggacatcgtggagatgaagtcggaggaggcctaccggctggtgctgcaccaggtggtccggtggctggagcgcaacgtggaccccggcaagtcgcgggtgttcttcgtcaccgcttcgccgacgcacacggacggcagagcgtggggcgacgacgacgcggagggcagcagcaactgctacaaccagacgtcgccgatcagcgccgcctcgtcctaccgtggcggcacgagccgggagatgctgcgcgcaacggaggaggtgctggccacgtcgcgggtgcccgtcgggctggtcaatatcacgcggctgtccgagtaccgccgggacgcgcacacgcagacctacaagaagcagtgggtggagccgacggccgagcagcgcgccgaccccaggagctacgccgactgcacgcactggtgcctccccggcgtgccggacacgtggaatgagctgctctactggaagctcttcttccccagcaacgatcaggtttagagatggcaatgggtacccgcgacccgatacccgatgggtatttactctattagggtatgtatgtgagctaaatattatacccatgggtctgttattggacaaaaatcttcacccaatgggtaaacgggtattagaacgttccgccttcacccatatccgttaacccgtgggtataaaatacccaatataaacttatctgaagcatgaacttggacttcagtcatccaacttttttactatttaacaacaatttaatgaccatgtaatggaacatgtaatgtgctatgtagtactatcatagtgttactactttattc

SEQ ID NO: 516 - DNA, 1869 bp, Zea mays
  Clone ID: PAT_MRT4577_101317C.1
aggccggtgtcgtcctgcccacgcgacgcgagagcgggagcggtgggtcgagggacgagctggaccccgccgctagtcccctacccctgcctgctcccccccgcctgccccgtgtttatatctgccgcgccgcacagggagagagtcgagtccagctcggcaggtcagtcagtagtggatagctccgctcgcggtcgcgggcggctcgagtcgcaccccagatcccaatgcgccccgccgcgccgctctaggccgcggaacggaagctaggtgcgtcacacgccggggccggtcgcggtcaccggaccggacgcacaggggcgccgtacgtgcagtcatcggccatgaaggtcctcgtcctcgccgtgctggcgctcgtcgccgccgcctccgccgctggtcagggcgaggaggggggcgggccgccgctgccgttcgcgttgggcgcggcgccggcgggctgcgacgtcgcgcagggcgagtgggtgcgcgacgacgacgcccgcccatggtaccaggaatgggagtgcccctacatccagccgcagctgacgtgccaggcgcacggccgccccgacaaggcgtaccagagctggcgctggcagccgcggggctgctcgctgcccagcttcaacgcgacgctgatgctggagatgctgcgggggaagcggatgctgttcgtgggtgactcgctgaaccgggggcagtacgtgtccctcctctgcctcctgcaccgggccatccccgacggcgccaagtcgttcgagacggtggactcgctgagcgtcttccgggcgaagaactacgacgccaccatcgagttctactgggcgccgatgctggccgagtccaactccgacgacgccgtggtgcactccgccgacgaccgcctcatccgcggcgcgcccatggacaggcactccagcttctggaagggcgccgacgtcctcgtcttcaactcctacctctggtgggtcgccggggacaagatccagatcctgaggggcgccgacaacgacccgagcaaggacatcgtggagatgaagtcggaggaggcctaccggctggtgctgcaccaggtggtccggtggctggagcgcaacgtggaccccggcaagtcgcgggtgttcttcgtcaccgcttcgccgacgcacacggacggcagggcgtggggcgacgacgacgcggagggcagcggcaactgctacaaccagacgtcgccgatcagcgccgcctcgtcctaccgtggcggcacgagccaggagatgctgcgcgcgacggaggaggtgctggccacgtcgcgggtgcccgtcgggctggtcaacatcacgcggctgtccgagtaccgccgggacgcgcacacgcagacctacaagaagcagtgggtggagccgacggccgagcagcgcgccgaccccaggagctacgccgactgcacgcactggtgcctccccggcgtgccggacacgtggaacgagctgctctactggaagctcttcttccccagcaacgatcaggtcctctgatggtgcattggtgcctgcatacatacgcctggaaaccaactgctaggggctagcccaaagaaaatgtgtctagatgaacaaagacatggggttcaaatgttttgttttgatttcggatatggacgctgtcgatgctcttgttctctgtggaattcttcttaccaactgtgcctcccatatatacatcactactgatactagaatctatgctgatattttctttcgttaaaaaaagcgacagtgaagcgtagaagcacctacaagagttttcaaaaaaaaaaagagaaaaaaaaaaaatttgaatcgtcagaaagtatcatagaaaaaaatcaacatccttttt

SEQ ID NO: 517 - DNA, 490 bp, Zea mays
  Clone ID: PAT_MRT4577_10137C.1
ctctcaccagcggggacttcggtatgtgaaaacaccaattcttcaactcctacagcgatccaccagtgcaactcgcagaatggcagtgttacctttatgacccttgtgcctgcaacactcatgagccctattacaacagtgacctttggtgcatttattgggacaaaacatcaggttttttcaactacaacaacttgtgctagcaaaccttgctgcctactgtcagtaacagcagattcttccattcaacacaactaggttcattgaactctgcttcttatttgcgacaacaacaactaccattcagccagctacctgctgcctacccacagcaatatattgcattcaaccaactagcagctattgaactgtactgcttatttacaggagcatcaactactaccattcatgcagctagctggtgtgagccatgctaccttgttgcacaaccacagatgatgccgttctaccaccacgttgcgcctaacgc

SEQ ID NO: 518 - DNA, 199 bp, Zea mays
  Clone ID: PAT_MRT4577_101478C.1
gcgctctgatcattaaggttatgtgcattcgattgctcgctggcattgccaggattgtgggtgctggggtatgttcatgatgttgtaagcttaatgaacggctggtaatggtatatgtagtaccaccaccctctgtaatctcagctgctgtggcaactttgactcttttcggaatactcacttgtactgcgtagaacag

SEQ ID NO: 519 - DNA, 141 bp, Zea mays
  Clone ID: PAT_MRT4577_101706C.1
agcgcaaggaaaaggctctcagcgttgatatggagcacaagcaaatggcaagtgatgagtttatgaggggagaacgtgcttatattcaacgtaagttgtaactcaaacgggatgaatgggagatggctatggaccaaaaac

SEQ ID NO: 520 - DNA, 1973 bp, Zea mays
  Clone ID: PAT_MRT4577_101720C.1
ccatcacgtcggcctcttccacggccgccgccgtcgtcgccgccgccgccacctcgccgccgaccaccataccatcagatatttcagagctcgcgcccctcacgcatggttcttggcttcttgcttcttgctcgacgtgcgccgtaactaatcgactataagcgtggtgacacgtctgacgagatgatgccggtggcggcggtggatgactggtcggagcgcggtttctcgctgacctgcgaggaagactgcgccgacctcggcaacggcgtcgtagacgacgacgagttcctcccgctctacaatgccggcgaagaggaggaagaggagtatttggagcagctggtgtttaaggagaccagcctctgctcctcctccgactcagccgcggactgcgacggcgacggcgaaggagacgaagaatacccctcgctcgcctctgaggagtggtttcggcaagctcgcctcgccgccgtcaagtggattcttgaaacccgcgggtgcttcggcttcggccaccggacggcgtacctcgccatcgcctacttcgatagcttcctcctccggcgacgcgtcgatagggaggcgatgccgtgggcggcgcagctgctgtccgtggcgtgcgtgtccgtggccgccaagatggaggagtgccaggtgccggcgctgtcggagttccacgccggcggctacgatttcgactcggcgtccatccggcggatggagctgctggtgctgtccacgctcggatggcgcatgggcgccgtcacgcccttggacttcctcccctgcttctcctcccgggtccacccgcacggcggcgccggcgccggcggccacgtcgcccacaaggccatcggtttcatctttgccacggctgaagctggtagcgtgcttgatcacaggccgtccactgtggctgcagctgcaatcttggctgcaacctatggacctctactgaccaaagaagcactcgattccaagatgagctacctttctccatcttgtcttattgagaaggaacatgtacatgcctgctacagtatgatggttggggacaataacaggagaggtagcaagagatcattgccatgttcaggctccaacgagattgccactagtacatatcattctgttcttgttgatgatgttacggacaccgccgccgcctttgccacggcggtatcggccaggaataagcggatcaggctggagctgacgggcatcagttgagaaagctagcaccaccggggacacagtttttagccagatgtctaggggggcttggtttgatcttccctttcattttcttcccttctttttgaacttatatgtttgcgaaaaagaagatatttttttaggttctttgagccattgccatgggttggcattggctgttgtcagatttgattggtttggtttgtgagaggtggaagagatgaacaaagcagagggctgagctttcctatggagaggagagcttaggttaataagcccaatgccagcgcccaaacagggcacacttcacattcagtgaactttacttcaaaggttgatgcaatgttgcattgcatgtggtgagagatgctgctgcagagaagatgcaaaacaagtggtaacaacactgagaggttgagggttttgccattgtttatagaacgagtgagcgagagagggagatgtttccctttttcacctgtgcaagtggatgtgagagtggtgtttcactctgcacttgcgagggttacatcgatttgtaacaaaccctgtgtacttgtgtaaccccctcttgttcctgaggaatggaatcagattgcgttttgcgtcaaaaaaaaaaaaaagaaaataaaaaagtgtccccacagccctgtagggttcgtgctcagttccgcgggccgccgcgcagctgctgtgccgctctgcccctgccggcggcggctggcccgtgccgttcaaggcaatcaacgatgaag

SEQ ID NO: 521 - DNA, 3389 bp, Zea mays
  Clone ID: PAT_MRT4577_101955C.1
gcaaagtgtttaaataatgcactaagattcgttagtaagtgtttaaaaatgcattccttactgtttagctcaattgttggtaaccagtttgtactatttgtgatttggttatatttattggtccagcttgacgaagttgatgaggcggcaattgaaaaggaagataatggaaagatggaggacatcgattgcaatcatgacatccggattcatgaagatttgggtcatgtatgccgtgtgtgtggtatgattgtgagaagagctgattcaataattgattatcagtggaaaaaggcttcaaggagaagaacgaatggctatggaggacattcaaaagatgctgatgagatagattgtggtactgttaaactgtctgaagatttcatagtcgcagatattgctattcatcctagacatgctcggataatgaaaccacatcagttgggaagggtttcaactttttggttaagaatttgattggagacaagggccggccggcgcttctagctccgcccacaggtacagggaactcccacccccttacagcaaccattcagcttctcctagcagacagcaacatgacttcggcacgaggccaaaaaggtggaggtggaagtggaggtcaccaaggcggcgccggcgaaggagaacgccgccgaagagaaggccgtcatccccgcgaccgagccgccggccgcccaggagaagccgccagcgccggccgacgactccaaggccctggccatcgtcgagattgcagataaatctactcctgagaagcctatcgctgagaagcaagggggctccagtatcagagatctcgctcttgcaagggtggaaacggagaagaggaactctctgattaaagcatgggaagataatgagaaggcaaaagctgataacaaggctactaagaaagtatctgttattctttcatgggagaacacaaagaaagcaaacatagaagctgaaatgaagaagattgaggaacaactggaaaagaagaaagctgaatatgctgagaagatgaaaaacaaggttgcaatgatccacagggaagccgaagagaagcgagcgatggtggaggcaaagcgcggcgaggaggtcctgaaggccgaggagatggctgccaagtatcgggccaccggccacgcccctaagaagcccattgggtgcttcggagcctaagaaatgttccaagtcacaccgagcagaaagtgaaaacctcaaccagtgattgcttggtcacctcacacccaaacagaaagacattatttataagttggaagcacatgatcggttcaaaagaaatgcagtagggagtgcactgtacattcatccatgtctttcagaactttcagaggttaatgctgagcatagggctaacacctttagagatgatttagttgatagtctggtagattctatcactgtgagagatggcgtgaaggccaattttttcatgaatatcctgtcacttgctaattctgcaggagagaaagtgctagctttcagtcaatatatatctcccatgattttctttgaaaggctgctggtgaagaagaaaggctggcatgtggggaaagagatctttatgatctctggtgatactagccaagaagacagagaattggcaacggaccattttaacaactctgctgacgcaaaaattatgtttggttctatcaaggcatgtggggagggtatctccctcgttggtgcgtcgagagttgtcattctggacgtacacctgaacccatctgtcacccgtcaagcgattgggcgtgcattcaggcccggacagcagaagaaggtgtttgtgtacaggcttgtagctgccgattctgacgaggtaaaggtccatgagacagcattcaagaaagaagtcataccgaagctgtggttcgaatggagcgagcactgtactacggaagacttcaaacttggtcaaattgatattgatgactctggtgacgaactgttggatactaaagcaatccgcaaggatatcaaagcgctgtatagaaggtaggtaacaagctttgtggccactggacaccatgtacatattgcagtgctgaccgtcgagctgatccttaaactgaagaaagaggtgacgggtgttgcggtggctacattgcgcggtcattcccagctatatccgtggaatggcggcttcttttgttcgtagtatgtgccaacttggggcagcagtcagctgatccccagacacatttctagactcttttttaggctcaagtttctgagaattaacctgctatggcgtttagccttaagtaaatatttcgttcgcaacaataataacccagtaaacctaatttgttcttgtgcgtttgtggtggtggttcttgaaatttacctggcgccttcttcctgggctagatgctatgcaggtgtcacaggttggtttgttggcatgtagaatcgggaaatgctaatctcgaaagctcgtagtttccttttcccccccgggtgacatgtttattcacctcttactagttaccacgtccatttccaactataagatatgatactttggcttttgaagatacattacttttattacgtatagtgtatatcgccgccgccgccggccgacgactccaaggccctggccatcgtcggagaaagttgcagatgaacctgctcccgagaagcctgcccctgcgaagcaagggggctccaatgacagggatctcgctcttgcaagggtggaaacagagaagaggaactctttgatcaaagcttgggaagagaatgagaagacaaaagctgagaacaaggctgctaagaaagtatccgctattctttcatgggaaaacacaaagaaagcaaacatagaagctgaactgaagaagattgaggaacaactggaaaagaagaaggctgaatatgcagagaagatgaagaacaaggttgcaatgatacacaaggaagccgaagagaagcgagcgatggtggaggcaaaacgcggtgaggaggtcctgaaggccgaggagatggctgccaagtaccgggccaccggccacgctcctaagaagctcatcggttgcttcggagcttaagaagccttccaagtcagaccgagcagaaagtgaaaaacgtcagccagtgattgcttggtcctctcgctctatcaagtgtgtagtgtgtcttcgaaagtttgtaaagcctactgctgctgctgtatatactgatatcgcatccaaggcaggcgtttggtggtgtacatgttgaatgcttgacgagaaacattcttgtgtgtagttaagaggtcacgctgttgttgttgttgttgttgacattcaagcagacattttgttctaaaaaaaaaaaaaaaggccggccgctcgcgatctagaactagt

SEQ ID NO: 522 - DNA, 633 bp, Zea mays
  Clone ID: PAT_MRT4577_102061C.1
ccggccgggatcgcacatatactcgagaccaactagcaacgtagaaagcacaatacgtcgaccaacaatggcagccaaaaatttcgcctccttacgctcgctggtctctctgcaagagctgctacggcgaccatcttcccgcactgctcggcaagctgctatagcttgccttcttcccccgtacctctcaccagaggtggcttcggtatgtgaaaacccaattcttcaaccctacaggatccaacaggcaatcacaggtggcatgctacctttatcacccttgctccttcaacaatcatcagccctattacatcaggtacctttgatgcattcattggcacaaaacataagggcacgacaactacaacatcttgggctaccacaccttgctgcctactctcagcaacagctgttccttgcattaaaccaactagctgtattgaactctgcttcttatgagcaacaacaacaactaccattcacccagctaactgctgcctacccccagtactttcttccattcaaccaaccgacagcattgaactctcctgcttatttacaggaacaacaactactaccattcagacagctagctggtgtgagccctgctaccttcttgatacaaccacagtt

SEQ ID NO: 523 - DNA, 639 bp, Zea mays
  Clone ID: PAT_MRT4577_102085C.1
ttgcggcacatcgttatggaatcaagagagtaattttacctgaaaggaacctgaaggacttatcagaggttccatcaccgattctctctggcatggagattctgcttgtgaaacacatcgaggacgtactcgaccatgctttcgaaggcggatgtccacttaaatcacgctccaagttatagcatccaactcgcctttgctatggatatttgcttcggaggatcatcgtcaacagtaccacgaatggtcaacagtcagaataagagcctagctctcttgccagcacaggtcttgacacgcccatttttgttaggcttcgcatctgaatgtgtatactggtcagaattcggagagcagtcagaagatctgctcgttcacctgctgggactcattgcatagtttctcgacaccagctgttgatgtttatgcacagatgcaacagaaatcagggaggaattacgctggttggtttctctgtcgtgggtgtatatatgtatgtatgcatgtaatctaatccagggaaatatagctacaacaaggttgtcaaaactaaagacatcgagaaacatcacacgtccattgggcttgggtgactttattataaatgtatgtacatataacccaaaaaaaaaaaaaaag

SEQ ID NO: 524 - DNA, 304 bp, Zea mays
  Clone ID: PAT_MRT4577_102318C.1
ccggccgggagcaaataagcacgacttgattcattgatgttagaagagatcgagccttcttttgaaccacaagggcgaggatgtcttgcaactgcggatcaagctgcggctgcggctcaagctgcacgtgcggcaagaagtaccctgacctggaggcgacgagcaccggcgggcaggccaccgtcaccctcgagggggggcgggagaagaaggccgcgccccgatttcgtccagggcgcggcggcactccgcgaggccccccacggctggagccgccggtggcaactggaagtgcgacccctgc

SEQ ID NO: 525 - DNA, 270 bp, Zea mays
  Clone ID: PAT_MRT4577_102583C.1
tagctacatcgaaagcacaatattgtaccaataatggcagccaaaatcgggcgcctcattatgctccttggtctttctgcaagtgcttcttcgtcgagcatttttccgtaatgttcacaagctcctatagcttcccttctttccccatacctatcaccagcgatgtcttcagtatgtgaaaatccaatttttataccctacaggatccaacaggcaatcttagcaagcaatttttaccttttatcacccctcgctgctataacccctttt

SEQ ID NO: 526 - DNA, 442 bp, Zea mays
  Clone ID: PAT_MRT4577_102590C.1
tttacgcgtccgcggacgcgtgggcgcgaggaagggcaagaaggcgaggaggaagaaggagctgaggccgttggacgtgctggacgacgagaacgacggagacgaggacggaggcggcggcgggtcagactcgacggagtcttccgctggcggctccggcggcggggagaggcagcgggagcaccccttcgtggtcacagagcccggcgaggtggccagggccaagaagaacgggcttgactacctcttccatttgtacgagcagtgccgcgtctttctgctgcaagtgcagtcccttgctaagctgggcggccacaagttccctaccaaggtgaccaaccaggtgtttcggtacgccaagaagtgcggggcgagctacatcaacaagcccaagatgcggcactacgtgcactgctacgcgctgcactgcctggacgaggat

SEQ ID NO: 527 - DNA, 185 bp, Zea mays
  Clone ID: PAT_MRT4577_102632C.1
ccaaaaaaaaacgaatcttatccataaacaaaaggggtcacagatattcctccatacgtacatgctcatggtggaagacgcagttgaccacctaaagctgaatacttacttattaagactgatccagcttgtggcaacatcggaagttcacatgcttacagacgacaaattttaataacaatagc

SEQ ID NO: 528 - DNA, 410 bp, Zea mays
  Clone ID: PAT_MRT4577_102752C.1
aaaagggagggggaaaatgaccaaattaaaaaataaggggacactctggcacgtccactcataatatatccaacgacccgcgccggccgggcggtttactcgctgcccggaccgggaggtagctttcgggaccccggggaaaaaaaccctggggcccaacagttccttgcccacctcggggggaaatgtgtcctaccggaggaaaaactccacaaggaggaacctgcccaccaacaccacaaaatttttcccggggcactgtttgttgtccaccctggggttctcggtctcacggccggtggaccagtacacgtactggaaaagcttgctgccctcctccccgaggaaacggtcgggcacaaaatccccgggggggtcccccaacacccgggggtccttgggggcccacg

SEQ ID NO: 529 - DNA, 1683 bp, Zea mays
  Clone ID: PAT_MRT4577_102819C.1
gcctggccgggaaaaaaaaaaaaaaaaaaaaaaaaaaaaaaaaaaaaaaaaaaaaaaaaaaaaaaaaaaaaaacgggcgggcttttttctctttcctcctgcctcctgcaagccacgcgacgccacacacaggatagcagggacggcggcgcggagctagggttttgatccgccacgccggctaggctgcaccatcccgacgaagccatggagagggagctactggagacgttcgatgcggccaagaaggcggccgacgctacggcaggacagggcgactcgccggaggctggccgctgcctcgacgcgctgcaccggctgcgcgacatacgcgtcaacaccgacatcctcgtctccacgcaggttggcaaacgtcttcgacctcttactaagcaccctcactcgggcattcaggcagtcgcatcagacctttttgggtactggaaaaaggttgtccttgaagagacaggaaagaaaaatgggagctcagagaatgaaaaatcaatggactcttcaggaaaggttgagaaggtgaggcccatgaaggttgaaaagaattctgcatcagcaagcatgaaggttgagaaaagagatgtggatgataggggtcagaagcctgacaatgtcaaagttgagaagaccgctagtaatggttccagaactcaatctgtgaaggtagaaagggtatccaaagaagtcaacagaactgatgcaaagaagccagcatctgtccccaatggccacccaaagcttacatctcttgtcaaatgcaatgatcctacccgagataaaatccgggaactacttgctgaagcctttgtaagggtttccagagagactagtgatgatgacagagacgaagtgaaaaacatcttggatgaagtcgaggcatgcgacccatacagggttgccgtgacagtagagtctgcactattcgagaggcttggaccttccactgggactcacagggcaaaatacaggtcaatcatgttcaacctgagggctgaaaacaacaccgatttccggaggagggtcctcatcggtctagtgaccccggagaggcttccagacatatcccctgatgagatggctagcgatgcaaggaagcaagagaacatgcagatcaaggagaaggctctgttcgactgtgagcgtggagcagcaccaaaggcaacgacggatcagttcaaatgtggcagatgtgggcagcggaagacgacttactatcagctgcagactcggagtgctgatgaaccgatgacgacgttcgtcacatgcgtgaactgcaacaatcactggaagttctgctgagtggcagccttgctaaagtgtttacttagttgtgctgagcacactatcctgctgtgatgtgtgtgctctgttagttgtgactgaaagttcgacagggcaggctgaacaactcagcttttttccccttttttaccccccgtaaactaggagcagttatcctcttcctctgtcaggcacccttctgattcattcagattgtactagtcgaacgcgtgaatgttgttgacttgatcgcatcgtcaccagctgtttaagttttgaatgttcttgggtggagttagaatagaatggtgccaagtcagaatgatgatggaataaaaaaaaaaaaaaaaaaaactcgagactagttctctctctctctctccctcgtgc

SEQ ID NO: 530 - DNA, 1760 bp, Zea mays
  Clone ID: PAT_MRT4577_102820C.1
cctccacaccaggccacgccacacacaggatagcgagcgggagcgacggcggcggcggaggagctagggttttgatccggcctcgccggctaggctgcgccgccccgacgccgaagccatggacagggagcttctagagacgtttgacgcggccaagaaggcggccgacgaggcggcaggggacggcaactcgccggaggctggccgctgcctcgacgcgctgcggcggctgcgcgacattcgcgtcaacaccgacatcctcgtctcgacgcagatatgcctcgtcgaatcgacggcctgtttcccctccctctcctctaagacgacgccgggtagacgcgcgcaagaaacagggccttcgtttggaactagatctattgagttcctgtctctattttgggtggatactggataggttggcaaacgccttcgaccccttactaagcatcctcactcaggcattcaagcagttgctgcagacctttttgggtactggaaaaaggttgtccttgaagagtcaggaaagaaaaatggcggctcagagaatgaaagatcaagtgactcttcaggaaaggttgagaaggtgaggcccgtgaagattgaaaagaactctgcatcagcaagcatgaagcttgagaaaagagatgtggatgttaggggtcagaagcctaacaatgtcaaagttgagaagactactagtaatggttccaaagctcaatctgtgaaggtggaaagggtatccaaagaagtcataaggactcctgactcgaagaggccagcatccgtccccaatggccacccaaagcttacatctcttgtcaaatgcaatgatcctacccgagataaaatccgggaactacttgctgaagcctttgtaagtgtttccagagagactagtgatgatgacagagacgaagtgaaaaacatcttggatgaagtcgaggcatgcgacccatacagggttgccgtgacagtagagtctgcactattcgagaggcttggaccttccactgggactcacagggcgaaatacaggtcaatcatgttcaacctgagggctgaaaacaataccgatttccggaggagggtcctcatcggtctagtggcgccggagaggcttccagacataccccctgatgagatggctagcgacgcaaggaagcaagagaacatgcagatcaaggagaaggctctgttcgactgcgagcgtggagcggcaccaaaggcgacgacggaccagttcaagtgtgccagatgtgggcagcggaagacgacttactaccagctgcagactcggagtgctgatgaaccgatgacgacgttcgtcacatgcgtgaactgcaacaatcactggaagttctgctgagtgttcagccttgctaaagtgtttacttagttgtgctgagcacactatcctgctgtgatgtgtgtgctctgttagttgtgactggaagttcgacagggcaggctgaacaactcaacttttttccccttttttaccccccgtaaactaggagcagttatcctcttcctctgtcaggcagcctcctgattcattcagattgtactagtcgaacgcgtgaatgttgttgacttgatcgcatcgtcaccagatgtgaatgttcttgggtggagttagaatagaatggtgccaagtcagacgatgctgatggattagtggtgctgtgctccatttctgtttccattgtctggatgaagatcgagatctatatcagatgatgcgctgtcccatttcggac

SEQ ID NO: 531 - DNA, 333 bp, Zea mays
  unsure (1)..(333): unsure at all n locations
  Clone ID: PAT_MRT4577_102894C.1
gcgtcggacnctacctccctccctctcccctctctccggcacaggcaatttagccctcgattcgaccccgagtcttgcgcccactaccgggattgcctgcgccaagcgcggatctgaacgctgcgatccaagtagtcgctcgaatccgccatgaaagaggccaaatccaatggcgccgacaaggccgatgccaagctggcggcgaagagcaaggtggcagacaagcccgccaagggcaagaaggggaaggacggcaaggaccccaacaagcctaatagggctcccagcgctttcttcgagttcattgatgaatttcacaaggagttcaaggag

SEQ ID NO: 532 - DNA, 396 bp, Zea mays
  Clone ID: PAT_MRT4577_102912C.1
gcccatcatcgctgttagcagtctcaccattataccgttctgccgtccctagagggcagaaagacccgttcaaatgcggcggccaaaggttgcatgcggaccaggcggtgagggtctgggcaagggtggagccaagcgccaccggaaggtgctccgcgacaacatccagggcatcaccaagccggcgatccggaggctggctcggaggggcggggtggagcgcatctaggggctcatctacgaggagacccgcggtgtgctcaagatcttcctcgagaacgtcatccgcgacgactgtaactacaccgagcacgcgcgccgtaagaccgtcaccggcatggatgtcgtttacccgctcaagcgccaaggccggagtgtgtacggctttggaagcta

SEQ ID NO: 533 - DNA, 303 bp, Zea mays
  Clone ID: PAT_MRT4577_102920C.1
gctaggcagctatacatacgaagaagaagcaagccaagcagaattgagagagaggcgaggacgtggcgacgacggcagccgcgatggcgacgacgacggacctggggttcgaggcgacggagctccgcctgggcctgcccggcgggggaggtggaggggagccagcactgtgcggcaaggagaggagctcttgctgcgcctacggcatgaggggctattccgagaccatggatctgaagctgaagctggagccagcggccgctgtggaggcgtatgacgatgaagaggaccacggcgtgggtg

SEQ ID NO: 534 - DNA, 1694 bp, Zea mays
  Clone ID: PAT_MRT4577_102951C.1
actgtgtgcgcctttgcctctttgcgctctcacctgcccgcccgtcccgcctgcctcgccgcaagccgcaagcgcacgcgctcggctcgccgcgtcgggtcgccgcagggcgaacgaaaccctaggatcagggaggctccgggcatcgctgctcgacccccatgacgtcctgcgggtgtctgatgctcgagaaggtggagggcgacgcgtcggcgaagacgagggtgaaggccgcgccgggcgccggtgccggcgcctggtgcggctcgtgcgctggggactggcggggccggtcagaggccatcttccccatctacgtgatggggagctcgcgggagagcaccgtggcggcggcgcgcggcatagtcgactcccccgaggaccccatatgggttgccgtcaaggcggaggccaagtctgaggcagaaaaggaacctattttgagtagcttcttgtatgccagtgtgctgtctcatgattgcctagagcgtgcattgagcttcgtccttgcaaataggcttgaagatccaacattgcttgctactcagctaatcgatatttttaacgatgtcatgctgaataacaaagatatatgccgctccattcgccttgatgctcaggctttcaaagatagagatccagcttgtgcccaatatagttgggcactgttatacttaaagggctaccaatcgttgcaatcatacaggatagccaatatattatggaaccagggacgcaaagttttggcattggcactgcaaagccgtattagtgaggtctttgctgtggatatacatccagctgccaaaattggcgagggaatattgttggatcatggaacaggtctagtcattggtgaaactgctgtagttggaaactgggtttcattaatgcagggtgttacacttggaggtacaggcaaggaacatggagataggcaccccaagattggtcagggagctctaattggagccagtgctactatcctcggcaatattaatgtaggcgaaggtgccatgattgctgctggctcccttgttttaaaggacgtacctccccacagtatggctgtaggtaatcctgcaaaggtagttggttatacagagaaagaagatccttctttaactatgaaacatgatgcaaggagagattattttgagcatgctgccatcagattgagatgattgatacacctaatgacgagtcttctttctattcgtctgtggaatactgtggagtaaaaaaagttccaaatcgccttattggcaagaagttttgtggagttaaaaaaaggtttcgtcgtcttactcgcaggaaaccttgtgaagttaaaaaaaaaatgtttgacgaaacgcatacggatgccattccggacatttcgtcacaggcacaaggctggatagtcgatgagctctgtgtttccctttctgcccagacaaccaaatgaagatggaaaagggtcacccagggctccaaaatctagagtgtagacaagcatgtccttaatgcgccttaaattggtctggatggcacttttttgtgataaactatctatctaaaccattgactaatgtctactctactctcaacaagatcaattaattgtatatttgatattaaagttggaatgtttagtatgacaaatttaatattttaaaatagatatgcatgaaatttgatcttgatctttttct

SEQ ID NO: 535 - DNA, 381 bp, Zea mays
  Clone ID: PAT_MRT4577_102973C.1
acgaaagccaaagaacattttacttcatatatatttgcacatttcattgacagactttcagttgtgtttctttacatcgcggcgtgcggcaaatgtttcttccacactatattgataagaagaaaaagaggaggaacagcattagtaatcccatattttttgctgaaccaattctatcatcaaattcttttgttggtacataggaatacatttcacctgatattattacccgagctggccatactagttctgtatattgttttgcgctaggaattcttttatatgagattttatattgttatacactcttcattgggaaaacaattcataagacatttactaatattttttacaaagatattatattttctgttagcattc

SEQ ID NO: 536 - DNA, 1617 bp, Zea mays
  Clone ID: PAT_MRT4577_103013C.1
cccacgcgtccggcaagcacactgctcctccctccccagccgcagcacagcagagcagagccgagtttgctgctgctgacctgacaccatcgtgtgcccctctctcggtccagaaggacgcgaaccgcgctcgtagagtgtggcagcaatggcggtcgtcgccggagacagcgagtcgctgatgcagcggtgcaagccgtacgtggcgatgatctcgctgcagttcgggtacgccggcatgaacgtcatcaccaaggtgtcgctcaaccacggcatgagccactacgtgctcgtcgtctaccgccacgccttcgccacgctctccatcgcgcccttcgcgctcgtgctcgagcgcaaggtccgccccaggatgacgctctgggccttcctccagatcttcgtcctcgcgctgctcgggccggtgatcgaccagaacttctactacgcggggctcaagttcacctcgccgaccttctcctgcgccatgagcaacatgctccccgccatgaccttcgtcctggccgtgctcttcaggatggagaaggtgaacctgaagaaggcgaggtgcgtggccaaggtggtaggaacgctcgtgacggtggccggcgccatgctcatgacgctctacaagggccgcgtcgtcgagttggtctggaccaagcacatacacctccacggcccgcacccggacgccgccgctgctgccgccgccgccgacaaggactggttcaccggctccattttcctcatcatcgctaccctcgcctgggcgtccctcttcatcctccaggccgccacgctgaagaggtacgacgcgccgctgtcgctgaccaccctcatctgcttcgtgggcaccctgcaggccatcgtcgtcaccttcgtcatggagcgcgagccctccgtgtggaggatcggcttcgacatgaacctcctagccgccgcctacgctggcatagtgacgtccagcattgcctactacgtgcaagggctggtgatccagagccggggccctgtcttcgcctccgccttcagccccctcatgatgatcatcgtcgccatcatgggctccttcatcctcgcagagaacatctacctcggcgggatcatcgggtccgtgctgattgtcgccggcctgtactcggtgctgtggggtaagcacaaagagaacgaggagaaggagggagaggcggccatggagatccccgtggcgatcaaggccgtcgacggcaatggcaggatcatggagatcgtggagctggacgaggtgcagctggagaaagcccaggccaacaccaacgccaacgccaacgcggccgtcgccgtcacggcggtccccgcggcggaggcccggatgcagggcaaggacgaccaggcttaagctacaggagatgcgccgatcgacgggtcgatcgcgcgcgtgcgtcatcttagccctcctgtgctgtgcttttgtgcgtcctcttctcccccggccggcccatgatagatgtgttgtagtgtggggcgacctgatgctttaagctagcgacgggcagtagtagtgctagctgtagtagtgaagtggtgccaagatggaagctgaggaggatgcaatataatgatgatggggagttttgt

SEQ ID NO: 537 - DNA, 539 bp, Zea mays
  unsure (1)..(539): unsure at all n locations
  Clone ID: PAT_MRT4577_103148C.1
gggggaaacgtaaacaactaaacatgtaagtaaatcagagttgcatacattttttcgggcctcggcccacgatcatacacaagcccatgcatacccacacgtttacatacgatggattacgtagccccccttattcgggcattacacgagcgcatacatacgtacccccccacaaaacggggggcgctcgatttcactttacacacccacccgtagcacacggggagggacgacgatacgggaggatcaatcagccgaaaaaggggggcttttttttgccgccggcctcctgggcctccttgggggccttttttttttcggggggctcggggaaggcgaaacccccggagccgacggccgccgccgccggaaccttcttcttgatcttgggggggggcgcgtgctccgggtcctttttcgcctcgggcttttcgtaaagtgcgaaggccccggcggcgatggcgccggcctcgccgaggggctgcttgggcttgngctccttctcctccttcttgtactcgncgaactcgttctcgccc

SEQ ID NO: 538 - DNA, 226 bp, Zea mays
  unsure (1)..(226): unsure at all n locations
  Clone ID: PAT_MRT4577_103156C.1
tttgccattggttcagctgctcttgtgtctctggcgctttttggttcctttgtcatcatagcgggagggaatattttcgatgtgctctcccccaaccttttcattaatttnattgtttgagcccttcttccctattgattctctgccattaccatgaatagtgttggaagttcctccctaaacatggtggattatgtccacacacaattcaacaccattccttttt

SEQ ID NO: 539 - DNA, 979 bp, Zea mays
  Clone ID: PAT_MRT4577_103177C.1
actcgactccgcccagtttttccaccaggcgctgtacctggggggcgtcaccgccgcccccgctcggcccacgctccgcctcatgaagcagaacctcgcgttcctctccagcgtcctcaccgagcaggcccagctgccggccgtgctcgaggtgatgagggcctccgtggaggccttcctgacggtcgtcctcgctggcggcagcgggcgggccttcgcccgcggggaccacgccgccgtggccgcggacttcgcgagcttgaagcgcctgttctgcagtttcggggtcggggaggaggcggtcgagagggagacggtgcgggcggaaggggtgctggcgctcatggccgttccgacggaacagctcatccatgagttgctcggccactatgcttccactccgatgagagcggcgggtgacgagttaccgcagctgccgatgatgccgatgacgcccacggcgagacgctggagccggtccgacgccaacaccgtgctccgcgtgctgtgctaccgagacgatgagcctgccaacagattcttgaagaaaacctttaatctgcccaagaggaggtagccgattacgcagttctatcgccggcccataggatcggattggatctatcattcgcgacccaaagggcctgttcgtttctgttgggtttcacaaaaattatttcggctaatcaaaccttatataaattagacaagcaatctacgtaggaattgttccgagtgttcaattctctggaaccgaacaaggcctaatactttttttgaaagcacgttcttattatacacatgtaacaggaaacaggaaagcacgtagacggtggtgtaggtttggtgaggtgagaaacgggaggtcttgcattcctattgatttttcatcgatctgtgttgtttttatttacgccattggccgacattatttaatgatgtcatgagccatgtggtatacatgaaaaagctctccccc

SEQ ID NO: 540 - DNA, 861 bp, Zea mays
  unsure (1)..(861): unsure at all n locations
  Clone ID: PAT_MRT4577_103195C.1
cgttctcgactcatggagtctgatctccaccattttataaaggctaatgatgacttgacaaaggagcattaccaattctttctttaccaattactccgggctctgaagtacattcacactgctaatgtttatcaccgggacctaaagccaaagaatatattggcaaattccaactgcaaactgaagatttgtgattttggattggcacgagttgcattcaacgatacccctacaacaatcttttggacggattatgttgcgacaagatggtatagagctccagagctctgtggttccttcttttcaaagtatacacccgccattgatgtctggagcatcgggtgcatctttgctgaggtcttgacaggaaaacctttgtttcctggtaaaaatgttgtacatcagttagatttgatgactgatcttttgggcacaccatctatggatacaatctctcgggtccggaatgagaaagcaaggaggtatctgagcagcatgagaaagaaagagctgatttcattttcgcataaatttcccaatgcagatcctttggccttagacctgttgcaaaggcttttagcgtttgatccaaaggaccgcccaactgctgaagaggcattgtctcatccgtactttaaagggcttgccaaggttgagagagaaccatcctgccaaccaatcacaaaaatggagtttgagtttgagcgtagaagagtgacaanagaagacataagggagcttatatttcgtgagatattggaataccatcccacattgctcaaagactacaccaatggcactgaaaggacnacctttctatacccaagtgctgttgatcattttaggagcagtttgctcatc

SEQ ID NO: 541 - DNA, 642 bp, Zea mays
  unsure (1)..(642): unsure at all n locations
  Clone ID: PAT_MRT4577_103258C.1
cggtgccggattcccgggcccgctgaccccggagcaggtcgcggaccctaagagctacgcggactgcacgcactggtgcctgccggggctccaggacacgtggaacgagctgctctactccaagctctttttcccctgagttaaagggtttgagttgcgaggtgcacggtgaagttggggtctctctctggcattattggcacgctgcacaatactagttagcttggcataggcccagcagtctgaagatggatgctctgcctctgctgcggtagtttctcgggggcaaaccttccacgcggcatggcatggtattgttgatgtacgattcattcgttggaaaacctggacgtgagtgctggaattgcaccatctggccttttctgtacatgcctgatgtaacggtggtgttgtgtttccccaccaccacctctcttttcacgatgatgacgcagtgcatgtataattgtatgggttaatgacgcagtgcatgccttgcggagtgggccggtagacaaacatttcggcggctggtcacttggtcagtgacccgttgatattattattattattggatctaatgcaacaaccagttctggtgttgaagtccaaaaaggacagnnnnnnnnnnnnnnnnnnnna

SEQ ID NO: 542 - DNA, 756 bp, Zea mays
  Clone ID: PAT_MRT4577_10326C.1
aattcggcacgagggatccactggccgccggttttctccagctggagagccattcgtgggcgtaggacgagagagaggatcggcggcggcggcgtgtgggagatggcgcgcgagaggcgggagatacggcggatagagagcgcggcggcgcggcaggtgaccttctccaagcgccggcgcgggctgttcaagaaggcggaggagctcgccgtgctgtgcgacgccgacgtcgcgctcgtcgtgttctccgccaccggcaggctctcgcagttcgcgagctccagtgtgaatgacatcgttgacaagtacagtacacattctaagaatctggggaaatcacatcagcagccttctattgatttgaatgtagagcagagcaaatacagcggcttgaacgagcaacttgctgaagaaactaatggacttagacagatgagaggtgaagaccttgagggattgagtgtagaggaattgcaccgaatggaaaggaaacttgaagcaggactgcatagagtgattagtacaaaggaccagctattcatgcaacaaatcggcgaattactgcaaaagggcacacagctagaagatgagaacagggcgtctaaaagaacaaaaaatatcctcactgaagacgggcagtcgtctgaatctgtaatgactgcattgcattcaggaagctcgctcgactgtgatgatggttccgatatttcctttgaagttgtcgttgccttgaaaggaagaccatcgcatcgcatg

SEQ ID NO: 543 - DNA, 1146 bp, Zea mays
  Clone ID: PAT_MRT4577_10330C.1
aaggatgctgcccctccacgcgccggccagctggagtgccatccgtgcccgcctcgcctgatggtggatccactggccgccggttttctccagctggagagccattcgtgggcgtaggacgagagagaggatcggcggcggcggcgtgtgggagatggcgcgcgagaggcgggagatacggcggatagagagcgcggcggcgcggcaggtgaccttctccaagcgccggcgcgggctgttcaagaaggcggaggagctcgccgtgctgtgcgacgccgacgtcgcgctcgtcgtgttctccgccaccggcaggctctcgcagttcgcgagctccagtgtgaatgacatcgttgacaagtacagtacacattctaagaatctggggaaatcacatcagcagccttctattgatttgaatgtagagcagagcaaatacagcggcttgaacgagcaacttgctgaagaaactaatggacttagacagatgagaggtgaagaccttgagggattgagtgtagaggaattgcaccgaatggaaaggaaacttgaagcaggactgcatagagtgattagtacaaaggaccagctattcatgcaacaaatcggcgaattactgcaaaagggcacacagctagaagatgagaacaggcgtctaaaagaacaaatgcctcaggtgctaacggctggcacaatggtggttgctgctgctgcagaaaatatccttactgaagacgggcagtcgtctgaatctgtaatgactgcattgcattcaggaagctcgctcgactgtgatgatggttcagatatatccttgaagttgtcgttgccttgaaaggaaggaccatcgcatcgcatgttatctgcatgagtggggctgacatcagtgcttctaagaagataaagactgggatagtcccattcgcggcattatattggtttaaccagatgtgctatccttgtgcatgtctgtacttcaaagtggctaacgcgaaatttgtatatataatagtgtatgcgctgcgttatcttcgttctaaaaatctgtattgtttcgttgctggcgctatattgttggtgtattatatatatgcacttagttgttatctctattctattaagaacataatatagacacatgatgctacc

SEQ ID NO: 544 - DNA, 1051 bp, Zea mays
  unsure (1)..(1051): unsure at all n locations
  Clone ID: PAT_MRT4577_103363C.1
aaacggacgaccgagaccgcctgggcggatccgagttcggacggcccatcagagcatcagacgaccaccttcctgcccccattcgtttccgcatcggcgtatctcccggcggccggcaaaggcgctctcgacctccctgcggtgccggtacgacagtcgacaggatggcaatggccacatcagcatcgtaccctccacctcctccattttaccgattgtacaaaaaatttgagcaagatccctcatctgcaccagaacctccaccaccaattgatgaaccattcaaagccttgggtgttgattacacaggagatgttgtgattccaagcttggagagtcataatgtccgtcagctttatccaaagggtcccaatattgacttcaagaaggagcttaggaccctcaacagagagcttcaattgcatattttggagctggcagatatattagttgagagaccatctcaatatgctcgtagggtagaagatattacgctcatattcaagaacttacatcatcttctcaattccttacgacctcatcaggcaagggccacattgattcacatgcttgagagccaaattcggcaccgcaaggaagcaattgaagatataaagcagaggagggaggaagcgcaaaagatgcttggggaatcactgcttatcttggatggaagtcaaactaactaggctgacgccgtcaaggtagttggttcaagaccgattcttctatgagttagtgtgttagtagaatagaagacaagatgtgtctggattgttgtggtatcatctgttgtggcttgtggtatttccagctttgataactgaattttcttacttctatggtctatgttagcaaagttggattactttcttacttccattggtactcaactgcatcatgggttactttcttgtggaagtgtatattgtgagattgatgcctcgtggccagcttaattgaaaggttgttatatgctaaaaaaaaaaaaaaagcggccctcgagccntgggtcgatgctantttcccatggnaagatttctcgtcttaa

SEQ ID NO: 545 - DNA, 1752 bp, Zea mays
  Clone ID: PAT_MRT4577_103367C.1
tgggtacctcgaagccggcctggaaattcctacgagcacggcatttggaagtcatcctcgcccagtcgccccaccaccgcctccgtcgacggcgtcctcgcctccgccgcgctcgcctcaccgccaccgccaccacggccttcctcgtctcatctccgccgctggcctcgccctcgatacgctactgacggggtgcccctcgccgtcgacacgtgacctccgtcatttgcatctcagctccaagatctactccagatcgggtgcatgcatgcagctgctggcctgtagctggcagtggtgactggcaggctgatccggttggacacggagaatgggctgctcttggcaccaggattggcaccatcaccggcacgcttgtctccaatctccattgatataattgactccattcggcttggttgtttcagtgaagacaagaagtgacccagcaatttccattttcttgttcaggatggcaatggccacatcatcatcttaccctccaccacctcccttttaccgactgtacaaaaattttgagcaggatccttcatctgcaccagaacctccaccaccaattgatggaccattcaaagctttgggtgttgattacacaggagatgttgtgattccaagcttggagagtcataatgtccgtcagctttatccaaagggccccaatattgacttcaaaaaggagctaaggaccctcaacagagagcttcaattgcatattttggagctggcagatattttagttgagagaccatctcaatatgctcgtagggtggaagatatcacactcatattcaagaacttgcatcatcttctcaattccctacgacctcatcaggcaagagccacattgattcacatgcttgagagccaaattcagcgccgcaaggaagcaattgaagatataaagcagaggagagtggaagcgcagaagctgcttggggaatcactgcatatcttggatgcaagccaagctaactaggctgacgccgagttggctggttcaagactggttcttcttagttaagacttaagagagtgttagcagcttcgagcctgccttcagctacatgttgggttactttgttgtggaagtatagattgtgagattgatgcctcgtggctaaacttaatcgaaaggttctcatatgctactcccttcattctaaattattagttttattttttttttaaatgtattattatgcctatacataataatagctaagtattcagcaaattattagtttttttttttataaagcagtgagtgactagggtttttttttccagcctgtctgcataagttttgattatcatgtaatttagtttataaaaagtaagggtgaacttctgagctaaaacgatattcatcagtattaaataaatcgcgcaaaagcacaacactccagcatatgctgaagctgttatatatgtttcatcaatatttacatatgcttacctatagttgtgaaaatgggttgtgtctggacatgcttccttattgttcacaactgttgcaaaaaaataaaacagtgcattacgatttacgactttggcatagtaacgtggactatagccatttgtcacagtttacgactgcttgctacccatgttcggttcgctcttaactcatgtggattgagttggcttaaaccctaagggctagtttaggaaccttatttttctatgggatttccattttttaaaggaaattagtttattttcccttggaaa

SEQ ID NO: 546 - DNA, 497 bp, Zea mays
  Clone ID: PAT_MRT4577_10366C.1
tatctcgagaacgaggccttagcttatttctgggaagcgccccacatcagccaaaaaacatcattattgaacatataactcataagcaatctaaaagagggcaccaccaatgatggtttgtcggtagaacgctgctgtgttagacaaagcatgttggctgaatggcagtaatcgttgcagttgtaagagggtgccaacgctaggcgcatagcgcgagtaaaacaacaacaactgttgctgtgtcaagaacgcagcatggactcacatcacttaactggctgaatggtggtagctgctgttgctgtaaataagcagcatagttcaatgctgtcagttggctgaatggaagtaattgctgggggtaggcagcagctagctggctgaatggtagttgttgttgcaaataagcagcagagttcaatgcagccagttggttgaatggaagaaactgctgttgctgagagtatgcatgaatgctttctagcacaagatgttgt

SEQ ID NO: 547 - DNA, 940 bp, Zea mays
  Clone ID: PAT_MRT4577_10397C.1
gtgtggtgtgtgtttatttttttgtttttttttttttttttttttttttttttttttttttttttttttttttttactacagctggtttgtttttatttattcactcgcacaacacaacatactgagccaggaagctcaccgaacagcgcaaagtacatacgatacgaggaccacgaaacactgaacagcacacgtacacacacaccaaacataccaaagcagagcaaccacacagcacacacacacgagtcgcgtcgctgaaacccaagatccgacgccgcgacgcgaacgcgacgcgaccattcacctcccgtccatgtcttcttcagccggagatctggatgctcttcacctcgggctttttgacctcggccttgggcacggtgaccgtgagcacgccgttctccagcgcggccctcacctcctccgtcttggcgttctccggcaggcggaagcgccgcacgaactggccgctgctgcgctccacgcggtgccacttgtcgcccttgtcctcctcctccctgctgcgctgcccgctgatgagcagcacgttgccgtcctccacctccaccttcacctcctccttcttcacgccggggaggtcggccttgaacacgtgcgcctcgggcgtctccttccagtcgatgcgggcgctggcgaaggcggcggtctcggaggccgccgccgacgacgacgacggcacgatggagcggaacatgctgtcgaacgggtcgaagaggtccacggagaatgggtcgaacacgctgctgcgcctcaccagcgacatttctgcttcgttgctagcggcttggtgcgtgcgagtgcgaactgcggaagtagagctgtgtcctgtggattggaggatttcagtgcgcgtagcttgctgtgatggcgattcttcgctctggattggatcccggccggcctcgaggtacccaa

SEQ ID NO: 548 - DNA, 372 bp, Zea mays
  unsure (1)..(372): unsure at all n locations
  Clone ID: PAT_MRT4577_104004C.1
actaagaaaacataaaaaaaagggggggntttttgggggcaccaagaggcaccattttttccttaggattaacttaaaacaaatcctgccgggggtaacagtatccaccgatccacatgccatgctggttgacgcaagggtctgctggagccggggatgaacacagcattaacaactgacacagagcgaccttgcaatcaaaaacccagaggggccacaccaaacgagacgaacgaagataaaccctctggactagggaaaacaccaggggggggaacaggataacttggccgggcgggccccaccgttaagttcctccaattcccgtcggagttgccctaaccccccccacggttgtcacggacgaatccg

SEQ ID NO: 549 - DNA, 1873 bp, Zea mays
  Clone ID: PAT_MRT4577_10400C.1
cacctttccctttttccccttccacctcccctcccctcctcgcggccggccggggttcccattaatatctagccgcctctccccccgtctcttctcctccaaaactgtgagcgagaagcagggagtgcgctcgacggccgccgccattagtgatttagtgttgaagagggagagaatctaaagtgaccggacgctgtccttccttgctgatcggcgacacggtccatccctccctcgctcgctagggttccttttcgtccatggatcagagcttcgggaatctcggggccggagctgggagcagcagcgggggctccaactccaaggcggcggcagccgccgtgtcctcctcgtctttcctgcagctgccgctgtcgacggcgtcccccgcgtactacggcgcgccgctcgcgcttctgcaccacgccgccgcggccccgtcgtcgtcgcagcagcagcagcagcaccaccaccaccagtacgccaggcacggcgccgagatgtcggcggcggaggccgaggccatcaaggccaagatcgtggcgcacccgcagtactcggcgctcctcgccgcctacctcgactgccagaaagtgggcgcgccgccggacgtgctggagaggctgacggccatggcggcaaagctggacgcgcgcccgccgggccgccacgagccgcgcgacccggagctggaccagttcatggaggcgtactgtaacatgctcgtcaagtaccgggaggagctcacccggccgatcgacgaggccatggagttcctcaagcgggtggaggcgcagctcgactgcatctccggcggcggcggctcctcctcagcgcgcctctcgctcgccgatggtaaatcagaaggggttggctcttctgaagatgacatggacccgaatggtcgcgagaacgatccgccggagattgacccacgagcggaggacaaggagctcaagtaccagctgctgaagaagtacagtggctacctgagcagcctcaggcaggagttttccaagaagaagaagaaagggaagctcccaaaggaggccaggcagaaactcctccactggtgggagctgcactacaagtggccgtacccttcagagacggagaagattgcgctcgcagaatcaacgggcctagaccagaagcagatcaacaactggttcatcaaccagaggaaacggcactggaagccgtcggaggacatgcctttcgtgatgatggaaggcttccacccgcagaacgccgctgctctgtacatggacgggccgttcatggccgacggcatgtatcgcctcggttcatgaactacacttccatggacgactgtgggggcctatccaatcgtcggaccgtgggagtatatttcagtgttgcggtgcaaggacattggataggcccccgcagaacgccgctgctctgtacatggacgggccgttcatggccgacggcatgtatcgcctcggttcatgaactacacacttccatggacgactgtgggggcctatccaatcgtcggaccgtgggagtatatttcagtgttgcggtgcaaggacattgttgtggaatttttgttgctgattgccaaggggtgggtcggtcgatgtagcgtctatgcatggcttgtagttctcctgtaatgttgttgttaatttccgcttggcggcttgtaatctaggtgtatctctggaacttgaatcctgggtgattaatccggcaagcagctgcctgtttgtatgattgtatggttcgggttggtggaacatgatgcatgctaaggcgtggcctgtctggatcaaaaaaaaagaagatgtcttttgtaccagtggaatgattggaacttcagattgctgaacatttccgatct

SEQ ID NO: 550 - DNA, 1438 bp, Zea mays
  Clone ID: PAT_MRT4577_104121C.1
gtcacgcgtggcgggagccctcaagtccgacgcgctccgttcccctttccctttccgaagcttctcgaccccccatcccctccctgacatggccgacaacgcgaaggccgcggcggcgcatgcgaggccggagtcgtcgcaggaggaggaggaggactggaaggaggccgagggggacgtcgccgaagtcgaccgcgccgccaccaatggcgccggcgaggggggcgtgcccacagacaggccgatccgggtctacgccgacggcatctacgacctcttccacttcggccacgccaagtcgctggagcaggccaagaagtcgtttccaaacacatatcttcttgttggatgctgcaatgatgagttgacacataaattcaaaggaagaactgttatgactgaggatgagcgatatgagtcacttcgtcattgcaagtgggttgatgaagtcattccagatgctccatgggtggtgacagaagagttcttggataagcataacattgattttgttgctcatgattctctgccgtatgctgatgctagtggagctggtaacgatgtttatgaacatgtaaaaaagcttggtaagtttaaggagactcagcgcactgatgggatatcaacatcggacattataatgcggattgttaaagattataatgagtatgttatgcggaatctggccaggggctacactagaaaggatcttggtgttagttatgtcaaggaaaaacgactgcgagtgaacatgggacttaaaaacctgcgtgacagagtgaaacagcaccaagaaaaagtaggggagaagtggagcacggttgcaaaactccaggaagagtgggtggaaaatgcagaccgctgggtggctggtttcttagagaagtttgaggaagggtgccactcaatggggacagccatcaaggagaggatccaggagaggctcatcaaggcacaatccagcgactttggcagcctcctacagtacgacagctacgattctgatgaagccaaagaaaacgacgaggacgaagacgaagatgaactctttgaagacgtcaaggaatagcacctccgtacatatacaatggttttgtagctgcaaattgtgttgtgagtcagttgcctctctctggttggtgatctttatatatggtctcaaaggtaggtcaggttgcaatgtttgtagctgctcttggtgtttgttcaggcaacgcatggttgtaaaagctgtggaaagactcttgtgcagtcaaggatacagattccgatggttacctttgggttagaacatatacggctgtaaaattggaagtcgaggtggttaaaactctgaaatcttgtctgttttccttcccctgtgcgtgctcagaaacacagcggaactcctgggcggcaaaaaagaaaatccagtgcttttggaccgggtaattaatag

SEQ ID NO: 551 - DNA, 214 bp, Zea mays
  Clone ID: PAT_MRT4577_104216C.1
tgttgtagctgtcacgtctgctatgggggaggagcagatctgcgcgctgaaggatgttggccccaagaacttccctgccttggaatgctgtgtctgaaaacctaaatcgaaaaaagaaggggatgaaggattgctacagagacatgcatctggcttgagctggcttgtgctatgggaaacacaagggcagggatcgctgggtggtgcaccgtgg

SEQ ID NO: 552 - DNA, 1591 bp, Zea mays
  Clone ID: PAT_MRT4577_104403C.1
ccggccgggacacgactctcggcaacggatatctcggctctcgcatcgatgaagaacgtagcaaaatgcgatacctggtgtgaattgcagaatcccgcgaaccatcgagtttttgaacgcaagttgcgcccgaagccttctggaggagggcacgtctgcctgggcgtaacgcatcccggtttcgcgataccccctcctcgagccggccgggcctcccctccggtgaagtcggggcaacgcgcatcactcgctttaaatccggacctcccggcgtctccctcctcccggccggtccccttatcacctcaccttctcctctgagtcctctctctccgccgccgcagctagctgtgacgttatgctctcgccggcgccatagcgccagcgcctaccgtctacaactatccagccttaggcttacctatcccgtcaatcaagcctctcgtaaggaacaaggaaggtagctagctagttcgtcatcggcggcggcggcgcctgttcttagaggataaggttgtcgtagcggagagggagctagccaggattttggttgagatcaggagggggagcaggcggcggcggcggcgatggggcgcggtaaggtgcagctgaagcggatcgagaacaagatcaaccgccaggtgaccttctccaagcgccgctcggggctgctcaagaaggcgcacgagatctccgtgctctgcgacgccgaggtcgcgctcatcatcttctccaccaaagggaagctctacgagtattccaccgattcatgtatggacaaaattcttgaccggtacgagcgctactcctatgcagaaaaggttcttatttcagtagaatctgaaactcagggcaattggtgccacgagtatagaaaactaaaggcgaaggtcgagacaatacaaaaatgcctgcaggcacctcatgggagaggatcttgaaactgtgaatctcaaagagcttcagcaactagagcagcagctggagagttcactgaaacatatcagaaccaggaagagccagcttatgctcgagtcaatttcggagctccaacggaaggagaagtcgctgcaggaggagaacaaggttctgcagaaggagctcgcggagaagcagaaagcccagcggaagcaagtgcaatggggccaaacccaacagcagaccagttcgtcttcctcgtgcttcatgataagggaagctgccccaacaacaaatatcagcatttttcctgtggcagcaggcgggaggttggtggaaggtgcagcagcgcagccacaggctcgcgttggactaccaccatggatgcttagccacctgagcagctgaaggtttccttgcccaaaattcagcaactcttccccgtttatccgcctggtgcagtatagtatcatcgtgatcgcgagtcagcagcagtgggtttgccgtatctttttttttaccactgtatgtctatatgtaagtatcaaatctgcaatgtgttaatcaccatttccgctggggcggacgcacgagtatcaaatctgcaatgtgcagcatcaaatattccattttcatgagcataaaaaaaaaaaaaaaaaaaaaaaaagcggcc

SEQ ID NO: 553 - DNA, 1974 bp, Zea mays
  Clone ID: PAT_MRT4577_104555C.1
aataactgatttttgaaaggggattggtgaataatgaccatcctcctcagcaagcataaagaagatcgtccttcgcagtcgcagcaagcattccggctctgcatctggcccagctctgggttgcgcgaacagtcggaaccctaattccctccccggcgccggcgccggcgccccctagctgcgcccccacgaccagcagaatccagatcgaagttttgctcttgccgcggccccgcctaaactccaaaagtgcgaaccccctaactcatcgatcccagcctgcctccgcctacgcgcctcgtgacggcgtggacccctcccctatctgcgtgctgcgcgcatccgcctgcggcctgtcccgtgcagccgtgcctcctccgcgcacatctccagggtctagccgagagcagaccgccgtgacgccaccactcgcgctcgcgctcctgacatcgttgtctgccttctctgtctaagatcagagcagagctccatcgaaagcgtcgcccgcctgcttggatgatcaatcaccacgaaatagtgcagtttgggaagctgtacaatagagacatggaatcagctcctgctcatacccctcttatacatggtcttcctgatgaggtagctctcatttgcttggcaagagttcctcggcggtatcataatattctcaggcgtgtctcaaggagatggagagctctgttatgcagtgaagaatggcacttgtgccgcaagaggaataacttggacgagccgtggatctacgtaatctgtagggaagcaggcatcaaatgctatgtgttggctccagatcctccaagccggtgctttcgaatcatgcatgtcattgaacccccatgctcagggaggaaaggtgttaccattgaagctttagacaaaaagctatttcttctgggtggctgcagttccgtgtatgatgctacggatgaagtatattgttatgacgcatcctcaaatcgctggagctcagctgctccaatgcctacagcaaggtgctattttgtgtctgcatcccttaaggagaagttgtacataactgatggatacggcttgacggacaagtcaccaaattcatgggacatctatgacccggccacggactcgtggtgcacccacaagaacccgttgctcacccctgacatagtgaaattcgtcgcattgggcgaggagctggtgaccattcaccgagcggcgtggcacaggatgtactttgccggcgtatacgacccgctggaacgcacctggaggggcagagggaacgagatcgctctctgctactcgagcccgacggtggtcgtggacgggacgctgtacatgctggagcagtccatgggcacgaagctgatggtgtggcgggaggacgccaaggagtgggccatgctcggcaggctctccgacaaggtcactagacccccctgcgcgctcgtggccatcggcaggaagattcatgtggtcggaagagggctgagcatggtcaccgtggatgtggacacggcggcaagggtggacgggttcctggttaccacctctgtaggcccgttggtggaggaagacctgaccccggagaggtgcgtggtgatcaccatctgaaggggtgggcgtgtccaagcttccttgacgccgggtgtattgtggtaactgtgactgactatcgtcgctggcgccgaacatttggctagctagcgtggatgatatatactgcgatgtgagtgaattcaataagaggcttggctctccatacagccaataactatagttagcatttgtatctcgtgttgtttgggctgcttttgtcgactgctggctgtaagaacaatatttgagcttcgtttgttgagtactgtgcgtcccagatggatgggattaatacaagctaatgtgatcctaaaaaaaaaaaaaaaaaaaaaaaaaaaaaaaaaaaaaaaaaaaagaaaaaaaaaaaaaaaaaggccccta

SEQ ID NO: 554 - DNA, 291 bp, Zea mays
  Clone ID: PAT_MRT4577_104608C.1
cgcgcttcttcaaaccaaactgaaccgtgttggagcactagtgcacgacgggggcagcacgagatggtggggacggcggaaggcggcgcggatagggcggtgcggcggtgggtggacgccgtcggcaaacgcctggtactggactgcaggctggccacggagctctagatcaactgcgccgacctaaacgacacagtatggagcgccaagtgccttatctcctcctcggacctcatacgcaaggtccatatggactacctagaaaccggggcgaacattataattacagca

SEQ ID NO: 555 - DNA, 282 bp, Zea mays
  Clone ID: PAT_MRT4577_10482C.1
ttgagaccaactatcaacatagaataaacaataccgtaccaacaatggcaggcagaatattttgcaaacttatgctccttggtctttctgcaagtgttgctaccgcaaccattttcccacaatgctcacaagctcctatagcttcccttcttcccccatacctctcaccagcggtgtctgcaatgtgtgaaaccccaatagttcaaccctacaagatccatacatgcaatcgcaacaagcattttaccattatcacccttgaacctataacaactcattgcc

SEQ ID NO: 556 - DNA, 149 bp, Zea mays
  Clone ID: PAT_MRT4577_10491C.1
ctacaccctatagagagtcgtattaaagagtttgaggcaggccgcgtgcgctttcagtgggtgagctgaagcagtcagctggagaggaggaatccgcaggacttcaataagggaagtcgggaggtctgggtgaggtggccgtttcgtca

SEQ ID NO: 557 - DNA, 282 bp, Zea mays
  Clone ID: PAT_MRT4577_104966C.1
cgcgccggcgctccgacggctgccgactaaaccagaccatcaaacaagtgccagcgccctggggcaggcgccgcaatggagagcaccttcatcatgatcaagcctgacggcgtccagaggggcctcattggtgtgatcatcagccggtttgagaagaagggctgctacctcaaggccttgaagcttgatcacgcgcagaggtcggtagctgagaaacactacgcagatctggcctgcaagccgttctttcagggactggctgactacatgatctctgtccct

SEQ ID NO: 558 - DNA, 240 bp, Zea mays
  Clone ID: PAT_MRT4577_105105C.1
tcttcccttaatcctcacaagctactatctctactataataacctcgtacctctcaccatcaatgtcttctctataaaaaaacccaattcttcaaccctacaacatacaacatgcaatcacatctcgcatcttacctttatcacccttcttcctgcaacaatcatcacccctattacatcagttacatttgatgcatttattctcacaaaacataagagcacaacaactacaacaacttc

SEQ ID NO: 559 - DNA, 176 bp, Zea mays
  Clone ID: PAT_MRT4577_105235C.1
attctgaaggtcactctgtgtcagttgttaaagctgtgtacaccctcggctccagcagacccatgcatcaaccagcatggactgtggatccaggggtgctgttaccaccgtcaggctttattctaagttaaatcccaatgaaaaaaattgtgcttcttggtgctgcaaatcaaaac

SEQ ID NO: 560 - DNA, 215 bp, Zea mays
  Clone ID: PAT_MRT4577_105517C.1
gttggcttctcctcccccttcggttcgggtacgggttcatgaggttctccggtgttcgatttggggggtgagcagatcgagatggcggcgcacgatgttgagtaccgttactatgtcggccgactcatctgggccacggacgaccactaaattcacaacgcctttagcacctactgtgaggtgctagatgtccaagatcattcgggtatgggaga

SEQ ID NO: 561 - DNA, 858 bp, Zea mays
  Clone ID: PAT_MRT4577_105598C.1
aaaaaaaaaaaaaaaaaaaaaaaaaaaaaaaaaaaattaaaaaaaaaaaaaaaaaaaaaattcaaaaaatcggtttgttagcgtgacgtgcgtgaggagtctggagtcggacggaatcgaaaaggcgaaaactcagtgtctcgagtttcctcggagcggaggcgatggctgggaagggagggaaaggcttgctcgccgcgaagactacggcggccaagtccgccgagaaggacaaggggaagaaggccccaatctcacgctcctcccgcgccggcctccagttccctgttggacgtatccaccgtcagctgaagcagaggactcaggcaaatggtcgtgttggtgccaccgcagccgtctactccgctgccatcctggagtacttgactgccgaggttctggagctggctgggaatgctagcaaggatctgaaggtgaagcgtatcacccctcgccatttgcagctagccattcgtggagacgaggagctggacaccctcatcaagggcaccatcgcaggcggaggtgtcatcccgcacattcacaagtccctgatcaacaagtcctccaaggagtgaagactaggggatgtgcatctttagtttaaactggacttctttgcgctcctcgggtggtctggtatggtgttacagctactgtaaccaaggagcgatgctgcgccatatatatcacgtcttttgaaatcaaattacagtattccagcaccccccgaccaaacaaacagggttcaccacagaaggctggaccaagcaaacaaggttcaccacagaaggctgttcgctacgtgaattaaagtcagttgttcgaactactgtggagtaaaaaccggtactgatt

SEQ ID NO: 562 - DNA, 884 bp, Zea mays
  Clone ID: PAT_MRT4577_105599C.1
aaacattgggaaactcgaaaccggccggggaggggaaaaaaaactctgtttgttagcgtgacgtgcgtgaggagtctggagtcggacggaatcgaaaaggcgaaaactcagtgtctcgagtttcctcggagcggaggcgatggctgggaagggagggaaaggcttgctcgccgcgaagactacggcggccaagtccgccgagaaggacaaggggaagaaggccccaatctcacgctcctcccgcgccggcctccagttccctgttgggcgtatccaccgtcagctgaagcaaaggactcaggcaaatggtcgcgttggtgccaccgcagccgtctactccgctgccatcctggagtacttgactgccgaggttctggagctggctgggaatgctagcaaggatctgaaggtgaagcgtatcacccctcgccatttgcagctagccattcgtggagacgaggagctggacaccctcatcaagggcaccatcgcaggcggaggtgtcatcccgcacattcacaagtccctgatcaacaagtcctccaaggagtgaagactaggggatgtgcatctttagtttaaactagacttctgtgcgctcctcggcgagtccttgtcatcctgtaggttttagttgagctgtcaggttggagctcctctgtgtaacgcttgcctggtactgcttcatcagttatttggttattgtgtttgtgttgagttgttaacttcaggggtgcaaacctggatgcttatttagttatgtgactactgctattcggtttatgttgtggtttgtttttatttttacaattttttctagctgcaattacacttataatatgatgttggtagccctgtggagtgctggggggctcagatttatc

SEQ ID NO: 563 - DNA, 965 bp, Zea mays
  Clone ID: PAT_MRT4577_105638C.1
ctcgaggccggccgggccgggttcacagagccgctgccgttgccgctgccgctgccggctgccgctacctatgctcaagtgctcagtgctcaccgctctgcccctgcctcatcacacgcgcgcacggcgcacagataccttttctctcctctcccgtcccactctcctgggcaatcccggcccggcatggcgagcccgtcctcgtccccctcgcggaaggctctgagcaagatcgcctgcagccgcctgcagaaggagctcgcggagtggcaggtcaacccgcccgcgggcttcaagcacagggtcaccgacgacctccagaggtgggtcatcgatgtagcgggggcagcaggcacgctctacactggcgaaacctacaagttgcaggtggatttccccgagcattatccgatggaggcacctcaggttatatttctgcatccagcaccgatgcatccacacatttacagcaatggacacatctgtttagatatactgtatgactcgtggtccccagcgatgactgtcagttctatctgtatcagcatattatctatgctgtccagctcgccagaaaagcaacgcccagctgataatgatcgctatgtcaagaactgtcgcaatgggaggtctccgaaagagaccaggtggtggttccatgatgacaccgtgtgatcggtgttccgattattgttgtcctgtatgcatttagttgccagactatgggagatggacttatttcgaacgacccatttgaccagaaattaacatgctcttgtggtttgtagatgaatgtgcatcagcgtcaggcctgtactttctgattcttacaccgtcgatgatatatagaataatgtttgtatcttgtcaatttacggaacagacatgaaattcaatgcaggtcactggtttctgaatcaaaaaaaaaaaaataaattaaaaaaaaattaaaaaaatattaattt

SEQ ID NO: 564 - DNA, 760 bp, Zea mays
  Clone ID: PAT_MRT4577_105744C.1
cctcgaggccggccgggatcgagcttccattatccgcgactccactcatcgctgactccatcaacgaccgcaagaggaaggagaggcttgattccgtctctgaggagaccaccacgatcgtcctcgaggctctaccatatgtatgagagcggagtcctcctcttccctgccattaacgtctacgattcccccactgacagcaagattgacaacctgtatggttgccgacactcactccctgatggcctgatgagggccacagacgctatagatcgccgtgaaggttaccgtggtctgcggatacatcgatgtcgataatgactgcgccgctgtactcaagcaggatgtcgtccgcgccattgtagacgagatcgaccccatctgcggcctccaggatctgatggagggtcttcagaaccttctcttgtaggatgctcgctctgaagactgacatcttctgtgaccaccaatggtaacaaggatatcatcatgcctgaccacatgaagaagataaagaacaatgccgttgtctgcaacattggtcactttgacaatgaaaatgatatgctcctccttgaatactaccctgaagactagcgcatcaacatcaagccacatactgaccgctgtgtgttccccgataacaacactgccatcattgtccttgatgaggtcgcctgatgaaccttgggtgtgctactgaccatcctaactctgacatgctctggtcattcactaaccatgtcatagcccaacttga

SEQ ID NO: 565 - DNA, 347 bp, Zea mays
  Clone ID: PAT_MRT4577_105790C.1
ctacttgctacattgttagcacatttgtgttcctactttggctgccattattttgagcctccttatgctccttggtctttctgcaagtgctgctacagcgaccattttcccgtaatgctcgcaagctcctatatgcttcctttttcccccgttcctctcaccagcggtgtcttcggtatgtgtaaacccaattcttctacccttcaagatccaacatgcattcacagctggcatcttacctttatcacccttgttcctccaacattcatcagccctattacatcagtttcctttggtgcatctattggcacattacatcatggcacaacatcttctacaacttgtgc

SEQ ID NO: 566 - DNA, 2179 bp, Zea mays
  Clone ID: PAT_MRT4577_105922C.1
acccgccgggccggggacgtcgccgagaaaactcaaatcgaatccccaaatccttcgccggcgattccactccaagtctcgatcggaaaagcgcagaagagcaacggaatcccaattcccaaagggacaaggcaaagctaacttctccttcttcccatccttcctcatcccgtcggatcaatgccagcgggagcaaattcgaagccgctgccgaaattgtggccggttgaccggtgtttccagcccatccccccgttgcacgcggcgaggtagaggagtttccgccgtcaactccatccgatcggcgtagggtcgcggggtgccgacaactttggtccccgctccccacttgggcgccacggtcgctgcgcatgccgcgggctcccgcgcccactggaccccggtaacaccgcacggcgcctcgctccgcgtgcccgcccgctgccagctccatgccaaccgccgcggctacataggtagctgcgcgctggctgaaggctcctgcagtgcgcgttgaaggctttcgctgcgtgttgtgcgttctgcttgaatttcggtctgagtttggatgggccagatgatttcgggtgataaatccgacgaacagacagcacgcgacgatggaatcatcaagaatggaagggaaatcctatttcaggcttttaactgggaatccaataagcacaactggtggagtattttggaggaaaaagtaaccgatcttgcggaatctgggtttacgtcagtgtggcttcctcctccaacacagtcattatctcgagaaggctatctaccacagaatctgtactgccttgactcatgttatggttccctccatgagctaaaattgttgcttcataaaatgagcgaacataatgtaagggctatggcagatgttgttatcaaccatcgaattggaactactcaaggatccaatggcatgtataatcgttatgatggcatcccagtatcatgggatgaacatgctgttacatcttgttctggcgggaagggaaacaagagcactggggataactttgatggggttcccaatatagatcatacacaaccatttgtacgcaaagatattatcgaatggttgatctggcttcgaaaatcagttggttttcaagattttcgctttgatttcacgaaaggttatgcagccaagtttgtaaaagaatacattgaggaatcaaaacctctttttgcagttggggaatactgggatagctgtgaatatagcccccctgactaccgactgaactataatcaagatatccataggcagaggattattaattggatagataacactggaggactttgtgccgcatttgatttcacgacaaagggcattcttcaggaagctgtcaaaggagagttgtggcgtttgcgagattcagaaggaaaaccacctggtgtgatgggatggtggccttcaagatcagttacatttattgaaaatcatgacactgggtccactcagggtcattggccttttccgtcagatcatattatggagggatatgcttatatactcacccaccctggcatccccacggtgttctatgatcacttctatgaccagggtgtgcctctccatgacgaaattgctaaactgatgcaaatcagaaaatgccaagatatacatagccgttcatcaatcaaaattctggaggttgggtcagatctgtactcagcaatcatcgacgataagttgtgcatgaagatcggggacggctcgtggtgcccaagtgatccagagtggaggctggcagtctctggtgacagatatgctgtgtggcacaagtgaagcatataagtgccctcgatacagtttatttctgctctcaggaacaggagtaattagcatgttagctgaataacagcacggtaaaacatgccaaaaatgaccctcttcgaggtttacctgtacaagaggagtgcctaaatgcaatgcttaattagaaatacgtgagatcgtgcggctggtcccgaggtgagacatacattttgctaatcgcaacaactatggattacctgcaaaagaaatatatatagggcatgtgatgtctctgtggaatattttatcctggaaccagaaatttgaattatttttataaaaaaatgcatctgtgcaatttacattccgaaaaaaaaaaaaaaaaaagcggcc

SEQ ID NO: 567 - DNA, 1451 bp, Zea mays
  Clone ID: PAT_MRT4577_106002C.1
ttgacgcgtgggcgcggaggttacctctcgccccccctctcctccgtccctcggagtctcctcctgtcttgatttcgggtcgctgctgtttcgatcccctttcctccctgacgatttgcttatttttgcgttggatttgtaacctaaacatctcgtttccgcaccgttttggggccgcgtctactggtggttgggtccctttagatcgagtaggcgcgaggatggggacacatccccgattgatctgacgtgatacgcatccggcgtactgcaaattttgaaaactgaactgtaagatggcatcagcagagctttcccgtgaggaaaatgtgtacatggcgaagctcgctgagcaggcggagaggtacgaggagatggttgagttcatggagaaggtagccaagactgttgactcggaggagctcactgtggaggagcgaaacctcttgtctgttgcatacaagaacgtcattggagcccgccgcgcctcatggcgcatcatctcctccatcgagcagaaggaggagggccgaggcaatgaggaccgagtaacactcatcaaggattatcgtggcaagattgagactgagctgaccaagatctgtgatggcatcctcaagctgcttgagacccatcttgtgccgtcttccactgcccccgagtccaaggtcttctatctcaagatgaagggtgattactacagataccttgctgagttcaagactggagctgagagaaaggacgccgctgagaacacgatggtggcatacaaggctgcccaggacattgctctggctgagcttgctccaactcaccctattaggcttggactggcacttaacttctcagtgttctactatgagattctgaactcacctgatcgcgcctgcagtcttgcaaagcaggcttttgacgaggccatctcggaactggacaccctgagcgaggagtcctacaaggacagcactttgatcatgcagctccttcgtgataacttgaccctatggacctctgacatctcggaggaccctgctgaagagattagggaggcgcccaagcgcgactcgagtgaggggcagtaaagccggctttatgtgcctagaaactagtagctagtgtttgctgctgtcgaatgacactatgcaatgtgatctggaacctggtttcttgggtgcgacgcttgtagccgtgttatgactgtcgtccgtaaaatttgggggctccccgtaagggatgctgcctggcaaggcctcggtgtcccacctcgtctgtggcgtggggcgctggagcccggtctggttgggttgggaagccctttaaactgttgtcacttgcattttaccttttccatcgctgtttattgtgagtggtcctatatctaaaaaaaaaaaaaaaaaaaaaaaaaaaaaaaaaaaaaaaaaaaaaaaaaaaaaaaaaaactcgaggagggg

SEQ ID NO: 568 - DNA, 1569 bp, Zea mays
  Clone ID: PAT_MRT4577_106003C.1
ggcaccgcgcgggactagggctgccatcgtggcgccgacacgcgtcatcatctcattgggccgcgggactcggcgacaggccttttgtagaccgcagccggcaccatctcttcccgcaccccccattcgaacgccggagctcgacgaggacgaccgacgacgcacgcagagatccggcgtactgcaaattttgaaaactgaactgtaagatggcatcagcagagctttcccgtgaggaaaatgtgtacatggcgaagctcgccgagcaggcggagaggtacgaggagatggttgagttcatggagaaggtagccaagactgttgactcggaggagctcactgtggaggagcgaaacctcctgtctgttgcatacaagaacgtcattggagcccgccgcgcctcatggcgcatcatctcctccatcgagcagaaggaggagggccgaggcaatgaggaccgagtaacactcatcaaggattatcgtggcaagattgagactgagctgaccaagatctgtgatggcatcctcaagctgcttgagacccatcttgtgccgtcttccactgcccccgagtccaaggtcttctatctcaagatgaagggtgattactacagatacctcgctgagttcaagactggagctgagagaaaggacgctgctgagaacacgatggtggcatacaaggctgcccaggacattgctctggctgagcttgctccaactcaccctattaggcttggactggcacttaacttctcagtgttctactatgagattctgaactcacctgatcgcgcctgcagtcttgcaaagcaggcttttgacgaggccatctcggaactggacaccctgagcgaggagtcctacaaggacagcactttgatcatgcagctccttcgtgataacttgaccctatggacttctgacatctcggaggaccctgctgaagagattagggaggcacccaagcgcgactcgagtgaggggcagtaaagccggctttatgtgcctagaaactagtagctagtgtttgctgctgtcgaatgacactatgcaatgtgatctggaacctggtttcttgggtgcgacgcttgttatgactgtcgtcagtaaaatttgggggctccccgtatgagatgctgccgggcaaggcctcggtgtcccacctcgtttgtggcggggggcgctggagcccggtctggttgggttgggaagccctttaaactgttgtcacttgcattttaccttttccatcgctgtttattgtgagtggtcctatatcaatggctggtctcagtggtctatacgtatgctttttggttctctcttgattcctcacagggtgagtggggcatgagcatttctgtctcatctcaatgatgtgacttcagaatccgtaaatctctgaagtctaaacgctctatctaaacctttggattcgattacaattgtagatatagaaatctgtagaagggtgcaattcagaatattttgccatgatatgaatattcttcttgtgagactctgtattaagactaaaacagctcaaattgatagagattctgtg

SEQ ID NO: 569 - DNA, 374 bp, Zea mays
  Clone ID: PAT_MRT4577_106005C.1
accgacgacgcacgcggagatccggcctactgcgaattttgaaaactgaactggtagatggcataaccagagctttcccgtgaggaaaatgtgtacatggcgaatctcgctgagcaggcggacaggtacgaggagatcgttgagttcatggagaaggtacccaagactgttgactcggacgagctcactgtggaggagcgaaacctcttgtctgttgcatacaacaacgtcattggaccccgtcgcgcctgatggcgcatcatctgctccatcgagcataacgaggagggccgaggcaatgaggaccgactaacactcatcaaggattatcgtggcaagattgagactgaactgaccaagatctgtgatggcat

SEQ ID NO: 570 - DNA, 1301 bp, Zea mays
  unsure (1)..(1301): unsure at all n locations
  Clone ID: PAT_MRT4577_106010C.1
gtctgaatttgactagctagtacctattcgtgccacagatcaataaagtgttgtcccatatattgatgtatatttgcagatccggcgtactgcaaattttgaaactgaactgtaagatggcatcagcagagctttcccgtgaggaaaatgtgtacatggcgaagctcgccgagcaggcagagaggtacgaggaaatggttgagttcatggagaaggtagcgaaaactgttgactcggaggagctcactgtggaggagcgcaacctcctgtctgttgcatacaagaacgtcattggagcccgccgcgcctcatggcgcatcatctcctccatcgagcagaaggaggagggtcgaggcaatgaggaccgtgtaacactcatcaaggactaccgtggcaagattgaaactgagctcaccaagatctgtgatggcatcctcaagcttctcgaatctcaccttgtgccgtcttccaccgctcccgagtccaaggtcttctatctcaagatgaagggtgactactacagataccttgctgagttcaagactggagctgagagaaaggacgctgctgagaacacgatggtggcatacaaggctgcccaggacattgctctggctgagcttgctccaactcaccctattaggcttggactggcacttaacttctcagtgttctactatgagattctgaactcacctgatcgcgcctgcagtcttgcaaagcaggcttttgacgaggccatctcggaactggacaccctgagcgaggagtcctacaaggacagcactttgatcatgcagctccttcgtgataacttgaccctatggacttctgacatctcggaggaccctgctgaagagattagggaggcgcccaagcgcgactcgagtgaggggcagtaaagccggctttatgtgcctagaaactagtagctagtgtttgctgctgtcgaatgacactatgcaatgtgatctggaacctggtttcttgggtgcgacgcttgtagccgtgttatgactgtcgtcggtaaaatttnnnngctccccgtatgagatgctgccgggcaaggcctcggtgtcccacctcgtttcaggcgtgggacgctggagcctggtctggttgggttgggaagccctttaaactgttgtcacttgcattttaccttttccatcgctgtttattgtgagtggtcctaaatctatggctcgtctcagtggtctagtatatgttttcttggtttctcttgattcctcacacggtgagtgggaccgttcgcatttgtctgtcccatcccatcttaa

SEQ ID NO: 571 - DNA, 545 bp, Zea mays
  Clone ID: PAT_MRT4577_106098C.1
tcggtgctcggctataaggtcgacaccgtggacacgaccggggccggggacaccttggtgggctgcctcctcttcaacgttggcacggacgactgcatgttgcacaacgaggagaagctacgtgaggctatcaagttctgcaacgcctgcggagccatctgcaccaccaagaagggcgccatcccggtgctgtccacggtcgacaccgcccaggacctgatcgccaaggccaactagatggccgaacgcccggccgctacaccacgtgactgtcccccggcgccccgcccctagtcgtcgacgtcctcggtttcagttcattaggtagatcgagacttagcgtccgtttatgcgcctctactctgagacgggttgtttgggttaattaagttagctgtcgtggagatttcgaccgagagcatcaataaaatgttggcatgcgtggtgggatgctatccttaaaaaatatgttattttattggatttctagcttggatcagcttgggttttgaacattgctagtagcgcgtgattgggagggctat

SEQ ID NO: 572 - DNA, 1827 bp, Zea mays
  Clone ID: PAT_MRT4577_106131C.1
gattgggtacctcgaggccggccaaaaaaaaaaaaaaaaaaaaaaaaagagcacccggcggcagcgatcgaggctttgctcctgcttcggcttcagccccccccaattctttataaaaatccctcgccagcgcttccctcttttgacaaatcggccgcgggggagagagatatatagagccaatttttgcccgatttgcctgtctgctcgggactgagccggtattcctcttcctcgtcgacgagaataaataagctaagccagggccccggggaagaagaagatgagctccgccggaggcatggacgggtctccgccggtcgccgaattccagccgacggtgacgcacggcggccggttcctccggtacaatatcttcggcaacctgttcgagatcacgcgcaagtaccagcctcccgtcatgcccatcggccgcggcgcctacgggatcgtctgctcggtgatgaacttcgagacgagggagatggtggccatcaagaagatcgccaacgccttcgacaaccacatggacgccaagcgcacgctccgggagatcaagctgatgcggcacctcgaccacgagaacatcatcggcatcagggacgtgatcccgccgccgatcccgcgggcgttcaacgacgtgtacatcggcatggagttcatggagacggacctccaccagatcatccgctccgggcaggagctgtcggaggagcactgccagtacttcctgtaccagatcctgcgcgggctcaagtacatccactccgccggcgtgatccaccgcgacctcaagcccagcaacctgctgctgagcgccaactgcgacctcaagatctgcgacttcgggctggcgcgcccgtcctccgacagcgacatgatgacggagtacgtggtcacgcgctggtaccgcgcgcccgagctgctgctcaactccaccgactactcggcggccatcgacgtctggtccgtcggctgcatcttcatggagctcatcaaccgccagccgctcttccccggacgcgaccacatgcaccagatgcgcctcataacagaggcacgagtgacgcacgcaacgcaccccacatccccttcctataattcaattccttcttcttcttctgctcataacatcgcggcacggcaggtgatcgggacgcccacggacgatgagctcgggttcatccggaacgaggacgcgcggaagtacatgcgccacctcccgcagttcccgcgccggccgttcgtcagcctgttcccgcggatgcagcccgtcgcgctggacctcatcgagcggatgctcaccttcaacccgctgcagaggatcacagtggaagaggcgctggagcacccgtacctggaacggctacacgacgtcgccgacgagcccatctgcacggacccgttctcgttcgacttcgagcagcaggctctgacggaagaccaaatgaagcagctgatattcaacgaggccatcgaactcaaccccaacttccgatactagctagctagttcggacacacatcttaattatacgtatacgtatgattcctcgtacgtggtttgtaaatagaagatcgagccggccgccggtgttattagactgaacgttgcatttgtttgttcgttgacgttcgcgcgctcgccatatatatcctgcctgtgaggctgtgtagtgtgctgccgtgctgcaggtttcaggtgttcgtgtaatgagctgtaccaagaataaaaggctttggacttaaccaggctgaacttgctcaaaaggtggggactacccagccacatgtttctcggccatacagaatcacagttttgtctgcc

SEQ ID NO: 573 - DNA, 1628 bp, Zea mays
  Clone ID: PAT_MRT4577_10627C.1
cggacgcgtccgcccacgcgtccgtcaccgcaagcgtgcgcgcaacccagctcccaccgacgactgcaccggccgtcgctgccgcgctacttcggccccttttccggcgacgagcaccaccaggtccatgcagagtaggaaggcaccttttcgtcactcgaacctgttgcttgacctgcaagtgtcgggcggtgcacctgtgcccttgttgccgcgatgcagattatgtgggttttgagttggacagctgatggagtgcaaatctctggcctgccaggtagctgctaatggagattgacagcctcagagaaggatttgatcgagttgctgagaaacgttcattatcttctgctaaagctctggaagttgttgatcaaatagtgaatgaaattgagcaggctattgtgaagctgcagatgatgaatacagattctactggaaatgttgaccacccatccatccttgcagaactgaaagctaagctcaatgaaatggcaccactaaaccagcttgaaggcagccaaaaggagctcaatgttgctctgagcaaatatctcaaactccttgagaagtctttcaatccagatatatctaaggcatacagaaatgtggattttgaggtccatacagtaaacaatatcatagcgaatcatttctaccgccaaggcctctttgatcttggtgacatgtttgtccatgagtgtggggaactaggcggagcttccttgaagctaccgtttcaggagatgtatgctatccttgaagccatgaaagcgagaaacctcgagcctgctctcagttgggctgccaaaaaccatgatcagctgttgcagaatgggtctatgctggagttcaagctttatcagcttcagtttgttgaaatattgtccaaaggcagtaggggtgaggccaaagatgaggctcttttatatgctaggactcacttggtcccctttgcagccgtgcacaaggaagaattccagaagctaatggcttgccttctatgggttggccggctcgatcaatccccatattctgagttaatgtcatccgcgcattgggagaagctagctgaggagctcacccatcaattctgtagccttctgggccagtcgagggagagcccgctgagtgttgcagtgtcagctggttttcaaggactaccaactctgctgaagctgacgcaagtcatggctgcgaagaagcaggagtggcaagttatgaagcagcttcctgtccccatagacatcgggccagaattccagtatcattctgtctttgtgtgcccggtgctcagggagcagtccagtgacgagaatcccccaatgcggatgccttgtggacatgttgtctccaagcagtccatcatgaagctgtcgaaaagcagctcgagggccttcaagtgcccctactgcccctcggaggctatggcgtcgcattgcaagcagctgcatttctagatgtgttaatcttttctggctgcgcaaaactgcaaacctgttggtacatgtttcccctcctgttccatgttgcaccagtccaataactgtctctctgtaatataaacatctacgtccggataaacatgtagtttcgtctgtattactgatatgtacagttgcatcttt

SEQ ID NO: 574 - DNA, 1225 bp, Zea mays
  Clone ID: PAT_MRT4577_106286C.1
cattgggtacctcgaggccggccgggcccttctctctctgctccgggttcagagcagagctcagcgccctgtctccctccctccctccattcctcctcctccgctctctctctctgcaggcctgcactgtgaggagactgtgacccggggacggagagctcctttcttctctctcatcgctccaccccttatttaccggtcggttgttcctgggccgtcccgtcccgtcccgtcgtctcgcctgggttctcgcttgcttctcaccatcactaccaccgtccacaccatcgcgagggcctggagggaagaggatgggacagggaggagaagtgaaggcggcgccggccgtgagggtgctggtggtggacgactcccccgtcgaccgcaaggtcgtggagctgctgctccggaaccacaaccaccagggcggcgccgcgccattccacgttaccgccgtcgacagcggcaagaaggcaatggagcatctccggctgatggagcaaggcggccagctggattcatgtgccgctgatgctaatcggataaccattgacatcgtgctcacggactactgcatgccggagatgactggctacgacctgctcaaggccatcaaggcgctgagctcccctaacccgatcccggtggtggtgatgtcgtcggagaacgagccccagaggatcagcagatgcctaaccgccggtgccgaggatttcatcctcaagccactcaagaccaaggacgtgcagcgcctgcgcaactgctccagcgccgctagacccacggacggcgcggcccaccagtgcgagagcttgaggagcagcagcagaaagctgcggtcggatcaggtcgccgcgcctgcccacagatcgcaaccgacgacgggattaaccatggtgctgcatgcctccagcattgagctctcgcactacttccagttcctcctcaagttcgtgctgctcgcgtacgcggtgctgtgcctgaccgagctcctccacagatggtccaatggctccgtcctctccctgtggtctgcatgaggtcgactggaaccgccatgcggtattattagtgtaaccactaaggctccaggctttcagttcaattccccccctgtaatccagtcctggcatgaggagccaccagttcttgctcgccgctccctatatttccatttcacttttcaccagcttttttgtggttattattatttatttttttggct

SEQ ID NO: 575 - DNA, 1926 bp, Zea mays
  unsure (1)..(1926): unsure at all n locations
  Clone ID: PAT_MRT4577_106290C.1
aagaaggcaatggagcatctccggctgatggagcaaggcggccagctggagccttctctctctgctcccacgcgtccgcagagctcagcgccctgtctccctccctccctccattcctcctcctccgctctctctctctgcaggcctgcactgtgaggagactgtgacccggggacggagagctcctttcttctctctcatcgctccaccccttatttaccggtcggttgttcctgggccgtcccgtcccgtcccgtcgtctcgcctgggttctcgcttgcttctcaccatcactaccaccgtccacaccatcgcgagggcctggagggaagaggatgggacagggaggagaagtgaaggcggcgccggccgtgagggtgctggtggtggacgactcccccgtcgaccgcaaggtcgtggagctgctgctccggaaccacaaccaccagggcggcgccgcgccattccacggtcagcggctcctgctcctcagctcctcgcttgctcccctctcgtccggtcccttccgttccgtctggccactccattcctcccctctgctggtctcgacgacccttctcggcggcccgtgtactctgatccgggattatggctatgcataggaattgcatggcatgatcaagcttcatccattcgtcgtctgtcagttgcttatcagtactgttgaagaaaaaacgaaattaaatttccgcagcatgaactaattaaggcccgggtttcgttcctttcctcgtttggttcagttaccgccgtcgacagcggcaagaaggcaatggagcatctccggctgatggagcaaggcggccagctggattcatgtgccgctgatgctaatcggataaccattgacatcgtgctcacggactactgcatgccggagatgactggctacgacctgctcaaggccatcaaggcgctgagctcccctaacccgatcccggtggtggtgatgtcgtcggagaacgagccccagaggatcagcagatgcctaaccgccggtgccgaggatttcatcctcaagccactcaagaccaaggacgtgcagcgcctgcgcaactgctccagcgccgctagacccagggacgacgcggcccaccagtgcgagagcttgaggaggagcagcagaaagctgcggtcggatcaggtcgccgcgcctggccacagatcgcaaccgacgacgggattaaccatggtgctgcatgcctccagcattgagctctcgcactacttccagttcctcctcaagttcgtgctgctcgcgtacgcggtgctgtgcctgaccgagctcctccacagatggtccaatggctccgtcctctccctgtggtctgcatgaggtcgactggaaccgcgatgcggtattattagtgtaaccactaaggctccaggctttcagttcaattcccccctgtaatccagtcctggcatgaggagccaccagttcttgctcgccgctccctatatttccatttcacttttcaccagcttttttgtggttattattatttatttttttggctagataaaaattcttgcatttgggggcgtcgtatcgtttgcttggttgatggaagcgacaagaagtgggcgcgataaggtgatggtgattatatatagtgtaaatgcacggtatgagtgggtcagggtatctaatggccctgttaatcaagataccggcttgatctgccgatgcaactgccagacccgcccgtccgcccgccggccggggtggacgcagacgcccacctgctctgctgttaacatcagtacccgcggtcacgctgtgcgtcagtgacacaaacaaaactgcataagttgaccgccatatgacgccacattgatcttaggggaaagcaaaaatattgtgnnnnnnnnnnnnnnnnnnnnnnnnnnaaaaaaaaaaaa

SEQ ID NO: 576 - DNA, 1644 bp, Zea mays
  Clone ID: PAT_MRT4577_10629C.1
ggaccctcgaggccggccggggaaatcttcacccccgcccccccgccctggcgttgcgcccggccggggtcctgtcttcatcaatcctagcctcgccgccggccgggatcaatcatcaccgcaagcgtgcgcgcaacccagctcccaccgacgactgcaccggccgtcgctgccgcgctacttcggccccttttccggcgacgagcaccaccaggtagctgctaatggagattgacagcctcagagaaggatttgatcgagttgctgagaaacgttcattatcttctgctaaagctctggaagttgttgatcaaatagtgaatgaaattgagcaggctattgtgaagctgcagatgatgaatacagattctactggaaatgttgaccacccatccatccttgcagaactgaaagctaagctcaatgaaatggcaccactaaaccagcttgaaggcagccaaaaggagctcaatgttgctctgagcaaatatctcaaactccttgagaagtctttcaatccagatatatctaaggcatacagaaatgtggattttgaggtccatacagtaaacaatatcatagcgaatcatttctaccgccaaggcctctttgatcttggtgacatgtttgtccatgagtgtggggaactaggcggagcttccttgaagctaccgtttcaggagatgtatgctatccttgaagccatgaaagcgagaaacctcgagcctgctctcagttgggctgccaaaaaccatgatcagctgttgcagaatgggtctatgctggagttcaagctttatcagcttcagtttgttgaaatattgtccaaaggcagtaggggtgaggccaaagatgaggctcttttatatgctaggactcacttggtcccctttgcagccgtgcacaaggaagaattccagaagctaatggcttgccttctatgggttggccggctcgatcaatccccatattctgagttaatgtcatccgcgcattgggagaagctagctgaggagctcacccatcaattctgtagccttctgggccagtcgagggagagcccgctgagtgttgcagtgtcagctggttttcaaggactaccaactctgctgaagctgacgcaagtcatggctgcgaagaagcaggagtggcaagttatgaagcagcttcctgtccccatagacatcgggccagaattccagtatcattctgtctttgtgtgcccggtgctcagggagcagtccagtgacgagaatcccccaatgcggatgccttgtggacatgttgtctccaagcagtccatcatgaagctgtcgaaaagcagctcgagggccttcaagtgcccctactgcccctcggaggctatggcgtcgcattgcaagcagctgcatttctagatgtgttaatcttttctggctgcgcaaaactgcaaacctgttggtacatgtttcccctcctgttccatgttgcaccagtccaataactgtctctctgtaatataaacatctacgtccggataaacatgtagtttcgtctgtattactgatatgtacagttgcatctttgatctttcagtgtgttgcttaagtctcttctggagattaaaggaaaaaaaaaatattagaagactcagtgtgttgctta

SEQ ID NO: 577 - DNA, 1497 bp, Zea mays
  unsure (1)..(1497): unsure at all n locations
  Clone ID: PAT_MRT4577_106327C.1
atccacctaattcggcaggttcctaacccccacccacctcgcccaaattgcaaccttccccgagtgctccaggtcccgtggccggcccccagatcctctccaatcccaatccaagtatcgaacggatcccatcggtggcgctcgagcgagcgagtgcggccggaaccgagcgaagatgggcatctcgagcatgccggcgcccgaggacagcctgctggggttcgtgctgtacaacacggcggcgtcggtggcgatcctggcggggctggtgcgcgccgcgctgctgttcctgggcctggcggcggcggaggacgaggagccgcggcagcaggcggaggccgtgacggtcacggccgtggggcccagcctcgcggaccggttccggagcaggttccggccgtcgcgctacgggcggcgccggggcggggactgccgcgtgtgcctggtgcggttcgagacggagtcggtggtgcagcggctcccctgcggccacctcttccaccgcgcctgcctcgagacctggatcgactacgaccacgccacctgcccgctgtgccgccaccgcctcctgccccccgccgctgccgccgacgaggtgccccggattgcctgattagcgccctaggaattgagagtaggcgtagcactctgcacctcgcagcagcagtgtctctgtacaggtttttttttcttttcctttttgttcgggggagagagaggacagaacggagattgaaggaagaaaatggtggcaacaaagctgttccccctttcgtttctccgaagctctctgttgtctttattcattccaaaagtataatctactcgtatgaaccaagtactcaaaattgtctttgggcttgtgctggggtggacgcaaaaaccactatcttgctgtgaataagggattctataatagtggcacgactagattaccctttcgtatgtggttgctttatttgtgattgtacacgcattgatgtttttaaaagaatttttgggggggaaagtaagaaaagataatcaaaggggtcactttaataagctcttttgtttggctttgattaaaaaacatcanaaaagtctggtggacagcggcgttgggtcttttttagtgccggaaattttctttatccactccaaaccgaaggagagtggatttttggaaaccaagtttattaaaatttttattgttatgaccatttttttttataggtccccacgggatttgtttaatatggggcggtgcgtggtttttaattatacaaanaagggggtgcacgcccaaaaactggtagttctccacaaatttctcgaaacctcaagtatgtgtccgaacctccttctttttattggaatccattctgggtcacaattttgggggtggcgtgggttttatggaaacgtctttctgactggaaatattttgaccgtgttaaaggacagacctttctggtttgtaaaacccaatctccttaataaaaaaacttggtattt

SEQ ID NO: 578 - DNA, 850 bp, Zea mays
  unsure (1)..(850): unsure at all n locations
  Clone ID: PAT_MRT4577_106424C.1
gctcccgtccctctccgagcattcgccgcttcctccccgaccctctcgatccgcccaccttccccttccccacgcctgtggtagtcgcgtgctccggccatggcgttcttccggggcctcgccgcggtctcgaggctgcgatcccgtatggggcaggatgccaccacgcttggtggtgtgagatggctgcagatgcagagcgcttccgatctcgatcttaggtcccagctgcaggaaatgattccggagcaacaggaccgcttgaagaaactaaagtcagagcatggaaaggtccagcttggaaacataactgtggacatggtccttggtgggatgagagggatgactggaatgctttgggaaacatctttacttgacccggaggagggtattcgatttagaggtctctctattccagagtgccagaaagtactgccggctgcagttaaagatggagaacctttacctgagggcctcctttggcttcttttgaccggaaaggtgccaaccaaggagcaagttgatgctctatcaaaggagttgcttagccgttcgactgttccaggttatgtctacaaggcgatagatgctctccctgttactgctcatccaatgacacagtttaccacaggagtgatggcactccaagttgagagtgaatttcanaaggcttacgacaagggaatgcccaaaacaaagttctgggagcctacatacgaagattgcttanatttgattgctcggcttcacaagtggcttctatggttaccggaggatttcaaggatgggaagctatgcagctgatatacactggactacgcagcgaattttccacatgctttggtttgat

SEQ ID NO: 579 - DNA, 748 bp, Zea mays
  Clone ID: PAT_MRT4577_106455C.1
gtcaggaagtcccgggtcgacccacaacgtccgcggacgcgtgggctatcatgaatctgcactctgaccagggaagtaactcccttggctgctcagacttgggttgggagaatgatactaagacaccagacatcacatccattgctcccattcccactattgctgaaggcgatgagtctgtatttgtcaactccaattcaaacagctcgatggtgcctcctgtccttgagaacaatgctgttgatctcactgatgggctgacagatttggaatcctatatgaggtttcttatggatggcggtgcaagtgattcaattgatagccttctgaaccttgatggatcacaggatcttggtagcaatatggacctctggaccttcgatgacatgcccatcgctggcgatttcttctgaggaatttgaagcttggccataggactatgtacatagggactagggaataaagactgggagattgggaagcacctgcttggcaccttggggtagcatatgctcgtgtctagctcagatgcagaagtcgcattctgaaactctttggttatcgacctgttccctattttaactatctctgtatgagagccatttatgagactgaaccattttaccattttgttttcccccttctttcgttgttacagtatatggtttaacattatgatttatggatatgtggccaaacatgccttttatatgcgctttgtgcttggttgaaattgagttaactagtt

SEQ ID NO: 580 - DNA, 1961 bp, Zea mays
  unsure (1)..(1961): unsure at all n locations
  Clone ID: PAT_MRT4577_106460C.1
cattgggggtccccccgcttcggccgggatagggcccacgccccctccccgccgggaaaagtttcgtccaccatttcgctctcgcaagtcgcaagccaccgatttgtttacaggcgccggagctcccgacgacgactgagccatgtgcggcggcgcgatccttgccgagctccgcgagccggcgccgcgccggctcacggagcgggacatctggcagcagaagaagaagcccaagaggggcggcgccggcgggaggcgctcgttcgcggcggaagacgatgaggacttcgaggccgacttcgaggactttgaagccgactccggtgattcggatttggagctcggggaaggggctgacgacgacgtcatcgagatcaagcccttcgccgccaagagtactttctccagagatggcttaagcaccatgactactgctggttatgatgcccctgcagcaaggttggccaaaaggaagaggaagaatcaatacaggggtatccgccagcgcccttggggtaagtgggctgctgagatcagagatccccagaagggcgttcgtgtttggcttggtactttcaatagtccggaggaagctgcaagagcttatgatgctgaagcgcgcaggattcgtggcaagaaggccaaggttaactttcctgatgcaccagcagttggtcagaagtgccgttctagttcagcttctgctaaagcactcaagtcatgtgttgaacagaagccaattgtcaaaacagatatgaacatccttgccaacacaaatgcacccttctaccaatctgttaactacgcatccaacaatccatttgttccagcaatgaactctactgtttcttttgaggatcctatcatgaatctgcactctgaccagggaagtaactcccttggctgctcagacttgggctgggagaatgatactaagacaccagacatcacatccattgctcccattcccactattgctgaaggcgatgagtctgtatttgtcaactccaattcaaacagctcgatggtgcctcctgtcctggagaacaatgctgttgatctcactgatgggctgacagatttggaatcctatatgaggtttcttatggatggcggtgcaagtgattcaattgatagccttctgaaccttgatggatcacaggatcttggtagcaatatggacctctggaccttcgatgacatgcccatcgctggcgatttcttctgaggaatttgaagcttggccataggactatgtacatagggactagggaataaagactgggagattgggaagcacctgcttggcaccttggggtagcatatgctcgtgtctagctcagatgcagaagtcgcattctgaaactctttggttatcgacctgttccctattttaactatctctgtatgagagccatttatgagactgaaccattttaccattttgttttcccccttctttcgttgttacagtatatggtttaacattatgatttatggatatgtggccaaacatgccttttataaaaaaaaaaaaaaaaaaaagaaaaaaaaaaaaaaaaaaacggccaagtttctcgtattgttgtgtaccttgtgatatttcattcgttgaaattgagttaaactagttatccgggtgggcctatcgagatggattgtggacctgatgacttgcgtgggtccatacttttcttcggttgcgggggggggcctgtggngagatgtcaccctgccttggtgtctcggtccgctctctggtgcgcgtcttgtctgctcttgcgtgggcctctttttgtggttctgggtgtttgtgtctgcagcgtttgcctctgctatgtctggcacgggcgttttgtggccctattgtgatggggctttatttgttgttgttgtttggctgcctatttgaggctgaaaatcnttttggtgnggttttgtgttgcccctgttcgctgcct

SEQ ID NO: 581 - DNA, 576 bp, Zea mays
  unsure (1)..(576): unsure at all n locations
  Clone ID: PAT_MRT4577_106556C.1
aactcgaaaaaaaatattattcttaaataaaatgcttggacagacatttctccatacatatatgctcattgtggtagacgcagctgaccacctagagctgtattaatacttattcaaattgattcagcatgtggcaacataggaaaacatgcttacagacgacatttttcatactctaatagcctggcttggctgcttcacagaataaccaaacgacgacaacgaaattgcaaagataaaaaaaacaactcagaagcaaatcgacaccagaagcccatcttactcatcaagcactccatccttctccatggcatccacttcctcccagcagagaagattagccagtttgcggtccttcacaggaggagcattctccatgttcacaccttcgaagcagtgaagaacagatttgggcgaggtagcaacagcgtcttcagcagcacagaagctctggtagatgaggagtccgccaccaggcagctcctgctccaccatgttgttacagtcataaacctctgcaccaagttgctttccccacgtcccagcttggccacgcccgccngagatggtcacagc

SEQ ID NO: 582 - DNA, 309 bp, Zea mays
  Clone ID: PAT_MRT4577_106579C.1
cccgaaaagatgcagttttgtttttggcccaagctgcctcaagtttttccatgtacagcctttcactttaagttaaaagacattatagtttttttaggtctatatatacccatgggccctgccacgatgggggcaaccactgcacatatacattcatttcagccctagagtccctcctaacacacaggtgggggcagtatgtatttttggcgaataaacaactgggtaagacatccttttaaatgcaggacgggttgttattgacggggaccacggtaaattggttgtccagggacgttgccgaccccg

SEQ ID NO: 583 - DNA, 713 bp, Zea mays
  Clone ID: PAT_MRT4577_106585C.1
gatctccatctctcatccgctagctagctagctaggcaagacagtcgagagtcgacaccatggccatggcgacgcaggggcaggccgaccagcagcagcagcacgggcggtctgagcccaccaccagcgtcgccgccaaccgctgggggccctactccggcgccggcgacttcgccagcaacatggccgtcatcctggccgccctgctggccgcgctcgcgctcggcctggcgctcaacgccgccgtgcgctacctgctccgccgcagccgccgcgccggctctgttggtggacagggcaacggcagcggcgtgctgatgccgtcggacgacccggctgagaagccctctgtggaggtggagctgcaggcgccgccgcccgccctgctggtgtactccgccgccgggacgacgctggcgggcgccgcggcggagtgcgccatctgcctcgccgagttcgcagacggggacgccgtgcgcgtcatgccggcctgcggccacggcttccacgcgcgctgcatcgagcgctggctcgcggagggccgccgctcctcctgcccgacctgccgcgcgccggccgtgcagcgcagcctgcacgcaagtgaattactctaaataaataattgccgttttagtgttgctatttaccattgcttgtactgcctctgtaaatcaagaagaagaaataaaattataactcttaggtttgggctc

SEQ ID NO: 584 - DNA, 879 bp, Zea mays
  Clone ID: PAT_MRT4577_106587C.1
gatctccatctccatccgctagctagctagctaggcaagacagtcgagagtcgacaccatggccatggcgacgcaggggcaggccgaccagcagcagcagcacgggcggtctgagcccaccaccagcgtcgccgccaaccgctgggggccctactccggcgccggcgacttcgccagcaacatggccgtcatcctggccgccctgctggccgcgctcgcgctcggcctggcgctcaacgccgccgtgcgctacctgctccgccgcagccgccgcgccggctctgttggtggccagggcaacggcagcggcgtgctgatgccgtcggacgacccggctgagaagccctctgtggaggtggagctgcaggcgccgccgcccgccctgctggtgtactccgccgccgggacgacgctggcgggcgccgcggcggagtgcgccatctggaccaagctggcgggcgccgcggcggagtgtgccatctgcctggccgagttcgcagacggggacgccgtgcgcgtcatgccggtctgcggccacggcttccacgcgcgctgcatcgagcgctggctcgcggagggccgccgctcctcctgcccgacctgccgcgcgccggcgggacgccgcagcctgcacgcaagtgaattactctaaataaataattgccgcggccacgcctgtcgtcgtgaataatggctcggtttggccatggccagtggcggacgcagaacaaaattctaggtggggccgacagcgcaagagataaatcatcagactagaccataaatgtagattaatgataagtgttttagtgttgctatttaccattgcttgtactgcctctgtaaatcaagaagaaaaaaaaaaaaaaaaaagcggcc

SEQ ID NO: 585 - DNA, 174 bp, Zea mays
  Clone ID: PAT_MRT4577_106632C.1
caggcaggtacgtcgcgtcgataccaggtcttcgagaggagcggaggaggatggcggcgagtacggaggagaggcgagtacagctgtagcgtttcgcttcttgcccgtagcggcggcggtgccacctcgaacgctgctccctgttctggggcttacagcggatcctgatctgag

SEQ ID NO: 586 - DNA, 997 bp, Zea mays
  Clone ID: PAT_MRT4577_106650C.1
cctccggcgactgcgaggatcattgaccaaatgtgcgtcgctcggggccgggcgggaattgacatccttacattttcttgctgatcacagctagtagggagcgagagttaccttgaaatcaaggcagtacgtacgagtacgatcgacaatgtcgacggtcacttcttgcacctttctgagcctcgggtccccagtgcggccggcagtctcctccgcgagaccggcggcggcggcggtggcttcccgacggaggccccggtccctttctgtgtgctgcgaggccggccggaaaggggatcacaacccaaagacggatctgcatccatttaacatccctgccttcgttctggtgcacccggtggcaccacgtgaggaacgatggcagctggaggaggacgccgacaaggtgaacctgtggttcgaggtgcctgggcagtccaaggatgacctcaccgtggagatcgacgaagacgtgctcgtcatcaagaagaggaaggagctggtgggccagcggagccctgctggcggtggcgtcgcagagtacggctcgcagtcccagcagcagagcaggaggggcaccgcagatggcaaggagctgccggcggcacagcagggccaggccggcgaggtggtctatgcccggatgctcctcccggcggggtacagcagggatggcgtgcaggccgagctcaagtccggcgtgctcagggtcactgtcgtcaaggtcacggagcgagcgcgcaggaagatcgacgtccccattcaagtcaagtagatatgcgtgtatgtgtatgcacattcgtcctgcgcacgtgtcagcaggggtgctttatttacatctgtctcatgtccaacatgcagactacagcggtcgatctcaccacgtactcgatcgcgtcgactacacatgttcatgggctttgtgttcccatgtactcatcaatcaataaaatgagcatatgtgttctccgccgaaaaaaaaaaaaaaaaagcggcc

SEQ ID NO: 587 - DNA, 2425 bp, Zea mays
  Clone ID: PAT_MRT4577_106832C.1
ccggggaaaaggttccaccgtctaccttgccccgaccggaactggaacccctaaaaatttccctttcgtacctttccccttcctcctcccgtccaccacaccccggctccaccccgtgcaaatccgctggccgcagcaagagaggtcgaggagggaaacagatcgggtggcggcaaccggtagccggttccgctggcacgatgggcggcgaggccgagggcggggagcggcggctggggcgggtcctgagctttgggatcccggacacggcgctggggctagtgatggggtacgtggaggacccttgggaccgcgacgccatctcgctggtgtgccgccactggtgccgcgtcgacgcgctcagccgcaagcacgtcacggtggccatggcctactccacaacacccgagcgcctgttcggccgcttcccgtgcctcgagtcactcaagctcaaagcaaagccccgcgcggccatgttcaacctcatctccgacgactggggcgggtctgcgtcgccgtggatccgacagctctcggccactttccactccctcaagaagctccacctgcgcaggatgatagtatccaatgacgacatcaacacgctcgtccgcgccaaagcccatatgctcgtgtcgctgaagctcgaccgctgctcaggcttctccacgccctccatcgcactcatcgcccgctcttgcaggaaactggaaacacttttcctggaagaaagcatgattgatgagaaagaaaatgatgaatggatccgtgagcttgctacgagcaattctgttcttgagacactgaatttctttcagacagatctcagggcatccccagagtatcttacccttcttgtgcgcaactgtcaaaggctgaaaaccttgaagattagtgagtgtttcatgcctgatctggttagtttgttccgaactgcacaaacactacaagaattcgctggtggttcctttgaagatcagggtcaacctgtggcaggtagaaattatgagaactactattttcctcctttactgcaccgcttgagtttgctctacatgggaacaaatgagatgcagatactgtttccatatgctgctgcacttaagaagttagaccttcagtttacattcctttccacagaggatcactgtcagatagttcagcgctgccccaatctggaaaccttagaggtgagggatgtcataggggatcgtgggctacaagttgttgcagagacctgcaagaaattgcagaggctcagagtagagagaggagatgatgatcaaggaggtcttgaggatgaacaaggtaggatttcacaggttgggatgatggctatagcccaaggctgccctgagttgacatactgggcaatatatgtatcggacattacaaatgcagctctagaggcggttggtacatgcagcagaaatcttaatgatttccgccttgtccttcttgatagagaagcacatataactgagttgccactggacaatggggttcgtgctttgcttagaggttgcaccaaactcaggaggtttgcattttatgtgagacctggggccctatctgatgttggtcttggctatgttggagaatttagcaagagcattcgatatatgttgcttggcaatgttggtgaatctgataatggaattatacaattatcaaaaggctgcccaagcttgcaaaaactggagctgaggggttgtttgtttagtgagcatgctttagctatggctgcactagagctcaagtcactgaggtatctgtgggtgcaaggattcaggtcatctccaaccggaactgatcttatggcaatggtacgccccttctggaacattgagtatattcttccagaccaagatgaaccttgcccagagtataagaaacagattctggcatactactcccttgctggaaggaggacagattgccctccatcggtaactccactttacccggcagtttgagcgtagatacttgctttttgccagactgaatctcatggtactaagctccattgctcccacaatctgtgaaatcgatggttcctgttgatggggacatgcagacgttccattgcacataaccccagagctaagctttaagcaggacgacagctcggaactgaggctagctgagaacaatcgtgaatacctgaaggcagcactttgtggatcagattggcctacctgtccagtatggaaatgtaaacttcaccattttgaatagttttggagaaacaattttgtaataatttacccttgtttagtgtacattatcgattttcgattatatgatgttgtattgctttatttaacatttaagtcaactagttaatctacagtctgacttgctgtgattcgatgaattaatggattttccttgctgccaaaaaaaaaaaaaaaaaaggccccta

SEQ ID NO: 588 - DNA, 2385 bp, Zea mays
  Clone ID: PAT_MRT4577_106833C.1
gctgtccagtatgggcacgcacgcgtcccctaaatttcccaaccttccctttccccttcctcctccagtccaccgcatcaccacaccccgtctccaccccgtacaaatccaaaagagggcgaggagggaaacagatcggctggcggcaatcggtagccggcttggctggcacgatgggcggcgaggccgagggcggggagcggcggctggggcgggtgctgagctttgggatcccggacacggcgctggggctagtgatggggtacgtggaggatccctgggaccgcgacgccatctcgctggtgtgccgacactggtgccgcgtcgacgcgctcagccgcaagcacgtcacggtcgccatggcctactccacaacacccgagcgcctgttccggcgcttcccgtgcctcgagtcactcaagctcaaagcgaagccccgcgcgtccatgttcaacctcatctccgacgactggggcgggtctgcgtcgccttggatccgacagctctcggccaccttccacttcctcaagaagctccacctgcgcaggatgatagtatccaacgaagatatcaacatccttgtgcgtgccaaggcgcacatgctcgtcgcgctgaagctcgaccgctgctccggcttctccactccctccatcgcactcgtcgcccgttcctgcaggaaactggaaacacttttcctggaagaaagcacaattgatgagaaagaaaatgatgagtggatccgtgagcttgctacgagcaattctgttcttgagacactgaatttctttctaacagatctcagggcatccccagagtatcttaccctccttgtgcgcaactgtcaacgattgaaaactctgaagattagtgaatgtttcatgcccgatctggtcagtttgttccgaactgcacaaacactacaagagttcgctggtggttcctttgaagagcagggtcaacctgtggcaagtagaaattatgagaactactattttcctccttcactgcaccacttgagtttgctctacatgggaacaaatgatatgcaaatactgtttccatatgctactgcacttaagaagttagaccttcagtttacattcctttccacagaggatcattgtcagatagttcaacgctgctccaatctggaaaccttagaggtgagggatgtcataggggatcgtggactacaagttgttgcacagacctgcaagaaattgcataggctcagagtagagagaggagatgatgatcaaggaggtcttgaggatgaacaaggtaggatttcacaggtggggttgatggctatagcccaaggctgccctgagttgacatactgggcgatacatgtatcagacattacaaatgcagctttagaggcagttggtacatgcagcaaaaatcttaatgacttccgccttgtcctccttgatagagaagcacatataaccgaattgccactggacaatggggttcgtgctttgcttagaggttgcaccaaactacggaggtttgcattttatgtgagacctggggccctatctgatgttggtcttggctatgttggagaatttagtaagagtattcgttatatgttgcttggtaatgttggtgaatctgataatggaatcatacaattatcaaaaggctgcccaagcttgcaaaaactggaggtgaggggttgtctctttagtgagcatgctttagctttggctgcactacagcttaagtcactgaggtatctgtgggtacaaggattcaggtcatctccaactggaactgatattatggcaatggtacgccccttctggaacattgagtatattgttccagatcaagatgaaccttgcccagagcataagagacagattctggcatactactcccttgctggcaggaggacagattgtcctccatcagtaactctgctttacccggcattttgagtgtagatacttgctttttgccagactgaatctcatggtactaagttccattggtcccactatctgtgaagtaaatggtccctgttcttccaattgatgaggacatgcagacgttccagtgcaaagaaccccaaaggtaagctttaagcaggacggccagctctgaactgaggctagctgagaacaatcatgaatacctgaaggcagcacttatgtcagcttggcctagctgtccagtatgggcatgtaagctttaccatcttttgtagttttggagaaacaattttgcaataactacccttgtttagtgtatattatcgattttcgttcatatgctgttgtattgttgtattgaacaattatgtcaattaattagtctacactctacagtctaacttgctgtgattcgatgaaaaaaaaaaaaaaaacagccgcc

SEQ ID NO: 589 - DNA, 289 bp, Zea mays
  Clone ID: PAT_MRT4577_106856C.1
cgcaacctcccgggccgccttctcttctccagcgtccgatctcccactcgcctccctcaccgcagctctcccacctccgccctccccccgcacgcgctcgccacctcgccctcccctccacgttgctcgcacccgcgcttatataagtgcaggaggagctcatggcggaagctccggcgagccctggcggcggcggcgggagcacgagagcgggagcccaggggaggcggagcggtggcacgtcagggacaggacaggttctgccatcgcaacatcatcggtcatgaag

SEQ ID NO: 590 - DNA, 2052 bp, Zea mays
  Clone ID: PAT_MRT4577_107184C.1
ccctgctgccgtccctgtccacaaagatcccgtaggagtcggccgggacgaaggagtcggagtcgaaccgtaacctccgtgtgtagtcttgccaggcggcggaggagaggggtaagaggggagcaaatcagtggctcgagtttcctggcgtgcgggaggagtcggagggaaccgaagaaacgcagggtctcgaatttcctaggagcggaggcgatggctgggaagggaggaaaaggattgctcgccgcgaagacgacgcgccggccaagtcggcggagcaaggacacgggggaagaaggcccccatctcacggtcctcccgcgcgggcctccagtttcctgttggacgaatccaccgtcagctgaagcaaaggactcaggcaaatggccgcgttggtgccactgcagccgtctactctgccgccatcctggagtacttgactgccgaggttctggagctggctgggaacgctagcaaggatctgaaggtgaagcgtatcacccctcgccacctacagttggccattcgcggagacgaggagctggacaccctcatcaagggcaccatcgcaggtggaggtgtcatcccgcacatccacaagtccctgatcaacaagtcctccaaggagtgaagactagggaatgcacattgttagtttaaactggacatttctgtgtgctcctctgcgagtccttgtcgtcgtgctaggttttagttgagctgtcaggttggagtgaccctttctcctgtgtaacgcttgcctggtactgctctcagtgatttgtagaatacgctttgtatggagttgataacttcttatgtgacaaacttgcataattagttagtaataaaatgaaaaaatggtattcggtttaaaaaataaaaaaaaatcgataaaagaaaggtttagatctcaactgacccatctcaaacggagaggaatttcgaattgtggcaggtgctgcctccacctggtaacggtgggctgaaatactatggttgtgagcagtaaattcgaccaaatcatctgctccacagaagccatcagcgcctcgaccggacagtgacataggtgatccacagatacttcatgtacacagcaaaagatttggaagagtggtcagaaaatcatgattcctttcgccacgagcagaatttggttcagtggactgagaaaaaacggccatatgttgaagcccttttcatcgtggttgtaaccaatggtgtcggtaaggattttgtcatcaacaatgagtcgtactggaagacgggatctcgctgacggaggtaggagggctgctgcaggagtgggatggcagggaagagccagctggacagcatgccctggaggacagcctcgcatccgaggatctggggagcatgctggagtccatcaaagtggagagggccaaatattcactgatgtgctttcagttccctgttggacgtatccaccgtcagctgaagcaaaggactcaggcaaatggtcgtgttggtgccaccgcagccgtctactcagctgccatcctagagtacttgactaccgaggttctggagctggctgggaatgctagcaaggatctgaaggtgaagcgtatcacccctcgccatttgcagctagctattcatggagacgaggagctggacactctcaccaagggcaccatcgcaggcggaggtgtcataccgcacattcacaagtccctgatcaacaagtcatccaaggagtgaagattaggggatgtgcatctttagtttaaactggacttctgtgcgctcctgagcgagtccttgttgtaccgtaggttttagttgagctgttaggttggagctcctttgtgtaacgcttgcctggtagtgcttcattagttatttggttattgtgtttgtgttgagttgttaacttcaggggtgcaaacctggttgcttatttagttatgtgactactgctattcagtttatttttaaattttttgtagctgcaattatacttataatatgttgttgatagccctgtggggtgctgggggctcagatttatcatctccaaac

SEQ ID NO: 591 - DNA, 852 bp, Zea mays
  Clone ID: PAT_MRT4577_107185C.1
ctccatagggcgattgggtctctcgaggccggccggggcgctctgtttgtggcgtgcggaaggagtcggagggaaccgaaaactcagggtctcgaatttcctaggagcggaggcgatggctgggaagggaggaaaaggattgctcgccgcgaagacgacggcggccaagtcggcggagaaggacaaggggaagaaggcccccatctcacggtcctcccgcgcgggcctccagtttcctgttggacgaatccaccgtcagctgaagcaaaggactcaggcaaatggccgcgttggtgccactgcagccgtctactccgccgccatcctggagtacttgactgccgaggttctggagctggctgggaacgctagcaaggatctgaaggtgaagcgtatcacccctcgccacctacagttggccattcgcggagacgaggagctggacaccctcatcaagggcaccatcgcaggtggaggcgtcatcccgcacatccacaagtccctgatcaacaagtcctccaaggagtgaagactagggaatgcacattgttagtttaaactggacatttctgtgtgctcctctgcgagtccttgtcgtcgtgtaggttttagttgagctgtcaggttggagtgacccttctcctgtgtaacgcttgcctggtactgcttcagttatttggacactgtgtttgtgttgagttgttaacttcaagggtgcaaacctggataattatttagttattatatgactatctggtatccggtttatgctgaaaaaaaaaaaaaaaaaggcccctagggaggtgacttgtcatttgtgctcgttggtttgcatgacctgcatattcttgc

SEQ ID NO: 592 - DNA, 985 bp, Zea mays
  Clone ID: PAT_MRT4577_107186C.1
gccggccgggtcggggtggcgtgcggaaggagtcggagggaaccgaaaactcaggtgagggcttcttccgccgcacccgccgtcttatccgaactcctcgacccgattggcgcgattcgccgtttgttttcccgaatcggcgacgggatccgcccgattcggccgtcgatctgcgctgattcggcccgcgcgccgtcggggttcgctttcttctgcgcagggtctcgaatttcctaggagcggaggcgatggctgggaagggaggaaaaggattgctcgccgcgaagacgacggcggccaagtcggcggagaaggacaaggggaagaaggcccccatctcacggtcctcccgcgcgggcctccagtttcctgttggacgaatccaccgtcagctgaagcaaaggactcaggcaaatggccgcgttggtgccactgcagccgtctactctgccgccatcctggagtacttgactgccgaggttctggagctggctgggaacgctagcaaggatctgaaggtgaagcgtatcacccctcgccacctacagttggccattcgcggagacgaggagctggacaccctcatcaagggcaccatcgcaggtggaggcgtcatcccgcacatccacaagtccctgatcaacaagtcctccaaggagtgaagactagggaatgcacattgttagtttaaactggacatttctgtgtgctcctctgcgagtccttgtcgtcgtgtaggttttagttgagctgtcaggttggagtgacccttctcctgtgtaacgcttgcctggtactgcttcagttatttggacactgtgtttgtgttgagttgttaacttcaagggtgcaaacctggataattatttagttattatatgactatctggtattcggtttatgctgttgggcagtggccagttggggctcgggtttgtaatttgtcatttgtgctggttggttgtcatgacctgctatttcttgc

SEQ ID NO: 593 - DNA, 309 bp, Zea mays
  Clone ID: PAT_MRT4577_107313C.1
tggcgacgccagggcggagagcacacaccgaagcgggccgctgcggcggcgcaggcgcaggcgcaggcgcttacatgggagtagtagaaccgggcgggtgcacggcggaggcggtcgtgaacgggtctacgcttggggttggaagttcttcacggccctcctgttcttttgggcggcggcggccgcggcagactcttactagctagctagcaaccttcttcctcctcctccttgtaggtagtagtagtagtaggctacacaacaacgaccacatatatatatacatactaggtactactagcaggcgag

SEQ ID NO: 594 - DNA, 258 bp, Zea mays
  Clone ID: PAT_MRT4577_107364C.1
ctccactccccccttcacagatccgttcctccagctagggttagcgttcctcttctgctatggcgatcaagcggaccaaggcggagaagaacatcgcgtacgacaacaagctgtgcagcctcctcgatggttccaccaagtggctcatcgcccgcgcggccacgtcggttccaagcagctccaggacatccgccggggcctcaggggcgactcggtggtgctcatggggaagaacacgctcatccagcgctgcatcaa

SEQ ID NO: 595 - DNA, 484 bp, Zea mays
  Clone ID: PAT_MRT4577_107366C.1
ttttttttttttttttgttcactcggtccattttaatattataaagtaatattcagaactcagctccaactaacagaaacactttgttcgatcgacaaacttaaacaaaaatgcatgttgcacgactacggtagcataaatgccatagacaaatactgatcgccgataagatagcactacttctatgggaccaaactttactcgtcatcctcatcgtcgtcatctgcgccgcccgaggagttgagttggttgagcctttcaatgagactggccttcctctgctcgtatgtcagtttcttggggttgtacctcttgtgctcctttggtggctgcttggttgacttgaccacagaaggatcagcacggatggcagcatggaccttcttgtacagagcttccatgtcatcagcctcaattcccttcttaatgtacttactgaagtgagactggtacttctctggctcctcttcagcgaggtttctca

SEQ ID NO: 596 - DNA, 482 bp, Zea mays
  Clone ID: PAT_MRT4577_107370C.1
gtttgggttttttttttttttttttttttttttttttttttttttggtcgactcgggccaattttaatattataaaagtaaatattcagaactccagctccaaactaacagaaacaactttgttcgcatcgacaaacttaaacaaaaagggtgtggggacgactacaggtagcgataaatgccatagcacaaattctggtcgccgcataagatagcactacttcgatgggaccaaactttactcgtcatcctcatcgtcgtcatttgcgccgcccgaggagttgagttggttgagcctttcaatgagactggccttcctttgctcgtacgtaagtttcttggggttgtaccttttgtgctcctttggtggctgcttggttgacttgaccacagaaggatcagcacggatggcagcatggaccttcttgtacagagcttccatgtcatcagcctcaattcccttcttaatgtactcactgaag

SEQ ID NO: 597 - DNA, 554 bp, Zea mays
  Clone ID: PAT_MRT4577_107373C.1
tttttttttttttttttgttaactcggtccatttaatatataaaagtaatattagaactccgctccaactaacagaaacaactttgttcgatcgacaaacttaaacaaaaatgcatgttgacgactacggtgcgataatgcctagcacaaatctgatcgccgataagatagcactactttatgggacaaactttactcgtatcctcatcgtcgtcatctgcgccgccgaggagtgagttggtgagcctttaatgagactggccttcctctgctcgatgtagtttcttggggttgacctcttgtgctcctttggtggctgcttggttgacttgaccacagaaggatcagcacggatggcagcatggaccttcttgtacagagcttccatgtatagcctcaattcccttcttaatgtactcactgaagtgagactggtacttctctggctcctcttcagcgaggttcctcatgtagtcagcaacatggccaccatagatgtacttgcgatggatatcagcatccagctgcttgtcatccttcttgaaaccagcaaa

SEQ ID NO: 598 - DNA, 254 bp, Zea mays
  Clone ID: PAT_MRT4577_107426C.1
agcgcgtccacctcccaaacccctactcccccaggaagcaatggcttcccccacccagggccaggtcatcacctccaaagcggcggtggcgtacgacaacaacaagccgctcgtgatcgaggacgtgcaggtggcgccgccgcagccggcgaggtccgcgtcaagatcctcttcaccgcgctctgccacaccgaccacttgtcctggagcggtaaggatcctgagggtctttttccttgcattcttggccacga

SEQ ID NO: 599 - DNA, 368 bp, Zea mays
  Clone ID: PAT_MRT4577_107482C.1
tcgagcggccgcccgggcaggtacaagctttttttttttttttttttttatcttttactttctttttttatttctgggaagcctcaaacatcagcacaaaaacttattattgacctattactgataagaaatctaaaagagggcaccacctatgatgggacgttggcggaacgctgctggatttgtgaaagcaagccgattgaatggcagcaaaagacgcacttgtaagagggtgccagcgttgggcgcagggcggtggtagaacgacaacaactggggttgcgtgaataatgcaccagggctcacaccagctacccggctgaatggtggtagttgatgctgctgtgaataagcctgatagttcaatg

SEQ ID NO: 600 - DNA, 522 bp, Zea mays
  Clone ID: PAT_MRT4577_107781C.1
agtgtatatatatatatatagtatcaaatcatatcatcggggaccaattaatatatggttacagcagacgcaatcgggtcaaccaacatgcatgtagacacacgtacatgagcacaaagactgaccccaaacatgcagagagagagatagcaaactgaagaactctgtttctttctctctctcacacaccacacaatacctatgtatggcagccagctcggcctcgcttattattgttcaaccaccaccacaagctagatagataataatcatatccatggtcgtcgatcgatgtgaacagcagttgcaggggtcgaacttgcagctgttacccgaaccgtaggcgtgggcggactcaacggacttcgccgcgggctctacgaactcgggcgcgggcttcttatccggggccacccctaggactactgcggcctgcgcgggggtgcttgtcttctccaggtaaaggtacttcttgccgcacttgcagcttgagccgcagccgcagcttgatccgcagttgca

SEQ ID NO: 601 - DNA, 547 bp, Zea mays
  unsure (1)..(547): unsure at all n locations
  Clone ID: PAT_MRT4577_107783C.1
agtatcaaatcatatcatcgtggaccaattaatatatggttacagcagatgcaatcggatcaaccaacatgcaggtagacacacgtacgtacatgagcacaaagactgacgccaaacatgcagagagagatagcaaactgaagaactctgtttcttttttttttacacacaccacacaatacctatgtatgggagccagcttggccttgcttattattggtcaaccaccaccacaagcttgatagataataatcatattcatgggcgtcgatcgatgtgatcagcaattgcaggggtcgcacttgcagttgccaccgcaactgcagccgtgggcgggctctccggacttcgccgcgggcttgacgaacttgggcgcgggcttcttcttcggggccacgccgaggacaaccgtggcctgcgcgngcggtgctcttctcctccaggtcagggtacttcttgtcgcacttgcagcttgagccgcagccgcagcttgatccgcagttgcaagacatactctacctctgtggtgcaaaaaaaactcgatctc

SEQ ID NO: 602 - DNA, 1046 bp, Zea mays
  Clone ID: PAT_MRT4577_107935C.1
cattgggtacctcgaggccggccgggagactattaaggccttcagaccgggagggctccctgtcctgtcccccgcgccgccgcggatggccggagccaccacgccggcatcaggcgccctcgtcaggctctgcctgccttcgctcctcctctttctgtaccggtgctgcagatgtgaggctgttgagatggagagaacccttgcgatgatcaagcccgatggtttgtcaggtaagtacacagaagcaatcaaggaggtcatcttggattctggatttcatatcgtcaaagaaaccgaggtccagcttgatgctgagagggcatctgtcttctatgcggagcattcccagagaagcttctttgacagcctagtcaagtacataacaagtggtccagttcttgctatggttctggaaagaccggacgccgttgcgcaatggcgcactttgattggaccaactgatgcaaaaaaggccaaaacctctcatccaaacagcattagagcaatgtgtgggctggactctgagaaaaattgcgtgcatggttcggattcaccagaatctgcagacagagagatctcatttttcttcggagaagctgaatccgtaactgtggaacatgatgagctatagacgccacactggtatcagtggcaatattggccggctcattggacaacgtgggagagtatcgactctgctgcttctagtgttcgtcatgcttcttttatgaactaaacccgaagacgctgcaatttgaggaggggatgtcagttgtcacagaggagagagtcatttttagggctagtttggaaatctcatttttttcaagagatttttattttcctaaaggaaattagtttatttttctttgagaaaatagaattcccttgggaaattagagtttctaaacgagcccttaatttcgtaaaattatgtccggagtccatatttcctatcggagcaccatggtccttgaacttgcaaaactatatggtgcaaaccaaatattgttttttcatccgtgttgacgtcttgtgtggcataa

SEQ ID NO: 603 - DNA, 1937 bp, Zea mays
  Clone ID: PAT_MRT4577_107936C.1
cattgggtacctcgaggccggccgggagatattttcgaatcagaccgggagggctccctgtcctgtcccccgcgccgccgcggatggccggagccaccacgccggcatcaggcgccctcgtcaggctctgcctgccttcgctcctcctctttctgtaccggtgctgcagatgtgaggctgttgagatggagagaacccttgcgatgatcaagcccgatggtttgtcaggtaagtacacagaagcaatcaaggaggtcatcttggattctggatttcatatcgtcaaagaaaccgaggtccagcttgatgctgagagggcatctgtcttctatgcggagcattcccagagaagcttctttgacagcctagtcaagtacataacaagtggtccagttcttgctatggttctggaaagacctgacgccgttgcgcaatggcgcactttgattggaccaactgatgcaaaaaaggccaaaacctctcatccaaacagtactctttgtcatttcagcattagagcaatgtgtgggctggactctgagaaaaattgcgtgcatggttcggattcaccagaatctgcagacagagggatctcatttttcttcggagaagctgaatccgtaactgtggaacatgatgagctatagacgccacactggtatcaggcaagtcagcaaactgaattttgatgtgtctttgaactcttaggctatctcctgtagcttcttactcgtacccgtttcttattattttaaaagttattatgtaaacagtataatttatagtgcaaaacagtgtcttgcatggccatatgcttgtggcttcatatgcagagtttactgatctgctgtgcacattgtgattgctaagactaggatggctgagcagctgaggcctattggccattcatatgcttctgcttgctcaagtgtttactctcgaagtaattatgggcatgtttggttcggattattattctcttttccacggagaaacaccagaatcgacggatagtccgccaaatgtcatgctttttccgcttttcctcaccgcggcttcggtagcaagcgtggggttgaacaaaaaggccagaatcgtaagacgccaatagaatcatgattctccccaccgtcgattgtttcggacgcgctcccgtgaaaagcgagtacaaacatgccctatgtgtaaagaaacttatatactactcccttcattcttttttatttgtcgcggattcgaaaacagaggtagtatttgattgcactggcactgcacacaaatagatctttgcaactgtcacttggcagtccttcaaataatgcaaattaggatacagtagaatagaatccatgaaacgggaagagaagtgctggtttgtccaagagccggatgcttaggatcaggaatttattttcaaataatgcaaattatgctggcagattggtttcttttttttatttttattttcgcaaggatatagatttgcttgtggtctgtttattcatcatgtagtttcgtttgctttggtgagtagtggcaatattggccggctcattggacaacgtgggagagtatcgactctgctgcttctagtgttcgtcatgcttcttttatgaactaaacccgaagacgctgcaatttgaggaggggatgtcagttgtcacagaggagagagtcatttttagggctagtttggaaatctcatttttttcaagagatttttattttcctaaaggaaattagtttatttttctttgagaaaatagaattcccttgggaaattagagtttctaaacgagcccttaatttcgtaaaattatgtccggagtccatatttcctatcggagcaccatggtccttgaacttgcaaaactatatggtgcaaaccaaatattgttttttcatccgtgttgacgtcttgtgtggcatactttgac

SEQ ID NO: 604 - DNA, 247 bp, Zea mays
  Clone ID: PAT_MRT4577_107976C.1
ctctaaccaagacctcttcggggtaggggttcttatggttttgtggagggcctatggcagcggctgatgtgtagtaccgttgctacgtcggctggcttgcctgggccaccagcaacgagtcgcttgagaatgccttctcctcctactgcgagatcctcgactccaaggtcatcaccgaccgggagacggggaggtctcgcggcttcagctttcttaccttctcctccgaaaacttcattctctactc

SEQ ID NO: 605 - DNA, 244 bp, Zea mays
  Clone ID: PAT_MRT4577_108267C.1
cagacggatgaactggcgaacggcatggagaaggtcgcggtgtccgaacccgaaaagcacggacacaatgaggaggagcacgaagtcgtcggcgaggagaaggagggccttctcgccaagctgcaccgcaccagttccaggtccaggtcgtcaggcgacgaggaagaggaggcggtcggtggggacagcgaggttatcgggaggaagaagaaggagatgggcctcgaggagaggctcgaggaga

SEQ ID NO: 606 - DNA, 418 bp, Zea mays
  Clone ID: PAT_MRT4577_108332C.1
tcttgcggattggtccgtgaacagccctgaggggctccacctttcccaggaggaccttatttagaagtttgccactggagttttcatgggttccttcctgtcactggctatctcataccccacccttgcttctttgccccacatgttcatcaatgggtacaacaatgtgcttgcttttgctgtcgagacaaactactcatacccacatgctgacaagatcaaggagtaccttaaggacccaaacaagtttgctgttccggcccggttgctgctggtgactctggcgcttcaactgcttccaaagaagaagagaaagcttcggagcctgaaaaggagtcggacgaggaaatgggcttcaaccttttcgacgactagagcttctgttttcgtcaaacttgtgcaaggtttggctttttta

SEQ ID NO: 607 - DNA, 336 bp, Zea mays
  unsure (1)..(336): unsure at all n locations
  Clone ID: PAT_MRT4577_108376C.1
atttctctctctcctctatctacacctctgcgccggctgggcgttacgcctgccgcggcgaagcttctgccctccccgccgtctcgctctgatccgcgtcggccgggaagatggcatgcggcttagggtcttatctgctcagccctttctggctttcttgtcagaggtgcaaagcgcggataggaagataccgttcagagaaaaagttatctacactgngatatctctcttgattcttctggtgtgcacacagctcccactctataggattcattcgacgactggagctgatcctttctactggatgcgtgntatcctcgcataaaccgtggcact

SEQ ID NO: 608 - DNA, 231 bp, Zea mays
  Clone ID: PAT_MRT4577_108660C.1
accactcttccgacattggccactttgacaatgaaattgttttgctcgtgctggagacctaccctggcgttaagcgcatcaccatcaaatccgagactgtccgatgagtgttctctgagaccaacactggcataattgttcttgatgagggtagcctgatataccttggttgtgcttttgctcatcctaacttgtcatgttcttggtcattcactaaccaaattattgtcc

SEQ ID NO: 609 - DNA, 415 bp, Zea mays
  Clone ID: PAT_MRT4577_108691C.1
acgcatctagcagacatcagtaaagcacaatattgtaccaacaatggcagccaaaatattatgcctgcttatgctccttggtctatctgcaagtgctgctaccgcgaccattttgccgcaatgctcgcaagctcctatagcttatcttcttacaacgtacatttgatcagcggtgtattatgactgtgaaaacccaattattcaaccctacaggatccaacaagcaatctcagctggcatattagctatatcacgcatttgcctccaacaattatcagccctattacatcaagtacctacggcgcatctattggcacataacattacggcacatcaactacaacaacttgtgctagcaaaacttgctgtgtactatcatcaacagcagaatcttgcattctaccaactaactgca

SEQ ID NO: 610 - DNA, 834 bp, Zea mays
  unsure (1)..(834): unsure at all n locations
  Clone ID: PAT_MRT4577_108742C.1
ngaaaccacccaccaccagcagctttcctctcagctcgagcgatcgatcgaatccttccgtcgcgttcgcgtttccgtttcgtgtgtttagaccaagtttccaatggctcctctcggtgacgctgttgcccccgcggccgccgccgccgccccaggcctcgtcgtctctttcggcgagatgttgatcgacttcgtgcctgacgttgccggcgtctccctcgccgagtccggcggcttcgtcaaggcgcccggaggcgcgcccgccaacgtcgcctgcgccatctccaagctcggcggctcctccgccttcatcggaaagtttggcgacgacgagttcggccacatgctggtggagatcctgaagcagaacggcgtgaacgccgagggctgcctgttcgaccagcacgcgcgcacggccctggccttcgtcacgctcaagtccaacggcgagcgcgagttcatgttctaccgcaacccgtcggccgacatgctcctcaccgaggccgagctcaacctggacctgatccgccgcgcccgcatctttcactacggctccatctcgctcatcaccgagccctgccgctcggcgcacgtcgccgccatgcgtgccgccaagtcggccggcatcctctgctcgtacgaccccaacgtccgcctgccgctctggccctctgcgcaggccgcccgcgacggcatcatgagcatctggaaggaggccgacttcatcaaggtgagcgacgatgaggtggccttcctcacccagggcgacgccaccgacgagaagacgtgctctccctctggttcgagggactcaagctgctcatcgtcaccgac

SEQ ID NO: 611 - DNA, 1416 bp, Zea mays
  Clone ID: PAT_MRT4577_108770C.1
acatgcaaagcgaagcgcgcgcacagagatctagctgaggctgagctactagctagcagctgctgcaggtctcctgacatggcgaaggacatcgaagcatcggggcccgaggccggcgagttctcggccaaggactacaccgaccctccgccggcgccgctcgtcgacgcggatgagctcaccaagtggtccctctaccgcgcggtcatcgccgagttcatcgccacgctgctcttcctctacatcaccgtggccaccgtcatcgggtacaagcaccagacggacgcggcggcgtcgggccccgacgcggcgtgcggtggcgtgggcatcctcggcatcgcgtgggccttcggcggcatgatcttcatcctcgtctactgcaccgccggcatctcaggtgggcacatcaacccggccgtgaccttcggcctgttcctggcgaggaaggtgtccctcgtccgcgcgctgctctacatcatcgcgcagtgcctgggcgccatctgcggcgtgggcctcgtcaagggcttccagagcgcctactacgtgcgctacggcggcggcgccaacgagctcagcgacggctactccaagggcaccggcctcgcccccgagatcatcggcaccttcgtgctcgtctacaccgttttttccgccaccgaccccaagcgcagtgcccgtgactcccacgtcccggtgttggcccctcttccgattgggttcgccgtgttcatggtgcacctggccaccatccccatcaccggcaccggcatcaacccggcgaggagcttgggagccgcggtcatctacaacaaggacaaggcctgggacgaccaatggattttttgggtgggcccactgatcggcgccgccatcgccgccgcctaccaccagtacgtgctgagagccagcgccaccaagctcgggtcctaccggagcaacgcctaagtccggcgccgccggacgcgtgtgggcgccaccgatcgatccaagtgtagatacgtacgccccgactccgtccagtatatgacgccctgtcttcttccttgggggaaaaaagtgtgatatatctttgctttctgtatatgtgagaatgcattctgtaagccagtcatgtgagtttcacagtctacttttagaacgatttaaacggccctgaatcttactttacttgcaactttagaggaaagtacgggaaaagaacctcacaacaagtcaccaagggacttgacagttggttggtatgtgttaggcctgcggcccaaataagcaagcccatcggcgggctccgtttttcctctgttgtactgccctaagtgcctgaaggccgaaccccctgaaccttgcgctgccaatgaggtaacgctccacaatttttctccctctgttttgtatcacgcgatttagattgagagttcg

SEQ ID NO: 612 - DNA, 441 bp, Zea mays
  Clone ID: PAT_MRT4577_108771C.1
gccggagctcagccggtccttggtgtaccgcgcggtcatcgccaagttcatcgccacgctgctcttcctctacatcaccgtggccaccgtgatcgggtacaagcaccagacggacgcgtcggcgtcgggccccgacgcggcgtgcggcggcgtcggcatcctcggcatcgcgtgggccttcggcggcatgatcttcatcctcgtctactgcaccgccggcatctcatgtgggcacatcaacccggccgtgaccttcggcctgttcctggccaggaaggtgtccctcgtccgcgcgctgctctacatcgtggcgcagtgcctgggcgccatctgcggcgtgggcctcgtcaagggcttccagagcgcctactacgtgcgctacggcggcggcgccaacgagctcagcgacggctactccaagggcaccggcctcgccgccga

SEQ ID NO: 613 - DNA, 1714 bp, Zea mays
  Clone ID: PAT_MRT4577_108772C.1
gccggccggttcggagaacgactctcggcaacggatatctcggctctcgcatcgatgaagaacgtagcaaaatgcgatacctggtgtgaattgcagaatcccgcgaaccatcgagtttttgaacgcaagttgcgcccgaagccttctggcggagggcacgtctgcctgggcgtcacgccaatcaattaagcgaggcgatgagctcgtcctctctcttgcacgagccgtcctcccacgccccacgcatatatacctcggcctctcgagtctccggcctcacagcacacaacaagcaaagcgaagcgcgcgcacagagatctagctgagctactagctatagcagcagctgctgcaggtctcctgacatggcgaagcaggacatcgaagcatcggggcccgaggccggcgagttctcggccaaggactacacggaccctccgccggcgccgctcatcgacgcggatgagctcaccaagtggtccctctaccgcgcggtcatcgccgagttcatcgccacgctgctcttcctctacatcaccgtggccaccgtcatcgggtacaagcaccagacggacgcggcggcgtcgggccccgacgcggcgtgcggcggcgtgggcatcctcggcatcgcgtgggccttcggcggcatgatcttcatcctcgtctactgcaccgccggcatctcaggtgggcacatcaacccggccgtgaccttcggcctgttcctggcgaggaaggtgtccctcgtccgcgccctgctctacatcatcgcgcagtgcctgggcgccatctgcggcgtcggcctcgtcaagggcttccagagcgcctactacgtgcgctacggcggcggcgccaacgagctcagcgacggctactccaagggcaccggcctcgccgccgagatcatcggcaccttcgtgctcgtctacaccgtcttctccgccaccgaccccaagcgcagtgcccgtgactcccacgtcccggtgttggcccctcttccgattgggttcgccgtgttcatggtgcacctggccaccatccccatcaccggcaccggcatcaacccggcgaggagcttgggagccgcggtcatctacaacaaggacaaggcctgggacgaccaatggatcttctgggtgggcccactgatcggcgccgccatcgccgccgcctaccaccagtacgtgctgagagccagcgccaccaagctcgggtcctaccggagcaacgcctaataagtccggcggcgggagctgtgggcgccaccgatcgatccaagtgtagatacgtacgctcccccgactccgtccagtatatgacgccctgtggtcgtccacatctgccaccacagtcccgtccgcttggtgctgttttctttctttccttgacggggaaaaaaagtgtgatatatctttgctttctgtatatgtgacaaaatgcattctgtaagccagtcatgtgagtttttatttaaccacagtctacttttagaacgatttaaacggccctgaatcttacttgcaactttagaggaaagtacgggaaaagaacctcacaagtcaccaagggacttgacagttggttggtatgtgttaggcctgcggcccaaataagcaagcccatcggcgggctccgtttctcctctgttgtactgccctagtgcctgaaggccgaaccccctgaaccttgcgctgccaatgaggtaacgctccac

SEQ ID NO: 614 - DNA, 2608 bp, Zea mays
  unsure (1)..(2608): unsure at all n locations
  Clone ID: PAT_MRT4577_108774C.1
cggccgggacaacacacaacaagcaaagcgaagcgcgcgcacagagatctagctgaggctgagagctactagctagcagctgctgctgcaggtctcctgacatggcgaagcaggacatcgaagcatcggggcccgaggccggcgagttctcggccaaggactacaccgaccctccgccggcgccgctcgtcgacgcggatgagctcaccaagtggtccctctaccgcgcggtcatcgccgagttcatcgccacgctgctcttcctctacatcaccgtggccaccgtcatcgggtacaagcaccagacggacgcggcggcgtcgggccccgacgcggcgtgcggcggcgtgggcatcctcggcatcgcgtgggccttcggcggcatgatcttcatcctcgtctactgcaccgccggcatctcaggtgggcacatcaacccggccgtgaccttcggcctgttcctggcgaggaaggtgtccctcgtccgcgcccttctctacatcatcgcgcagtgcctgggcgccatctgcggcgtcggcctcgtcaagggcttccagagcgcctactacgtgcgctacggcggcggcgccaacgagctcagcgacggctactccaagggcaccggcctcgccgccgagatcatcggcaccttcgtgctcgtctacaccgtcttctccgccaccgaccccaagcgcagtgcccgtgactccacacgtcccggtgttggcccctccttccatttttgggttcggcccgtgttcatggtgcaccttggccaccatccccatcaccggcaccggcatcaacccggcgaggagcttgggagccgcggtcatctacaacaaggacaaggcctgggacgaccaatggatcttttgggtgggcccactgatcggcgccgccatcgccgccgcctaccaccagtacgtgctgagagccagcgccaccaagctcgggtcctaccggagcaacgcctaataagtccggcggcgggagctgtgggcgccaccgatcgatccaagtgtagatacgtacgcccccgactccgtccagtatatgacgccctgtgttcgtccacatctgccaccacagtcccctccgcttggtgctgttttcttctttccttggcggggaaaaaaagtgtgatatatctttgctttctgtatatgtgagaaaatgcattctgtaagccagtcatgtgagtttttatttaaccacagtctacttttagaacgatttaaacggccctgaatcttacttgcaactttagaggaaagtacgggaaaagaacctcacaagtcaccaagggacttgacagttggatcttatctctctttgcagccagtaggtcaccactcaaaagcttgtgaagcaggtgagatgggcaaggaggtggatgtgtccactctggaggccggcggcgtccgtgaccgtgactacgcggaccctccgccggcaccgctgatcgacatcgacgagctcggcatgtggtccctgtaccgcgccgtgatcgccgagttcgtggccacgctgctgttcctgtacatcacggtggccacggtgatcgggtacaagcaccagacggacgcgtcggcgtcggggcccgnnnnnnnnnnnnnnnnnnnnnnnntcctgggcatnnnnnnnnnnnnnnnnnnnnnnnnnnnnnnnnnnnnnnnnnnnnnnnnnnnnnnnnnnnnnnnnnncatcaacccggccgtcacgttcggcctcttcctggcgcgcaaggtctccctggtgcgcgctctgctgtacatggccgcgcagagcctcggcgccatctgcggcgtcgcgcacgagtattgcgttccagagcgcctacttcgaccggtacggcggcggcgccaactcgctcgcgtccggatnnnnnnnnnnnnnnnnnnnnnnnnnnnngatcgtcggcaccttcgtgctcgtgtacaccgtcttctccgccaccgaccccaagcgcaacgcccgcgactcccacgtcccggttctggctcccctccccatcggcttcgccgtgttcatggtccacctggccaccatccccgtcaccggcaccggcatcaacccggccaggagcctgggcgccgccgtcgtctacaacaaggacaagccatgggatgaccactggattttctgggtgggcccgctcctgggcgctgccatcgcggccttctaccaccagtacatcctccgggcgggcgccatcaaggctctcggctccttcaggagcaacgcgtgatgagcagagctaaagaaaggccttcgctggactgcgtgctggagcaacggcgatcgatcgatctagcgtggggagaggcggataggcgggcgcgcgagggaggagaataagtttgtgccggtggcccggtctcgtcggtcgcttttgttccagcatgcagctgcgtcgcgttcgtgtgcgtgcgtgggggtctccttaatttccccggcccctgtaatcatcaatcaccatgtgtgcgtataatatctgctgccaagggatcgattattccccccccccctctctctctatctgctcttgtagctccttctgttttatcgttattatgtagcgacaccaacgacgacgaccaccatc

SEQ ID NO: 615 - DNA, 219 bp, Zea mays
  Clone ID: PAT_MRT4577_108925C.1
gattagccagggaggcgagggcgacaccagactgattttctgttccatgaaaaccagcatacgcacacgaggttacgaggagtgcagaccaccactctggacaatctccagagaatgaaaaaaaagggttcttttctgcttttggcgctgacacaacagaaatcacctgagtagctttggagcagacaccaccatacatttattgcaaccgtacaaaca

SEQ ID NO: 616 - DNA, 927 bp, Zea mays
  Clone ID: PAT_MRT4577_10894C.1
agatgtctgcgctgtacctccaagtcagtattgtgagccaggctctgatcttcgtcacccgttcccgtagctggtccttcgtggagcgccctggtctgctcctggtcaccgcgttcctgctcgctcaacttgttgcgaccttcctcgctgtgtacgccaactggggcttcgccaggatcaagggtatcggctggggctgggctggtgtcgtctggctctacagcatcgtgttctacttccctctggacctgatcaagttcttcatccgctttgtgctcagcggcagggcatgggacaaccttctcgagaacaagaccgccttcaccaccaagaaggattacggacgggaagagagggaggcgcaatgggccaccgcgcagaggacgctgcacggtctccagccgccggaggctgccaccaacactctgttcaacgacaagagcagctaccgcgagctgtcggagatcgctgagcaggccaagagacgagctgagatcgcgaggctgagggagctcaacaccctcaagggccacgtggagtcggtggtcaagctcaagggcctggacatcgacaccatccagcagaactacacggtgtgagagcccctctgctgcgatgtcgacgacaacacctttgctgcccgacgggagccatctgattacagataaaaattttcctagctgtaaagctctctataccaccagatactgccatatgatggtatggttgggtacccgtctttctagggagtttcttttctctctctcttttcttattgttatgtttttcaatagtggagtgtgcgcgtgttgtaatcgtttttacctgcgttttcctctaactagccggtgatctcgcgggaagcgaggtgaagaaataatgcaactaaaattctctgccaaaagcattgttccttctcacttgggt

SEQ ID NO: 617 - DNA, 402 bp, Zea mays
  Clone ID: PAT_MRT4577_108964C.1
atcaccctcgagaagccacgctggctcatcgccgccgccaacatcttcgtcgtcgtgcacgtcatcggcagctaccagatctacgccatgcccgtgttcgacatgctcgagacgttcctggtgaagaaactccggttcaagccaggcatgcctctccgtttgatagcgcgctcgctctatgttgtgctgacagctctggttggcatcgccgtgccgttcttcggggggctgctagggttctttggtggcttcgcatttgcgccgacaacctactaccttccgtgcattctgtggttgaagattaagaagccaaagaagttcagcctctcttggttcatcaactggttctgcatcatagtcggcgtgctcctgacggtgcttgcgcccattggaggcctccgg

SEQ ID NO: 618 - DNA, 2182 bp, Zea mays
  Clone ID: PAT_MRT4577_10896C.1
ctggccgcgagggcatcgaggaccgagaaccaggacgccatcgacgccgccatggttggcatgcttgctgaccctaaggaggccagggctggtatcagggagatccacttcttgcccttcaaccctgtcgacaagaggactgctctgacgtacattgatgccgatggccactggcaccgtgtcagcaagggtgcccctgaacagattcttgacctgtgccactgcaaggaggatctgaggcgtaaggtgcacggtatcatcgacaagtatgccgagcgtggtcttcgttcgcttgctgttgccagacaggaagtgcctgagaggaacaaggagtcccctggtggaccatggcagttcgttggtctgttgcctttgtttgatccgcccaggcatgacagtgctgagacgattcgcaaggctcttgttcttggtgtcaacgtcaagatgattacgggtgatcagcttgctatcggtaaggagaccggaaggaggctcgggatgggtaccaacatgtatccttcctcagcattgctcggccaaaacaaggatgctacgctcgaggcacttcctgtagacgagctcatcgagaaggccgacggttttgccggagtcttccctgaacacaagtacgagatcgtgaagagactgcaagagaagaagcacatcgttggtatgactggagacggtgtcaacgacgccccggctcttaagaaggccgacatcggtatcgctgtcgcggacgctaccgacgcggccaggagcgcttccgacattgtccttactgagccaggtctcagtgtcatcatcagcgctgtcctcaccagcagatgcatcttccagaggatgaagaactacaccatctatgcagtctccatcacaatccgtatagtgcttggatttatgctcattgcattgatctggcaatacgatttctcccccttcatggtccttatcatcgccattctcaacgacggcactatcatgaccatctctaaggacagagttaagccgtctccgttgccggacagctggaagctgaaggagatctttgccacgggcatcgtgcttggaagctacctcgctctgatgactgtcattttcttctgggctatgcacaagaccgacttcttctcggacaaattcggtgtgaggtcgatcagggacagtgagcatgagatgatgtccgcgctgtacctccaagtgagtatcgtgagccaggctctgatcttcgtcacccggtcccggagctggtccttcgtggagcgccctggcctgctcctggtcaccgcgttcctgctcgcccagcttgtcgcgaccttcctcgctgtctacgccaactggggcttcgccaggatcaagggtatcggctggggctgggccggtgtggtctggctctacagcatcgtgttctacttccctctggacctgatcaagttcttcatccgtttcgtgctcagcggcagggcatgggacaacctcctggagaacaagaccgccttcaccaccaagaaggactacgggcgggaggagagggaggcgcagtgggccaccgcgcagaggacgctgcacgggctccagccgccggaggccgccaccagcacgctgttccacgacaagaacagctaccgcgagctgtccgagatcgcggagcaggccaagaggcgcgccgagatcgcgaggctgcgggagctcaacaccctcaagggccacgtggagtcggtggtcaagctcaagggcctggacatcgacaccatccagcagaactacacggtgtgagatgtgtgctgtgatgtcgacgaaaacacctttgccatgccacccttgttgttcttgcgacgacggagtcatgtgattgttacagaaaaaaagaagaaaattttccggtgatgtgattggagacaatagaagcgtgtacgtacgtacgtgtggctgatcctgaccccgagcatgcagagcagccctaggtgaggtgaccattgccaccagatatatacccgtctttctagcttagctagggagcttcttcttcttttttttccctcttgttattgtcaagtgtgtgcgcgtgttgtaatggttttactcgcctaactagccggtggtctcgcgaggcgaagaaataatgcaaccgaaagcattattgctctcttctgacttgattgatgctggcagcagaatgtgt

SEQ ID NO: 619 - DNA, 3515 bp, Zea mays
  Clone ID: PAT_MRT4577_10899C.1
aattcggcacgaggcccgttccactcgacgcccagcaagcgctactactccaccaccaccactactttgcttgcttgcccctttcccttcccttctcacacgagaagagaagcgagtcggcgttcgcgtggcatatgcccgtgtctgccgccgggcttggcttctagggtccgctccagcgccggccgaccgccatgggtgggctcgaggagatcaagaatgaagccgtcgatctggagaacatccccatcgaggaggtgttcgagcagctgaaatgcacccgcgaggggctgagctccagcgagggccagcagcgcctcgagatcttcggccccaacaggctcgaggagaagaaggaaagcaagatcctcaagttcctcgggttcatgtggaacccgctgtcgtgggtcatggagatggccgccgtcatggccatcgccctcgccaacggcggcggcaagccccccgactgggaggacttcgtcggcatcatcgtgctcctggtcatcaactccaccatctccttcatcgaggagaacaatgccggcaacgccgcggccgcgctcatggccaaccttgctcccaagaccaaggttctgagagatggccgatggggcgagcaagaggctgcgatcttggttcctggtgacatcgtcagcatcaagctcggtgacatcgtccctgccgacgcgcgtctcctcgagggcgatcctctcaaggttgaccagtccgcgcttaccggagagtcgctcccggttaccaagggtcccggggacgaggtgttctcggggtccacctgcaagcagggcgagatcgaggccgtggtgatcgccaccggagtgcacaccttcttcggcaaggccgctcacctcgtggacagcaccaaccaggtggggcacttccagcaggtcctgacggcgatcgggaacttctgcatctgctcgatcgcggtgggcatcgtcgtcgagatcatcgtcatgttcccgatccagcaccgcaggtaccgcagcgggatcgagaacctgctggtgctcctgatcggcggcatcccgatcgccatgcccaccgtgctctcggtcaccatggccatcggctcgcacaagctgtcgcagcagggcgccatcaccaagaggatgaccgccatcgaggagatggccgggatggacgtgctctgcagcgacaagaccggcacgctcaccctcaacaagctcagcgtcgacaagaacctcgtcgaggtgttctgcaagggcgtcgacaaggaccacgtgctgctgctggccgcgagggcgtcgaggaccgagaaccaggacgccatcgacgccgccatggttggcatgcttgctgaccctaaggaggccagggctggtatcagggagatccacttcttgcccttcaaccctgtcgacaagaggactgctctgacgtacattgatgccgatggccactggcaccgtgtcagcaagggtgcccctgaacagatccttgacctgtgccactgcaaggaggatctgaggcggaaggtgcacggtatcatcgacaagtatgccgagcgtggtcttcgttcgcttgctgttgccagacaggaagtgcctgagaggaacaaggagtcccctggtggaccatggcagttcgttggtctgttgcctttgtttgatccgcccaggcatgacagtgctgagacgattcgcaaggctcttgttcttggtgtcaacgtcaagatgattacgggtgatcagcttgctatcggtaaggagaccggaaggaggctcgggatgggtaccaacatgtatccttcctcagcattgctcggccaaaacaaggatgctacgctcgaggcacttcctgtagacgagctcatcgagaaggccgacggttttgccggagtcttccctgaacacaagtacgagatcgtgaagagactgcaagagaagaagcacatcgttggtatgactggagacggtgtcaacgacgccccggctcttaagaaggccgacatcggtatcgctgtcgcggacgctaccgacgcggccaggagcgcttccgacattgtccttaccgagcctggtctcagtgtcatcatcagcgctgtcctcaccagcagatgcatcttccagaggatgaagaactacaccatctatgcagtctccatcacaatccgtatagtgcttggatttatgctcattgcattgatctggcaatacgatttctcccccttcatggtccttatcatcgccattctcaacgacggcactatcatgaccatctctaaggacagagttaagccgtctccgttgcccgacagctggaagctgaaggagatctttgccacgggtatcgtgcttggaagctacctcgctctgatgactgtcattttcttctgggctatgcacaagaccgacttcttctcggacaaattcggtgtgaggtcgatcagggacagcgagcatgagatgatgtccgcgctgtacctccaagtgagtatcgtgagccaggctctgatcttcgtcacccggtcccggagctggtccttcgtggagcgccctggcctgctcctggtcaccgcgttcctgctcgcccagcttgtcgcgaccttcctcgctgtctacgccaactggggcttcgccaggatcaagggtatcggctggggctgggccggtgtggtctggctctacagcatcgtgttctacttccctctggacctgatcaagttcttcatccgcttcgtgctcagcggcagggcatgggacaacctcctggagaacaagaccgccttcaccaccaagaaggactacgggcgggaggagagggaggcgcagtgggccaccgcgcagaggacgctgcacgggctgcagccgccggaggccgccaccagcacgctgttccacgacaagaacagctaccgcgagctgtccgagatcgcggagcaggccaagaggcgcgccgagatcgcgaggctgcgggagctcaacaccctcaagggccacgtggagtcggtggtcaagctcaagggcctggacatcgacaccatccagcagaactacacggtgtgagatgtgatcgagagagcctgctgtgatgtcgacgaaaacacctttgccatgccatgccatgccacccttgttgttcttgcgacgacggagtcatgtgattgttacagaaaaaaagaagaaaattttccggtgatgtgattggagacaatcagacaatagaagcgtgtacgtacgtacgtgtggctgatccctgaccccgagcagagcagccctaggtgaggtgaccattgccaccagatatatacccgtctttctagcttagctagggagcttcttcttcttttttttccctcttgttattgtcaagtgtgtgcgcgtgttgtaatggttttactcgcctaactagccggtggtctcgcgaggcgaagaaataatgcaaccgaaagcattattgctaaaaaaaaaaaaaaaaaaaaaaaaaaaaaaaaaaaaaaaaactcgaggggggagcccgggtaccccaat

SEQ ID NO: 620 - DNA, 3380 bp, Zea mays
  Clone ID: PAT_MRT4577_10901C.1
gaattcggggcggtggaacagaggaggagcccgactgaggctaggcggcggaggcctgggcggacggatccatgagaagaagcggacccttcctttctcgcacgggaagagtagcgaggaggcgcgggccccgtgcgggtatgcccgtgcctgccgtcgcgtccgcctctaggactagggtccgctccagcgccagccgtccgccatgggtgggctcgaggagatcaagaacgaagccgtcgatctggagaacatccccatcgaggaggtgttcgagcagctgaaatgcacccgcgaggggctgagctccagcgagggccagcagcgtctcgagatctttggccccaacaggctcgaggagaagaaggagagcaaggtcctcaagttccttgggttcatgtggaacccgctgtcatgggtcatggagatggctgccatcatggctattgcactcgccaacagtggtggcaagcccccggactggcaggacttcgtcggtatcatcgtgctcttggttatcaactccaccatctccttcattgaggagaacaatgccggcaacgcggccgccgcactcatggccaaccttgctccaaaaaccaaggttctgagagatggccgatggggcgagcaagaggctgcaatcttggttcctggtgacatcatcagcatcaagcttggcgatatcatccctgccgacgctcgtcttctcgagggtgatccactcaaggttgaccagtctgcgcttactggagaatccctcccggttaccaagggcccaggggacgaagtcttctcgggttccacttgtaagcagggtgagatcgaggccgtggtcattgccaccggagtgcacaccttcttcggcaaggccgctcatcttgtggacagcaccaaccaggtcggacacttccagcaggtgctgacagcaatcggtaacttctgcatctgctccattggggtcggcatcctcgttgagatcatcgtcatgttcccaatccagcaccggaggtaccgcagcggaatcgagaacctgttggtcctcttgatcggtggtatcccaatcgccatgcctaccgtgctttcagttaccatgccgattggttcgcacaagctgtcacagcagggtgccatcactaagaggatgactgccattgaggagatggctggtatggacgtgctttgcagtgacaaaaccggcacactcaccctcaacaagcttagcgtcgataagaacctcgtcgaggtgttctgcaaaggcgtcgacaaagaccatgtgttgctgttggctgcaagggcttcaagaactgagaacctggacgctatcgatgccgccatggttggcatgcttgctgatcctaaggaggccagggctggtataagggaaatccacttcttgcccttcaaccctgttgataagaggactgctctgacgtacattgatgccgatggcaactggcaccgtgtcagcaagggtgctcctgaacagattcttgacctgtgccactgcaaggaggatctgaggcggaaggtgcactctattatcgacaagtatgccgagcgtggtcttcgttcgcttgctgttgccagacaggaagtacctgagaaaaacaaggagagtccgggggggccatggcagttcgttggtctgttgcgggtgtttgatccgcctaggcatgacagcgctgagacaattcgcaaggctcttgttcttggtgttaacgtcaagatgatcacgggtgatcagcttgctattggtaaggagactggaaggaggcttggcatgggtaccaacatgtatccatcctctgcgctgctcggccaaaacaaggatcgtacgcttagcgctcttcctgtagatgagctcattgagaaggccgatggttttgccggagtcttccctgaacacaagtacgagatcgtgaagagactgcaggagaagaagcacatcgttggtatgactggagatggtgtcaacgatgccccggctcttaagaaggctgacatcggtattgctgttgcggatgctactgacgctgcgaggagtgcttccgacattgtccttactgagccaggtcttagcgtaattatcagcgccgtcctcaccagcagagcaatcttccagaggatgaagaactacaccatctatgcagtttccatcacaatccgtatagtgctcggatttatgctcattgcgttgatctggcaatacgatttctctcccttcatggttcttatcattgccattctcaatgacggtactatcatgaccatctctaaggacagagttaagccatctccgttgcccgacagttggaagctgaaggagatctttgctacgggcatcgtgcttggaagctaccttgctctgatgactgtcattttcttctgggctatgcacaagaccgacttcttctcggacaaattcggtgtgaggtcgatcagggacagcgagcatgagatgatgtccgccctgtacctccaagtcagtatcgtgagccaggctctgatcttcgtcacccgttcccgtagctggtccttcgtggagcgccctggtctgctcctggtcaccgcgttcctgctcgctcaacttgttgccaccttcctcgctgtctacgccaactggggcttcgccaggatcaagggtatcggctggggctgggcaggtgtcgtctggctctacagcatcgtcttctacttccccctggacctgctcaagttcttcatccgcttcgtgctcagcggcagggcatgggacaacctcctcgacacgcgaattgccttcacgcggcaccaagaccttcggaaaggagagagggaggcgcagtgggccaccgcgcagaggacgctgcacgggctccagccgccggaggcttcctccaacacgctgttcaacgacaagagcagctaccgcgagctgtccgagatcgccgagcaggccaagagacgagctgagatcgcgaggctgagggagctcaacaccctcaagggccacgtggagtcggtggtcaagctcaagggcctggacatcgaccccatccagcagaactacccggtgtgagagcccctctgctgcgatgtcgacgacaacacctttgctgcccgacgggagccatctgattacagataaaaattttcctagctgtaaagctctctataccaccagatactgccatatgatggtatggttgggtacccgtctttctagggagtttcttttctctctctctctctttttctattgttatgtttttcaatagtggagtgtgcgcgtgttgtaatcgtttttacctgcgttttcctctaactagccggtgatctcgcgggaagcgaggtgaagaaataatgcaactaaaattctctgccaaaaaaaaaaaaaa

SEQ ID NO: 621 - DNA, 6615 bp, Zea mays
  Clone ID: PAT_MRT4577_10903C.1
ggcagagaattttagttgcattatttcttcacctcgcttcccgcgagatcaccggctagttagaggaaaacgcaggtaaaaacgattacaacacgcgcacactccactattgaaaaacataacaataagaaaagagagagagaaaagaaactccctagaaagacgggtacccaaccataccatcatatggcagtatctggtggtatagagagctttacagctaggaaaatttttatctgtaatcagatggctcccgtcgggcagcaaaggtgttgtcgtcgacatcgcagcagaggggctctcacaccgtgtagttctgctggatggtgtcgatgtccaggcccttgagcttgaccaccgactccacgtggcccttgagggtgttgagctccctcagcctcgcgatctcagctcgtctcttggcctgctcggcgatctcggacagctcgcggtagctgctcttgtcgttgaacagcgtgttggaggaagcctccggcggctggagcccgtgcagcgtcctctgcgcggtggcccactgcgcctccctctcttcccgcccgtagtccttcttggtggtgaaggcggtcttgttctcgaggaggttgtcccatgccctgccgctgagcacgaagcggatgaagaacttgagcaggtccagggggaagtagaagacgatgctgtagagccagaccacacctgcccagccccagccgatacccttgatcctggcgaagccccagttggcgtagacagcgaggaaggtggcaacaagttgagcgagcaggaacgcggtgaccaggagcagaccagggcgctccacgaaggaccagctacgggaacgggtgacgaagatcagagcctggctcacgatactgacttggaggtacagggcggacatcatctcatgctcgctgtccctgatcgacctcacaccgaatttgtcctgcgcaatgacatggtgctgagaacaaccagacaggaaaaaaaccctaccgatcgaggagatcgatgcaaagggctagtgggtatttttttaccgagaagaagtcggtcttgtgcatagcccagaagaaaatgacagtcatcagagcaaggtagcttccaagcacgatgcccgtagcaaagatctccttcagcttccaactgtcgggcaacggagatggcttaactctgtccttagagatggtcatgatagtaccgtcattgagaatggcaatgataagaaccatgaagggagagaaatcgtattgccagatcaacgcaatgagcataaatccgagcactatacggattgtgatggaaactgcatagatggtgtagttcttcatcctctggaagatgcatctgctggtgaggacggcgctgataatgacgctaagacctggctcagtaaggacaatatcggaagcactcctcgcagcgtcagtagcatccgcaacagcaataccgatgtcagccttcttaagagccggggcatcgttgacaccatctccagtcataccaacgatgtgcttcttctcctgcagtctcttcacgatctcgtacttgtgttcagggaagactccggcaaaaccatcggccttctcaatgagctcatctacaggaagcgcttcaagcgtagcatccttgttttggccgagcagcgcagaggatggatacatgttggtacccatgccaagcctccttccagtctccttaccaatagcaagctgatcacccgtgatcatcttgacgttaacaccaagaacaagagccttgcgaattgtctcagcgctgtcatgcctaggcggatcaaacaggggcaacagaccaacgaactgccatggtccaccaggggactccttgtttttctcaggtacttcctgtctggcaacagcaagcgaacgaagaccacgctcggcatacttgtcgataatagagtgcaccttccgcctcagatcctccttgcagtggcacaggtcaagaatctgttcaggagcacccttgctgacacggtgccagttgccatcggcatcaatgtacgtcagagccagtcctcttatcaacagggttgaagggcaagaagtggatttcccttataccagccctggcctccttaggatcagcaagcatgccaaccatggcggcatcgatagcgtcctggttctcagtccttgaagcccttgcagccaacagcaacacatggtctttgtcgacgcctttgcagaacacctcgacgaggttcttatcgacgctaagcttgttgagggtgagtgtgccggttttgtcactgcaaagcacgtccataccagccatctcctcaatggcagtcatcctcttagtgatggcaccctgctgtgacagcttgtgcgaaccaatggccatggtaactgaaagcacggtaggcatggcgattgggataccaccgatcaagaggaccaacaggttctcgattccgctgcggtacttccggtgctggattgggaacatgacgatgatctcgacgaggatgccgaccccaatggagcagatgcagaagttaccgattgctgtcagcacctgctggaagtgtccgacctggttggtgctgtccacaagatgagcggccttgccgaagaaggtgtgcactccggtggcaatgaccacggcctcgatctcaccctgcttacaagtggaacccgagaagacttcgtcccctgggcccttggtaaccgggagggattctccagtaagcgcagactggtcaaccttgagtgcatcaccctcgaggagacgagcgtcggcagggacgatatcgccaagcttgatgctgatgatgtcaccaggaaccaagattgcagcctcttgctcgccccatcggccatctctcagaaccttggttttgggagcaaggttggccatgagtgcggcggcggcgtttccggcattgttctcctcaatgaaggagatggtggagttgataaccaagagcacgatgataccgacgaagtcctgccagtccgggggcttgccaccaccgttggcgagtgcaatagccatgatggcagccatctccatgacccacgacagcgggttccacatgaacccaaggaacttgaggatcttgctctccttcttctcctcgagcctgttggggccaaagatctcgagacgctgctggccctcgctggagctcagcccctcgcgggtgcatttcagctgctcgaacaccaccactctctagtctcaccgccccccgtcccgctcattggacgagacgacggacccttcctttctcgcacgggaagagtagcgaggaggcgcggcgcccgtgcggcgtatgcccgtgcctgccgtcgggttccgcctctaggactagggtccgctccagcgccagctagccgtccgccatgggtgggctcgaggagatcaagaacgaagccgtcgatctggagaacatccccatcgaggaggtgttcgagcagctgaaatgcacccgcgaggggctgagctccagcgagggccagcagcgtctcgagatctttggccccaacaggctcgaggagaagaaggagagcaagatcctcaagttccttgggttcatgtggaacccgctgtcatgggtcatggagatggctgccatcatggctattgcactcgccaacggtggtggcaagcccccggactggcaggacttcgtcggtatcatcgtgctcttggttatcaactccaccatctccttcattgaggagaacaatgccggcaacgccgccgccgcactcatggccaaccttgctcccaaaaccaaggttctgagagatggccgatggggcgagcaagaggctgcaatcttggttcctggtgacatcatcagcatcaagcttggcgatatcgtccctgccgacgctcgtctcctcgagggtgatgctctcaaggttgaccagtctgcgcttactggagaatccctcccggttaccaagggcccaggggacgaagtcttctcgggttccacttgtaagcagggtgagatcgaggccgtggtcattgccaccggagtgcacaccttcttcggcaaggccgctcatcttgtggacagcaccaaccaggtcggacacttccagcaggtgctgacagcaatcggtaacttctgcatctgctcgattggggtcggcatcctcgtcgagatcatcgtcatgttcccaatccagcaccgcaagtaccgcagcggaatcgagaacctgttggtcctcttgatcggtggtatcccaatcgccatgcctaccgtgctttcagttaccatggccattggttcgcacaagctgtcacagcagggtgccatcactaagaggatgactgccattgaggagatggctggtatggacgtgctttgcagtgacaaaaccggcacactcaccctcaacaagcttagcgtcgataagaacctcgtcgaggtgttctgcaaaggcgtcgacaaagaccatgtgttgctgttggctgcaagggcttcaaggactgagaaccaggacgccatcgatgctgccatggttggcatgcttgctgatcctaaggaggccagggctggtatcagggaaatccacttcttgcccttcaaccctgttgataagaggactgctctgacgtacattgatgccgatggcaactggcaccgtgtcagcaagggtgctcctgaacagattcttgacctgtgccactgcaaggaggatctgaggcggaaggtgcactctattatcgacaagtatgccgagcgtggtctccgttcgcttgctgttgccagacaggaagtacctgagaaaaacaaggagtcccctggtggaccatggcagttcgttggtctgttgcccctgtttgatccgcctaggcatgacagcgctgagacaattcgcaaggctcttgttcttggtgttaacgtcaagatgatcacgggtgatcagcttgctattggtaaggagactggaaggaggcttggcatgggtaccaacatgtatccttcctctgcgctgctcggccaaaacaaggatgctacgcttgaagcgcttcctgtagatgagctcattgagaaggccgatggttttgccggagtcttccctgaacacaagtacgagatcgtgaagagactgcaggagaagaagcacatcgttggtatgactggagatggtgtcaacgatgccccggctcttaagaaggctgacatcggtattgctgttgcggatgctactgacgctgcgaggagtgcttccgatattgtccttactgagccaggtcttagcgtcattatcagcgccgtcctcaccagcagatgcatcttccagaggatgaagaactacaccatctatgcagtttccatcacaatccgtatagtgcttggatttatgctcattgcgttgatctggcaatacgatttctctcccttcatggttcttatcattgccattctcaatgacggtactatcatgaccatctctaaggacagagttaagccatctccgttgcccgacagttggaagctgaaggagatctttgctacgggcatcgtgcttggaagctaccttgctctgatgactgtcattttcttctgggctatgcacaagaccgacttcttctcggacaaattcggtgtgaggtcgatcagggacagcgagcatgagatgatgtccgccctgtacctccaagtgagtatcgtgagccaggctctgatcttcgtcacccgttcccgtagctggtccttcgtggagcgccctggtctgctcctggtcaccgcgttcctgctcgctcaacttgttgccaccttcctcgctgtctacgccaactggggcttcgccaggatcaagggtatcggctggggctgggcaggtgtggtctggctctacagcatcgtcttctacttccccctggacctgctcaagttcttcatccgcttcgtgctcagcggcagggcatgggacaacctcctcgagaacaagaccgccttcaccaccaagaaggactacgggcgggaagagagggaggcgcagtgggccaccgcgcagaggacgctgcacgggctccagccgccggaggcttcctccaacacgctgttcaacgacaagagcagctaccgcgagctgtccgagatcgccgagcaggccaagagacgagctgagatcgcgaggctgagggagctcaacaccctcaagggccacgtggagtcggtggtcaagctcaagggcctggacatcgacaccatccagcagaactacacggtgtgagagcccctctgctgcgatgtcgacgacaacacctttgctgcccgacgggagccatctgattacagataaaaattttcctagctgtaaagctctctataccaccagatactgccatatgatggtatggttgggtacccgtctttctagggagtttcttttctctctctcttttttcttattgttatgtttttcaatagtggagtgtgcgcgtgttgtaatcgtttttacctgcgttttcctctaactagccggtgatctcgcgggaagcgaggtgaagaaataatgcaactaaaattctctgccaaaagcattgttccttctcacttggttcatgcagagtttgcagacaggttctgcaatacaatgccgtctgaatgtcgcgttttttttt

SEQ ID NO: 622 - DNA, 219 bp, Zea mays
  Clone ID: PAT_MRT4577_109104C.1
cgtcacaacaccctaaagtgagtcgtattaaagcaactgggtacatacactgcgcacttcgtcatgtacttcccaatatgccactggaacaaaggagacaacttccagtcgacctgcctgaaggacatctcaaagctctaagcccgcaaaccttgggtcaaggggtagacatgcatctcggcttggctattgatagtccagaggcgacattagcagtca

SEQ ID NO: 623 - DNA, 1328 bp, Zea mays
  Clone ID: PAT_MRT4577_109142C.1
atctcgcccacacgaactcgagacctcgcccgcccaaatacaaaagcctcagatctcagtgaccagcgccgccgcttcgttcgtgtcgaatagagaagagaggaaatggcggcgagcgagggcgtgctcctggggatgggcaaccccctcctcgacatctccgccgttgtcgatgacgccttcctggcaaagtatgacatcaagctgaacaatgccattctcgctgaggagaagcactcgcctatgtatgatgagttggctagcaacagcaatgttgaatatattgctggaggagccacccagaactctatcagggttgcccaatggatgcttcaaactcctggtgcaacaagttacatgggatgcattgggaaggacaagtttggtgaggagatgaagaaaaatgctcaagctgcaggagttactgctcattactatgaggatgagactgctcctactggcacatgtgctgtatgtgttgttggtggcgaaaggtcattgattgcaaatctgtcggcggcaaactgttacaaatctgagcatctcaagagaccagagaactgggcactagttgagaaggcaaaatacatctacattgctggatttttcctcacggtgtcacctgattctatccagttagttgctgagcatgctgcggcaaataacaaggtgttcctgatgaacctctctgctcccttcatctgtgagtttttctatgatgcccaagagaaggtcctcccgtatgctgacttcatcttcggcaatgaaaccgaggcaaaaatcttcgccaaagttcgaggatgggagactgagaatgtcgaggagattgctttgaagatctctcagcttcctttggcttcaggcaagcaaaagaggattgctgtgattactcaaggtgctgatccagtggttgttgctgaggacgggaaggtgaaaacgttccctgtgatcctattgcccaaggagaagcttgttgacaccaacggcgcaggtgacgctttcgtcggaggctttctctctcggctggtccagggcaagagcatcgaggactgcgtgacggctggttgctacgccgccaatgttgtcatccagcgcccaggctgtacctacccagagaagcctgacttcaactagtgcaatactcaggcacgttacgagcggttcggcgtgtacactccctgtatcctttccggtccggccaattttttgtacgaggcatggtttgccatcattatactgttagcttcggcgatgcttgcaatgcaacgagaatgcgttggaaccatatatgcaatgctacccgatcgattcggcaaaaaaaaaaaaaa

SEQ ID NO: 624 - DNA, 1790 bp, Zea mays
  Clone ID: PAT_MRT4577_109144C.1
cgggtcgagctcgagccctcgcccgctcagtcacaaagcctcagatctcagtcgcctgcgccgccgcttcgttcgtgtggaggggagaagacaggaaatggcggcgactgagggcgtgctcttggggatgggcaaccccctcctcgacatctccgccgtcgtcgatgacgccttcctgacaaagtatgacatcaagctgaacaatgctattctcgctgaggagaagcacttgcctatgtatgacgagttggctagcaagagcaatgttgaatatattgccggaggagccacccagaactctatcagggttgcccaatggatgcttcaaactcctggtgcaacaagttacatgggatgcattggaaaggacaagtttggtgaggaaatgaagaaaaacgctcaagctgcaggagttactgctcattactacgaggatgagactgctcctactggcacatgtgctgtatgtgttgttggtggtgaaaggtcattgattgcaaatctgtcagcggcaaactgttacaaatctgagcatctaaagagaccagagaactgggcactagttgaaaaggcaaaatacatctacattgctggatttttccttacagtgtcgcctgattctatccagctagttgctgagcatgctgcagcaaataacaaggtgttcctgatgaacctctctgctcccttcatctgtgagttcttccgtgatgcccaagagaaggtcctcccgtatgctgactacatcttcggcaacgaaactgaggcaaagatctttgccaaagtcagaggatgggagactgagaatattgaggagattgctttgaagatctctcaacttcctttggcttcaggcaagcaaaagaggattgctgtgattactcaaggtgctgatccagtggttgttgctgaggatgggaaggtatgctttttatcagtttgatgctaaactaatattacttgacataggctgagaaggtagattcaaccaaatatttttttgcactatttttttgtcaaatatgcatgcttttgcctgttggtcatgcaacaaaacataataaatttcttctgtacatgttttcttacaatctttttccacccctttctgtaacaaacactctttgctcttatggttccgcttgggatctttgatgtccctttggaaactaagttgattgcacaatggttgtttgcttgtccaaggattttgcatctgtagttttaacttttgtgcttgaatgaagaactgatatctgacatcttaagtgtttttgtagaggctgttgagtatgatgtactaattattatgctgataataggtgaaaacgttccctgtgatcctattgcccaaggagaagcttgttgacaccaacggcgcaggtgatgctttcgttggaggcttcctctcacagttggttctaggcaagggcattgaagactgcgtgagggcaggttgctatgccgcaaacgttatcatccagcgcccgggctgtacttacccggagaagcctgacttcaactagtgcaaaactgaggcacgtcatgagagggactgttataggcacacttaattgttaaccagtgcgtggttcggtgtctacacaccctgtattcttccgaggcttctctcctgatccggccaatatttttgccgtgaaatttgtgttctgcaactatggacgtctcctttgttgctgtataaggcatgatttgccatcattctgttgcttcggtgatgcttgcaatgcaatgagaatgtgttggaaaaaaaaaaaaaaaaagcggcc

SEQ ID NO: 625 - DNA, 1438 bp, Zea mays
  Clone ID: PAT_MRT4577_109145C.1
attgggtccctcgaggccggccgggatctcgcccacgcgaactcgagacctcgcccgcccaaatacgaaagcctcagatctcagtgactactgactagcgccgtcgcttcgttcgtgtcgaggggagaagagaggaaatggcggcgagcgagggcgtgctcctggggatgggcaaccccctcctcgacatctccgccgttgtcgatgacgccttcctggcaaagtatgacatcaagctgaacaatgccattctcgctgaggagaagcacttgcctatgtatgatgagttggctagcaacagcaatgttgaatatattgctggaggagccacccagaactctatcagggttgcccaatggatgcttcaaactcctggtgcaacaagttacatgggatgcattgggaaggacaagtttggtgaggagatgaagaaaaatgctcaagctgcaggagttactgctcattactatgaggatgagactgctcctactggcacatgtgctgtatgtgttgttggtggcgaaaggtcattgattgcaaatctgtcggcggcaaactgttacaaatctgagcatctcaagagaccagagaactgggcactagttgagaaggcaaaatacatctacattgctggatttttcctcacggtgtcacctgattctatccagttagttgctgagcatgctgcggcaaataacaaggtgttcctgatgaacctctctgctcccttcatctgtgagtttttctatgatgcccaagagaaggtcctcccgtatgctgacttcatcttcggcaatgaaaccgaggcaaaaatcttcgccaaagttcgaggatgggagactgagaatgtcgaggagattgctttgaagatctctcagcttcctttggcttcaggcaagcaaaagaggactgctgtgattactcaaggtgctgatccagtggttgttgctgaggacgggaaggtgaaaacgttccctgtgatcctattgcccaaggagaagcttgttgacaccaacggcgcaggtgacgctttcgtcggaggctttctctctcggctggtccagggcaagagcatcgaggactgcgtgacggctggttgctacgctgccaatgttatcatccagcgcccaggctgtacctacccagagaagcctgacttcaactagtgcaatactcaggcaccgaggcacgttacgagcggttcggcgtgtacactcccctgtatcctttccggtccggccaattttttgtcgccgtgatatttgttcagcaactatggacgacgtcgcctctgttctgtacgaggcatggtttgccatcattattctgttagcttcggcgatgcttgcaatgcgacgagaatgcgttggaaccatatatgcaatgcaaagttagcagctcagtctacccgatcgattcggcagctcgctacttccct

SEQ ID NO: 626 - DNA, 1519 bp, Zea mays
  Clone ID: PAT_MRT4577_109147C.1
ccaaaggaggcggccggccgtgcccacatgtcacggaaatcatgtagcatcaccgtgcgtacgtccaccaaccaccgtcgaacacgaggagggtgacaggtgggccatccgaggtttgggcgagccaaacaaaaaccctcttcacaccggtcaccacttcatctcgcccacacgaactcgagacctcgcccgcccaaatacgaaagcctcagatctcagtgaccagcgccgccgcttcgttcgtgtcgaggagagaagagaggaaatggcggcgagcgagggcgtgctcctggggatgggcaaccccctcctcgacatctccgccgttgtcgatgacgccttcctggcaaagtatgacatcaagctgaacaatgccattctcgctgaggagaagcacttgcctatgtatgatgagttggctagcaacagcaatgttgaatatattgctggaggagccacccagaactctatcagggttgcccaatggatgcttcaaactcctggtgcaacaagttacatgggatgcattgggaaggacaagtttggtgaggagatgaagaaaaatgctcaagctgcaggagttactgctcattactatgaggatgagactgctcctactggcacatgtgctgtatgtgttgttggtggcgagaggtcattgattgcaaatctgtcggcggcaaactgttacaaatctgagcatctcaagagaccagagaactgggcactagttgagaaggcaaaatacatctacattgctggatttttcctcacggtgtcacctgattctatccagttagttgctgagcatgctgcggcaaataacaaggtgttcctgatgaacctctctgctcccttcatctgtgagtttttctgtgatgcccaagagaaggtcctcccgtatgctgacttcatcttcggcaatgaaaccgaggcaaaaatcttcgccaaagttcgaggatgggagacagagaatgtcgaggagattgctttgaagatctctcagcttcctttggcttcaggcaagcaaaagaggactgctgtgattactcaaggcgctgatccagtggttgttgctgaggatgggaaggtgaaaacgttccctgtgatcctattgcccaaggagaagcttgttgacaccaacggcgcaggtgacgctttcgtcggaggctttctctctcggctggtccagggcaagagcatcgaggactgcgtgacggctggttgctacgccgccaatgtcatcatccagcgcccaggctgtacctacccagagaagcctgacttcaactagtgcaataatactcaggcacgttacgagcggttcggcgtgtacactcccctgtatcctttccggtccggccaattttttgtcgccgtgatatttgttcagcaactatggacgacgtcgcctctgttctgtacgaggcatggtttgccatcattattctgttagcttcggcgatgcttgcaatgcgacgagaatgcgttggaaccatatatgcaatgcaaagttagc

SEQ ID NO: 627 - DNA, 1438 bp, Zea mays
  Clone ID: PAT_MRT4577_109260C.1
cctagggaacgcgagaccggccgtcggcgagagaaggactcgaatggagtgcgcaagggagttgcgggttcgctccacgtttacggcggcggccatggcgtccaagaagcaggtggggcctggaggcgcggttcccgctcaggaacagatgaacggcggcgatgccgccagactggtcaggaagccaatggatacatttccacagccagcggcggcaagaggccgtagggcacttgtcgacgttggcaatcttatgaatggccggccttctcttgtgaaccatcagaagcaagcggttgcggcagcggcaaccagtcacaaaccactcaacgttggcaacaagaagccacttgttcctcaggcagcagcaagaggccttcgaccccttgccgacgttacgaatcttatgatcaatgaccgtgctgctcctgcaaatcgtcagaagcctctggatgctgtgtttaacaggaacgggaaggcagtaaagctgaaggaatgcaaggtgaagcctgaagtcattgtgagcattccagattccgagaaggagaagaaaagcaaattccctggaggtcagaaagtctgtaggagggtgccaacactttttgacaatttgacaaaatgcagcagggcctctgatgggattaccaccccgaagaagaagaatccatatgacattgatgcacctgattcttgcaatgagctggcagtcgttgaatatgttgaggacatttacagattctacaagagcactgagggcacctgccttcctctcagcagctacatgagctcacaggctgaaatcagtgagagaatgagagctatccttatcgactggattatcgagtacttatctatggagagtgtaccaagaaaggagctacagctcgtcggcataagtgccatgctgatagcaagcaagtacgaagagatatgggctccactggttaaggacttgatgtgcctctgtgacaacgcatttaccagagaccagattctgaccaaggaaaaggccatcctggacatgctccattggaacctgacggttccaacaatgtacatgttcattgttaggtacctgaaagccgcaatgtgtgacgcagagcttgagaacatggcattcttctactccgagctggcattggtccagtacgcgatgctggtttaccctccatcggtgaccgcagccgctgccgtctatgctgccaggtctacacttgggatgaatccaccgtggactgatattctggaacatcacactggcctagctgagccacagttactggactgcgctaggcggctgatcagcttccatgccctggctccggaaagcaagcagaaggcggtgtacaggaagtactccaagcccaagctcggctccgtcgcgcttcaatcccctgacaagaagctgttgtcaggttgaggctcgttgctgctcatt

SEQ ID NO: 628 - DNA, 1720 bp, Zea mays
  Clone ID: PAT_MRT4577_109262C.1
tacctcgtgtccgacgagccctagggaacgcgagaccggccgtcggcgagagaaggactcgaatggagtgcgcaagggagttgcgggttcgctccacgtttacggcggcggccatggcgtccaagaagcaggtggggcctggaggcgcggttcccgctcaggaacagatgaacggcggcgatgccgccagactggtcaggaagccaatggatacatttccacagccagcggcggcaagaggccgtagggcacttgtcgacgttggcaatcttatgaatggccggccttctcttgtgaaccatcagaagcaagcggttgcggcagcggcaaccagtcataaaccactcaacgtcggcaacaagaagccacttgttcctcaggcagcagcaagaggcctgcgaccccttgccgacgttacgaatcttatgatcaaagaccgtgctgctcctgcaaatcgtcagaagcctgtggatgctgtgtttaacaggaacgggaaggcagtaaagctgaaggaatgcaaggtgaagcctgaagtcattgtgatcattccagattccgagaaggagaagaaaggcaaattccctggaggtcagagagtctgtaggagggtgccaacactttttgacaatttgacaaaatgcagcaggtatgaacacaagcaaaattctaaggcctctgatgggattaccaccccgaagaagaagaatccatatgacattgatgcacctgattcttgcaatgagctggcagtcgttgaatatgttgaggacatttacagattctacaagagcactgagggcacctgccttcctctcagcagctacatgagctcacaggctgaaatcagtgagagaatgagagctatccttatcgactggattatcgaggtacagtacaggcttactctaatgccagagacactttacttgaccgtctacatcatcgaccagtacttatctatggagagtgtaccaagaaaggagctacagctcgtcggcataagtgccatgctgatagcaagcaagtacgaagagatatgggctccactggttaaggacttgatgtgcctctgtgacaacgcatttaccagagaccagattctgaccaaggaaaaggccatcctggacatgctccattggaacctgacggttccaacaatgtacatgttcattgttaggtacctgaaagccgcaatgtgtgacgcagagcttgagaacatgacattcttctactccgagctggcattggtccagtacgcgatgctggtttaccctccatcggtgaccgcagccgctgccgtctatgctgccaggtctacacttgggatgaatccaccgtggactgatattctggaacatcacactggcctagctgagccacagttactggactgcgctaggcggctgatcagcttccatgccctggctccggaaagcaagcaaaaggcggtgtacaggaagtactccaagcccaagctcggctccgtcgcgcttcaatcccctgacaagaagctgttgtcaggttgaggctcgctgctgctcattgtattgtatatcatcgcttcgatggtcccatttgtttgggtcgtgtgctcttatgcttttctactgaagcagagcatgtgttggttagtcagtttgcttaaacgactactgaagcagagccttgtatgtgtgttgggagaatgtgatatgtgatgtcaagctccaactttttcccc

SEQ ID NO: 629 - DNA, 317 bp, Zea mays
  Clone ID: PAT_MRT4577_109267C.1
gcagtttcgacgtcaagctacccgtaccgtggagcttgcaacgccttacgcctccacacttaacagtgatggtcgtcatgggcaaggagcagcaacacgaggaggaggtggtgtaagggaaggtctttcaagaagaagtgcaagtcgtccaatagacggtggtgccggtgccatctgaggaggacaaggaggccgaggcggtgctcatgcacaagatctctaggctggtcgtagtcatagccaaactgtcattcctgagcccgtggccggaggtgaacgcgctctttatcgagcttgtgacggcgtgcatcccgcgc

SEQ ID NO: 630 - DNA, 323 bp, Zea mays
  Clone ID: PAT_MRT4577_109273C.1
cccacgcgtccgcccacgcttccgcctatgttttcgaaaaaaaaaaaaaaaaaaaaaaaaagaaaatataaaaaaaaaaaaaaagaaaaaaaaaaaaaaaaaaaaaaaataaaaaaaaaaaaaaataaaaaaaaaaaaaaaaaaagggtcggccttttaaagaatcaaaattaacttacccttcattgcaattaaatagtttttttattgtgccacctaaataaaattaattggccgttttttaaaaacttctgaactggaaaaaccttggcttaaccaaattaaatccctttgaagaaaatccccttttcgcaagttggctt

SEQ ID NO: 631 - DNA, 605 bp, Zea mays
  Clone ID: PAT_MRT4577_109470C.1
tactccatctggtgtcttcgttatacttatgcttatcggctacataatatatgctgcgtggaatcgctatgatagcgttacggaagattgccggaaaatgaaagcactgaaaaaacgggcggaagccgctgatgttgctaagtctcagttccttgcaactgtttctcatgagatcaggacacccatgaacggtgtgctaggaatgcttgatatgctattagacacagagctgaagtcaacccagagagattttgcgcaaactgcccaaatctgcggaaaggcattgatatccctaattaatgaagtgcttgacagggccaaaattgaagctggcaagttggagctagagtctgtaccgtttgaccttaggtccatccttgatgaagtcgtctctctattttcttcgaaatcaagagaaaagggaattgagcttgcggtatatgtctctgaaagagttcctgaaatcctgctgggcgatcctggaaggttccgtcagataattacaaacttagttgggaactcaattaagttcacggaaaggggacacatttttgtgcaagttcacctggcagaccactccaatctagcaactgaaccaaaagttg

SEQ ID NO: 632 - DNA, 454 bp, Zea mays
  Clone ID: PAT_MRT4577_109586C.1
acgcatctagcaacatataaagcacaatagtgtttcaacattggcagccaaaatattctgcctcctcgtgctggttgtactttcaccacgtgctgctactgctaccattctcccgcaatgatcgcaagcttctatagcttacattcttcaccagtacctctcaccagaggtgtattccctatgtgaaaacccaactctttaaccctacaggatccaacacgcaatcacagctgacatcttacctttatcacactagcttctccaacaattataaaacctattacatcacatacctttgctgcatttattggcacaaaacatcaggtcacaacaactacaacaacttgtgctaacaaaccttactgtctactctcaataacaataaattatttcattcaaccaaataacttaatttaactctacttcttatttcaacaacaacacctaccattca

SEQ ID NO: 633 - DNA, 225 bp, Zea mays
  unsure (1)..(225): unsure at all n locations
  Clone ID: PAT_MRT4577_10969C.1
ccaccccnggggcacccacccgncccctggtggtcttccatgcctcccatcggtggcggcgacgccctccccgacggccagntcgggtggatcgacagagaacgaccagttgcagcaggtctccgtccccgcgctcgccgacggaaataaggtcatcctcttcggcgtccccggcgccttcaccccgaaatgtagaaaccagtatgtgccaggctccatcacaca

SEQ ID NO: 634 - DNA, 1716 bp, Zea mays
  Clone ID: PAT_MRT4577_110073C.1
tttaaaacccccccctttaccacccctttttaccattttttttacccactttaacataaaaagttttcccatttaaaaaccaccctttcaacacccacccatttaaatcaaataactccctacctctcccccccctaattataacattaaccttcccactcataattttttcccccttttaccccatattaatttcttccataaaacaattatccccatttttttcccaaattctaatataaccctccacccaaaaaaatttttttccttcacctacccatctaaaattccctggcctaccccccaaccctctctttttatatttcaagcgcccccccttttttttttttttttttttcctggtacccccctccaggtacccggtcccggtcccggggggtggatgacgaggacggcctgagctttgagacagcatgcatgcatggctccgcgacccccacgcgcctatatccatccatcatcctattcctatcccgccacatactccaccacctattattccgctcccgacgcccagaattcacgagaacgcacccgcccgcctcctccttccgtccccatccagatgatgcttagggtttccgcgtctccggccgccgcggtggccaaccatctctctggtggggccgcggcgaccacggctcctgccagggtgacggcgcagcgcagcggcgtctcgctgtccgccgccgccgccgccggcaaggggaaggaggtgctcagcggggtggtgttccagcccttcgaggagatcaagggggagctcgccctcgtgccccagtcccccgacaggtcgctcgcgcgccacaagttcgtcgacgactgcgaggcagccatcaacgagcagatcaatgtggagtacaacgcctcgtatgcgtaccactccctcttcgcctacttcgaccgcgacaacgtggccctcaaaggatttgccaagttcttcaaggaatccagcgacgaggagagggagcacgctgaaaagctcatggagtatcagaacaaacgcggaggcagggtgaggctccagtcgattgtggcgcctttgaccgagtttgaccaccccgagaaaggcgatgctctgtacgctatggagctgactctggctctggaaaagctggttaatgagaagctgcacagcctgcatggtgtggcaacaaggtgcaatgatcctcagctgatagacttcatcgagagtgagttcctcgaggagcaggtggaagccataaataaggtctccaagtatgtcgcgcagctgaggagagtgggcaacaaggggcacggggtgtggcacttcgatcagatgctgcttgaggaagaggcctaaaaagaagaacggacagatgaatgaaggaaacaagtgtgtaatgttgatcaggcggaggaataataatgggtcaactgacaactctgggtcggtggatttgtagttggtttgggttttttagttgtagaacggtgttgccctcctagagagggatgaacacattatgcatgcgatgtgtcagttcggtcggtgctatgctcgttgggatttgattgtcggaaataaactccctaatctatgtcttggtgatgaagttgagaaagccctgcgggtgtaggtggatttgtaaaggtttttcttcagttggttaggttcgctgttgcctacctcatttgcccctaatcatcatccccgtaatttttttataatat

SEQ ID NO: 635 - DNA, 1738 bp, Zea mays
  Clone ID: PAT_MRT4577_110074C.1
ccacccctcgaggctcgccccgagaccacgagaacgcacattggctacctcgaggccggccgggagccgcacaatccatccatccatctattctccagtccacccattccattccactaccgacgcccagaattcacgcgaacgcacacgcacccacacgacacatccagatgatgcttagggtttccccgtccccggccgccgcggtgccaacccagctctccggtgcgcccgcgacccctgctcccgtcgtcagggtggcggcgccgcgcggcgtcgcctcgccgtccgctggcgccgcgtgcagggccgcgggcaaggggaaggaggtgctcagcggggtcgtgttccagcccttcgaggagatcaagggggagctcgccctcgtgccccagtccccagacaagtcgctcgcgcgccacaagttcgtcgatgactgcgaggccgccctcaacgagcagatcaacgtggagtacaacgcctcgtatgcataccactccctcttcgcctacttcgaccgcgacaacgtggctctcaaaggatttgccaagttcttcaaggaatccagcgacgaggagagggagcacgctgaaaagctcatggagtaccagaacaaacgtggaggcagggtgaggctccaatcgattgtgacgcctttaaccgagtttgaccaccctgagaaaggagatgctctgtacgctatggagctggctctggccctggaaaagctggtcaatgaaaagctgcacaacctgcatggtgtggcaacaaggtgcaatgatcctcagctgacagacttcatcgagagtgagttcctcgaggagcaggtggaagccataaacaagatctccaagtatgtcgcccagctgaggagagtgggcaaggggcacggggtgtggcacttcgatcagatgctgcttgaggaagaggcctaaaaagaagaacggacagatgaatgaaggaaacaagtgtgtaatgttgatcaggcggaggaataatgggtcaactgacaactctgggtcggtggatttgtagttggtttgggttttttagttgtagaacggtgttgcccccctcctagagagggatgaacacattatgcatgcgatgtgtcagttcggtcggtgctatgctcgttgggatttgattgtcggaaataaaacatgggtgatgaatgtgtaccctccctaatctatgtcttggtgatgaagttgagaaagccctgcgggtgtaggtggatttgtagagttttttcttcagttggttaggttcgctgttgcctacctcatttgcccctcatcatcgccgtaatttatttatttataatataaaagatccagcttttcccccactaaaaaaaaaaaaaaaaaaactcgagactagctcattttcttgcttcttgtttgccggttctgacctctggtttaggataggatctgaatgcccaagtgcctcagaggagagtctgcgtgtgtggtactggtagtctggtaatggtagagcaaggaaagtaacaaaagctcggggttgtccagaagtggaatttattctgcgtctgaacatagttgtatgactgtatgagttgaagctttcagtatgtgcatcgatggatgatgatagattcaaagactggtagcaattctacaaatttaggacgacttatatagaatagaaggctagctattgttagtaaatgtttggttatgtatcaagctatgttgtagttatgttcatgctt

SEQ ID NO: 636 - DNA, 457 bp, Zea mays
  Clone ID: PAT_MRT4577_110079C.1
ggttgtgtgtttttttttttttttttttttttttttttttttttttttttttttttttttttttttttttttacttaatctaacattacccaaactggcattatgacaatggtagccgatgatgaccacaagggaaacagtaatttaggggcaggggggggcctttggtgggtgggaagggggcccccccacaaaccccccagaccagggggagaaccacccgccaggggggccaacggggggcgctttccgtttttgcccgacaaaaggaaaaataaaacatcacgagggggggggaaactgaataattctaggccatgggtataggccccttttttgggatccccacggggccttgggttgccgctcccttgttgggtgaagcacgggccattggctcggggggctccatcacttggcatcatctttatcctccccactaccctctttattatcc

SEQ ID NO: 637 - DNA, 322 bp, Zea mays
  Clone ID: PAT_MRT4577_110208C.1
gggttggcttctcctctcgctgcggttcgggatcgagctcgagaggttctccggggttaggattcgtgggtgagcggatcgagaggcggcgtcgggtgttgagtaccgctgcttcgtctgcggactcacctgagacacggacgaccactccctcgaaaacaccttgatcacctacggggaggttctagagtccaaaatcattctcgatcgaaagacgcaaaggtccctcgacttcggcttcggtaccttctgcacaaaggaggagatgcggaactccatcaaggacataaacggcaaggagctgaacggtcgtaacataccg

SEQ ID NO: 638 - DNA, 2609 bp, Zea mays
  Clone ID: PAT_MRT4577_110225C.1
aattcggcacgaggcctcccttactgtcgaggatagattcacggctagtgcgcttagccactgtaggcggaagcggggaaggccggacacgccgcccgccccaccccgtatgtacattgcggggctctaagcaattagtaagtcaaatgcgcctacttacgactcagagttggtcaccagaagctattaaccattctacaccatgcggacgtgtaggtcttatttggcgctgcggcttatggaaaaccaggggtagtagacatgtggaaccacaatcgtgtggcaacatcatcggtctcggccctgcgtgatgctagagccaatcgtacgaggtggggtggcgattactctccaacggggctgtcacacctgcaatgtgggctagcatcactcgttttggatttaactttatgctaacagaatctaggtgtcattaagctagattaagctcgctgcttgacttagtagtgtaaatctgtaaagaaaattacctggtttgggtttagtctctataaaagaaatggaacagaggaatgttctggcattgggtgaacatgttctaaaagctactgtttggaagcggaagcataagactgctatggagcaccctgaaggcaatgatgtgatggtgttctctcagcatgatcaaagaaagcaccctgtgatatttgacgacagagctaaatgtaagaagtctaaattaatttcctgtgggagtggagttatattggagtcatattggaactttatagaacaagtgggctgcctgtgcgcgtgcttttctaccaacatggtgactggagtgattttccagaggatgttgtaaatctagcacaacaggacttccagttgaagaagccaattacaactgctgtgttccagaacaagcacatcctgttggacttcattcacatgatttgcatagattatgagatgaccatagacaaaccactagcatgggttgatgataatggcaaacgcttctttccagatttatctgctgggctctacacatctaaaccatctcagcatgagaatggtgaagctgatgagtgtgatggaacgcctacaagtgtagctgaaagttctagttcggtatctgttggtgaagtagtttctcatggtaagaggatcaatgatattgcagaggacaacatgagagcacataacatattgtatgaagctgttggtgaaaatatttcaggtccttcattccatttgaatgaatattctagtggaaccatacaagctactggcaagccaaacgattgtcgacgtattgattcagctgtgcggaatttgttgctcaaaggattaggtcagccgtttagtgaggaagatattattggtatctatagaacaccactgctagatcagcgagggcaagttcgttgtggtctcttccagaaggagatcgaagagaccaggagtcgtcgggggaatgcaaatgtacgttatgcttggcttccttgctcaagatataccatggagcagatggcaatgcggggtgctctggaaatcgcgaagcctcataaggggtccatttgtggtgttgggacttgtcttgctcctgcaaactgtacaaattcatgtgccagatattctgattttcatgaagatggcatcatcagaatgatgttgtgccgtgtaataatgggtaatgttgaggttgttttgcctggatcaaagcaatttcagccatccaatggaagttttgataatggtgtggatgatcttcaaaatccacagaattacatcgtatgggatgctaatgtgcataaacacatatatgctgaatatgctgttattgtccaagcacctctcgtgaccaatgaatgttcgggcttgaaggatagcgtgcccaacatatctgagatcataagttctggttctcgagacaatctaaccaaggaggataggttcgcgccttgtggtgtcgaacaagaagcacctaggctggggcgtgctccaagggccccctcctcaccatggatgcccttttcgatgctttttgctgctatttccacgaaagtgcctcgttcggacatggagttggtcatcagatactatgaagaattcaagaggaagaggatgagccggagcgacctggtggtacggatgaggcaaatagtcggtgataagatattggtttctacaataatgaggcttcaccaccagaagaagcccccatcgatggcagcagcagcagctgggctagcaagagcactcgcaaggggggaagagggagggggagtagccgagtaagattagtttaagccgccttgtcttttgagaaatttatggagcacatatgctttgtcgacatggccagacccaaggtgtcaaaagggagggagatgagctgagcaactgttgtagtgtagtctcaaactcaaagcgtttaggtcttgacatttgacaaactaaaactcagaaacattatcatgagtagtgttttttttttcgtttctctttcctggatttaactattgttattgctatttcgtggatatctgggcactgaaggccgtgctattgttggttaatgatggtatgattaagggtgcgcttgccattttaaagaaaaaaaaaaaaaaaaaaggccccta

SEQ ID NO: 639 - DNA, 1728 bp, Zea mays
  Clone ID: PAT_MRT4577_110243C.1
atggcggcgccgtcggcggccacgcgcaggaaactgcagcgcaagttccgcctgcgaggcttcaccctcaaggtggacgccctcgaggaggccgccgccttcctcgaccgcttccccgacgccgaggacgacgcgctcgatctcctcctcgacgagctcgacaaggaaccgctgcagtcgtcgatactggaccgggacgcggtcaggcgcgtggtggcgctgcttgtcgaggccgaggaggcgctcgatgtggcgtcgccagcggccacaagcgcaaggtctgcgctgcgggtggtggacgcgttcctcgtgccgcggttccactacgatccaatcaagaaagtattttacgagtatgtgaacgctgactcttctttgtggatctgggaaattctccacggggacttgagtattggttcgttctttttaggcttctcaattgaaccggggcacacaggcagattagctgtccatggagaagctggagataaagcttccctttatagggataggtatcaagtgctgctgcagagactgtctcgtgataaatatttctctaagccggcttttgacacagttgcgaccgaacactgtagttgcgaggtaaatacatgtggatttcctcccctggaggacagagaagcgtcagtctcattgctcatgggttttgatttctttgggggaggtgtaataccaactgaagaaacactaaggttatcatcactggaaaaaaaggctgtgaatgatatgtttgtcattctttcggatgtgtggctggacaatcctgagtatgagataacccttagctatgtacctccacacagatttcagttcggaaagcttggcgagatgattgcagctcgatctagattaaaggaacatagtcgtttcttattcattcctggacctgatgatgcaggtccttctaaagccctcccaagatgtgcacttccaaaatatctaattgaagaacttcagaagcacataccaaattcaatcttcgtaagcaacccctgcagctatgctctttgttattttgagatctcattgcacaatcacatgatgtacaatggcattggggtgaagttttacacacaagaaattgtgtttttccggcaagatctcctttacaggatgcggcggtcatgtctcattccaccaacaacggaagaaacaagtgacccttttgaacacattgtattgggtgacaaaagcgagcagaaagccttcaaatatactgggatcacttgctttaatccaggttcgtttgcgaatgacagcaccttcgcagcatatcgtccttgcaccaaagaggttgagctttctgcgttggaaggctaacataaagggagaataaactgaagttctccaatttgatgaagtgtaaagtcttcgacaaattaaagaactgccacttccacccaaggaaccgtgaaaatagcatggctttcatgacgatgtggtgtttttgtgaagagaactgatgctgatatctcatcataggctcagcaaagcagtaggagcagcccattggtgtttgtgcagcatctctagctgtttgtaacaatctttaatactgcacgttagaccagactattttacttgtactgtttagtttttcattgaatcatggtaacaactaacaagattactttttgacagtgctcataactgctgtatcttcatattttgatcacccccctttccaattgttatatttggtagtct

SEQ ID NO: 640 - DNA, 1623 bp, Zea mays
  Clone ID: PAT_MRT4577_110317C.1
tatgggagccgcggtgccggccgggacagccaccacagcccagacccctcgcctcggcctcttttaaatatcgcgcatcccggcgccgcaaatggctcacgcggcgctgctccattgctcccagtcctccaggagcctcgcagcctgccgccgcggcagccactaccgcgccccttcgcacgtcccgcgccactcccgccgtcgccgacgcgccgtcgtcagcctgcgtccgatggcctcgtcgacggctcaggcccccgcgacggcgccgccgggtctgaaggagggcatcgcggggctgtacgacgagtcgtcggggctgtgggagaacatctggggcgaccacatgcaccacggcttctacgactcgagcgaggccgcctccatggccgatcaccgccgcgcccagatccgcatgatcgaggaggcgctcgccttcgccggtgtcccagcctcagatgatccagagaagacaccaaaaacaatagtcgatgtcggatgtggcattggtggtagctcaaggtacttggcgaagaaatacggagcgcagtgcactgggatcacgttgagccctgttcaagccgagagaggaaatgctctcgctgcagcgcaggggttgtcggatcaggttactctgcaagttgctgatgctctggagcaaccgtttcctgacgggcagttcgatctggtgtggtccatggagagtggcgagcacatgccggacaagagaaagtttgttagtgagctagcacgcgtggcggctcctggagggacaataatcatcgtgacatggtgccataggaacctggatccatccgaaacctcgctaaagcccgatgaactgagcctcctgaggaggatatgcgacgcgtactacctcccggactggtgctcaccttcagactatgtgaacattgccaagtcactgtctctcgaggatatcaagacagctgactggtcggagaacgtggccccgttttggcccgccgtgataaaatcagcgctaacatggaagggcttcacctctctgctgacgaccggatggaagacgatcagaggcgcgatggtgatgccgctaatgatccagggctacaagaaggggctcatcaaattcaccatcatcacctgtcgcaagcctggagccgcgtaggaggaggccaaggagcacaagttactagcacaggcacaggagtgccaagtgcaataatgtagatccgtggcaccatcgccgtctactcatctatactgcaccaaaatcaacattctcctaggacatgttaaataattttctgccactcgtcgagatatttcaaattcactgttccacaaaaaaaaaaaaaaaacggccgactagtgagcttccgggcctcccctacctttcctttccatcccggagtcgctttcttcacacaagcatttgtacgtccttgtgtgctgggtctatgagtacttgggccaaagtctgggcacgtgcccaacaggcatccatatatgggctccgccacttcaccccacccgtttgtagatccttgtttcgagtttcagggtagagtattatttcaccccttgtttggccgacacgtcataagtggataagcttctacactttttctgctgttcccc

SEQ ID NO: 641 - DNA, 398 bp, Zea mays
  unsure (1)..(398): unsure at all n locations
  Clone ID: PAT_MRT4577_110361C.1
tgctggcttcggctagagccattatcaagtcctnctcgggttagggttccttagggttctgtggaggggcgatggcggcggctgatgtgaagcaccgtagcttcatcagcggacttgcctgagccaccagcaacgagtcgctggagaatgccttcttcttttacgganagatgctcgactcctaggtcatcaccgaccgatagacggggaggtcccgcggcttcagattcgttaccttctactccgagaactccatgctagacgctatcgagaacatgaacggnaaggagctcgacggtcgtaacatcaccgttaaccacgcccaatcccgtgacggcggcggcggctgcggcggctgtgtctacagcggcggtcgcggaggctgcggctatggtggc

SEQ ID NO: 642 - DNA, 731 bp, Zea mays
  Clone ID: PAT_MRT4577_110481C.1
attgggacctcgagccggcaggccgggatagcctgagtcaacagctgcaaatggcagacacaagaggaattgcaacagtggtgaggcagttgatacaaaaccaaggtatagttagaggcctcccaagctcaacagggatcgaaatgactgtggttactacaggtcggcaaagggctagggcccggagaccacaaaggcaggataataacgcatcaccttccatacatgttgcagcacagaatatgggcaatgttgcctctgagagcagcaatcaaatccagctgccacattctaatggcgacaatgctgcacagatggttcttgcatctcctcagcagtcatcgtctgtcgaacagctgtcaacttctagcaccacagctcttatagtgggtgagcctagatcaactaggcggttaaggcctttggagtccccaaccataagaagaacaaggaggaggccgctgtaggtaccaaagtggtgtcactcccttcaatgaaacctacagaccatgccccattgttagttattaccatgattagctccaataacatctcaaggttaataatgtaggcatgtatatgccatcactcgttcccacctttctcttacataccatgtaccatctatgtagcttcatcatggagtcaaaatgtcagttccaagatctatgataatcttgatctcctgtatactcgaaatatattttctgatttagtctctgtttctggta

SEQ ID NO: 643 - DNA, 3185 bp, Zea mays
  Clone ID: PAT_MRT4577_11048C.1
gaaagcacctccgactcggagtcgcggcgagagccgagaaccttctcattcatcttcctcttctatccatcctgcctgcctgcttgcctccgtattccagctagatctccgggcagccgattgaccgagaagtttgtggttgtggcggcggcggagagggaaacggggagcgggagggcggcgcggatgccactgctgcgccggcgccggcggggccggtgatgcccgccgtggcggtcgcttgaggccgccgtgcgtgggaggtggacgggggagcgaggcggtgcggaccgaggttgcgttgggttggattcgattgggctgcgtctgctgagaaggtctaggaggagctatgaggtactacttccgtcaggtccagcgtttggttggagatatggaaggaggagctctcttgtttatagatgacctcaactccaagtgacaaagtgaacagctgttgaacttcccgtctatttctgtttctttttgctggatttggagatggaggtgaattcctctggtgaggaaacggtgataaaggtaaggaagccatacacaataaccaagcagcgggagcggtggacagaggctgagcacaaacggttccttgaagccttgaaactttatggcagagcatggcagcgcatagaagagcatgttgggacaaagacggccgtgcagatcagaagtcacgctcaaaagttcttcaccaagttggaaaaggaagctattaacaatggtacttctccggggcaagcccatgacattgacataccgccaccacggcctaaaagaaaggctaacagtccatatcctcgaaaaagtggtctcagctctgagacaccaaccaaagaacttccaagtgacaagtcaacaaaaccaaatatgcccttgagcaatgagaatgtactaatggcaggtgatgcatctcttcagaaatttcaaaggaaggagttgtctggaaaagaaagttgctcggaagttcttaatctcttccgtgatgccccatctccatcattttcttcagttaacaaaagctcttcaaatcatggtgcaccgattgaggcaagtaaaacaaaaatccgagatatgaccattatggaaaatagttctcttaaccccaacatgcaagaggatgtaaaggaaatcaatgatcaggagatggaaaggcttaatggtacccaaatcagctctaaatgtgaacactctcatgagggatatttggacatctcaatgcaacaaatgaagctaaagccagagtctgtggagacaacatatgtggacaaacaaaccgcaagagcttcacactccctagcggagagaactgggacaactagcattccggtcactgcaactgaagaaactcattctgttctaacaagtgatcaagtgggaatcaatggaagcatgaacccatccatccatccaatgtttcctgcagatccaaaatttgatagcagtgccacaccacagccttttcctcataattatgctgcctttgctccaatgatgcagtgcaactgcaaccaagatacccacagatcattggtcaacatgtcatccaccttctccagcatgcttgtttccacgttgttgtcaaaccctgccatccatgcagctgccaggctcgcagcatcatactggccagcagctgaaggtaacactccgattgatccgaatcaagaaaatcttgcagatggtgttcaaggaaggagcatagggtctcctccaagcatggcttctattgtagcagctacagttgctgcagcatctgcatggtgggcaacacaaggtcttctccctttcttcgccccacccatggctttttcatttgtgccagctcccagtgctgccttccccacagttgatgttccacgaccttcagagaaagatagagattgcccagctgaaaatgcacagaaggaatgccaagaagctcgaaaacagggacagtttgaaggtttcagagttgccgcttcttcagagtatgatgggagtggaaaaggcgaggtgtctgtccacacagagttaaagatatctcctgtccagaatgctgatgccacgtctgccgcaggagctgacacgactgatgcattcatgaataagaaaaagcaggaccgctcttcatgcggttctaacacaccttcaagtagtgatgtagatgtggacaatgtccctgagaaagagggcaatggtaatgagaaggcgaagcaagcctcctgcagcaactcttcagctggtgacactaaccaccgcagatttagaagcagtggaagcacgagtgattcatggaaggaagtttccgaagagggtcgtctggttttccatgcgctgttcagtagagaaaagcttccgcaaagcttttctcccccacaagcagaaggctcgaaggaagttggcaaggaggaggaagatgaagtcaccacagtggcagttgacctcaacaagagtaccacaagcattgatcatgacctcgacacaattggtgagccaagggcttcctttcccaatgaactgtcgcccctgaagctgaaattgcgccgaacaggcttcaaaccatacaagagatgttctgtggaagcgaaggagaatagggtgccggctagcgacgaggttggtaccaagaggattcgtcttgatagtgaagcatcaacatgagcgatttctacatggttaccgctcggacttcctctgccgccatgaagtttatgacaaagttgtatttacatctaaactagtataggacttaaagaccttgcaatgcaatgcttcatgaaactgttgtgtgctgtattttagtacttgtgaagcagcccggtagactgcttttaaacctttatctcgtagactctgatttaagcatcaagcaactattgaactttatatttttggcgggaaggaaaataattattttttgatttatgcagtgcaactgcaaccaagatacgtacaggtcattcaccaacatgtcatccacgttctccagcatgcttgtttccacgttgttgtcaaaccatacaagagatgttctgtggaagcgaaggaaaaccgggtgccgactagcgacatggttggtaccaagaggattcgtcttgatagcgaagcatccacataattgatttcttcaaagttatatttacatctaagctactataggacttcagatcttgcaatgcagtgcttca

SEQ ID NO: 644 - DNA, 1689 bp, Zea mays
  Clone ID: PAT_MRT4577_110516C.1
tttcggacgcgtgggcggacgcgtgggcgggcgtcagggaatgcctggaggaggtcggccacatcacgcgcctcgccgacccgcgggacgcctggctgcccatcaccgagtccaggagcggcaacgcctactacgccgcgttccacaacctcagctccggcatcggcttccaggcgctcgtgctccccacggccttcgcatcgctcggatggacgtgggcgatcatctgcctgaccctggcgttcgggtggcagctctacacgctgtggctgctcgtcaggctccacgagcctgtcgcgggcgccacccgctacagccgatacatgcacctcgccaccacagttttcggcgagagatgggccaagatcctggcgctgctcccggtgatgtacctgtcggcggggatctgcacggcgctcatcatcgtcggcggcggcagcatgaagctgctgttcggcatcgcgtgcggcgagccgtgcccggcgcgcccgcccaccaccgtggagtggtacctcgtcttcgtctgcgcggccgtgctgctgtcgcagctccccaacctcaactccatcgccggcgtgtccctggtgggcgcgaccgcggccgtcgcctactgcaccatgatctggaccgtgtccgtggccaagggcagggtgcccgccgtgtcctacgaccccgtcaaggcccccagcgacgtggacggcgcactcgccattctcaatggcctcggaatcattgccttcgccttcaggggccacaatgtcgtgctggagatccagggcacgatgccgtcgacactgaaacacccatctcatgtgcccatgtggaagggggttaaggtagcgtacgccatcatcgcgctctgcttgtaccccgtcgccatcggtggcttctgggcttacggcaaccaggtacgtgtaccacatatatacatacatacgcacgggcttcggacgacgtcgagagtgactgatgatttgcgatgcacgcgcagatacctcccaatggcatcctgagcgccctgtacaagttccacagccgcgacacgtccaggctagtgctgggggtcaccacgacgctggtgatcgtcaactgcctcaccacgttccagatctacgccatgccggtgtacgacaacatggaggccgggtacgtgcacaagaagaaccgcccgtgcccgtggtggatgcgctcgggcttccgcgccttcttcggcgcggtcaacttcctcatcgccgtcgcgctgccgttcctgtcgcagctcgccggcctcctcggagggatctcgctgccggtcaccctggcctacccgtgcttcatgtgggtggccatcaagaagccgcggaagggcaccgccacgtggaacgtcaactgggcgctgggaatcctcggcatgagcataagccttgtcctcatagtcggaaacctgtggggccttgtggagaaaggcttgcgggtcaagttctttaagcctgccgattcccagtgaaaaaaaggatgcagatttgtcaatcggttagatttgtaatgccatgcttttatatatgttgatttcttcgccaggaacgtataatgtcctcctgcaccttgacaatttgcaagaaagcaaagtccagttaaggtactcgtggtcgttcctcgtgccattgtgccttttgctcatttttttttctttatttatgcgctttatat

SEQ ID NO: 645 - DNA, 3370 bp, Zea mays
  Clone ID: PAT_MRT4577_11058C.1
gcggcctggttcctccgttcgtgtaagggtctattgcgatctcgagccgcacaggccacagcctctctcccctctgctcccgcggccctcgcagcgcccagcattcagcgcacggggctgcggccaccgcagcgaacagcaaagcacctccgactccaagtcgcgagagccttctcattcgtcttcctcctcttccacccatcctgcctgctcacttccgttccgtagtccagctagatccccgggcaaccgatccaccgagaagcttgtggttgtggcggcggcggagagggaagcggggagcgggaggtcggaggtaggcgcggatgccactgttgtgccggcgccggcgggggccggtgatgcccgcttgagctgggcctccgtgcgtcggaggtggacgagggagcgaggcggcgccagaccgaggttgcgtcgggctcgatttctactgggctgctgtctgctgagtttacggaagtgtttggccctagaagagttgaagataaggagtggagctaggtttaaactctggtgacttggttgttgtgtgcaacgaatcaactatgctgagtttttctgtagagtaacagaaattggatcaattcaagtagaggtctaggaggagatatgaggtactacttgcgtcaggtccagcgtttggttggagatatggaaggaggagctctcttgtttatagacgacctcaactccaagtgacaaagcgaacagctgttgaacgtttcccttctatttctgtttctttttgccggatttggagatggagatgaattcctctggcgaggaaactgtggtaaaggtaagaaagccgtacacaataacgaagcagcgggagcggtggacagaggctgaacacaaacggttccttgaagccttgaaactttatggcagagcatggcagcgcatagaagagcatgttgggacaaagacagccgtgcagatcagaagtcacgctcaaaagttcttcactaagttggaaaaggaagctatgaacaatggtacttctccggggcaagcccatgacattgacatacctccaccacggcctaaaagaaagccaaacagtccatatcctcgaaaaagttgtctcagctccgagacacaaaccaaagaacttccaaatgacaagtcaacaaaaccaaatatgcccttgagcaatgggcatgtaaaaatggtaggcgatgcatctcttcagaattttcaaaggaaggagttgtctgaaaaaggaagtcgctcggaagttcttaatctcttccgtgatgccccatctgcatcattttcttcagttaacaaaagctcttcaaatcatggggcacccaggaggaccgaggcaagtaaaacagaaagccgagatatgtccatcatggaaaataattcttttaaccccaacacccaagaggatgtaaaggtgatcagtgatcaggaaatggaaaggcttaatggtatccagatcagatctaaatgtgaacattctcatgaggggtatttggacatctcaacgcaacaaatgaagctaatgccaaagtctgtggagacaacatatgtggatgaacaaactgcaagagcttcacacaccctagcagagagcaacgggacagctagcattccagtgactgtacctgaaggaactcatcctgatcaaacaagtgatcaagtgggaatcaatggaagcatgaacccatgcatccatccaatggtttctgcagacccaaaatttggtagtagtgccacaccacagacttttcctcataattatgctgcctttgctccaatgatgcagtgcaactgcaaccaagatacgtacaggtcattcaccaacatgtcatccaccttctccagcatgcttgtttccacgttgttgtcaaaccctgccatccatgcagctgccaggctcgcagcatcatactggccagcagctgaaggtaacactcctattgatccgaatcaagaaaaccctgcagatggcgtccaaggaaggaacataggctctcctccaagcatggcttctattgtagcagctacagttgctgcagcatctgcatggtgggcaacacaaggtcttctccctttcttcgctccacccgtggcttttccatttgtaccagctcctagtgctgcctttcccacagttgatgttccacgaccttcagagaaagacagagattgcccagttgaaaatgcacagaatgaatgccaagaagctcgaaaacaggtacagttcgaaggtttaagagttgctgcttcttcagagtctgatgggagtggaaaaggcgaggtgtctctccatacggagttaaagctatctcctgcccagaatgctgatgccacacctaccacaggagctggcacaaatgatgcattcaggaataagaaaaagcaggatcgctcttcatgcggttctaacacaccttcaagtagtgatgtagatgcgggcaatgttcctgaggaggacaatgctaatgagaaggcgaagcaagcctcctgcagcaactcttcagctggtgacactaaccaccgcagatttagaagcaatggaagcacaagtgattcatggaaggaagtttccgaagagggtcgtctggctttcgatgcgctgttcagtagggaaaagcttccgcaaagcttttctcccccacaagcagtagactcgaaggaggttgccaaggaggaggaagatgaagtgaccacagtggcagttgacctcaacaagaatgccacaagcattgatcatgatgacctcgacacaatggatgagcccagggcttcctttcccaatgaattgtcgcacctgaagctgaaatcgcgccgtacaggcttcaaaccatacaagagatgttctgtggaagcgaaggaaaaccgggtgccgactagcgacatggttggtaccaagaggattcgtcttgatagcgaagcatccacataattgatttcttcaaagttatatttacatctaagctactataggacttcagatcttgcaatgcagtgcttcattaaaactcaatctgttgtgtgctgtattttaatgcttgtcaagcagcccgctagactgctttaaaaccttatctcgtagactctgatttaagcatcatgcaactatcaaacttttttttggtcaaaatgtattttccttatgttttatatttttggaaaggaaaataattgaaatattatttattttgaaggctcacgcaaaagtttatttgatcaaggtgtaggggaataggctgagcgagagggtgaacattatgactaatatagggcagaaaatatttgaacattgtcatgtttgctgttgctagaagattgtgtagagaaagtactcacataaatgtttcacttctatttt

SEQ ID NO: 646 - DNA, 197 bp, Zea mays
  Clone ID: PAT_MRT4577_110884C.1
ggctgatgacatggaagcactgtacaagcaggtccgagcagccaaccgaggtgatccttctgaggtcagtacaccaagcaaccaccaaagggagcacaaagaggtacacccccagccactgccgtacgagcagaggaaggccagtatcattgaaaggaacgaccaactcaactcctcgggcggcgcgcatgacgacg

SEQ ID NO: 647 - DNA, 384 bp, Zea mays
  Clone ID: PAT_MRT4577_111062C.1
agggaaagccgtgcggccggccgtaaccttgcatcctttacagcgtcggcccacgctttcttttcattgaactatgctgcttatttagaggggcaacacctactaccagagagccaactctctttagtgagccctgcttccttctagacacaaccacaggcgccgccgatctaccagcacgctgcgcctaactgctggcaccgtcttacaactgcaacaattagctgccattcaaccaacttgctttgacaaacccagcagcattctaccaacaacccatcattggtggcgccctgttttagatttcttatgagtgatagttcaataataaagtgctgggtctagatgtttgggcttcccagaaataagaaagtacatttctag

SEQ ID NO: 648 - DNA, 709 bp, Zea mays
  Clone ID: PAT_MRT4577_11119C.1
gcggggacctcagcactagtctcctcttcgcacgagcgcaacaccatccacccaccagttcgaagcggaggcgaccggcaacctgcggcgcgaagcgtcaccggaaggtgctgcgcgacaacatccaggggatcacgaagccggcgatccggaggctggcgaggaggggtggcgtgaagcgcatctccgggctgatctacgaggagacccgcggcgtgctcaagatctttctcgagaatgtcatccgcgacgctgtgacctacacggagcacgcccgtcgcaaaaccgtcaccgctatggacgtcgtgtacgccctcaaacgccagggccgcactctctatggcttcggcggctaggttaggtgtgggtaattgcctgtccaggtgtctcggatctgtggtactagtttggctgccttcctgtgttcgtattgtagtagttgtggtagctggttgctttgtcgtcctgtagtcgtgcttctttgggtctgtaagaaccgctggttcgatgggattggattggacggtgaagtaggaatgttggcatgttagacttttctccaacgtagcgttgcctctaatttgatctctcaatttattttcaattggggtgcactgtaattcttcctgtctaattcaaatcccctttctgaaattttgtgacctcccaagttttggacccctcgattgttcgaacgagtttttgaatt

SEQ ID NO: 649 - DNA, 588 bp, Zea mays
  Clone ID: PAT_MRT4577_11121C.1
tagtctcctcttcgcacgagcgcaacaccatccacccaccagttcgaagcggaggcgaccggcaacctgcggcggagatgtcaggcaggggcaagggcggcaaggggctcgggaagggcggcgcgaagcgtcaccggaaggtgctgcgcgacaacatccaggggatcacgaagccggcgatccggaggctggcgaggaggggtggcgtgaagcgcatctccgggctgatctacgaggagacccgcggcgtgctcaagatctttctcgagaatgtcatccgcgacgctgtgacctacacggagcacgcccgtcgcaaaaccgtcaccgctatggacgtcgtgtacgccctcaaacgccagggccgcactctctatggcttcggcggctaggttaggtgtgggtaattgcctgtccaggtgtctcggatctgtggtactagtttggcgatgggattggattggacggtgaagtaggaatgttggcatgttagacttttctccacgtagcgttgcctctaatttgatctctcaatttattttcaattggggtgcactgtaattcttcctgtctaattcaaatcccctttcc

SEQ ID NO: 650 - DNA, 877 bp, Zea mays
  Clone ID: PAT_MRT4577_11122C.1
gagagtctcctcttcgcacgagcgcaacaccatccacccaccagttcgaagcggaggcgaccggcaacctgcggcggagatgtcaggcaaggggctcgggaagggcggcgcgaagcgtcaccggaaggtgctgcgcgacaacatccaggggatcacgaagccggcgatccggaggctggcgaggaggggtggcgtgaagcgcatctccgggctgatctacgaggagacccgcggcgtgctcaagatctttctcgagaatgtcatccgcgacgctgtgacctacacggagcacgcccgtcgcaaaaccgtcaccgctatggacgtcgtgtacgccctcaaacgccagggccgcactctctatggcttcggcggctaggttaggtgtgggtaattgcctgtccaggtgtctcggatctgtggtactagtttggctgccttcctgtgttcgtattgtagtagttgtggtagctggttgctttgtcgtcctgtagtcgtgcttctttgggtctgtaagaaccgctggttcgatgggattggattggacggtgaagtaggaatgttggcatgttaaaaaaaaaaaaaaaaaaaaaaaaaaaaaaaaaaaaaaaaaaaaaaaaaaaaaaaaaaaaaaaaaaaaaaaaaaaaaaaaaaaaaaaaaaaaaaacccttcgttgcgccgccgcctccaaaatcgttttttcgtccccacaagaaaccaataatccgccggcgttgaaatgttggtttatcaaaacctcctatctggggacgagctcctgtcggtttctttcccctacaaggagctcaaaaacggcgtcctggggaaggccaaggaaaagtggttcacccaaggccctgttgatgtaaactttggggc

SEQ ID NO: 651 - DNA, 2601 bp, Zea mays
  Clone ID: PAT_MRT4577_11123C.1
gctggtgccggactgacggttagagatggcccacccctcctccgccgccgccgtatcctccacggcgcccgctgcaaaccctagttatggcgcccgcgaggaaggaggcgcccgctctccgccgtctccgtctccgtctccgtctcagagggggcgggccaaggtggtgatcgttatgggcgccacgggcgccggcaagtcgcggctggccgtcgacctcgcggcccacttcgccggcgtcgaggtggtcagcgccgactccatgcagctctaccgcggcctcgacgtcctcaccaacaaggctcccctccacgagcagaacggtgttcctcatcatctacttagcgtgattgatccctctgtcgagttcacttgccgtgatttccgcgaccgtgccctgccgattatacaggaaatagtggaccgcggtggcctccctgtggttgtcggcggcacaaacttctacatccaggctctcgttagcccattcctcttggatgatatggcagaagaaatgcagggctgtactctgagagatcacatagatgatggtataggccttaccgatgaagatgaaggcaatgggtttgaacgcttgaaggagatcgatcctgtggctgcgcagaggatccatccaaacgaccatagaaaaatcaaacgctacctcgagttgtatgcaaccacgggtgccctacccagcgatctgttccaaggagaggccgctaagtataaacttgctgggaattcctggtcatcatgtcagaacagaaatggggtcggcctagtaactccagactctactgctgtttcctgtgggtagatgctgatcttcaagtcctggacagttatgtcaacaaaagggtcgattgcatgatggatggtggtctgctggacgaagtatgcagcatatatgatgcggatgctgtctatacccaggggctgcggcaggccattggggttcgtgagtttgatgagtttttcagagcatatttagccagaaaagaatctggtgagggttcctgtgcaagcctgttaggtatgcatgacgatcagcttaagagcttgttggacgaatttttttcccagctgaaggcaaacactcgcagactagttcgacgtcaaagacggagattgcataggctgagtaaagattttgggtggaacttgcatcgtgttgacgcaacggaagcattcttctgtgccactgacgactcatggcaaaagaaagttgtcgaaccatgtgtggatgtcgtaagaaggttcttgtcggacgattccactgttttgccaagcacaagcgcaagtgacccctcttcaagagagctgtggacgcaatatgtgtgcgaggcctgcgacaaccgggtgctgcgaggtgcgcacgagtgggagcagcacaggcaagggcgaggccaccggaagcgagtgcagcgcctgaagcggaagagcctgaggccatggccatcgctgctgccccaagaccgcagctgatggtaactttttcacagcagaaccggcgaggagtgggacggggacgttgacgtggacatggtcgtctcgtcccacccaaaaaagcgtgccagcatgacagcgacatgctttcccaatcccgaattcccggcacgtcgacggggggaatacctccatgccttttagcagctgaagaagcaggcaccaaagaactgcttgtcaaaagtattgtaccacacgtacgacgggtctagaagccacagaaacgtagtgtggaagtggatagatacatgaacaatggcccatctttctatactgctaaagtttagcatatgctaaggaggtgtttaagattaaaaaaaaaaaaaaaaaaaaaaaaaaaaaaaccctcagcactagtctcctcttcgcacgagcgcaacaccatccacccaccagttcgaagcggaggcgaccggcaacctgcggcggagatgtcaggcaggggcaagggcggcaaggggctcgggaagggcggcgcgaagcgtcaccggaaggtgctgcgcgacaacatccaggggatcacgaagccggcgatccggaggctggcgaggaggggtggcgtgaagcgcatctccgggctgatctacgaggagacccgcggcgtgctcaagatctttctcgagaatgtcatccgcgacgctgtgacctacacggagcacgcccgtcgcaaaaccgtcaccgctatggacgtcgtgtacgccctcaaacgccagggccgcactctctatggcttcggcggctaggttaggtgtgggtaattgcctgtccaggtgtctcggatctgtggtactagtttggctgccttcctgtgttcgtattgtagtagttgtggtagctggttgctttgtcgtcctgtagtcgtgcttctttgggtctgtaagaaccgctggttcgatgggattggattggacggtgaagtaggaatgttggcatgttagacttttctccaacgtagcgttgcctctaatttgatctctcaatttattttcaattggggtgcactgtaattcttcctgtctaattccactcccctgtctgaagaaaccaaaaaaaaaaaaaaaaaaaaaaaaaaaaaaaaaaagggcgcgcgct

SEQ ID NO: 652 - DNA, 453 bp, Zea mays
  unsure (1)..(453): unsure at all n locations
  Clone ID: PAT_MRT4577_111398C.1
aagtaaatcagagttgcatacattttttcgggcctcggnccccggtcatacccaagcccatgcctacacacacgttttcatacgatagattacgtagccacgctttttcgggcctcacacgagcgcatacatacgtacgcgcgcacaaaacggggggcgctcggtatcactctcacacacccccgcgttggacacgggggggggcgacggttcgggggggatcaaacaggcgaaaaaggggggctttttttcgccgccggccccctgggggtccttgggggccttttttttttcggggggctcggggaaggggaaaccgccggagccgacgggcggcgccgccgggacctccttcttgatcttgggggggggcgcgggctccggggccttctttgcctcgtgcttctcggtccgggcctggncccgtcacacgaggggatccgtgatcattat

SEQ ID NO: 653 - DNA, 1019 bp, Zea mays
  unsure (1)..(1019): unsure at all n locations
  Clone ID: PAT_MRT4577_111497C.1
gtcgaagggcaacatctttcatcacagnagatgtttggtatggaatctatgctggaacaaacccaggtagagcagttataaattatgcggttaatgtaggagattaagtattacttgcagctttaattgcttggttatttttctatatatttaaattttcacgagatggcgttattgcttgatcttttcatatcaagcaaggcttgacatttgtgattttatattaatattttcaatcaaattaacagtcaaacttgctcttcagtttactacttgcaaataaagcaacatccgtttttgttatttttatgagaaaataaaatacaagttaggactatctctgaataaataaaagactcctggtcatagatacatgttgttttaggataagatctggtgaaaacttgaaaattacaaacatcaatatcaaatttatctggtttagaaacatgttaatatatgtctagatttttgtttgaaaatacttgcaaaatctcgtgatttcaagaatttttagaatatgttctagaagaaattggtggtgaaagaaaatatcaaaaccgtgcaaagacaaatgtgacaactatttttcacgggagggagaattccttgctttttatcactctaatcatgcagtacatttactttttcttcttttttcctgctgatgattccaaatgatgtacacaatgttctaattcccaaacatacatgcatgccatggtctgattcccaaacatacttgctatgttgtaatgagcctgcagagacatttgtacgcgccgacggggcattcatcccatttgctcacgacttcgacatctccacagtcacaactacagnttaggggtgttggtgacattggggatgttaaggttatagatctgcagagtccacttaatagcctcatagggaggcaagtatgcaaaatcggcagaagttctggtcacacaacgggaactgtggtggcttatgcccttgagtacaatgacgagaaaggaataagcttcttcactgac

SEQ ID NO: 654 - DNA, 292 bp, Zea mays
  Clone ID: PAT_MRT4577_111499C.1
ggacgggggaacaacttttcaattttattggacaaaaatgggtgcgaacaaaaaccttgctcatttttttttgggctggtttcatagggggggcaaacaaagggaacaactggggtcccaacacctaatccaaaggtagaacggacactaacacggtgacagaagcgaacggtaacacgatcctttagatggataagataactcggccgaagccagtatgggcccacacattagtctcttcagccgccgttgtcgtcttcgtatcctccaccactacctttggtccgaccgt

SEQ ID NO: 655 - DNA, 2732 bp, Zea mays
  Clone ID: PAT_MRT4577_111563C.1
gctctcaattccccactcatagtcatatttgctcagccttttgcaaacgagttgaaatcaccttgttcaaatcgtcccctcctctctctctctcgctcgctcgccaagcacaatcttctgcgcgttcgtgttgcggatttgttaattggttggtcagctcctctctgacccagaggcaaagccatggctctcacgctgcgttcctcgacgtcgttcctgtcgcctgtggaccccacgtccaagctcctccacaagcccgccgacgaggcgcagccctgctgcgtcgccgtaccccctgcgcccggccgcaggccgcgcgcgctcagggcggccgcggccgctgcgccctcaccggcgacgcaccgcgcgccggcggaggcggccgagctgctgcacggcggcggcgcggaccagcaccacgggctgccgcgcggcggggtgccggtgtacgtgatgctgccgctggacacggtggggccaggcggccagctgtcgcggcagcgcgcggtggcggctagtctgatggcgctgcggggcgccggggtggagggcgtgatggtggacgtgtggtggggcgtggtggagcgggagggccccggccgctacgactgggaggcctacgccgagctcgtgcgcatggtggagcgagccggcctccgactccaggccgtcatgtccttccaccagtgcggtggcaacgtcggcgacacctgcaacatcccgttgccgccatgggtgctggaggagatgagcagcaacccggacatcgtgtacacggacaggtccggccgccggaaccccgagtacatctccctcggctgcgacacgctgccggtgcttaagggccggacccccatccaggtctacaccgactacatgcgcagcttccgcgagagattccgtgactacctcggcaatgtcatcgcggagatccaagtgggcatgggtccttgtggagagctgaggtatccttcataccctgaggccaacggaacctggcgttttccgggcatcggcgagttccaatgctatgataagtacatgcgggcttcgaatttagagtatacctagcaaacttggttaattgatcgatgttggttgctctgatgtttgcagcatcccgttgccgccatgggtgctggaggagatgagcagcaacccgaacatcgtatacacggacaggtccggacgccggaatcccgagtacatctccctcggctgcgacacacttccagtgctcaggggccggacccccatccaggtctacaccgactacatgcgcagcttccgccagaggttccgtgactacctcggcaatgtcatcgcggtaattaaccagccaccgttactacgatcacttaacgttgcaatagcagttgaccataaagaggccatgcctgatgttgtgatcctaggccaaaccactcgtgtctcactgtcgcaggagacctcagtgggtatgggtgcttgtggagagctgaggtatccttcgcacccgcaggccaacgtaatggggggtttcacgggcaaccgggacttccagtgctatgacaaggtaggcgcccgtgactcgaaaggtattcggcgttgctgcgacacgttgcctgagttgttgtgcgttggtacagtacatgcgggcatcgctggaagccgcggcggtggcgtcgggccacgaggagtgggggaggggcggaccgcacgacgccggcgagtacaagcagatgcccgacgacacgggcttcttccggcgcgagggcacgtggagcaccgagtatgggcatttcttcctggagtggtactcgggcatgctcctggagcacggtgaccgcgtcatggccgcggccgaggccgtgttcggcggcacgggcgcaacgctctctgccaaggtcgccggcatccactggcactaccggacccggtcccacgcggcggagctcacggccgggtactacaacacgcggggccacgacgggtacgcgccgatcgcgcgcatgctggccaagcgcggcgctgtgctcaacttcacgtgcatggagatgaaggacgagcagcagccgcagcacgccagctgctcccccgagctgctggtgcagcaggtcaaggctgcgaccagcgccgccggcgtgcagctcgccggcgagaacgcgctggagcggtacgacgatgcggcgttctcgcaggtggtgtcgacggcgcgcggcgcaggcctggccgcgttcacgtatctgcgcatgaacaagacgctcttcgacggcgacaactgggggcggttcgtgtccttcgtcagggctatggccgacggtggcgcgaggccagcgctgccgcggtgtgacacggggcactcggacctgtacgtcgggtttgtcgacgccgccaaggagaggaaggcggcggaggccaagggcgccgccaccaccgcagcattgtaggtggtcgtcggtagatgcccatgcatgtgcttgcataatgcatacagacacatgcgccgagctgttgtataacgtacacaggagaactgtataaattcagggccttcaggttgcaaagttttataggctgtaatcgagcaggtagataaggaggcaggcatgtcagaacttaggctatcttcagtttatttgttccatttcaaactgtattataaggagcagcttggtgactttcactgtcataaatttagctgaaggaaaatagaaatgccaattactacaaaaaaaaaaaaaaaagcggcc

SEQ ID NO: 656 - DNA, 1343 bp, Zea mays
  unsure (1)..(1343): unsure at all n locations
  Clone ID: PAT_MRT4577_111565C.1
accggtaccggcactcccgggctcggctgcgacacgctgccggtgcttaagggccggncccccatccaggtctacaccgactacatgcgcagcttccgcgagagattccgtgactacctcggcaatgtcatcgcggagatccaagtgggcatgggtccttgtggagagctgaggtatccttcataccctgaggccaacggaacctggcgtttcccgggcatcggcgagttccaatgctatgataagtacatgcgggcatcgctggaggctgcggcggtggccgcgggtaccaggagtgggggaggggcggaccgcatgacgccggggagtacaagcagatgcccgacgacacgggcttcttccggcgcgagggcacttggagcaccgagtacgggcatttcttcctggcgtggtattcgggcatgctgctggagcacggcgaccgcgtccttgccgcggccgaggccgtgttcggcggcacgggcgcaacgctctccgccaaggtcgccggcatccactggcactaccggacccggtcccatgcggcggagctcacggccgggtactacaacacgcgggaccgcgacgggtacgcgccgatcgcgcgcatgctggccaagcgcggcgccgtgctcaacttcacatgcatggagatgaaggacgagcagcagccgaaacacgccagctgctccccggagctgctggtgcagcaggtcaagaccgcggccagcgccgccggggtggagctcgccggcgagaacgcgctggagcggtacgacgaggcggcgttctcgcaggtggcgtcgacagcgcgcggcgccggcctggccgcgttcacgtacctgcgcatgaacaagacgctctttgacggcgacaactggcggcagttcgtgtccttcgtcagggccatggccgacggcggcgcgagaccagcactgccacggtgcgacacggggcactcggacctgtacgtcgggttcctcgacgccgccaagaagagcaaggcgccggaggctgagggcgccgccaccgccgcggcattgtaggtggatgctcatgcctgtgcgtgcacacagacacatgcgccgtgctgttgtataacgtgcaccggagaaggggaactgtatgtatagattcagggccttgcaggttgcagagttttataggctgtaatcgagcaggtcggtaaggaggcaggcatgtcagaacttaggctgtcttcagttcatttgtcccatttggaactgtattgttataagtctaatctctgtagagagaattctatatggtgttattttccatactaacataatatacataataaaatataatataagaatgtg

SEQ ID NO: 657 - DNA, 162 bp, Zea mays
  Clone ID: PAT_MRT4577_111657C.1
gaacaaacaaacattacccaaactgacattttgacaatgtttggcgttgatgacaacattggaaacagtaatctaggtacaagcaggcgcctctggtggctggcaagtgtgaccacacacaaacacaccataccagttgttgaaccacccgcctgtggcgcc

SEQ ID NO: 658 - DNA, 266 bp, Zea mays
  Clone ID: PAT_MRT4577_111758C.1
aaacaaggttctgtttagtagagaggaagggcagcagcaaggggagcagaggctgcaagagagcgtgattgtggaaatctcgaaggaacagattcgggcactgagcaaacgtgccaaatctagttcaaggaaaaccatttcctctgaagataaaccttttaacttgagaagccgcgaccccatctactccaacaagcttggcaagttctttgagatcaccccagagaaaaaccccaagctgtcgggacttggatatcttcctcagt

SEQ ID NO: 659 - DNA, 1717 bp, Zea mays
  Clone ID: PAT_MRT4577_11183C.1
gccggccgggtctcgagacaccactgcgccattggccagctagagccaaccagaagagcttgcagttactgagagtgtgtgtgagggagaggatgggtggcagcggcagggctgctctgctgctggccctggtggtggtggccgtgagcctggccgtggagatccaggccgacgccgggtacggttacggcggcgggtacctcgaggccggccgggccggggctaagagggaagaacaatcgagctactaataaggtcgtatacatatcttctatatactcctctgaaagttgtgaactccggtcgagcttaaaaacagcagcaatggcgaagctttggacattgctgctggctgcagtggtggtcctctcactcctagtgagccccattgcttgcacccgaaagctcaacaaacccaagccgaagccgggcagctacaggcggccggtcaagccgaagccaaaaccggtcacgggcagctacaagccggcgcctgtggccgccagaagaaaccacacagctacacccacgccatcgccgactgtctacggccccggtggctggctgtcaggcgccggcgccacgtactacggcgcgaccaacggcgacgggagcgacggcggcgcgtgcggctaccagacggccgtcggaaagaagccattcgactcgatgatcgccgccgggagcacgccactgtacaggggaggcgagggctgcggcgcctgctacgaggtgaaatgcacgaccaacgccgcgtgctccggccagcccgtgaccatcgtaatcaccgaccagtcccctggcgggctgttccccggcgaggtcgagcactttgacatgagcggcaccgccatgggcgccatggcccggcccggcatggccgacaagctccgcgctggcggcgtgctcaggatcctgtacaggagggtgccgtgcaagtacaccggcgtcaacatcgcgttcaaggtggatcagggcgcgaacccgtactacttcgacgtgctcatcgagttcgaggacgacgacggcgacctcagcgccgtggacctcatggaggccggcagcggcgtctggactcctatggcgcacaactggggcgccacgtggcgcctcaacaacggcaggaagctcaaagcgccgttcgggctccggctcacctccgactcccgcagggtgctcgtcgccaacaacgccatcccggccgcgtggaagcccggcaagacctaccgctccttggtcaactacccctgaaaagagaaataccgacaagtggatggcgtgtattgtgcgtccgggtgttgcgagtggcggcggtgtactactggtgtcggaaaacagaagagaatgaaagaggaggttgaagaagagaataatgtccttcttccctccctggacggtctctgcagtccccaaaagtgatgtgtgacggtgttagtcaaatcatgccggtaatttgatacttcatctcgatttgagttttactgctatactactgtgattgaggtaagacagaatcttatttcttgaccacgtagtacataaactacaaagcatgcccgttgcgttggtaattagactcttgtagtggtttttgccaatatcaagatgtatgtagaatgtgtgtgcatgcgttcacagtgatgagaatatacatgcgtgtatctgatcctctaaaaaaaaaaaaaataaaagaaacaactacatactatgtttatat

SEQ ID NO: 660 - DNA, 229 bp, Zea mays
  Clone ID: PAT_MRT4577_112075C.1
tttcggaccaactagcaacatagaaagcacaatagtgttcgggcaatggcagtcaaaatattttgcttccttatgctccttggtctttctgcaagtgctgctaccgcaaccatttttccacattgctcacaagctctatatagattcctttttttccccatacctttaaccagcggttgtttcagtgtgtgaaaaccctattcttctatcctacatgatccaacatgct

SEQ ID NO: 661 - DNA, 139 bp, Zea mays
  unsure (1)..(139): unsure at all n locations
  Clone ID: PAT_MRT4577_112288C.1
tctctcgcgatctatatcgtacgcagacgcgccctcactacacatgcagatgatgcttanggtttncccggccccggccgacactgtgccaacccagcttttcggtgcgcccgcgacccctgctcccgtcgtcagggtg

SEQ ID NO: 662 - DNA, 304 bp, Zea mays
  Clone ID: PAT_MRT4577_112369C.1
caaaccaccaagccgtgcatgcatcatggagtacggtcagcaggggcagcgcggccacggcgccacgggccatgtcgaccagtacggcaacccagtcggcggcgtcgagcacggcaccggcggcatgaggcacggcacgggaaccaccggcggcatgggccagctgggtgagcacggcggcgctggcatgggtggcgggcagttacagcctgcgaggtaggagcactagaccggcgggattctgcatcgtttcgtgagctccagctccagctcgttggaggacgattgtatgtgcggaaggtgg

SEQ ID NO: 663 - DNA, 284 bp, Zea mays
  unsure (1)..(284): unsure at all n locations
  Clone ID: PAT_MRT4577_112620C.1
cacccgctggtcacgctcggccnccccatggtcctggaggagccgctgctccanacgttcnacctcccgcctttcctcgtcaagggcgactacaggtgcgctgnacnagtacttntccacggtggcgaacagggcgctgganaccgccgaggnnctgggcctgtcgcgcgagnaggcctgccacaacctcctcttcgcnagaanttcaanagntagggnggcntcaangtgntgtccnngggcctgctggncancgtgacnagnggcggcnngaaggnnatgat

SEQ ID NO: 664 - DNA, 559 bp, Zea mays
  Clone ID: PAT_MRT4577_112636C.1
aattcggcacgaggaacccgtcagggcggcgaatctgagcaactgcacccagagcgcgatccattgccggcgaagaagcaacttgttgcgagcctcctctatggcgagctccgaccatggttccaccaccgccctcaaggacgtgccgggcagctactgcctgccgctggtgggcggcgggcgcgaccagcctttttttttactacttgcaggggcaggacaagtacttagagtaccgcgtggagcgctaccgctccacacgaggtgcgcatgaacctgccatcgcgccactacatggcgcgcgacccgcgaatggatgcggtcctggacgccaagagcttacctggactcttcgacatggacaaggcggagaataaggacctgttcacggccacatacatgccgtgcacctccctcaccggaggctaccgcgcctgctggtacctggacccctgcgagcccacccacaccatggagaagcagctgatctaatccctcctgctctacagtaggacaaggtgatccccaccttacgctccaacttctcctagctcctcgc

SEQ ID NO: 665 - DNA, 273 bp, Zea mays
  Clone ID: PAT_MRT4577_112665C.1
tcgagatcctcaaggtcatccgcaagaacctggtcaagaagtgcatcgagatgctctttgacgacgcggataacaaggacgactacggcaagttctacgacgccttctctaagaacatcaaggtcgggcatccacgatgtctcggacaaccgcgccaagctcaccgacctgctgctctaccactccaccaagagcggctgaccagacgactcagcctcaaggactacctatacgcgcatgaaggacgggcataacgacatctactacatcacc

SEQ ID NO: 666 - DNA, 251 bp, Zea mays
  Clone ID: PAT_MRT4577_112678C.1
ccccaggccgaacccttctgcgcccggtgcgaccttgtatccaccagcctgccctctccttcgcgagaggcggccccggtgaccgcgtcggcagtgggagaccggaccgaggcttctcccgctggaaggttccagccatgcggagtgccgatctgcggggaaaggacgaggagctctactcctccctctttgattccggaaaaagcgacggcgttaagtcaggttcgcagcggattgacaggaacattgaa

SEQ ID NO: 667 - DNA, 236 bp, Zea mays
  Clone ID: PAT_MRT4577_112707C.1
acggttcccatccatccatcgccatcctctaggccaggccaaaggaaccctagccatgagcgcctcctacaagaagctcttccaggccgccaggtccctcgggctcttcggttctcaccgctccgtccttgccgcctagggccgcaccggcgcgctcggcacgctcaccaactttggcaggaagacccttcccaccgcctactttatcctaccacatgcagggatcccaccatgcc

SEQ ID NO: 668 - DNA, 263 bp, Zea mays
  Clone ID: PAT_MRT4577_112978C.1
ggctatcgcagcaggcattttacctttattacccttgttccttcaacaaccgggaggcctattacagcagttacctttggtgcatttgttgggacaaaacattaaggcacaacaactacaacaacttgtgcttggaaaccctggtggctacttttaacaacagcagtttctttcattcaaccaaatggctgcattggaccctgcttgttatttgcaacaacaacttccatttaacaaggaagctggtgactacccccagcaat

SEQ ID NO: 669 - DNA, 317 bp, Zea mays
  Clone ID: PAT_MRT4577_113047C.1
gagccccccagttcttttatttttagctcttttccaagggaacagcccaaaactttcaaagggaaaaaaaaaagattttgggactaacaggtggggggccaattatacaacatgaacccttttgagtcacaagtttggggggggtttggatatgccccctgatccaaaaaaagaactcctgagcccccacctggaccttttaaaggggggcaaggggaaaaaccgaaaaaagcccaataaggttgcaagttgctcaacagctgcatgtttacctttggatcaacattcacagggaaagggaaagcttggcaaacatt

SEQ ID NO: 670 - DNA, 3013 bp, Zea mays
  Clone ID: PAT_MRT4577_113066C.1
gcaccagtttcaacgatcgtcccgcgtcaatattattaaaaaactcttacatttctttataatcaacccgcactcttataatctcttctctactactataataagagagtttatgtacaaaataaggtgaaattatgtataagtgttctggatattggttgttggctccatattcacacaacctaatcaatagaaaacatatgttttattaaaacaaaatttatcatatatcatatatatatatatacatatatatatatatatataaaccgtagcaatgcacgggcatataactagtgcaacttaatacatgtgtgtattaagatgaataagagggtatccaaataaaaaacttgttcgcttacgtctggatcgaaaggggttggaaacgattaaatctcttcctagtcaaaattgaatagaaggagatttaatctctcccaatccccttcgatcatccaggtgcaaccgtataagtcctaaagtggtgaggaacacgaaacaaccatgcattggcatgtaaagctccaagaatttgttgtatccttaacaactcacagaacatcaaccaaaattgcacgtcaagggtattgggtaagaaacaatcaaacaaatcctctctgtgtgcaaagaaacacggtgagtcatgccgagatcatactcatctgatatacatgcttacagctcacaagacattacaaacaactcatattgcattacaaagatcgtttcatgaaaaataaaataggccggacaggacaaaaatccttgacgtgtaaagtaaatttacaacaaaaaaaaagccatatgtcaagctaaatctaattcgttttacgtagatcaacaacctgtagaaggcaacaaaactgagccacgcagaagtacagaatgattccagatgaaccatcgacgtgctacgtaaagagagtgacgagtcatatacatttggcaagaaaccatgaagctgcctacagccgtctcggtggcataagaacacaagaaattgtgttaattaatcaaagctataaataacgctcgcatgcctgtgcacttctccatcaccaccactgggtcttcagaccattagctttatctactccagagcgcagaagaacccgatcgacaccatgagggtgttgctcgttgccctcgctctcctggctctcgctgcgagcgccacctccacgcatacaagcggcggctgcggctgccagccaccgccgccggttcatctaccgccgccggtgcatctgccacctccggttcacctgccacctccggtgcatctcccaccgccggtccacctgccgccgccggtccacctgccaccgccggtccatgtgccgccgccggttcatctgccgccgccaccatgccactaccctactcaaccgccccggcctcagcctcatccccagccacacccatgcccgtgccaacagccgcatccaagcccgtgccagctgcagggaacctgcggcgttggcagcaccccgatcctgggccagtgcgtcgagttcctgaggcatcagtgcagcccgacggcgacgccctactgctcgcctcagtgccagtcgttgcggcagcagtgttgccagcagctcaggcaggtggagccgcagcaccggtaccaggcgatcttcggcttggtcctccagtccatcctgcagcagcagccgcaaagcggccaggtcgcggggctgttggcggcgcagatagcgcagcaactgacggcgatgtgcggcctgcagcagccgactccatgcccctacgctgctgccggcggtgtcccccactgaagaaactatgtgctgtagtatagccgctggctagctagctagttgagtcatttagcggcgatgattgagtaataatgtgtcacgcatcaccatgggtggcagtgtcagtgtgagcaatgacctgaatgaacaattgaaatgaaaagaaaaaagtattgttccaaattaaacgttttaacctttaaagagtttcttttaaaggaccccagcaagctctcggcgtacagggaccggccggttcaaggggacgcaggaggagtatgaggcggcgctgcttgcgtcgacaacgctgtacatcggtaatatgtccttctacaccacggaggagcaggcctacgagctcttctcccgcgccggcgagatcaagaagatcatcatggggctcgacaagaactccaagaccccatgcggtttctgctttgtactgtactactctagggaggatgctgaagatgctgtcaaatacattagtggaacgatgcttgacgatcgtccaatccgcgttgatttcgattggggctttgaagaaggcagacagtggggccgtggacgaagtggtggacaagtcagagatgagtaccgtacagattatgatcctggaagaggtggttacggtaagatggttctgagggaactagaagcacagcgagaattagttgactatggtggatcttttcaaccgaatgcaccacctccctatgagagaagtgagcggaagagaggacatggagattctcataggaatgacagaggagattaccagcggaaacgctaccggaacgatgaccggtcagcaccagaggagtccaagagagcaccggactctgatccagcggagaagaatcctagattccgtgagaaaggtgactctgacgaagaagaggatgactacgacggcaaacgtcgtcgctaaagctgtggaacagccgttgctactacatgcagctgttctggtgtccagacgttgcagaagagtccacagctagcagcagtatccggatctcgccctgttgtacaacagatttaattcttcggtcggccattcctccttttctagtgctcctatcatctgttaatctgaatgtgcgcggtgttacatgtgctccaagtggggcactgttctcacagatacaatgagccttatctgtacgtttgctgctgatgaagcttgagaccagtgcatatattaattctaacagattgttaccgaaccc

SEQ ID NO: 671 - DNA, 191 bp, Zea mays
  Clone ID: PAT_MRT4577_113206C.1
tcgcacggagcgtacgtcgctcttcagctcgcgccgcaaacgtgcgcgcaacccagctggcatcgacgcctgcaccggacgtcgatgccgagctacttcggcaccttttacggcgatgagcaccagcaggtagctggtaatggagattgacagcctcagagtaggatttgatcgagttgctcagcaacgtt

SEQ ID NO: 672 - DNA, 150 bp, Zea mays
  Clone ID: PAT_MRT4577_113275C.1
aaggatggtcgccacaggaagcatcatgtgatcagcacacagactgaaacctacaagaaaaaggtgaagcactcctacgaggcgtacaagactctgcagcaggagctggggttgcgcgaggagccggcgtggatcgtggacaacaccggc

SEQ ID NO: 673 - DNA, 2169 bp, Zea mays
  Clone ID: PAT_MRT4577_11332C.1
tgagcccgcgcgccgtggaaacgcgaggcgtgagttgggttgcaaatgttcgtaaacgtggggcgagtttgattttcttgcgcccttgcctcacctgacctagcgggtccagagtaccgtggaccgcacggccaacgtgctgggccacccgaccccgagcctccgcgaccactacgcgctcggccgcaagctggggcaggggcagttcggcaccacctacctctgcacggacctcgccacgggcgtggactacgcctgcaagagtatagccaagcggaacgtcatcaccaatgaggatgtcgaggacgtgcgccgcgagatccagattatgcaccacctggctggccaccggaacgtcgtcgccatcaagggcgcgtacgaggaccagttgtacgtccacatcgttatggagttctgcgcgggcggggagctcttcgaccgtatcatacagcgggggcattacagcgagcgcaaggccgcggagctcacgcgcattatcgttggggtcgtcgaggcttgccactcgctcggggtaatgcacagggatctcaagccagagaacttcctgctctcgaacaaggatgacgatatgtcgctcaaggccatcgacttcggcctctccgtgttcttcaagcctggtcaaatttttaccgatgttgtgggaagcccttactatgtagctccagaagtgctgcgcaaacgatatggaccagaagctgatgtgtggacagctggagttattctttacatacttctatgtggtgtaccgccattttgggcagagacacagcaaggaattttcgatgctgttctgaaaggtgtaattgattttgatttggatccctggcctgtgatctctgagagtgcgaaggatcttataagaagaatgctgaatcctatcccatcagagcgcttaacagcacatgaagttctatgtcatccatggatttgtgaccatggagttgctcctgatcgtcctcttgatccagctgtcctgtcacgcatcaagcagttctcagcgatgaataagttaaagaagatggccttgcaggtgattgctgagagcctttcggaggaggagattgcagggctgaaggaaatgttcatggcaatggatacagataatagcggtgcaattacatatgatgaactgaaggaaggattgagaaagtatggctccacattaaaggatactgaaattcgtgatctcatggaggcggcggatatagacaacagcgggaccattgattatatagaattcattgctgctacattgcacctcaataaactggaacgtgaggaacatctagttgcagcattttcgtattttgacaaagatagcagtggttacattactgtggatgagcttcaacaagcgtgcaaagagcataacatgccagctgcttttcttgatgatgtgattaaagaagctgaccaggataatgatgggcgcattgattacggggaatttgttgccatgatgacaaagggcaatatgggagttgggaggagaacgatgagaaacagcttgaacataagcatgagggatacgcctgctggtgccctctgaagtctgagcatccaagaaatttgttgcagtatgagagaacgcctggtacgggctgcggaaagcttcttctaatcctttcctacacgaattctgcctacattttttggttgctatatctgttgaagcattgtagggttgtttcaggaattccgggtagggtaactcaactcctgctctttcctcgatgagaagtgtgaattgttatgcgttagttggattgcaaatgttcgtagacgtcgggcgtgtttgattttcttgtgcccttgcctcacctaacctagctgggcaagggtaccctcgccagccgaggcaagctgaagcggctcacctgatacctggccaagcatggaaaaatctttacggcacgggaaacgaggcagatggtaaagaatccaatccaaacacaaacaggctggattttgtccagacaggcgaggcaagcgcttggcgtcttggcgaggaaaccaaacgttcctgttgccctcactaattgcaagttttcatatgcagctgggccatcacgccaaaaaaaaaaacttctctacgtgtaaacgtgtatattcgacatcctgatataaataggaatttcaagctggcgc

SEQ ID NO: 674 - DNA, 1433 bp, Zea mays
  Clone ID: PAT_MRT4577_113655C.1
gataagcaacaattcatttatagcagcttgtttctggagactggagtacacatgagacaaacattgtctcaccaatgtatacgtatataatccatcacacatgaatacttaggttatttgtcttctagcttccgcctgacacaatcacagaactagaatgtaaaaaggggtaaagaaataaaaaaggacgactcctaatggagtccgccattgccgtattgtgacttgccggtttgtgcgcacctcagctgaccaccaaggaggtcaggaaaggcaccacgaaaacgaatgcttcttgagagttaaagctgcacgacgatggatagtggaaacagagcttctcaagaagcattcgttttcgtggtgcctttcctgacctccttggtggtcagctgaggtgcgcacaaaccggcaagtcacaatacggcaatggcggactccattaggagtcgcccttttttttttttttttttttttgataagcaacaattcatttatagcagcttgtttctggagactggagtacacatgagacaaacattgtctcaccaatgtatacgtatataatccatcacacatgaatacttaggttatttgtcttctagcttccgcctgacacaatcacagaactagaatgtaagtgggcgagagggaagagatggcggcgtcggacgttgagtaccgttgcttcgttggcggcctcgcctgggccaccgacgaccactccctcaacaacgccttcagcacctacggcgaggtcctcgagtcgaagatcatcctggatcgggagacgcagaggtcccgcggcttcggcttcgtcaccttctccacggaggacgcgatgcgcagcgccatcgagggcatgaacggcaaggagctggacggccgcaacatcaccgtcaacgaggcccagtcccgcggcggccgtggaggcggcggcggcggcgggtacggtggtggccgtggaggcggcggctacggcggtggcgggcgccgtgatggcggcggcggctacggcggtggcggcggctacggtggtggcggcggcggctacggtggtggtggcggcggctacggcggtggcaaccgtggcggcggctacggcaactccgacgggaactggaggaactgagcggtggggcccgcgcggccaagttatcctgttcgctaccgtgttgtttaccctagtccagagggtttatcttcgttcgtgtcgtgtttgttgttgcccatctgtgtttttgattgcaaggtcgctctgtgtcagttgttagtgctgtgttcatcctcggtttcagcagacccatgcatcaaccagcatggactgcggatcgatggatgctgttacccccgtcaggctttattctaagttaaatcctaaggaaaaaatggtgcttcttggtgctgtcaaaaaaaaaaaaaaaaaagcggcc

SEQ ID NO: 675 - DNA, 408 bp, Zea mays
  Clone ID: PAT_MRT4577_113657C.1
tgctcggaattcgagctagagctcctccttttcttctgttcgggtaaaggtacacgaggctctccggggttctgactcgtgggtgagcggatcgagatggcggcgtcggatgttgagtaccgctgcttcgtcggcggcctcgcctgggccacggacgaccactcccttcacaacgccttcagcacctactgcgaggtcctcgagtccaagatcatcctcgatcgggagacgcagaggtcccgcggcttcggcttcgtcaccttctccacggaggaggcgatgcggaacgccatcgagggcatgaacggcaaggagctggactgtcgctacatcaccgttaacgaggaccattcccgctgttgccgttgaggcggctgctgtgggtactgtggtggccgtggaggctgc

SEQ ID NO: 676 - DNA, 347 bp, Zea mays
  Clone ID: PAT_MRT4577_113658C.1
gcagcaccaagaagcaccattttttccttaggataaacttaaaacaaatcctggcaggagtaacagcatccatcgatccacagtccatgctggttgatgcatgggtctgctggagccgctgatgaacacagcactaacaactgacacagagcgaccttgcaatcaaaaacacagatgggcaacaacagacgagacgaacgaagataagccctctggactagggttaacatcacggtagcaaacaggataacttggccgtgcgggccccaccgttcagttactccagttgccgtcagagttgccgtagccgacgacactgttgtcaccgtcgtagtcttcaccaccac

SEQ ID NO: 677 - DNA, 404 bp, Zea mays
  Clone ID: PAT_MRT4577_113661C.1
tcggatcgggtacgtggatgtgaggttctccggggttcgggttcgggggagagcggatcgagatggcggcgtcggatgatgagtaccgctgcttcttcggcggcctcccctgggccacggacaaccacttcccttccacaacgcccttcagcacctaacggtcgaggtacctctagtccaagatcatcctcgatcgggagacgcaaaggtcccgcggattcggcttcaaacaccttctccacggaggaagcgaatgcggaacgccatcgagggcatgaacggcaaggagctggacggccgcaacatcaccgccaacgaggcccagtcccgcggcggtcgtggaggctgcggccgccggaaaccgtggaggccccggaggccgcggctaccgccgttgctgtccc

SEQ ID NO: 678 - DNA, 363 bp, Zea mays
  unsure (1)..(363): unsure at all n locations
  Clone ID: PAT_MRT4577_113663C.1
gcaccaaaaagcaccatttcttccttaaggattaacttatacataaagcctgacgggggtaacagcatccatcgatccgcaccccatgctgctcgatgcatgggtctgctgaaaccaacgatgaacacatgactgggggcgggcgcagagcgaccttgcaatcaaaaacacagatgggcaacaacaaacaccacacgaactaagataaaccctttggactagggtaaacatcactttcgcgaacaggataacttggccgcgcgggccccaccgctcagttacttcagttcccgtcggagttgccggaaccgccgccacgggagcctccgcnctttccaacccctccttcaccggggcctctgt

SEQ ID NO: 679 - DNA, 496 bp, Zea mays
  Clone ID: PAT_MRT4577_113664C.1
gcagcaccaaaaagcaccattttttccttaaggattaacttagaataaagcctgacgggggtaacagcatccatcgatccggagtccatgctggttgatgcatgggtctggcgaaaccggggatgaacacagcactaacaactgattcttagcgaccttgccatcaaaaacacagatggggaacaacaaacacgacacgaacgaagataaaccctctggactagggtaaacatcacggtagcgaacaagataacttgggcgcgcgggccccaccggtcagttcctgcagtttccgtgggagttgccgtagccgccgccacggttgccaccgccgtaggcgtcggcaccaccaccgtattctgcggcgccaccgtaatcgacgccaccggcgtatgcgccaccgccatcacggaggccggcaccgccctaggcggcggctgcacgggcaccaccgtacccaacgccggcggctccacggacggcgggggactgggcc

SEQ ID NO: 680 - DNA, 467 bp, Zea mays
  Clone ID: PAT_MRT4577_113665C.1
gcagcaccaagaagcaccattttttccttaggattaacttaaaacaaatcctgacaggggtaacagcatccattgatccacagtccatgctggttgatgcatgggtttgctggagcccaggatgaacacaggactaacaactgacaaaaagcgaccttgcaatcaaaaacacaaatgggccacaacaaacgaaacgaacgaaaataaaccctctggactagggtaaacatcacggtagcaaacaggataacttggccgggcgggccccaccggtaaattcctccaattcccctctgagttgccgtagcccccgccaccgttgccaccgccgtagccgccaccaccaccaccgtagaacaccgccgacaccgtatgcgtcaacgccaccgacgtaacccccgcggccatcatggggcccgccacctccgtattgcgcgccttcacgggatccaccgtagccgccggcg

SEQ ID NO: 681 - DNA, 371 bp, Zea mays
  Clone ID: PAT_MRT4577_113668C.1
attcggctcgaggttggctactcctttttctccggttcgggttcgggttcgtgaggttctccggggttcggtttcgagggtgagcggatcgagacggcggcgtcagatgttgagtaccgctgcttcgtctgcagcctcgcctgtgccacggacgaccactgcctgcacaacgccttcagcacctacggcgaggtcctggagtccaagatcatcctcgatcggtagacgcataggtcccgcggctctggcttcgacaccttctccacggaggaggcgatgcggaacgccatcgatggcatgaacggcaaggagctggactgccgcaacatcaccgtcaacgaggcccattcccgcggctgccgtggaagctg

SEQ ID NO: 682 - DNA, 542 bp, Zea mays
  Clone ID: PAT_MRT4577_113693C.1
cccacgcgtccggtttcgtgggtgagcgggtcgagatggcaggcgtcggatgttgagcaccgttgtcttcgtcggcaggcctcggctgggccacggacgaccactccctccacaacgccttcagcacctacggggaggtcctcgagtccaagatcatgctcgatcgggagacgcaaatgtcccgcggcttcaggttcgtcaccttctgcacggaggaggcgatgcggaacgccatcgagggcatgaacggcacggagactggacgggcgcaacatcaccgtcaacgaggcccagtcccgcggcggccgaggaggcggtggcggccgcggttaccgtggtggccgcggaggcggcagctacagcagtggcaggcgccgtgatggcggcggcggctaccggggtggcagcagatagcgtggtggcagcggcggctaccgtggtggtggcggcggctcagagagggcaaccgaggcggcggctactgaaactgcgacaggaactggaggaactgatcggaggggcccgcgcggccaagctatcct

SEQ ID NO: 683 - DNA, 683 bp, Zea mays
  Clone ID: PAT_MRT4577_113695C.1
ccgctgttttgtcggcggcctcgcctgggccacggacgaccactccctccacaacgccttcagcacctacggcgaggtcctcgagtccaagatcatcctcgatcgggagacacagaggtcccgcggcttcggcttcgtcaccttctccacggaggaggcgatgcggaacgccatcgagggcatgaacggcaaggagctggacggccgcaacatcaccgtcaacgaggcgcagtcccgcggcggccgtggaggcggcggcggtgggtacggtggtggccgtggaggcggcggctacggcggtggcgggcgccgtgatggcggcggcggctaccgcggtggcggcggctacggtgggggctgcggctacggtggtggcggcggcggctacggcggtggcaaccgtggcggtgggtacggcaactccgatgggaacctggaggaactgagcggtggggcccgcgccggcaagttatcctggttgctgccgtgttggttaccctagtccaaaggggtttatttttgtttctgtccggtttgggggtgccccactgggtttttgatggaagggcgctctgtgcaagtgttaggcttttttattcctggtttcaggagaccttgctttaccagcatggcctgggtacgtggtgttgtaccccgtttggcttttttttagtattttaggg

SEQ ID NO: 684 - DNA, 557 bp, Zea mays
  Clone ID: PAT_MRT4577_113696C.1
ggcgggcacggcttctcctccccctccggatcgggttcgggctcgcgaggttctccggggttcgggttcgtgggtgagcggatcgagatggcggcgtctgatgttgagtaccgctgcttcgtcggcggcctcgcctgggccacggacgaccactccctccacaacaccttcagcacctactgcgacgtcctggagtgccaagatcatcctccatcgggagacgcagaggtcccgcggcttcggcttcgtcaccttatccacagaggaggcgatgcccaaccccatcgatggcatgaacggcacagagctggacggcacgaacatcaccgtcaacgaggcccaatcccgcagcggtcgcagaggctccaccggagggtacggaggtggccgtcgaggcggcgactacggggagggtggccgccgtgatggccgcggcgactaccgcggcggcaacggctacggtgacggccgcggctaccgtggtggcggcgtccgctactgcggtgaaaaccgtctgcacggctacctgaactccgaccgaaactggatgaactgag

SEQ ID NO: 685 - DNA, 461 bp, Zea mays
  Clone ID: PAT_MRT4577_113698C.1
gcagcaccaagaagcaccattttttccttaagattaacttacaacaaagtctgacgggggtaacagcttccatcgctccccagtccatgctgtttgatgcatgggcctgctgaagccgaggacgaccacagcactaacaactgacacataccgaccttgcaatcaaaaacacagatgggcaacaacaaacactacacgtacgaagataaaccctgtggactagggcaaacaacacggcagcgaacaggataacttggccgcgcgggccccaccgctcagttcctccagttcccatcggagttgccgtagccgccgccacggttgccaccgccgtagccgccgccaccaccaccgtagccgccgtcgccaccgtagccgccgccgccaccgccgtagccgccggcgccatcacggcgaccgccaccgccgtagccggcgtctccacgggcaccaccgtaccc

SEQ ID NO: 686 - DNA, 526 bp, Zea mays
  Clone ID: PAT_MRT4577_113699C.1
ccttaggatttaacttagaataaagcctgacgggggtaacagcacccatcgatccgcagtccatgctggttgatgcatgggtctgctggagccgaggatgaacacagcactaacaactgacacagagcgaccttcaatcaaaaacacagatgggcaacaacaaacacgagacgaacgaagataaacactctggactagggtaaacaacacggtagcgaacaggataacttggccgcgcgggccccaccgctcagttcctccagttcccgtcggagttgccgtagccgccgccacggttgccaccggcgtagccgccgccaccaccaccgtagccgtcggcggcaccaccgtagccggcgtcaccggcgtagccggcggcggcatcacggggcccgccaccggcgtagccgccggcttcaccggcaccaacgtacccggcggcggcggcggcttcacgggcggcgggggaatgggccttcttgaccgggatggtgcgggccgtcagcttctttggcggtcatgcccc

SEQ ID NO: 687 - DNA, 460 bp, Zea mays
  Clone ID: PAT_MRT4577_113701C.1
cttcctacgctttcgtccattttttttttttgcagcaccaagaagcaccattttttccttaggattaacttagaacaaatcctgacaggagtaacagcatccatcgatccacagtccatgctggttgatgcatgggtctgctggagccgaggatgaacacagcactaacaactgacacagagcgaccttgcaatcaaaaacacagaggggcaacaccaaacgcgacgaactaagataaaccctgtggactagggttaacatcacggcagcaaacaggataacttggccgcgcgggccccaccgttgaatttcttcagttcccgtcgaagttgccgtaaccgccgccacggttgtcaccgtcgtagccggcaccaccaccaccggagccaccgccggcaccgtagccagcgtcgacaccgtcgtaaccgtcggcgccatcacggagcccgccaccaccgta

SEQ ID NO: 688 - DNA, 522 bp, Zea mays
  Clone ID: PAT_MRT4577_113705C.1
ccttaggatttaacttagaataaagcctgacgggggtaacagcacccatcgatccgcagtccatgctggttgatgcatgggtctgctggagccgaggatgaacacagtactaacaactgacacagagcgaccttcaatcaaaaacacagatgggcaacaacaaacacgagacgaacgaagataaacactctggactagggtaaacaacacggtagcgaacaggataacttggccgcgcgggccccaccgctcagttcctccagttcccgtcggagttgccgtagccgccgccacggttgccaccgccgtagccgccgacaccaccaccgtagccgccgtcgccaccaccgtagccgacgccaccgccgtagccgccgccgccatcacggggcccgccaccgtcgtagccgccgacttcacggccaccaccgtacccggcgacgtcgtcgtctccacggtcggcgcgggactgggccttgttgacggtgatgttggggtcgttcagtttcttgccggttcatg

SEQ ID NO: 689 - DNA, 714 bp, Zea mays
  Clone ID: PAT_MRT4577_113706C.1
agtgctttcttagaggtgggttggcttctcctccccctccggttcgggttcgggttcgtgaggttctccggggttcggtttcgtgggtgagcggatcgagatggcggcgtcggatgttgagtaccgccgcttcgtcggcggcctcgcctgggccacggacgaccactccctccacaacgccttcagcacctacggcgaggtcctcgagtccaagatcatcctcgatcgggagacgcagaggtcccgcggcttcggcttcgtcaccttctccacggaggaggcgatgcggaacgccatcgagggcatgaacggcaaggagctggacggccgcaacatcaccgtcaacgaggcccagtcccgcggcggccgtggaggcggcggcggcggcgggtacggtggtggccgtggaggcggcggctacggcggtggcgggcgccgtgatggcggcggcggctacggcggtggcggcggctacggcggtcggcgcgagggtggtggtggcggctacggcggcggcggcggcggctggagggactgatgtgtgggcccatcctggcttcggccgagttatcttatctatctatagtatcgtgttaccgttcgcttctgtcaccgtgattagtgtccgttctaccttttggatttaggtgctggtaccccctgttgttcccctcttgtttgctcccgcctatgaacgagacgagagaagaacga

SEQ ID NO: 690 - DNA, 434 bp, Zea mays
  Clone ID: PAT_MRT4577_113723C.1
ccttaagattaacttagaataaagcctgacgggggtaacagcatccatcgttccgcagtccatgctgtttgatgcatgggtctgctggagccgaggatgaacacagcactaacaactgacacagagcgaccttgcaatcaaaaacacagatgggcaacaacaaacacgagacgaacgaagataaaccctctggactagggtaaacatcacggcagcgaacaggataacttggccgcgcgggccccaccgttcagtttcctccagttcccgtcggagttgccgtagccgccgccacggttgccaccgacgtagccgccgccaccaccaccgtagtcgtcgccccaccgtagccgtcgccaccgtcgtagccgctcgcgtcatcacggtgcccgtcaccgtcgtagccgccgtcttcacggacaccaccgtaccca

SEQ ID NO: 691 - DNA, 500 bp, Zea mays
  unsure (1)..(500): unsure at all n locations
  Clone ID: PAT_MRT4577_113725C.1
ccccaccagnggcacgagccggccccacctctcagccccaattcatctccttcgagtggaaatgcggtgctcattttccgagctgagcgtatacgagaggcggcgtgggatgttgagtaccgatgcttcgtcggcggcctcgcctgggccacggacgaccactccctccacaacgccttcagcacctacggggaggtcctcgagtccaagatcatcctcgatcggaagacgcagaggtcccgcggcttggggttcgtcaccttctacacggaggaggcgatgcggaacgccatcgagggcatgaacggcaaggagctggacggtcgcaacatcaccgtcaacgaggcccattcccgcggcggccgtggaggcgggggcggcggcgactacggtggtggccgtggaggcggcggatacggcggaggcggacgccgtgatggcggaggtggctacggagggggcggcagctacgggggtggcggaggaggctacaaagggag

SEQ ID NO: 692 - DNA, 919 bp, Zea mays
  Clone ID: PAT_MRT4577_113729C.1
taatgggggggcattaccaagaagcaccactttttctttaggataaacttaaaacaaatcctgacgggggtaacagcatccattgacccacagtccacgctggtagatgcatgggtctgctggagccggggatgaacacagcactaacaacggacacagagcggccttgcaatcaaaaacacagatgggcaacaacaaacgagacgaacgaagataaaccctcgggactagggaaaacaacacgggagcgaacaggataacttggccgcgcgggccccaccgcttagtacctccagttcccgtcggaggtgccgaagccgccgccacggttgccaccgccgtaaccgccgccaccaccaccgtaaccgccgccgcccccgtaaccgccgccaccgccgtaaccgccaccgccatcacggcggccgccaccgccgtaaacgccgccttcacgggcaccaccgttaccaccgccgccgccttcacggccgccgcgggactgggcctcgttgacggtgatgttgcggccgtccaactcctttccgttcatgccctcgatggcgttccgcatcgcctcctccgtggagaaggtgacgaaaccgaaaccgcgggacctttgcgtcttccgattgaggatgattttggactcgaggacctccccgtaggttctgaaggcgttgtggagggagtggtcgtccgtggcccaggcgaggcccccgacgaaacaacggttctcaacattcgacgccgccattttgattcgctcacccccgaacccgaaccccggagaacctcccgaacccgaacccgaaccggagggggaggagaaaccaacccccctttaagaaaacccgtttttttttttttttttttttttttttttttttttttttttttttttttttttttttttttttttttt

SEQ ID NO: 693 - DNA, 559 bp, Zea mays
  Clone ID: PAT_MRT4577_113739C.1
gcagcaccaagaagcaccattttttccttaagattaactcaggaataaagcctgacgggggttacagcatccatcgatccggagtccatgctgtttggtgcatgggtctgatggaaccgtggttgaacacacggactaacaactgacacagagcgaccttgcaatcagacaaacacagatgggcaacaacaaacacgacactgaacgaagataaaccctctggactagggtaaacatcacggtagcgaacaagataacttggtcgcgcgggccccaccggtctattcctccagttcccgacggggttgccgtaaccgccgccacagatgccaccgccgtaaccggcgtcaccaccaccgtaggcaccaccggcaccgtagccggcgccaccggcgtagccgccaccggcatcacagctcccgccacctgccgtagccagcggctgcacatgcccaccgtacccaccggcgcgcgtctccacggactccgcggtactgggcctccttgaccgtgatgctgcggccgttcagctccctgccgttcatgccctcgatggcgt

SEQ ID NO: 694 - DNA, 1355 bp, Zea mays
  unsure (1)..(1355): unsure at all n locations
  Clone ID: PAT_MRT4577_113764C.1
tttgtgccccaacccaaaatgggccccccccttccgtgaaacccccccattacccatgcccgtttaccccccttccgcaaggggccaagggggcccggccccatcattgtcgttggcctgattattccaccaaagcatgatagtcccgtgcccccttggcccattgcaaaaaaaagagcttatctggtgcatcggcccttgaggggtagtgaagagactgcggacttcttccttttgccgtttgtgttcctctcccatgaaggcttttttcctcgggagtctcagtttcagctcctttcatttcacttttccttgagaaacttgctctcatgctttgttgcaataatcaggccaacgacaatgatagtgccgtgcacccttggcacattgcagaaagagtgtaaacagctatggttaatgggtggttttcatgaatggtgatgatcaatatatgtattgttgcacatgatcagcaatgttgtattggtggggtgactaatgcctgccgccaaactgagcgatataacgcatcattaatgacatttgttcaatctggactttaaacatttttccnaaaaaaaaaaaaaaaaaaaaaaaaaaagtgctttcttagaggtgggttggcttctcctccccctccggttcgggttcgggttcgtgaggttctccggggttcgggttcgtgggtgagcggatcgagatggcggcgtcggatgttgagtaccgctgcttcgtcggcggcctcgcctgggccacggacgaccactccctccacaacgccttcagcacctacggcgaggtcctcgagtccaagatcatcctcgatcgggagacgcagaggtcccgcggcttcggcttcgtcaccttctccacggaggaggcgatgcggaacgccatcgagggcatgaacggcaaggagctggacggccgcaacatcaccgtcaacgaggcccagtcccgcggcggccgtggaggcggcggctgtgggtactgtggtggccgtggaggcggcggctactgcggtggcgggcgccgtgatggcggcggcggctccggcggtggcggcggcggctacggtggcggcggtggctacggtggtggtggcggctacggcggtcggcgcgagggtggcggtggcggctacggcggcggtggcggcggcggctggagggactgatgtgtgggcccatcctggcttcggccgagttatcttatctatctatagtatcgngttaccgttcgcttctgtcaccgtgttagtgtccgttctacctttggattaggtgttggtaccctggtgttcgctttggttgctcccgctttgaaacgagacgagagaagatgagcaagggttt

SEQ ID NO: 695 - DNA, 2919 bp, Zea mays
  Clone ID: PAT_MRT4577_113768C.1
gtgctttcttagaggtgggttggcttctcctccccctccggttcgggttcgggttcgtgaggttctccggggttcggtttcgtgggtgagcggatcgagatggcggcgtcggatgttgagtaccgctgcttcgtcggcggcctcgcctgggccacggacgaccactccctccacaacgccttcagcacctacggcgaggtcctcgagtccaagatcatcctcgatcgggagacgcagaggtcccgcggcttcggcttcgtcaccttctccacggaggaggcgatgcggaacgccatcgagggcatgaacggcaaggagctggacggccgcaacatcaccgtcaacgaggcccagtcccgcggcggccgtggaggcggcggcggcggcgggtacggtggtggccgtggaggcggcagcagcggtggaggcggcggatctggtggtggtggaagcggtggcggcggcggatctggtggcggcggcggcggcggcggtgggacaagcggtcgttgccccgtggacgcgctgaagctgggcgtgtgcgccaacttgctgaacgggctgatcaacgcgaccctggggacgccgcccaggacgccgtgctgcacgctgatccaggggctggcggacctggaggcggcggtgtgcctctgcaccgtcctcagggccaacgtcctgggcatcaacctcaacctgcccatcaacctcagcctcctcgtcaactactgcggcaggcgcgtcccatcgggcttccagtgcttctgatatatatggtgtagtattatatatgtccatgcatgcaatgcatctcgtcgtccatcacatgttgttgttgttgtgtgtgttttcgatgatcctgtctctgttataaatatcattattattacagtaaaaaaaaaaaaaaaaaaaaaaaaaatgctttctcagaggtgggttggcttctcctccccctccggttcgggttcgggttcgtgaggttctccggggttcggtttcgtgggtgggcggatcgagatggcggcgtcggatgttgagtaccgctgcttcgtcggcggcctcgcctgggccacggacgaccactccctccacaacgccttcagcacctacggcgaggtcctcgagtccaagatcatcctcgatcgggagacgcagaggtcccgcggcttcggcttcgtcaccttctccacggaggaggcgatgcggaacgccatcgagggcatgaacggcaaggagctggacggccgcaacatcaccgtcaacgaggcccagtcccgcggcggccgtggaggcggcggcggtgggtacggtggtggccgtggaggcggcggctacggcggtggcgggcgccgtgatggcggcggcggctacggcggtggcggcggcggctacggtggcggcggcggctacggtggtggtggcggcggctacggcggtggcaaccgtggcggcggttacggcaactccgacgggaactggaggaactgagcggtggggcccgcgcggccaagttatcctgttcgctaccgtgttgtttaccctagtccagagggtttatcttcgttcgtctcatgtttgttgttgcccatctgtgtttttgattgcaaggtcgctttgtgtcagttgttagtgctgtgttcatcctcggctccagcagacccatgcatcaaccagcatggactgcggatcgatggatgctgttacccccgtcaggctttatcctaagttaatcttcaaggaaaaaatggtgcttcttggtgctgcaaaaaaaaaaaaaaaaaaaaaaaaaaaaaaaaaaaaaaaaaaaaaaaaaaaaaaaaaaaaaaaaaaaaaaaaaaaaaaaaaaaaaaaaaaagcctgagcactccatccactactttactcaaagtctagagctagcttttgctttgctcaccagacaaacagcagcagatggcgtcgacgatcatggccgccacctcccgcatcgtcgcggccaagacgccgtttcttggccagggtcgcgccgccgccgccgccgccaatgccagccccctccgcgacgtcgccgccgccgctgctggcggccggatcaccatgggcaacgacctgtggtacggcccggaccgcgtcaagtaccttggccccttctccgcccagacgccctcgtacctgaccggcgagttccccggcgactacggctgggacaccgccgggctgtccgcggacccggaggcgttcgcgcggaacagggcgctggaggtgatccacgggcggtgggcgatgctgggtgcgctgggctgcatcaccccggaggtgctggagaagtgggtgcgcgtggacttcaaggagcccgtgtggttcaaggccggcgcgcagatcttctcggagggcgggctggactacctgggcaaccccaacctggtgcacgcgcagagcatcctggccgtgctcggcttccaggtcatcctcatgggccctcgtcgagggcttccgcatcaacggcctcgacggcgtcggcgagggcaacaacctctaccccggcggccagtacttcgacccgctgggcctcgccgacgaccccgtcaccttcgccgagctcaaggtcaaggagatcaagaacggccgcctcgccatgttctccatgttcggcttcttcgtccaggccatcgtcaccggcaaggggcccctcgagaacctgctcgaccacctcgacgaccccgtcgccaacaacgcctgggtctacgccaccaagttcgcaccggggtcttaagctagctaccgggccgcggcgtgccaggacattgtgttgtacactactcgtttctgtcgtgatctgtaccatgaacgaatgcaaatattcttgtgctctcccagaaggaacgaactggactagttttgctcttccaaacaaaaaaaaaaaaaaaaaaggcccctagggcc

SEQ ID NO: 696 - DNA, 1398 bp, Zea mays
  Clone ID: PAT_MRT4577_113770C.1
cctcgaggccggccggggatccatctcccacgcccccgcctcgcctcgggatcccgccgccgctccatctgcctttgctcccccacccgcaggcagcgagcgacagcgacggcgagggatggccaaggccaggtcgttggcgaagcagaagcaggcgcagcaatcaaacggcggcggcggccacgcgctgtcctccaagctcgcccggtacctcgacccggaggcctccttggacaaggaccaactgctggacgcggtgcactggatccgccaaaaaaaaaaaaagacacgactctcggcaacggatatctcggctctcgcatcgatgaagaacgtagcaaaatgcgatacctggtgtgaattgcagaatcccgcgaaccatcgagtttttgaacgcaagttgcgcccgaagccttctggcggagggcacgtctgcctgggcgtcacgcgtgctttcttagaggtgggttggcttctcctccccctccggttcgggttcgggttcgtgaggttctccggggttcgggttcgtgggtgagcggatcgagatggcggcgtcggatgttgagtaccgctgcttcgtcggcggcctcgcctgggccacggacgaccactccctccacaacgccttcagcacctacggcgaggtcctcgagtccaagatcatcctcgatcgggagacgcagaggtcccgcggcttcggcttcgtcaccttctccacggaggaggcgatgcggaacgccatcgagggcatgaacggcaaggagctggacggccgcaacatcaccgtcaacgaggcccagtcccgcggcggccgtggaggcggcggcggtgggtacggtggtggccgtggaggcggcggctacggcggtggcgggcgccgtgatggcggtggcggctacggcggtggcggcggcggctacggtggcggcggcggctacggtggtggtggcggcggctacggcggtggcaaccgtggcggcggctacggcaactccgacgggaactggaggaactgagcggtggggcccgcgcggccaagttatcctgttcgctaccgtgatgtttaccctagtccagagggtttatcttcgttcgtgtcgtgtttgttgttgcccatctgtgtttttgattgcaaggtcgctctgtgtcagttgttagtgctgtgttcatcctcggtttcagcagacccatgcatcaaacagcatggactgcggatcgatggatgctgttacccccgtcaggctttattctaagttaatcttaaggaaaaaatggtgcttcttggtgctgcaaaatggttgtgctcatctgaaaagctacttactctcgctttgagtgcgaatcaaggcaaaggttgccagtttttcaaacaaaaaaaaaaaaaaaaaagcggcc

SEQ ID NO: 697 - DNA, 1199 bp, Zea mays
  Clone ID: PAT_MRT4577_113817C.1
cagttcttctgatttggtcatgatttatattcgaaatttaatttggaatttgtctaattattcaacacaaccaaactggcgcgcgcacgatgtatcgccaaacatttattcagctagctagttgagtaaaattcgtcttctggagagggaaaattggagctgggcctacggcaagcccgagcccttctccctggcctccctcatgttccgctcccgctctaccctgtccacatcccgcgcgatccggtcccgctccttcacggcggcgtccacgtcctccgcgtcggggaccacgcgctccttgacgccgtgcgcggtgtccttggccgcgtcccaggtgctccgcgccgcctgcttcgccatgtccccgatggcctgcgccgtctcggccaccttccccgcgccctccttggtcatctccaccaccttctccccgtacgacgcggtcccctccacggcccggtccttggcctccccggccctgtccatggcgcgccccgccgcctccccggtccggtccttggccgccttcgccgccccctgcgcccggtccgcggcctcgtgtcccgcctccttggcccgctccttcacgtgccccgccctgtccgcggcctcccgcgccgcgtcacgcgtctcgttcttcgctcgctccgtcgcccgggacgccgtgtccgcggcgtcctccgccacgcccttcgcctggtccttggcccgctcggccatgcccgacgcctggtccgccacgcggccggccttgtcctgcgccctgctcttcgtctccccggccatcctcttggcgtgctccttggcgtccccggtggcgtccttcgcctcctccgccgcgtccttgtacttgtcccctatttctctccggtcttccggcgcgttgtcgtatgcctgggacgatcttggcgcagcctgcaagcagaggcgggtccaggtcgctgcctgcgggcgcggcggaaggaagcacgccggcatgggaagagcctgcatgccagcagcgttgccgttaccggtgagctttgcggcgccggcgacgcgcgcgcctccgagcagcatggcagccatcagcctggacatagacgacgacgtcgacgactaattaacaggcgagacagtgcgttgacgtgaggtcttggatttggatcaacgagctaccaattgtggatgggtttcagggctaggcggtcccgtac

SEQ ID NO: 698 - DNA, 851 bp, Zea mays
  Clone ID: PAT_MRT4577_113942C.1
gagagttgccttggttggcataacatctatgtctttcgactttatcttaacctcagcagcaacagcatcatcatcttcgttgaacgaataagcaacatctttgaatgcctggagcagggtgctgttaagacctcatgtcctctttcattgactaaaactgtatcagctaataatagtgaaaactgcttcgtcttttcactggttgtttctgcctggatgttatgcaaaccaagggatacattaaaaaccattcccttttttatcctgcgatcattcttggcattcagatttaagccagattctcggaattcaaggcctattccagttccagctgactttgttagattaggaagaagttcaggtgcatccctctcaatcacagccactgcagcttgataaactgcactcatctgattgcctggtttcacttgttgaatagcagcttcatgagctttcctaagggtctcatatgctttattctgtgtaggggtagcgtcgataagatatgtccgagcaacatttgagcaatagctactgtatttggaaccaattgcacagatgataatacttgctgaatcataatacaggtactcgtcattgctagacgcaccaggctttagatcaaacttacccccactttgaaagactggagggtagcatatatcaacattatcaggcttcaatttcaccttgacctttagtgggtccagaatagccttctctgcgtcatccatcaacgatgagtgtgagacttccttctcctcatcgataaccttctccaacttaggaatcacaaaatttctcccggcctcgaaagtcccaatagcagccttcttacacatgtgatctct

SEQ ID NO: 699 - DNA, 2567 bp, Zea mays
  Clone ID: PAT_MRT4577_114301C.1
gatgagggaagcaaaatgacatagatgatgagggaagctaaggactcggatcggatgtatttcacaggattccacgacactcagagcagacccgaaatgtgacacgaagaagacacacggtcctgcctcctggcaatcaaggtactactagacactaccgtgacctgtaccaacagtgacccctttggacccacacgcagacacacacaaacaggcatcgccattgaccgtcgtccctcatcgctgaaaacttgcatattataggaaggaaggacacctcagtcgacctcctccatcttgctctcctccgcggcgccctcgtcaagcgcgggcatgtcggcgtcctcgtcgccagcagcatcctcgtcgatgttgaggccgagcttgagcatcctgtggatcctggccgcgaacgtgttggggtcgtcgaggctgaaccccgaggtgagcagcgccgtctcgaagagcagcagcacgaggtccttgacggacttgtcgttccggtcggcctcggcgcgcttccggagctcctccatgatgccgttgtccgggttgatctccatggtcttcttggaggacatgtacgcgctcatgctgctgtcacgtagcgcctgcgccttcatgatccgctccatgttggcggtccacccgtactcgcccgtcaccaggcagcacggcgagtcgacgatgcggtccgacaccaccaccttctcgacgcggtcgcccaggatgtccttgatcaccttgcacagctcctcgaaccgcttcttgcgctcctcccgccgcttcttggcctcctcgtcgtcctcgtcgtccagctttaggccttccttggttgccgacaccagcttcttgccgtcgtactccttgagctgccccacggcgtactcgtcgatggcgtccaccatgaacagcacctcgtagcccttcttcttgagacgctccaggaacggcgagttctccacggccttcctgctctcgccggtgatgtagtagatgtccttctgcccctccttcatgcgcgtcacgtagtccttgaggctcgtcgtctcgtcgccgctcttggtggagtggtagcgcaggaggtcggcgagcttggcgcggttctgcgagtcctcgtggatgcccagcttgatgttcttagagaaggcgtcgtagaacttggcgtagtcgtccttgttctccgcgatctcgaagaacatctcgatgcacttcttgaccaggttcttgcggatgaccttgaggatcttgttctgctgcagcgtctcgcgggagatgttgagcggcaggtcgtccgagtccaccacgcccttcacgaagcccagccactccgggatgagctcctcgcagttgtccatgatgaagacgcggcggacgtagagcttgatgttgttgagcttcttgcgcgtgtcgaacaggtcgaagggcgcgcggcgaggcacgaacaggatggccttgaactccagctgcccctccaccgagaagtgcttcacggcgaggtggtcctcccagtcgttggtcagagacttgtagaaggaggcgtactcgtcgcgcgtgatctcctcgggcttgcggagccagatgggcttctgcttgttgatctgcacccactcgtggctcacctccttcaccttcttcttctttttactcttatccttggtgtccttgtcctcgtcgtccacctcctcgacgtcgccctcctcctccttcttgttgtcctcctcctcctcgtcgtcgctgatctccttctcggtggtcttctccgtccacaggtagatggggtagctgatgaactccgagtgcttcttgacgaggtccttgaggcggcgctcctccaggtactcgagctggtcgtccttgaggaagagcgtgatcttggtgccccgaccgagctgctcccccgtggtgtcatgcgtgacggtgaaggacccgccggcctgggactcccacacgtactgctcgtcgtcgttgtgcttggtggtgaccatgaccctgtccgcgacgaggtaggcggagtagaagccgacgccgaactggccgatcatcgacacgtcggtggcgcccgcggccagcgcctccatgaactccttggtgcccgaccgcgcgatggtgccgaggttgttgacaaggtcggacttggtcatgcccacgccggagtcgatgatggacagcgtcttgctggccttgtccgggacgagccggatgaagagctccggctgcgcgtccagcttcgacttgtccgtcaggctctcgaagcggatcttgtcaagcgcatccgatgcgttggagatgagctctctgaggaagatctccttgttcgagtagaaggtattgatgatgagggagagcagctggttgatctcggcctggaatgcgaaggtctccgtctccgcaccgccagccatgtgcacgtccgcagacgccattgccctgcttgttgttgtcggagaatcgaatgcttagttgttgcggatagattgctgagagagagtgagagagaggcgaaggatcgatcgctcaattgttgctcggtttcgtgtcacgttcgggcttaattcgacccgcga

SEQ ID NO: 700 - DNA, 1272 bp, Zea mays
  Clone ID: PAT_MRT4577_114398C.1
atttgctggaacagttatatgaagagccatattgcatctagtgattttgagggtatagtacaggtttgggatgttactaggagtcaagtttttgttgggatgagggagcatgagcgacgcgtgtggtcggtggacttctcaattgtggacccaacaaaattggtcagtgggagtgatgatggatctgtgaaactgtgggatatgaatcaggctgggagtattggcactattagaacaagagcaaatgtgtgttctgtacaatttcaacctgatactgctcgctccattgccatcggctctgcagaccacaaaatttactgctatgatctacgtaacatacgagctccttattgtacactagttggccacacaaagactgtaagctatgttaagtatctggatgcatcaacaatactatccgcatctactgacaactcattgaagctttgggacttatcgatgaatccaggaaggataattgacagtccagttcaaacatttacagggcatacaaatacaaagaacttcgttggtctttccatatctgatggttacattgctactggctctgaaacaaatgaggtttttgtctaccacaaagaatttcccatgccagtgttggcttataagttcagcgtgacggaccctatatcgggacaggagattgatgatcagtcacagttcatttcatgcgtctgctggagagggcagtcttcaactctactttctgcaaattccagcggcaacattaagatcttagaaatggactgaggagtttgcatctgtttgagtctcagctataaatagaccgacttcttaggccgtgctcaacaaatcatgcatatagccgtggtagatgtcactgtctagggagttgagtttaaaatgagagattggatgagtaatgctgctagagatagcttaccaagttgtgcgcgtgcgtggcttcaaaatttgtggcgattaaatccagagttgccaacggtgcagcttaatccgagttgcagagttgggaaaggtagtagctgtagcagatttagcgtggttttataggattacagattagcgtggtagcaaaagtagcataaataggaaacagaattggggcgtgggatagtaccacggggaaaggttttgtacatcattggtttgaggtatacttgtacaggcaatcaatccagtttctacctaccagtaccagcatcagacttgctcttgtcatagtgttacttgaaaggtgaaaggtataaatcgctgtacatctgttgaatc

SEQ ID NO: 701 - DNA, 320 bp, Zea mays
  Clone ID: PAT_MRT4577_114420C.1
tcgtctttagtgaggtcctgttcttcatctacctcctacctcccatcatcttcaatgccgggttccaggtgaagaagaaacagttcttccggaatttcatgacaatcacactgttcggtgctgttggcacaatgatatccttcttcacaatctctctcggcgcaatagcgatattcagcagaatgaacattgggacgctagatgtcggggattttctcgctattggagctatcttttctgcaacggattctgtgtgcacgctgcaggtcctccatcaggatgagacgccctttctgtacagtctggtattcggagaagga

SEQ ID NO: 702 - DNA, 395 bp, Zea mays
  unsure (1)..(395): unsure at all n locations
  Clone ID: PAT_MRT4577_114454C.1
gaccgcngcggcccaggnnnccggcgccgagggcgggcaagggagggaagggncngcnggcggccaagacgacggcggccaagagcaccgacaaggacaaggacaggaagaaggcccccgngncgcgctcggggggcgcgggccnccagnncccggngggncgcacccaccgccagcgcaaggcgcgngccncngcgcacggccgcgncggcgccaccgccgccggcnannccgccgccacccgcgaggaccccaccgccgagggccccgagccggccggcnccgccggcaaggaccccangggcaagcgcancaccccgcgccacccgcagcncgccanccgcggggacgaggagcccgacacccccancaagggcaccancgccgggggcggc

SEQ ID NO: 703 - DNA, 2142 bp, Zea mays
  Clone ID: PAT_MRT4577_11460C.1
cccacgcgtccgcccacgcgtccgcggacgagtgggcagcccgccgcgcagagcagcgcagcgcagcgcaggcgccctccaactccgggctccgcaaccgctgctccccctccctccctccctccagctcggcctgcctcagcccgcgccgcgcgatgtcagaggaggacgaggaccagccgccgcccaagcggccgtgcgcgtcgccgcccgcggaccaggtgctcgacaacgtgctcgagacggtgctccagttcctggacgccccgcgggaccggagcgccgcctcgctggtctgccgctcctggcaccgcgccgagtccgccacccgcgactccgtcgccgtccgcaacctcctggccgcctcggccacccgcgccgcgcgccgcttccccaacgcgcggagcctcctcctcaagggccgcccgcgcttcgccgacttcaacctcctcccgcacggctgggacgcctccgccttccgcccctgggccgccgccgtcgccgcggggtccttccccgcgctcacctcgctctacctcaagcgcatccccgtcaccgacgctgacctcgacctcctctcccgcccgctcccggcgtcattccgcgacctcacactgcacctctgcgacggcttcacctcgcgcgggctcgcctccatcgcctcccattgcaggggcctgcgagtgctcgacgtggtggagtgcgacatggccgaggagcaggaggtcgtggactgggtggccgcgttcccgccggagcccaccaacctggagtcgctctcgttcgagtgctacgagccgcccgtggccttcgccacgctcgaggcgctcgtggcgcggtccccgcgcctcagccgcctgggggtcaacctgcacgtctcgctcggccagctgcgccgcctcatggcgcacgcgccgcgcttgtcgcacctgggcaccgggtcgttccgcccggcggaaggcggcgaggaggaggcagagttcggggaggttgtctctgcattcgtgtccgctgggcgagcgcgcacgcttgtttctctctccggcttccgtgacctcgcgcaagagtacctgccaatcatcgacgtggtgtgctcccacttgaagagccttgacttaagctacgccgcggtcaccccgaatcagatcctgatgttcatcgggcaatgctacaaccttgagacgctatgggtacttgactcggtgcgtgacgaagggctcgacgccgtggggatttactgcaagaagctccagactcttcgcgtgctcccattggatgcgcatgaggatgccgacgagttggtatcggaggttggccttactgccatcgcacggggctgccctgctctccgttcaatactatatttttgccagacaatgaccaacgctgctgttgtcgacatgtcgctccactgcccggagctcaaggtattccggttatgtataatgggacgacaccagccggaccatgcgactgaggagcccatggatgaaggattcggtgccattgttaagaactgtaggaagcttaccaggctatccacgtcgggtcaacttactgaccgggcgtttgagtacattggcaggcatggcaagtccctgcggacgctctctgtagcgtttgctggaaacagcgacgtggcgctgcaatacatcctccggggctgctcaaagcttgagaagctggagataagggactgccctttcggtgatgccggcctactctctgggatgcaccatttctataacatgcggttcgtctggatgtcaggctgcaacctgaccctgcgggggtgcaaggaggtggctcgggggctaccacgaatggtggtggagttgataaatggccagcctgatgagaacgagaggaaggaaagtgtggacatcttatacatgtatcggtcactcgatggtccaagggaagatgtaccaccatttgtgaagatcctgtgaagctgcttctggtagtatcatgctgctgcccttgatatgctagttgagtgcagatcatttaacggaatatatgtaagatgttgggctgcagatatggtacaattttttttatctcttcaaattcttaggaggatttccaaagcactgtaatggagcggcgggcagggtgttcaattgacgttgttgttct

SEQ ID NO: 704 - DNA, 2578 bp, Zea mays
  Clone ID: PAT_MRT4577_11461C.1
gggaagatgtaccaccatttgtgaagatcctgtgaagccgccgcgtctgcaggcagagcagcgcaggcgccctgcacctccactctgcagctctgctccccctccctctctcccgctcctcctccttttccttctccagctcggccgcctcagcccgcgccgcgatgtcagaggaggacgaggaccagccgccggccaagcgacccagcccgtcgccgcccgcggaccaggtgctcgacaacgtgctcgagacggtgctccagttcctggacgccccgcgggacaggagcgccgcctccctcgtctgccgctcctggcacagcgccgagtccgccacccgcgagtccgtcgccgtccgcaacctcctcgccgcgtcggccacccgcgccgcgcgccgcttccccaacgcgcggagcctcctcctcaagggccgcccgcgcttcgccgacttcaacctcctcccgcacggatgggacgcctccgccttccgcccctgggccgccgccgtcgccgccggggccttccccgcgctcacctcgctctacctcaagcgcatccccgtcaccgacgccgacctcgacctcctctcccgctccctcccggcgtcattccgtgacctcaccctgcacctttgcgacggcttcacctcgcgcgggctcgcgtccatcgcctcccattgcaggggcctgcgagtgctcgacgtggtggagtgcgacatggccgaggagcaggaggttgtggactgggtggccgcgtttccgcaggagccctctaacctcgagtcgctctccttcgagtgttacgagccgcctgtggccttcgcggcgctcgaggcgctcgtggagcggtccccgcgcctcagacgcctgggggtcaatctgcacgtctcgctcggccagctgtgccgcctcatggcgcacgcgccgcgcttgtcgcacctgggcaccgggtcgttccgcccggcggatggcggcgaggagggggcaggattcggggaggttgtctctgcattcgtggccgctgggcgagcgcgcacgcttgtttccctctccggcttccgtgacctcgcgcaagagtacctgccgaccatcgccgtggtgtgcgcccacttgaagagccttgacttaagctactccgcggtcaccccgaatcagattctgatgttcattgggcaatgctacaaccttgagacactatgggtacttgactcggtgcgcgacgaagggctcgacgccgtgggaatttcctgcaagaagctccagtctcttcgtgtgctcccgttgaatgcacatgaggacgccgacgagttggtgtcagaggttggccttactgccatctcacggggctgccctgctctccgttcgatattatacttttgccagaccatgaccaacgctgctgttgtcgacatgtcgcggaactgcccggagctgaaggtattccggttatgtataatgggacggcaccagccggaccatgcgactggggagcctatggatgaaggattcggtgccatcgttcagaactgcagcaagcttaccaggctatccacgtcggggcaacttactgaccgggcgtttgagtacattggcaggcatggcaagtccctgcggacgctctctgtagcatttgctggaaacagtgatgtggcgctgcaatacatcctccggggctgctcaaagctagagaagctggagataagggactgccctttcggtgacgccggcctcctctctgggatgcaccatttctacaacatgcggttcgtctggatgtcaggctgcaacctgaccctgcaagggtgcaaggaggtggctcaggtgctgccacggatggtggtggagttgataaatggccagtctgatgagaacgaaaggaatgaaagcgtggacatcttatacatgtatcggtcactcgatggtccaagggaggatgttccaccgttcgtgaagatcctgtgaagctgcgcttctgcggagatggctgggtatcgctatctatcagtgggtgcctggtggtattcaggctgctgcacttgatatgctggctgagtgcagatcatttaacggaatatatatgtaagttgttgagctgcagatgtggtacatttttatctcttagaaagatttcgaagcactgtactggagcggggcgggcgggggtatcatgtagtaggagttcatcagatgtggtacatttttatctagtaggagttcatcagtgtatccaaagcgttcacggcaggaggactaagtgcagcagagcaggcttcttcgagggggcctcatggctgcctcagttttgtttgctgctctggagggggctctggtttgaggaccatattttctgtgccggtgcaaccaccatgttttccttcaaattttcgaaatgaaacctgtcatatcagactatattagattcattggaacttacccctatgttgttgttggtgcatattttctgtttcattttttctcgctttagaactatatgagatgagatgagaaagacctcctgatctgagctactgtatattgttaaatgccaatgttcctagagtcccaagttgtttgatctg

SEQ ID NO: 705 - DNA, 456 bp, Zea mays
  Clone ID: PAT_MRT4577_114642C.1
gcacgcgttcggccacgcgttcggccacgcgttcgtccacgcgttcggccacgcgttcggggggccttcggatgcgagctggcgcgctttgacccggttgagttcctggagttcggccgcgggaaggcggtggcctttgtcggggacttgctggcgcggaaccacatgccgtcggtggtttggcttctggcccaaggggggtattccaagggcctggcggggaacccgttggaccaaaacaaggggtaccaattccgggcgtacaacttcaccatcagcatggtctggtcggcgttcctggtgcgcgcccgggagcccgaacacgaagggcccgtgcacacgggccactggagccttttccttgacgagcccgacgaccagtgggtgttccaaatggcccggttcgacttcctgctggtgtcggcgggccactggttcttccggcccttccttttt

SEQ ID NO: 706 - DNA, 136 bp, Zea mays
  Clone ID: PAT_MRT4577_114825C.1
cgatcattgtcatatacggagtacatactatgtattccaaagagagcgaaagctgccacagcaccatgacattacatggagggtggtggcactacatataacatcaccagtcgatcattgggcttacatcattttg

SEQ ID NO: 707 - DNA, 324 bp, Zea mays
  Clone ID: PAT_MRT4577_114846C.1
acgctcgccttttcactggactcactcgccatacacaccctctctccagctccgttcgagcgcctagcagcatcatgcgcggggcggtcacgtagtaagcaactctcggctccctctccccttgctccatatgatcgcgcaacccatcaagctacacgcgtggactgccttccctgcgtcggaacattacgggatcgcaaggatgcctgcgtcggtctacaaagccatctgcttacaaaaaccgcgctcaaaacgcaccaatgacagagaagcgacctccttcgcccgccgatcggactcaacgccgaggcccccacacgccaa

SEQ ID NO: 708 - DNA, 1354 bp, Zea mays
  Clone ID: PAT_MRT4577_115011C.1
gatccaattgcttcattcggggtagtaattttacaaagcccagttatggggatacattggtttcaaaaaaaaaaactcgaaattctcccgcctatccaccttgaattggattggatttgcttcgagcagtcagtcttgccgaagtttttaggagttctccgacctcgtagtcaatcactcagtctcggagacacacattgccactgcgatggccgcccaccaggactcggcggcatcggggagcgggcctcctcgttgtcctcgcgtcctcctggcagcctccggcagcgtggccgccatcaagttcgaggtcctctgccgcagcgtcgccgagtgggcggatgtccacgcggtggcgaccgcgtccgcgctggaattcatcgacgtggcctccttcccgtgcgacaacctcctcacctgcgacgaccaggagtggtactacagcaagcccgtttacgtcgcgccggccatgaacaccttcatgtggggcaaccccttcacggccatcgcgccgctctcggccaacaccctcgcaaaggtacgccgtacgcacgccagctggtcatcgcgctcgccctcaccggtcgccgctgacaactctgcctgctgccaggtcgccggcgggctgtgcgacaacctcctcacctgcgtcgtgcgcgcctgggactacagcaagcccgtttacgtcgcgccggccatgaacaccttcatgtggggcaaccccttcacggcgcgccacctcgccgtcctgcgcgacctcggcatgtccgtcgtcccgccggtcaatggcgcgatggcggagccgtcggagatctgcaagaccctcatgctcttcttcggtccgcaacatctttagcagtcgccaagctcctcagttctttgctcctttatgtatgatgagatgtgtcccttgcttgacctagcatagcaatatggcagtggagcgcttctcgtctttcatttccccgtacagatcgtcaagcaccctgaaaacctcctcagcttcagacggcggcgcgctccaggccgtgaaggcgaacaccttgttcctcacttcaatccagctctgccccggattcttcctcaaccctgcctccttcatcgtcatcctcaccctcttggagtcgtcccacatcccacacgcggcgtacaggtttgtgatcagcgtgcggttgccggtggttgccgtctcagcctgcagaactttggccatggcagcttcggccagtgctgcatccccgtgaatcctgcaggagttgagcagcgctccccacacgcacaggtcaggcttcatcggcatcgtatcaatgagctcacacgcgcccctcagcaggccagcacgccccaggagccc

SEQ ID NO: 709 - DNA, 276 bp, Zea mays
  Clone ID: PAT_MRT4577_115086C.1
gccctggcttgtttagcatatcaacccatcttcgacacactagagctagctagagagagatggaggggacggtttcctccttcccggtggagaacatggtgaagctggagaccgacgagagggccactgccatggaggtcatccgccacagctgttagaactggggcttctttctgctggtgaaccacggcatctcccacgagctggtggacgaagtggaacggctgaccaaggcgcactactccacctttcgggaggccaagttccaggagttcg

SEQ ID NO: 710 - DNA, 491 bp, Zea mays
  Clone ID: PAT_MRT4577_115129C.1
tccgttgctgtcgcctggagtttaccgggtgatctatgacaagacaaatcatagccccaaattttgatcgtggctatggtgaaccagacgagatgctggctttgacaagtttcaagaactttaaatgcgaacgaggagagaacagtggtgcacatatcatcagaataccatttggccccaaagaaaagcatctagctaaagaaaatatctggcctttcattcaagaatttgttgatggtgcactaggtcatattgtgcggatgtcaaaaactttaggcgaagaaactggcagtgtgtgtccagtgtggcctgctgtgattcatggtcattatgccagtgcaggagttgctgctgctctactatctggagcacttaatgtcccgatggtgtttaccgggcattttcttgggaaagataagcttgaagggcttctcaagcaagggagacagacaagagaacaaataaacgtgacatacaaaataatgcgccca

SEQ ID NO: 711 - DNA, 3641 bp, Zea mays
  Clone ID: PAT_MRT4577_115380C.1
gcctggctctggcttctgccatcccactcagcagtgccaaggcccagcgccgaccgagccttcccctcgcctgatctgcgcgtccctgtcctcggctcctgagcactcgcgtactcgctcgtcgcatctgcccacactaccactggccacaccgaaaccctagctgcgcacccaaatcgatcgatccagggacggcagcggcacgacgcgccaaaataggttcagaactagcgtcgcgacaaaatcggttcacgaccgccacggttggaccagctgcgccgtggccgtgcggctgtgcggccggcattggcgcgctgcgcgctgctgcaggccggtgtgccgcgcggctgggcgacgtgaaacggatccacatcgtaggagcagaacttgctggtcgaggtggaggcttgctgcgtgcagcaggacagggagtcagggacaacagattttagcaaagtatgagctgtgaattagtgttagaggaaagcacgaaggaaatagtggcataaaacttgatttgtctaaagataaattggtttcttaaaatggctcagcaaatggcttcagttcatttgaatgatacaacagttgttgatgccaagcccttgcgtacattaactcccatgttccctgcaccactagggcttcacacgttcactcctcagaactcaccttcagttgtttgtgtgaccccatttggaccatatgctggagggactgaattggggatgcctgctgttccaccaatgtttgcagcgcctgtacctgctgcaggagcagaacccagccagagacagccgcatacagctaatatgaacggaggagacactgaattggggatgcctgctgttccaccaatgtttgcagcgcctgcacctgctgcaggagcagaacccaaccagggacagccgcatacagctaatatgaacggaactgcagtcaacagttcggtcacatctttgcaaactcctccttcagctgccacacaggaatctggtaagaggaagaggggcaggccaaagcgtgtgcctgatactactgtttcttcggctccttcagctcctctggctcctactatttctccagttccttcacttcctgtggttactccagttccttcagctcctcaggaattgaacactattgtttccctgacgccttcttcagacgccccacaagaatctggcaagaggaagaggggacggcccaaacgtatacaagacgttcctgtaatggttcctctgacctcgcaaggagatagcacatctgttattcagacacttccagggtccagtgtacatgaatctggtacgagaaggggacgtcccaaacgtttgcaggatagttcagatattgtcactccaattgactcaaaagatagtgagtcctctccccagccacctattgccgcacctgccgaaagtggtaagaggaagaggggacgtccaaagcgcattgatggttccgtgactccttcaagtcattctgttttttcaatagatgatgatgctgttgacacgatgaaacgtggacgacctaggaaaattgataccaaactgttacagtttccatctttattttcagatgatcctagacaaactgcagataatgtactcatgatgtttgacgccctgcgacgcagacttatgcagatggatgatgtgaaacaagctgcaaagcagcagcctaacttgaaagctgggagcatcatgaacaatgctgaacttcgtgtcaataaggacaagaggataggagaggttccaggtgttgaggttggtgatatgttctacttcagaattgagatgtgcttagtggggttgaatagtcagagcatggcagggatagattacatgtctgccaagttcggtaatgaggaggaccctgtagctattagtgttgtgtcagctggtgtatatgataacactggagatgatccagatgttctagtttatactggacatggcatgtcgggtaaggatgaccaaaaacttgagaggggtaatcttgcactagagaggagtttgcatagaggtaatccaatcagagtcattcgtagcgtaaaagacttgacttgtccaactggcaagatttacatatatgatggtctttacaagatcaaagaagcctgggtagagaaagggaaatctggtttcaatgtgtttaaacacaagttgcttagggaacctggccaacctgatggcattgcagtgtggaagaagactgaaaaatggagggaaaatccatcatctagagaccatgttatattacttgacatatcatatggtgtggaaaataaccctgtctgccttgtaaatgaggttgacgatgaaaagggccctagccgcttcacttatacaactaatttgacatatgggaattctctcagctcgatgagaaagatgcaaggttgcaaatgcataagtgtatgcctccctggtgataacaactgctcctgtacgcatcgaaatgctggtgaccttccttacagtgcttcaggcatacttgttagccgaatgcccgttttatacgagtgtggtgattcctgcacatgttcacaaaattgccggaaccgagttgtacagaaaggtacgcagatccgttttgaagtttttaagacaggagatcgtggttggggcctccgtagttgggatccaattcgagcaggcacatttatctgtgaatatgcaggtgaaatcattgacataaatagagtgaatggtgaagatgactacatatttgagacttctcctttagagcagaatttaagatggaactatgcaccggaattgctgggtgagcctagtctttctgactcaaatgaaacaccaaagcagctgcctatagtcatcagtgcaaaacgaaccggcaacatagctcgctttatgaaccacagctgctcacctaatgtgttttggcaaccagttctctatgatcatggtgatgagggatatccacatattgcattctttgcaattaagcatattcctccaatgacagagcttacctatgattatggtcagaaccagcgtaatagtattcaaatgggaacccattctggttttcggaagtctaaaagttgcttatgttggtccccgaagtgtagaggttcctttggctaataaccagccctataaggaatatattggatcataatactccatttcaaagttacacctaagatatctgctggtcgacttttatattcagctcccaaaaatctgtcacaagtttgtgagagcaactgaattgtctttaccagcagaagcagcccgtcatggtggcctgtatgaagcagcaggggtctcctatgtcctaggtgttccatgcaccatcgaataaatccacccctcttcatgttagaatgggaaacggggatgtgttttgcacaaattatctgtcatgcagtcgtcgtattaagttttcttgaactagtttgtagtcatcctcagagaatgcatgatgtgcactttgtagtaatatatgcaggttgttatcccacctactatataaccatcaaaatttcagtgtttgtacaggacgccctatgtagtggcgctgcttgcaaatgttagttagtacactgatattccataattttactcctttccaaattaattcaacttataaaattattctaagtc

SEQ ID NO: 712 - DNA, 1280 bp, Zea mays
  Clone ID: PAT_MRT4577_115406C.1
cctcgaggccggccgggccgggatctccggcctcacaccgcaaccgcaagcaagcgaagcgcagagcctgcctgaccagagctagctgagctacagccaacagcagctggtctgactgacatggcgaaggacatcgaggcatcggggcccgaggcgggcgagttctcggccaaggactacaccgaccctccgccggcgccgctggtcgacgcggaggagctcacccagtggtccctgtaccgcgcggtcatcgccgagttcatcgccacgctgctcttcctctacatcaccgtggccaccgtgatcgggtacaagcaccagacggacgcgtcggcgtcgggccccgacgcggcgtgcggcggcgtcggcatcctcggcatcgcgtgggccttcggcggaatgatcttcatcctcgtctactgcaccgccggcatctcaggtgggcacatcaacccggccgtgaccttcggcctgttcctggccaggaaggtgtccctcgtccgcgcgctgctctacatcgtggcgcagtgcctgggcgccatctgcggcgtgggcctcgtcaagggcttgcagagcgcctactacgtgcgctacggcggcggcgccaacgagctcagcgacggctactccaagggcaccggcctcgccgccgagatcatcggcacgttcgtgctcgtctacaccgtcttctccgccaccgaccccaagcgcagtgcccgtgactcccacgttccggtgctagctcctctcccaattgggttcgccgtgttcatggtgcacctggccaccatccccatcaccggcaccggcatcaacccggcgaggagcctgggagccgcggtcatctacaacaaggacaaggcctgggacgaccaatggatcttctgggtgggcccactgattggcgccgccatcgccgccgcctaccaccagtacgtgctgagggccagcgccaccaagctcgggtcctaccggagcaacgcctaagttccggccggccgcccgcccgaacgcgccaggagctgggcaccgttacaattctgttcctccacatgacgccctgttccgtttccgtgtggccaggactccgcttgcttcctgctgttttctacttcggaccaaagtgtgacgtatcgttgctttctgtatatgtatgtaggaatgcatcatgtaacgagaatttggaatacaattgcgtgagtttttatccgatcacaatctattgagtagtggcaaaaaaaaaaaaaaaaaaaaaaaaaaaaaaaaaaaaaaccccagcc

SEQ ID NO: 713 - DNA, 470 bp, Zea mays
  unsure (1)..(470): unsure at all n locations
  Clone ID: PAT_MRT4577_115435C.1
gacatacacacaacaagcaaagcgaagcgcgcgcacagagatctagctgagctactagctatagcagcagctgctgcaggtctcctgacatggcgaagcaagacatcgaagcatcggggcccgaggccggcgagtctcggcaaggactacacgaacctccgccggcgccccgctcgacgcggatgaggtcaccaagtggtccctaccgcgggcatcgccgagttcatcgccacgctgctcctcctctaacatctaccgtgggcaccgggtcatcgggtacaagcaccagaggacggggcggcgtcgggcccgacgcgggcggggggcgtggncacccggcatcgcgtgggncttcggcggcatgatcttcatcctcgtcactgcaccgggcatctcaggtgggcatcaaacccggccgtgaccttcggcctgtcgggcggaggagggggcccctcgtccgcgccctgctc

SEQ ID NO: 714 - DNA, 304 bp, Zea mays
  Clone ID: PAT_MRT4577_11560C.1
cgcaacatcaccgtcaactaggcccagtcccgcggcggccgtggaggcggcgggggtgggtacggaggtggccgtggaggcggcggctacggcggtggcgggcgccgagatggctgtggcggatacggcggtggcggtggcatactgtggcggcggctgatacaggtggtggaggcagttgctacggcggtgtcaacctgtgttgcggttactgcaactcctacttgaactggagtaactgtacggaggggcctgctcagccaattttttactgttttttaccgtgatgtttaccctatttcat

SEQ ID NO: 715 - DNA, 321 bp, Zea mays
  Clone ID: PAT_MRT4577_115738C.1
cccccaaacaccatttttttccttaagattaacttaaaataaagcctgacgggggtaacaggatccattgatccgcaacccatgctgtttgatgcatgggtctgttgaagaccaggattaacacaggacttacaactggcacaaaggggcctttcaatcaaaaacacagatgggcaacaacaaacatgacacgtacgaagataaaccctttggacttggggaaacaacccgggagcgaacaggataacttgggcgagcgggccccaccggtcagttcctccagttcccatgggagttgccggagccgcccccacggttgcc

SEQ ID NO: 716 - DNA, 342 bp, Zea mays
  Clone ID: PAT_MRT4577_115781C.1
ataccgccataccacaagtcttcttcacaagtttaggagtgacagcaacaagagatctcgatgggctctggcaccgtgctcaagtcctacttccttaccaagaagtccgaatggggcgccaccaggcaggccgccgcgcttagaccgtccaccgtctccatggtcgtccgcgcctacgactacgccgatgagctctttaagaccgcgaaaacgatcgcgtcttcttggcggagcattctggcgatggacgagttttacgcgacgtgcgggaagcggctggcgtacatcgggctggagaacacggaagccaaccggcaagcgtaccgcacgctgctggtcacg

SEQ ID NO: 717 - DNA, 1795 bp, Zea mays
  Clone ID: PAT_MRT4577_115783C.1
cattgggtacctcgaggccggccgggaaggaaggagaagaagacgagtgtcaagtgaacctgaaacttgcggtgtcactggctggtatagcctgagtgtgagtgagtgatcgagctagctgagctccgatcctcgctagctagctaggataccgccataccacaagtcttcttcacaagtttaggagtgacagcaacaagagatctcgatggcctctgccaccgtgctcaagtcctccttccttcccaagaagtccgaatggggcgccaccaggcaggccgccgcgcccaggccgcccaccgtctccatggtcgtccgcgcctccgcctacgccgatgagctcgtgaagaccgcgaaaacgatcgcgtcgccggggcggggcatcctggcgatggacgagtcgaacgcgacgtgcgggaagcggctggcgtccatcgggctggagaacacggaggccaaccggcaggcgtaccgcacgctgctggtcacggcgccgggcctgggccagtacatctccggcgccatccttttcgaggagacgctgtaccagtccgccgtcgacggccgcaagatcgtggacatcctggtggagcagggcatcgtgccggggatcaaggtggacaagggccttgtcccgctcgccggctccaacaacgagtcgtggtgccagggcctggacggcctggcgtcccgcgaggccgcctactaccagcagggcgcgcggttcgccaagtggcgcaccgtcgtcagcatccctaacggcccctccgagctcgccgtcaaggaggccgcgtgggggctcgcacgctacgccgccatctcacaggttggttggtttggtttctactcctgccattattattggctgcaacctgcatgccatgaccttcatgcatgcaggacaacgggcttgtgccgatcgtggagccggagatcctgctggacggcgagcacggcatcgagcgcacgttcgaggtggcgcagaaggtgtgggccgaaaccttctacgccatggcggagaacaacgtcatgttcgagggcatcctgctgaagccgtccatggtgacgcccggcgcggaggccaaggacagggccaccccggagcaggtggccgcgtacaccctcaagctcctccaccgccggatccccccctccgtgcccgggatcatgttcctctccggcgggcagtcggaggtggaggcgacgcagaacctcaacgccatgaaccaggggcccaacccgtggcacgtgtccttctcctacgcgcgggcgctgcagaacacctgcctcaagacctggggcggccagccggacaaggtcaaggcggcgcaggacgcgctgctgctgcgcgccaaggccaactccctggcgcagctcggcaagtacacctccgacggcgaggccgccgaggccaaggagggaatgttcgtcaagaactacagctactaattaatcgcccgccggccatcacccgggataccgccgcccctccgagagatacgtgtgtactgatcgtggttaagcacgtactccgatccattcccatcacatgaagccatgataatgatgatatgatccatggaccatgcatggtgctctggtcgatgccgtacgtgtgtccctgatacaatactatttgtactgatgctagtcatcatatatatcgagctcgccactgcgaagtctgggagataatgcatgtatgcttgacggcgagatctgaggaaaaataatactatatatgtttcgaaaaaaaaaaaaaaaaaaaaaaaaagtcgacgcggccgcgattgcc

SEQ ID NO: 718 - DNA, 1749 bp, Zea mays
  Clone ID: PAT_MRT4577_115786C.1
cattgggtacctcgaggccggccgggaaggaaggagaagaagacgagtgtcaagtgaacctgaaatttgcggtgtcactggctggtatagcctgagtgtgagtgagtgagtgatcgagctagctgagctccgatcctcgctagctaggataccgccataccacaagtcttcttcacaagtttaggagtgacagcaacaagagatcgatggcctctgccaccgtgctcaagtcctccttccttcccaagaagtccgaatggggcgccaccaggcaggccgccgcgcccaggccgcccaccgtctccatggtcgtccgcgcctccgcctacgccgatgagctcgtgaagaccgcgaaaacgatcgcgtcgccggggcggggcatcctggcgatggacgagtcgaacgcgacgtgcgggaagcggctggcgtccatcgggctggagaacacggaggccaaccggcaggcgtaccgcacgctgctggtcacggcgccgggcctgggccagtacatctccggcgccatcctcttcgaggagacgctgtaccagtccgccgtcgacggccgcaagatcgtggacatcctggcggagcagggcatcgtgccggggatcaaggtggacaagggccttgtcccgctcgccggctccaacaacgagtcgtggtgccagggcctggacggcctggcgtcccgcgaggccgcctactaccagcagggcgcgcggttcgccaagtggcgcaccgtcgtcagcatccctaacggcccctccgagctcgccgtcaaggaggccgcgtgggggctcgcacgctacgccgccatctcacaggacaacgggcttgtgccgatcgtggagccggagatcctgctggacggcgagcacggcatcgagcgcacgttcgaggtggcgcagaaggtgtgggccgaaaccttctacgccatggcggagaacaacgtcatgttcgagggcatcctgctgaagccgtccatggtgacgcccggcgcggaggccaaggacagggccaccccggagcaggtggccgcgtacaccctcaagctcctccaccgccggatccccccctccgtgcccgggatcatgttcctctccggcgggcagtcggaggtggaggcgacgcagaacctcaacgccatgaaccaggggcccaacccgtggcacgtgtccttctcctacgcgcgggcgctgcagaacacctgcctcaagacctggggcggccagccggacaaggtcaaggcggcgcaggacgcgctgctgctgcgcgccaaggccaactccctggcgcagcttggcaagtacacctccgacggcgaggccgccgaggccaaggagggaatgttcgtcaagaactacagctactaattaatcgcccggccatcaccgcccgggataccgccgcccctccgagagagatacgtgtgtactgatcatggttaagcacgtactccgatccattcccatcccatgaagccatgataatgatgatatgatccatggaccatgcatgcatggtgctctggtcgatgccgtacgtgtgtccctgatacaatactattagtactgatgctagtcatcatatatatcgagctcgccactgcgaagtctgggagataatgcatgtatgcttgacggcgagatctgaggaaaaataatactatatatgcatgttaaaaaaaaaaaaaaaaaaaaaaaaaaaaaaaaaaaaataaaaaaaaaaaaaaaaaaggcccctagggcc

SEQ ID NO: 719 - DNA, 1731 bp, Zea mays
  Clone ID: PAT_MRT4577_115789C.1
cattgggtacctcgaggccggccgggaagggaggagaagaagacgagtgtcaagtgaacctgaaacttgcggtgtcactggctggtagcctgagtgtgagtgagtgatcgagctagctgagctccgatcctcgctagctaggataccgccataccacaagtcttcttcacaagtttaggagtgacagcaacaagagatcgatggcctctgccaccgtgctcaagtcctccttccttcccaagaagtccgaatggggcgccaccaggcaggccgccgcgcccaggccgcccaccgtctccatggtcgtccgcgcctccgcctacgccgatgagctcgtgaagaccgcgaaaacgatcgcgtcgccggggcggggcatcctggcgatggacgagtcgaacgcgacgtgcgggaagcggctggcgtccatcgggctggagaacacggaggccaaccggcaggcgtaccgcacgctgctggtcacggcgccgggcctgggccagtacatctccggcgccatcctcttcgaggagacgctgtaccagtccgccgtcgacggccgcaagatcgtggacatcctggcggagcagggcatcgtgccggggatcaaggtggacaagggccttgtcccgctcgccggctccaacaacgagtcgtggtgccagggcctggacggcctggcgtcccgcgagggccgcctactaccagcagggcgcgcggttcgccaagtggcgcaccgtcgtcagcatccctaacggcccctccgagctcgccgtcaaggaggccgcgtgggggctcgcacgctacgccgccatctcacaggacaacgggcttgtgccgatcgtggagccggagatcctgctggacggcgagcacggcatcgagcgcacgttcgaggtggcgcagaaggtgtgggccgaaaccttctacgccatggcggagaacaacgtcatgttcgagggcatcctgctgaagccgtccatggtgacgcccggcgcggaggccaaggacagggccaccccggagcaggtggccgcgtacaccctcaagctcctccaccgccggatccccccctccgtgcccgggatcatgttcctctccggcgggcagtcggaggtggaggcgacgcagaacctcaacgccatgaaccaggggcccaacccgtggcacgtgtccttctcctacgcgcgggcgctgcagaacacctgcctcaagacctggggcggccagccggacaaggtcaaggcggcgcaggacgcgctgctgctgcgcgccaaggccaactccctggcgcagctcggcaagtacacctccgacggcgaggccgccgaggccaaggagggaatgttcgtcaagaactacagctactaattaatcgcccggccatcacccgggataccgccgcccctccgagagatacgtgtgtactgatcatggttaagcacgtactccgatccattcccatcccatgaagccatgataatgatgatatgatccatggaccatgcatggtgctctggtcgatgccgtacgtgtgtccctgatacaatactattttagtactgatgctagtcatcatatatatcgatcgagctcgccactgcgaagtctgagataatgcatgtatgcttgacggcgagatctgaggaaaaataatttctataaaaaaaaaaaaaaaaaaaaaaaaaaaaaaaaaaaaaaaaaaaaaagaaaaaaaaaaaaaaaaaagcggcc

SEQ ID NO: 720 - DNA, 157 bp, Zea mays
  Clone ID: PAT_MRT4577_11578C.1
gctgcactcaggcttttgcagaggcttttggcattagatcccaacgataggccaactgctgcagaagcattagctgatccgtattttaaaggcatcgcagaagtagagagataaccatcatgccagcggataacaaaaatggaattcgagtttgagc

SEQ ID NO: 721 - DNA, 1805 bp, Zea mays
  Clone ID: PAT_MRT4577_115791C.1
cattgggtacctcgaggccggccgggaaggaaggagaagaagacgagtgtcaagtgaacctgaaacttgcggtgtcactggctggtatagcctgagtgtgagtgagtgatcgagctagctgagctccgatcctcgctagctagctaggataccgccataccacaagtcttcttcacaagtttaggagtgacagcaacaagagatctcgatggcctctgccaccgtgctcaagtcctccttccttcccaagaagtccgaatggggcgccaccaggcaggccgccgcgcccaggccgcccaccgtctccatggtcgtccgcgcctccgcctacgccgatgagctcgtgaagaccgcgaaaacgatcgcgtcgccggggcggggcatcctggcgatggacgagtcgaacgcgacgtgcgggaagcggctggcgtccatcgggctggagaacacggaggccaaccggcaggcgtaccgcacgctgctggtcacggcgccgggcctgggccagtacatctccggcgccatcctcttcgaggagacgctgtaccagtccgccgtcgacggccgcaagatcgtggacatcctggtggagcagggcatcgtgccggggatcaaggtggacaagggccttgtcccgctcgccggctccaacaacgagtcgtggtgccagggcctggacggcctggcgtcccgcgaggccgcctactaccagcagggcgcgcggttcgccaagtggcgcaccgtcgtcagcatccctaacggcccctccgagctcgccgtcaaggaggccgcgtgggggctcgcacgctacgccgccatctcacaggacaacgggcttgtgccgatcgtggagccggagatcctgctggacggcgagcacggcatcgagcgcacgttcgaggtggcgcagaaggtgtgggccgaaaccttctacgccatggcggagaacaacgtcatgttcgagggcatcctgctgaagccgtccatggtgacgcccggcgcggaggccaaggacagggccaccccggagcaggtggccgcgtacaccctcaagctcctccaccgccggatccccccctccgtgcccgggatcatgttcctctccggcgggcagtcggaggtggaggcgacgcagaacctcaacgccatgaaccaggggcccaacccgtggcacgtgtccttctcctacgcgcgggcgctgcagaacacctgcctcaagacctggggcggccagccggacaaggtcaaggcggcgcaggacgcgctgctgctgcgcgccaaggccaactccctggcgcagctcggcaagtacacctccgacggcgaggccgccgaggccaaggagggaatgttcgtcaagaactacagctactaattaatcgcccggccatcaccgcccgggataccgccgcccctccgagagagatacgtgtgtactgatcatggttaagcacgtactccgatccattcccatcccatgaagccatgataatgatgatatgatccatggaccatgcatggatggtgctctggtcgatgccgtacgtgtgtccctgatacaatactattttagtactgatgctagtcatcatatatatcgatcgagctcgccactgcgaagtctgagataatgcatgtatgcttgacggcgagatctgaggaaaaataatttctatatatgcatgtttcgagatggctctcccttaattaattattacataccgtgtgttactagcttagcttttgcctggctgccggctatatatatatacttgtttgccccaaaaaaaaaaaaaaaaacaaca

SEQ ID NO: 722 - DNA, 2498 bp, Zea mays
  Clone ID: PAT_MRT4577_115857C.1
cccgcccgtccgctgctgcctctgggccggcctgcgtgctctctgttaccgccacaaatggccttggtggtcttggactcgggctacctggggcccattacctccagtcggcactagtcattcgatgtatgtcatgtaacagcaattttttgaacacagatctgctataccctcacattgtttctgaccattcacaacagttcaggcttcttgatgtccctcagcgaccaagtggtcaatctgctcaacaaacagaagggatgagtggtctgcccctttatgatagccacaacgttgaggatgaaaatggctcacagaagtttgtctgcagattatgtgggctcaaatttgatcttctgccagatcttggccgccaccataaagtcgctcatatggtctcaggtgctgttggccacattccactgggccgtgggaagtaccagcttaaccgcggccgacactactattccgctttcaagaaaagtttgcgaccaacaagtacattaaagaagagcagtagctctggaatcgataaaaatttgaagtttcagatctctggcttaacatctcaaatagttgaatctgaaacatccagccttggtaagttacaggatttccaatgctcagatgttgcacaaactttattttccaagattcaaaagacaagaccccatccaagcaactttgatgttttatcggttgcccgctctgtatgctgtaagacgagtcttcttgctgcgttggaagttaaatacggacctttacctgagaacatatttgtgaaagctgcaaagctttgcagtgacaatggcgtccaaattgattggcatcaagagggattcatatgccctaaagggtgcaagtctagatataattcaaatgctctgcttcctatgcaactcacggcagttgattttcttgaagctcctgttgattcccgtaatgatgatgaaatgtggggaatggaagaataccattatgttcttgattcaaagcacttcggatggaagcctaaaaatgagagtgttgttctctgtgaagacataagctttggcagggagaaagttccaattgtctgtgtcattgatgtggatgcaaaagattctttaggtatgaagcctgaagaacttttgccacatggcagttctttgccttgggaaggatttcactatatcacaaaccgtgtgatggattcatctcttattgattcagagaactctatgcctgggtgtgcatgttctcatcctgaatgttctcctgagaactgtggtcacgtgagtctctttgatggtgtctacaatagcctggtggatatcaatggaacaccaatgcatggcagatttgcatatgatgaagatagtaaaattattttacaggaagggtatccaatatatgagtgcaattcatcatgtatttgtgactcgtcctgccagaataaagtattgcagaaagggctgcttgttaagttggaactctttagaagtgagaataagggttgggctattagggctgctgaacctattctacagggtacctttgtctgcgagtatattggtgaagttgtgaaggctgacaaggctatgaaaaatgcagaaagtgtgtcatcaaagggtgggtgcagttacttgtttagcattgcttcccagattgatagggaaagagttcggactgtaggggctattgaatactttattgatgccacaaggtctggaaatgtttcccgttatattagtcacagttgttccccgaatctcagtacccggttggttttggtagagagcaaagattgccagcttgctcacattggattgtttgctaatcaagatattgccgtaggagaagaactcgcctatgattaccgacaaaagcttgtagcaggcgatggctgcccatgccattgtggaactaccaattgccgaggccgtgtctattgattttgcaggaatacactaactgttcaatgctcggttgcagaactccagagatttcaacagttgtgtaggcttgctgagcgatttagcattgcaattttcctacagcttgagtgcagggctaggatctcattgttaatgctacaaatagtgattgtgatataggactcaggcaagcattaggcaataacatagtgtcgattttagtcatggtaccatcatgtttaactgattatttgttagaagcagcctgaaatgaaactgattcaggctgctctgttcgtaggcgagaattctctctgtaaaattccttcattcatattttatggttcatgagcaccatcattgacgtgaagtaataaactagttatcccagtggcctattgtgcggataatactccctctgttttttttagggagcgacaaattcgagaggtatttttagttgtactaattgcgtgatggatatcagcaatgaaaaaggttttttccaaaaaaaaaaaaaaaaaaaaaaaaaaaaaaaaaaaaaaaaaaaaaaaaaaactcgaggggggggcccgggtaccc

SEQ ID NO: 723 - DNA, 2210 bp, Zea mays
  unsure (1)..(2210): unsure at all n locations
  Clone ID: PAT_MRT4577_115917C.1
ccggccgggccgggttcgtcccttttcgatcgccctgccggctgccgctcgcccttttctctgtttcccaattcccatacgcatggaaacatctcgtcgacccaaacccatccacccacaaggcggaatacacgatccagtccgatcctcgccccgcgagctgctccaaaccctggcgatgtcgacggcggcggccgcgaagactccgatcaagaccctgggctccgcggccgcgggtgtcataactccgaccaaatctcaggcccccgcggcggccaagacgccctgtacctctcgcgcgcggtcctcccacgcatccgagaattccaaccccaacatcccgggcacgccgcctcccccgcagtcgacgccgtccaagcccagcctcaagtccccggcgggcgcgggagccaggtccgccaccgcgaagaaaaagccctccacgcccgcgccccccgcgccaccgctggagcgggagcggcgattcctcgtggcgaagaagggcgcgcggcggaggcgcaacgtcgggaccatgggaggcggcggtggcggccgcgggggagagatcgacttcgataagtgccgcgaggccgctcgcgaggcgctgcgcgcgtcgcagggggagttcttccgcaaggaggtcgccgcatccacagccaccggagagggtcaattgggacaggaggaggaggggaagccgctggctgaagaggatgtgaaaggtggagcattcgaggagcggcaggaggaggagaccgacgcggagctggaggggagcagcaaggttagggcgatgaggacgaaggcgatggctaaggcgatgagcagcgttccgaatcctggctctggccgcgtcaagcatatggtgcaggccttcgagagcctgctcaacatctccggcgccacctccgatgctgaaagggccggtgagggctcatgggcgctgcccgggttgcagctatggaaggaggatgataagggtgatctggggttcccaccagtgtcggtgttctcttctgctgatttccagaatgcagggtctaatcgactctgctcgtcactaaatggaaacaccgtcaggtcgagctgggacagcagaacatcgactggcgagtgcagcaggagaaattcatctgagtcactaaggagcagaacatcggctggcgggcgcagaagcaggagaaaccagtcatctgagtcactaaggagcagctggaacaaaaagctcaaggtcaccagccagcatccattcaagttgaggacagagcaaaggggaaagtttaaggaacagcagttcgtccaaaaggtgcaagagatgcttgcagaggaagagaagaagcgtattcatattgcgcaaggattgccatggactaccgatgaacccgagtgcttgataaagcctgcagtcaaagaaagaactgagccgatagaccttgttttgcatagcgatgtgcgtgcgcttgaacgtgcagaatttgatcagcacgttttggataggaacaagttcgctgagcaacaaagactagaatgggagaggcaacaggaattagaggaagaagaaaggataaggcaactgaggaggaccgagctggttcctaaagctcaacccatgccatactttgaccgccccttcattcccaaaaggtcgactaaaccggctacagttcccatggaaccgaaattccacctcaggccagaaaagatatcctgttactgtcgacagcaatgtatggagcttggaaagctgaatccacaacagcagtgccaacatccactatggcaatcgagaagtacagagcatcaacacacatgatccaaaaaatgtttccattcctgctgtcttcgtcattcttgattcgtcgtcttccatatgtgaagaaattgctatcaggcgtgtttttcagctttgctcggatcgcctggcctctaatttctgttatgtacatgcatatgcaaatcgttggctctgtgcttcagatgcaatcccaccaaggttggaattttgctgcccaagaaactgatcaagaaattcaaagatgaatttcggtggtacattattgacttcagatgaatagtcgagtaatctgttgctgttgctgacttggttgtgtatgggcataagtgtagcaaactgaaactttgcacaattaaatctctgcactccaacatgttcactacatgtgctcaaaaaaaaattngaaaaagaaatt

SEQ ID NO: 724 - DNA, 2031 bp, Zea mays
  Clone ID: PAT_MRT4577_115921C.1
gccggccgggttccgaaggtaaaaatgacatgagttcccgttttgctcccgagttctctctcacgtccatccctctctctcgtctcgttctttagcagggccggctggagcgcccactcctccctccagcccggccccagccgcgccgccgcgccggtcgtagacccaacgcccgccgcccagcccagcgcgccctccggccgtgaggcggagaggatcgggcgggcctcggggcgagcgccacgcgtagacggcggttgaggagcctgagaaaacaacggtcctccttcaagatcctgatccctacgcgcaggcgtaggagattgtattccgtctgattaatcggcggagagcaagcgggtgttgcggctgcgcgagcatggcgggcgaggaggctgcggagggcagcggaaccaggaggcacatggatctaaacctgtatctcggcctccctccattgccgcggcctccagtctggctggacccgacgttgatgcccaacttgaccggtgctgcgccagaatcctcaataactggtgagcctgaggaatcgttggccctgggggcggcagcctattctccgtcgaatgcactttccaccccggaggagcacccaatgcttgatcccatagtttattcctggctcgacggcaacaggaccgatggtgaagaggacactgatgctcctgagccggggccagtggatggtgccaatgtctctaggtcgcagcttgtggtagctgccacaggattggaaggggatgatgatcttcctctagtaaggtttgtgcgccctagccagatggttgttgctggtggaatggagacggtgaacacaagtatacttcagcagtccattcaaagggctgctgcaattgaggccaggactcctgaactccgctttcagagggtgatacagattagccagcagcatagaattgtgaggccagcatcagtgaaccgcagtcaaggggcagctagtacagatgcggataggcttgtctgggcaatccagcgcactcataactctttagaagcaacaaggcggcaaaaactagatgacaacaacttgtgtggaaacggttctgctaagaaggatgagtcctgtgactgcaactccagctttgagtgcaatatctgtcttgacccagctaaacagcctgtggttacaccctgcggtcacctcttctgttggccatgcttgtaccagtggcttcatgcacattcaccccactctgagtgccctgtatgcaagggtgaggtgctagaactgaatgtcactccgatatatggaagaggcggtgaagaagggaattccaccaaccctgacttcccacctaggccacgagcaaacagaagggagagcctgaggcaacagctgcaaatgacagacacaagaggaattgcaacagtggtgaggcagttgatacaaaaccagggtataattagcgttctcccaagcccaacagggatcgagatgtcggtggttcctgcaggccggcaaagggctagggctcggagacagcaaaggcaggataataatgcatcatcttccatacacgttgtagcgcagaatatgggcaatgttgcccctgagagcagcaaccaaatccagttgtcacattctaacggtgacaatgctgcacagatggttcttgcagctcctcagcagtcatcatctgtcgaacagctgtcaacttctagcaccacagctgttatattgggcgagcctgggtcaagtaggcggtcaaggccttcggagtctccaaccataagaagaacgaggaggaggccacagtaggtactcgagtgttgtcactcccttcagtaaaatctacagaccatgccccagtgatagttattaccatgattatctccaataacatctcaaggttaataatgtagaaatgtatatgccatcactggtttctgcctttctcttacattccatgtatcatctattatgcaaaacgagtcgaaatatcagttccagtatctatgataatcttgacctttgtatactgggaatat

SEQ ID NO: 725 - DNA, 2224 bp, Zea mays
  Clone ID: PAT_MRT4577_115927C.1
gggatgaaactttacttagaaaaatagtttctctcgttctttacttcgacaggagctggagcgcccgccctccagcccaggtccgcgccgccgccgcgccgaccacaatcccagcgcccgctgcccagacccagcgccgcctgcggttgtgagcgcgaacaggagagagcgggtcttcggggcgagcgccacgcgcagacggcggttgaggagcctgagaaaaccctggtcttccttcaagatcctggtggatcgcgcccagctccgcgaaatttccttgatgtctatgtaggttcgtcctaaagattcgattttgttggctcttttgatccgacgcagatccgtacggttctcgcctgattctgcaattcaggcgccaggaggcttgctggctgtttttggattggtgtcttctcccatggggtcttgcaggtgtaggagggtgaattctgtctgattaatcagcggagggcaagcggctactgtggctgcgcgaacatggcgggcgagcaggctccggagggcagcgggaccagtaggcgcatggatctaaacctgtatctcggactccctccattgccgaggcctccagtctggctaggcacagcgatgattgccccgacgttgatgcccaattcgactgcgccggaagccccaagaacaggcgagcctgacgaatcgctcgccccggcggcggcagcctattcgccttcgaatgcgctttccaccccggaggagcaaccaatgcttgatcccatagtttattcctggctcgatggcaacagtaccgatggtgaagagcacactgatgcttctgagccagggccagtcgatggtgtcaacgtccctaggtcgcagcttttggtagctgccactgggttggaaggggatgatattcctgtagtaaggtttctgcgccctagtcaggtggctgctggtggaatggagatggtgagcacaagtatacttcggcgatccaatcaaggggctgctgcaattgagtccgggacccctgagctccgctttcagagggtgatacagattagccagcagcacagcattgtgaggccagcatcagcgaaccacagtcaaggggcagctagtacagatgcggataggcttgtctgggcaatccagcgcacacataactcttatgaagcagcaaggcggcaaaagctagatggcgacaacaacttgtgtggaaacggtgctgctaagaaggatgagtcctgtgactgcaactccagctttgagtgcaatatctgtcttgacccagctaaacagcctgtggttacaccctgcggtcacctcttctgttggccatgcttgtaccagtggcttcatgcacattcaccccactctgagtgccctgtatgcaagggtgaggtgctagaactgaatgtcactccgatatatggaagaggcggtgaagaagggaattccaccaaccctgacttcccacctaggccacgagcaaacagaagggagagcctgaggcaacagctgcaaatgacagacacaagaggaattgcaacagtggtgaggcagttgatacaaaaccagggtataattagcgttctcccaagcccaacagggatcgagatgtctgtggttcctgcaggccggcaaagggctagggctcggagacagcaaaggcaggataataatgcatcatcttccatacacgttgtagcgcagaatatgggcaatgttgcccctgagagcagcaaccaaatccagttgtcacattctaacggtgacaatgctgcacagatggttcttgcagctcctcagcagtcatcatctgtcgaacagctgtcaacttctagcaccacagctgttatattgggcgagcctgggtcaagtaggcggtcaaggccttcggagtctccaaccataagaagaacgaggaggaggccacagtaggtactcgagtgttgtcactcccttcagtaaaatctacagaccatgccccagtgatagttattaccatgattatctccaataacatctcaaggttaataatgtagaaatgtatatgccatcactggtttctgcctttctcttacattccatgtatcatctattatgcaaaacgagtcgaaatatcagttccagtatctatgataatcttgacctttgtatactgggaatatattttctgatttagcctctgttaaaggtatgatatgccattataacttccccggtgtggacgttcctt

SEQ ID NO: 726 - DNA, 244 bp, Zea mays
  unsure (1)..(244): unsure at all n locations
  Clone ID: PAT_MRT4577_115969C.1
gcggtcctcgatccgatccgtcgagtgcacaccacctttcccactccgatcgaatcgatggccgccgagggcgagaagaagatgataaccctcaaaagctncgatggcgaggagttcgaggtggaagaggcggtggctttttgatcgcaggccatccgccacatgatctaagatgactgctcccacaagggatcccttttcctacgtcaactccaaaatccttatccacggtcatcgagtactg

SEQ ID NO: 727 - DNA, 370 bp, Zea mays
  Clone ID: PAT_MRT4577_115970C.1
cttcttttttttttttttttatttttatttggttttttttttttttttatttttttttttttttttgggaaaaaaagaaatttgggccattgaaataagggtccaagatacaaataataattttttggaaaacattgttaaagcacaaagggggacatgcttcctttggctttaaagggttgatgggaaactttccatgtttacttttcgaaaatccaggggggctgggtgttttgccaataaaaagggcccttggggaaccacaggggaattttcttattagcactcttaaagcgggcacttccataaaataaattcctgccaatggtgacaggaaaagcgccccgggtggggccgggcttaaaaacca

SEQ ID NO: 728 - DNA, 1525 bp, Zea mays
  Clone ID: PAT_MRT4577_115998C.1
ctcaaggaagggagagtgctccacagccttcttgctctcaccagtgatgtagtagatctcgttctgtccctccttcatcctggtcacatagtccttgaggctcgtcagctcatcaccactcttggtggagtggtacctcggaagctcagcaatcttggtcctgttctgggagtcctcgtggatgccaagcttgaggttcttggagaaggcctcgtagaacttgttgtagtcctccttgttctcagcaatctcaaagaagagctcaatgcacttcttgacaaggttcttcctgatgaccttgaggatcttgttctgttggagagtctcacgggagatgttcaggggaaggtcctctgaatcaacaatgcccttgacaaagctcaggtactcagggatcaactcctcacagttatccatgatgaagacacggcgcacgtacagcttgatgttgttggccttcttcttgttgtcgaagaggtcgaagggggccctcttgggcacaaacaggacagccttgaactcaagctgaccctcaacagagaagtgcttgacagccaaatgctcctcccagtcattggtcaagctcttgtagaaagcagcgtactcttccttgttgatctcctctggcttcctcatccagatcggcttctgcttgttgaccaagttccactcgtgagagacttccttgatcttctttttcttcttttccttctcttccttctcctcatcaacatcctcaaccttgccctcctcagtatccttcttctcctcctcatcttcatcgtcagaaatttccttctcagtggtcttctcggtccacagggagatggggtagctgataaactcagagtgcttcttaactagatccttgatgcggcgctcctcaaggtattccatctggtcgtccttgaggtagagcaccatcttggtacccctgccgagctgctccccagacgtatcacgagtgacggtgaaggagccaccggcctgagactcccacacgtactgctcgtcgtcgttgtgcttggtggtgacgacgaccctctcggcgacgaggtaggcggagtagaacccaacaccgaactgcccaatcatggacacgtcagcgccggcagcgagtgcctccatgaactccttggtccccgacctggcgatggtcccgaggttgttgacgaggtccgacttggtcatgccaatgccgctgtcgacgatcgtgagcgtgctggtcgccttgtcggggatgatgtggatgaagagctcgggctgcgcatcgagcttgctcttgtccgtgaggctctcgaacctgatcttgtccaaggcatcggaggagttggagatgagctcgcggaggaagatctccttgttggagtagaaggtgttgatgatgagcgagaggagctggttgatctcggcctggaaggcgaaggtctcggtctccgtcgccatggctgcgcgcgtccctgagctgctcgaggcggaggagaagcgtgcgggaggcggctagggttaggaggggtttgagagg

SEQ ID NO: 729 - DNA, 1112 bp, Zea mays
  Clone ID: PAT_MRT4577_116090C.1
aattcggcacgaggctcacctcctcctctccttttcttcctccctcagcctggcctcaactcccctcccatcccgtcccccgatctcatctcgccggcggcggcgatggcgggcaacgataattggatcaacagctacctcgacgccatcctagacgccggaaaggctgccatcggcggcgaccggccttccctcctcctccgcgagcgcggccatttctcccccgcgcgctacttcgtcgaggaggtcatcaccgggtacgacgagaccgacctctacaagacatggctacgcgcgaacgccatgcggagcccgcaggagaggaacacgcggctcgagaacatgacgtggaggatctggaaccttgcaaggaagaagaaggagttcgagaaagaagaagcttgtcgtatgtcaaaacgccagccagaaactgagaaaacacgagctgatgctactgcagatatgtctgaagatctctttgaaggagaaaaaggagaagatgctggtgatccatctgtcgcatacggggacagcaccacggggagctcacctaaaacaagttcaattgacaagctatacatagtattgatcagtctacatggtctggtccgtggtgagaatatggagcttggccgagattcagatacgggtggccagatcaaatatgtggttgaacttgctaaagcattaagttcatccccaggagtttaccgggttgacctgctaacaagacaaatcttagcaccaaattttgatcgtagttatggtgaacctaaagaattattggtttcaacaagtggtaaaaattataaacaagaaaagggagaaaatagtggtgcatatataattcggataccgtttggtccaaaagacaagtatctagctaaagaacatctatggcctttcattcaagaatttgttgatggtgcactcagccatattgtgaggatgtcaaaagccataggtgaagaaactggccgtgggcatccagtatggcctgctgtgattcatggacattatgccagtgcaggaattgctgctgcgttactttctggagcacttaatcttcctatggcgttcacaggacattttcttgggaaagataaattcga

SEQ ID NO: 730 - DNA, 1848 bp, Zea mays
  Clone ID: PAT_MRT4577_116175C.1
aactctctctctccacacacctggcaacctccctagacctggagcgcacgagagagagatagaagagagacggaccgacgaccgacggcgatctcgatcggtaggcagccgttgcttcttcttgcttggcgggcggggcggccaccatagccctctgtagctcagctcttgccggctttccttgtgctccttggaatctcgccctgcatatcttgtactacagtagctagctcctctgctactgtagagctacaggcaagagggaagcaggcagcgaccgagctctagctgttggctgtgcgactgcgagctagagagagagagagagggtgcgggcgacggacggaacggaacagaggagcctagtacttgttgtccgctgtctttcgtccgtgcgactggaccttattccctcacacctgcagctttgaggctcggccgtcacgtagtagtacgtgtacgtttcagggagggagccttctgacctcttgttcccttgccgccttttggtcacctcgggcaccgcgaggcgcagcacctgtgcttccttccgtcgtcttcctgcctcctcttctgttcaccgctctggcgctctcctatactcttctctctctctcgctgaggcaggcgggggcagcctttcctccccggtcgccatcctcgtttatatacacacaccctctcttgccgaaccactgctcgcttctctgcctgcttctgcttgagtcgtgccagtgacccgtgaccgtgaccgcgagcttcagggacgcgggcggcggcgatcatggcgtggcgcggcccgctcggagccggagaggaggccctggacagcggcctcgagctcagcctcggcctcccggcctacttcgcccggccttcaggtttggacgccgccagggaggagcccgccgaggcctctgcctacgctatccaggccgccagtgggagcaatgtctccaaggcaagggtcaggccagcgggcgcggcgccggtggtggggtggccgccggtgcggtcgttccggaggaacctggccgcctcctcctccaggccgtcgtcggggaaacacacccgccaggagggcagcgccaaggacggcctgttcgtgaagatcaacatggacggcgtgccgatcgggcgcaaggtggacctcacggcgtacggcggctacgccgacctctccgccgccgtcggcaagctcttccgcggcctgcttgccgctcagagggaccgagcggccacggcgggtggcgaggaggaggaggagggggagggccccgtgatcggcggcgactacacgctggtgtacgaggacgacgagggcgacagggtccttgccggcgacgtcccctgggagatgttcgtggccaccgccaagaggctgcgcgtgctcaagagctccgacgtgccggcctcgtcggtgacgctgggagctgggggcccggagaggtctgcagccgactgctgctgctgaaacgtgctctgcttcgtcagctgcttgtaaaaagtcccgagtggaggagacgaggagtggccctatccctggcctcttttttgtgtgttgctcttgctgcctttctgctagtggtactagtattgggtgccagtaaaaagtaggagaacaaagtcatgacggtattaaggatgtaatgtgcaagattagcagtggtagtagtcgtaaggtgtttaatgaatctacggtctctgttttggggcatattcgaccgtttaaagctgtatgcacgcgtcgaatttcggtgtggtttctgcatgccggccttaatgtttttcagcttttgtttgcacacgaacgctttagagcaagtttaataatagttggctctaact

SEQ ID NO: 731 - DNA, 660 bp, Zea mays
  Clone ID: PAT_MRT4577_116192C.1
atccacatattgttgcgaccaactagcatcctagaaagcacactcgagcaccaacaatggcagactgaatattctgactccttatgctccttggcctttctgcagtgctgctgcggcgaccatgttaccacaatgctcacaagctcctatagcttcccttcttcccccgcacctgtaccagcggagtcctaggtatgcgaaaacccaagtctccaaccgtataggatccaacaggcaatcggagcgtgggatctgacctgttatcaccctagatgctccaacagtcactcacacctataacaggagttacctttggagcatttattggcccacaacatcagggcccaacgactacaacaacttgtgctagcaaaccttgctgcctactttcagacacaacagatcctcacattcaaccatctagctgaatagaactctggttcttagttgcaacactcagcaagctaccattcagccagctatctgctgactacccacagaacctgcttccattcaaccagctgacaggtttgaactctcctgcttacttacagcagcaacaactactaccattcatgcagctcgctggcgtgagccctgctaccttcctgacacagccacaatcgttagacgttctaccagcacgctgcgcctaacgct

SEQ ID NO: 732 - DNA, 542 bp, Zea mays
  Clone ID: PAT_MRT4577_116302C.1
gggttctcgccatcttattgagaccacgtgcacatattgagcacaatagtgtaccaacaatggcagccaagatattctgcctccttatgctccttgggctttctgctcgtgctgctacggcgaccatcgtcccgctttgctcgcaagctcctatagcttcccttcttgccccgtacctctcaccagcggcgtcttgggcatgtgaaaacccagttcttcaaccctacaggctccaccaggcactcgcagctgtcatcttacctttatcacccttgttcctccagcactcatcacccctattacacctgtttcctttggtgcatttattgccacacatcatgacgccacagctgctacaacgacttgtgctagcgaaccttgctgcctactctcagcaactgcagttcctcttcttcaaccaactaggttcattgtactctgcttcttattcgctacaccctcatctacctttcagccagctacctgctgtctacccccagcagtttgtttcattctaccatctagcagcattgtactctcct

SEQ ID NO: 733 - DNA, 556 bp, Zea mays
  Clone ID: PAT_MRT4577_116335C.1
ggccgcttttttttttttttttttctttggttttttttttttttttttttttttttctttttttttttttttttttttttttttttttttattttttaaaaagggcctttcttatttcggggaagccacaaacatcttccaaaaaacaggattatggaactataacccataagcaatctaaaagggggcccccccaatgatgggttgttggaagaaccctcctgggttggtcaaagcaagttggttgaatgggagcaattgatgcagttgtaagagggggccaccgttaggcccagcgtgcgaggggaatgacaacaactgttgctgggtaaaaaaggcaccagggctcacattagctaactgggtgaatgggggtaactgctgttgttggaaataagcgggaaagttcaatgctgccagttggttgaatggaagtaattgctgggggtaggcagcaactagctggctgaaggggagttgttgttgcaaataagcagcagagttcaatgcagcccgttggttgaatggaagaaactgccgcccctgagagtaggca

SEQ ID NO: 734 - DNA, 235 bp, Zea mays
  Clone ID: PAT_MRT4577_116680C.1
tttatttttttttttttttatctcgaaaaggggcagttttggatttggtccaagctgcctcaagtatttccatgtacagctctcttactctcagctaagagacattatagtttttttagctcctatatatacacatggacactggcacgagcggggcaaccactgcacatatacattcattttagtcctagagtacctcctaacacccttgaccttggggcccggggcaccggtt

SEQ ID NO: 735 - DNA, 2667 bp, Zea mays
  Clone ID: PAT_MRT4577_116788C.1
gtttttgtttttttttttttttaagttctcaaagcaaatcaccgttacatataatagaaccaagaacagaagaacttggcgatgcgttccaattaccaaacatttttttagtcccacaggtgaatgttttctaccactgatgcgaagagaaactgaccacgcaaaacaacaacaaaattaactagaagacagcagagacaatagtagcactagcataccaacaacagattgcataatagcataagtggtaagacccacagaacagacccgatgttctcactctctttcctccataagaataaacccagcttagtctacctcctccatcttgctctcgccagcgtcatcctccagagggggcatgtcagtgtcagcctccggagcctcctcgtcctcgtcaatgctcaggcccagcttgagcatgcggtggatgcggctgccaaaggtgttgggatcgtcgaggctaaagccggatgtgagcagcgccgtctcgaacagcagcatgacaaggtccttaacagacttgtcgttcgggtcagcctcagcacgcttgcgaagctacaccatgatggcgttctcggggttgatctccatcgtcttcttggaggacatgtacccagacatgctggagtccctcagcgcctgggctttcatgatccgctccatgttggcggtccaaccgtactcgccggtcaccaggcagcagggggagtccaccacgcggtcggagaccaccaccttctccaccttgtcgcccagcacctccttgatgaccttgcagaggccctcaaacttctccttgagctcctccttgcgcttcttctcatcctcactctcgtccagcttcaggccctccttggtggcagagacgagcttcttgccctcaaactccttcagctgtccaatagaatactcgtcaatggcatccaccatgaacagcacctcatagcccttcttcttcagcttctcaaggaacggggagttctccacagccttcttgctctcgccagtgatgtagtagatgtcattctggccctccttcatcctggtcacatagtccttcaagctggtcagctcatctccgctcttggtggagtggtacctcaggagctcagcaatcttggtcctgttggtggagtcctcgtggatgccaagcttgaggttcttggagaaggcctcatagaacttgttgtagtcctccttgttctccgcaatctcaaagaacagctcaacgcacttcttgacaagattcttgcggatgaccttgaggatcttgttctgctggagagtctcacgggagatgttgaggggaagatcctcagagtcaacaatgcccttgacaaagctcagccactctgggatcagctcctcacagttgtccatgatgaagacacgtcgcacatagagcttgatgttgttctgcttcttcctggtgtcaaagaggtcgaagggggcccgctttggcacaaagagtacagccttgaactcaagctggccctcaacagagaagtgcttcacggcaagatgctcctcccagtcgttggtcaagctcttgtagaaagcagcatactcttctttggtaatctcctcaggcttcctcatccagattggcttctgcttgtttaccaattgccactcatgagaaacctccttgatcttcttcttcttcttttccttttcttccttttcatcatcaacatcctcaaccttaccctcctcatccttcttatcctcctcatcttcatcatcagagatctccttctcagtggtcttctcaatccagagagagattgggtagctgatgaactcggagtgcttcttgatcagatccttgaggcggcgctcctcaaggtactccaactgatcatccttgaggtagagggtcatctttgtacccctgccaagttgctccccagaggtatcacgtgcgacagtgaaggagccaccagcctgagactcccacacgtactgctcatcatcattgtgcttagtggtgacgacaaccctctctgcaacaaggtaggcagagtagaaaccgacaccaaactggccaatcatggacacatcagcaccagcagcaagtgcctccatgaattccttcgtgcctgaccgcgcaatggtaccaaggttgttcacaaggtctgacttggtcataccaatgccgctgtcgatgattgtcagcgtgttgttggccttgtcggggacaatgtggatgaacagctctggctgtgcatccagcttggtcttgtccgtcaaactctcaaacctgatcttgtccaaggcatcggaggagttggagatgagctccctgaggaagatctccttgttggagtagaaggtgttgatgatgagcgagagcagctggttgatctccgcctggaaggcgaacgtctccgtctccgaggccatggcgaaacgaccttcccgaacgcgaggagagcgcgagcggtaggcggcggctagaggggactgagaaagtggcacgagacgagggtttgtggggcgaagatgcgttgcggcgcggtgaggattttatcgttgggggaggaggcgaggggttctcgaatgttctacgagccactgggggccggggagcgcggttgactgacctgccgaccgatgggcccggagttacgccggctccagcgctccgcccccacgcgtccg

SEQ ID NO: 736 - DNA, 347 bp, Zea mays
  Clone ID: PAT_MRT4577_116827C.1
ccgacgcgtccggttaagctcgtgctcctatcgctcttcaccgtctgcatcaccttcgcatttcagctgagctgcctgaccgctaacgggccagtgatactgccagcggaggcgatcacgattgtggtggtgctggggctcaccttctacaccttctggtgctgccaataagggctacgagttcgaattcctggggccgttcctggtgtctgtctgcctcatccacatgctcttctagcaccagcgtatcatctgcgtgctgggcaagacccggaccatggtgtaacgctgcatcgctcagctcgtcttctccggtttcatgatctatcatcaccgacaaccgcatc

SEQ ID NO: 737 - DNA, 414 bp, Zea mays
  Clone ID: PAT_MRT4577_116932C.1
tcgttttcgtaagcgttcaaaccgaccaatgtgggcaactgtacacagagcgcgggccattgccggggaagaagcaacatgctgcgagccttctttatggcgagctccgaccatggatccaccaccggccccaaggacgtgccgggtagctactgcctgccgttggagggcgccgtgcgcgaccgcctcgacttctactacttccaggggcacgacaagtactgggagtcccccgtggagcgctacgggtccaccgtagtgcgcatgaacctgccgccaggccccttcatggtgcgcgaccagggggaggttgctgtcctggacgcccagagctttcccgtgctatgcgacatggacaaggctgacaagaaggacctgatcgccgtcacctacatgccgtccaccttccttacc

SEQ ID NO: 738 - DNA, 3401 bp, Zea mays
  Clone ID: PAT_MRT4577_116976C.1
gccggccgggtcgggatttctcagcgaagcagccacgcccacgcacacgcagtctggaagcgtttacatgacacgtccacccatcctgacctatcgccaagccaagagctacagttcccaagcgccgaggaaaagccggcccgaattccatcgtttcatcgaccgcccgctgcaatgaaccgcgcttcttggttgctccttgttctggtgcagctctcttgcttgcactgctactcagccacccgccatggccgctgccgttagcacggacgtccttggacctgccccccaggcagccgctgcgccggctccgttctcttcttgggaccaggctgccctgtgagtacctcaatcgtggttgtcaaggtgaacctgctcctgcgcgcaagtcgcaacggtggtggctgcagctgcggcgtgctccttcgctggaaagtggggcagtatcttttcgcatctcctcgactccgcctctctcggatctcgccgaaggacgagcaaaggcccctgatcgcccgcttctactacaactatattctgtcgccagcgcacaagcggcgggggcacggggtagattcggagcggctcttggcttgcagtccagacgcccttcacccctgatctggaccggagggagcggctccttccgtcagttgttcttgctttgcctgggcctcttccgcctgcttcgtgttcttcacaggagccggtgacctcggacgatatcttggaggacaagatgtcgggggctgttcttgtcgccatagtcgcctccatcggcaatctattgcaggggtgggacaatgccaccatcgcagctgctgttctgtatataaagaaggaatttcaattgcaaaatgagcccactgtggagggactaattgtgtcaatgtcacttatcggcgccaccattgttactacattctccgggccattatcagactcgattggccgacgccctatgcttattctctcttcaattctgtacttcttcagcggcctcatcatgctatggtctcctaatgtctatgtcctgctgttggcacgcttcgtagatggatttggtattggcttggctgtcacgcttgtgcctttgtacatttcagaaatagccccttcggagattagaggtttgctgaatacactaccacaattcagtggatcaggaggaatgttcttgtcatactgcatggtgtttgggatgtccctgtcgccatcacccgattggagaattatgcttggtgtgctcgcgataccttcattgttcttctttggtttgacaatattttatcttcctgaatctccaagatggctcgttagcaaaggtcggatggcagaggcaaaaaaggtgttgcaaaagttacgggggaaagacgatgtctcaggtgaattgtcccttcttctcgaagggttggaggttggaggagacacttccattgaagagtacatcattggacctgccaccgaggcagccgatgatcttgttactgacggtgataaggaacaaatcacactttatgggcctgaagaaggccagtcatggattgctcgaccttctaagggacccagcatgcttggaagtgtgctttctcttgcatctcgtcatgggagcatggtgaaccagagtgtaccccttatggatccgattgtgacactttttggtagtgtccatgagaatatgcctcaagctggaggaagtatgaggagcacattgtttccaaactttggaagtatgttcagtgtcacagatcagcatgccaaaaatgagcagtgggatgaagagaatcttcatagggatgacgaggagtatgcatctgatggtgcaggaggtgactatgaggacaatctccatagtccattgctgtccaggcaggcaacaggtgcggaagggaaggacattgtgcaccatggtcaccgtggaagtgctttgagcatgagaaggcaaagcctcttaggggagggtggagatggtgtgagcagcactgatatcggtgggggatggcagcttgcttggaaatggtcagagaaggaaggtgagaatggtagaaaggaaggtggtttcaaaagagtctacttgcaccaagagggagttcctggctcaagaaggggctcaattgtttcacttcccggtggtggcgatgttcttgagggtagtgagtttgtacatgctgctgctttagtaagtcagtcagcacttttctcaaagggtcttgctgaaccacgcatgtcagatgctgccatggttcacccatctgaggtagctgccaaaggttcacgttggaaagatttgtttgaacctggagtgaggcgtgccctgttagtcggtgttggaattcagatccttcaacagtttgctggaataaacggtgttctgtactataccccacaaattcttgagcaagctggtgtggcagttattctttccaaatttggtctcagctcggcatcagcatccatcttgatcagttctctcactaccttactaatgcttccttgcattggctttgccatgctgcttatggatctttccggaagaaggtttttgctgctaggcacaattccaatcttgatagcatctctagttatcctggttgtgtccaatctaattgatttgggtacactagcccatgctttgctctccaccgtcagtgttatcgtctacttctgctgcttcgttatgggatttggtcccatccccaacattttatgtgcagagatctttccaaccagggttcgtggcctctgtattgccatttgtgcctttacattctggatcggagatatcatcgtcacctacgggagccttcctgtgatgctgaatgctattggactggcgggtgttttcagcatatatgcagtcgtatgcttgatttcctttgtgttcgtcttccttaaggtccctgagacaaaggggatgccccttgaggttattaccgaattctttgcagttggtgcgaagcaagcggctgcaaaagcctaatttctttggtacctttgcgtgcaactattgcactgtaagttagaaacttgaaggggtttcaccaagaagctcggagaattactttggatttgtgtaaatgttaagggaacgaacatctgctcatgctcctcaaacggtaaaaaagagtccctcaatggcaaataggagtcgttaagttgtcaatgtcatttaccatatgttttacctatttgtactgtattataagtcaagctattcaacgctggttgttgctagaaatctttagaacaaagatgataatgatctgatctgatgttataatattcaaatctcaaataaagaaaatatcgtttctcatgttgtctttgcaagcttttgcactgttcaatatgaaaaaaaaaaaaaaaaaaaaaagctagggcggccgccgactgataagctc

SEQ ID NO: 739 - DNA, 445 bp, Zea mays
  Clone ID: PAT_MRT4577_11701C.1
ctttctacaggtgggttggcttctcctccccctccgattcgccatcgtgttcgtgaggatctcccgtgttctgctccgtcggtgatgcggatcgagatgcccgctgccggatgttgagtaccgctgctccgccggcgggctcgcctgggccacggacgaccactccctccacaacgccttcagcacctacggctaggccctcgagaccaagatcatcctcgatcggtagacgcacaggacccacctcttcggattcgtcaccttctccacggaggaggcgatgcggaacgccatcgagggcatgaacggtaaggaagctggacggccagaacattaccgacaacgaggcccatccccgccgcggtcgtggaggcggcggcggtggatactgatgtggacgtccaggccgcccataccgcaccggctggcgcctggatggcggcgg

SEQ ID NO: 740 - DNA, 298 bp, Zea mays
  Clone ID: PAT_MRT4577_117083C.1
ccgtgtacgccaccaccgccgaccccaagaatggctcgctcggcaccatcgggcccatcgccatctgcttcatcgtcggcgccaaggtcctctccgcggggcgcttcagccgcggctccatgaaccccggcacgtgccttctgccccggcgtcgccgcaggcgatgtcggcggaaactggggctactggatcgtcccgctcgtcttcggcagcctcgctggcctcgtctacgtggacgtcttcattggctgctcgtagcagcaggtctcggaccatgactacgcctagtttattcagc

SEQ ID NO: 741 - DNA, 300 bp, Zea mays
  Clone ID: PAT_MRT4577_117102C.1
atcggcctcagacggacatatatactatactatactctaggaagcaaggacaccaccgacatggcagacaagatgcttgcattgttcgctcttcaagctctttgtgcaagcgccactagtgcgacccatattccagggcacttgccgccagtaatgccatagggtaccatgaacccatgcatgcagtactgcatgatgcaacaggggcttgccaacttgatggcgtgtaccttactgatgctgcaaagactggtgagcttaccgctaagtccaagccagtgatgatgccccagatgatga

SEQ ID NO: 742 - DNA, 1624 bp, Zea mays
  Clone ID: PAT_MRT4577_117128C.1
cccctatcttggcttttctttggtcgtcgctactagcgggatacgagcgccaccttatcggttcccctctctggccctcccggcctcactcaccagcatcggctcttcagtcttcaccatggccgccgcccacctcctcgccgctttgtcctcctccaccgccttgcgccctcctctccgcctccgttctccacagcatccaccacatatccgcttcaactgtactgggaggcggccgttcccggtggtacgcgcggctgagaccgacgccaaaaacgcgaaggcgaacgccaaggccccgaataaggcacccgcggcggatggctccagtttcaaccagctgctcggtatcaagggtgctaagcaagagagcgacatatggaagatccgtcttcaacttactaagccggtgacatggcctccgcttgtttggggagttctctgtggagcagctgcctctggaaatttccactggacagttgaagatgtcgcaaaatctattgtatgcatgataatgtctggtccatgccttacaggatacacacagacacttaatgactggtatgatcgagacattgatgcaattaatgagccttatcggcctattccatcaggtgctatatcagaaaacgaggtaataacccagatctgggtgctattgctaggagggcttggattgggtgctttgttagatgtgtgggcaggacatgattttcctattgtgttttatcttgctgtgggtggctccttactttcttacatatattcagcaccacctctcaagctcaagcagaatggatggattgggaacttcgctctgggtgcgagttacatcagcttgccctggtgggctggccaggcgttatttggaactcttacaccagatatcattgtcttgactactttgtacagcatagctgggctagggattgctattgtaaatgatttcaagagtattgaaggggataggactctggggcttcagtcacttcctgttgcttttgggatggaaactgcaaaatggatttgtgttggagcaattgatatcactcaattatctgttgcaggttacctattgagcaccggtaagctgtattatgccctggtgttgcttgggctaacaattcctcaggtgttctttcagttccagtacttcctgaaggaccctgtgaagtatgatgtcaaatatcaggcaagcgcacaaccattcttcgtactgggcctactggtgacagcactggcaaccagccattaatgaaggcaaacttaaacagaacgagcaaccgttctgataccgaagaggcacgtctggtgaccattaataagctagctgcttgtgtgcagggtaggaagagaacgtctttttacttgtagaacacagatcgattttgtaagggttatgtggtgggaggaaaagttagcaatagcactggatgttgttgtagtaggatctgtagttgcacggtaagatcgttacttcgccattgttagcggttgaactggcaatgctttgaacaaacagttttgtgtatcggccgtattgttgtatgatcaaccctggaagattgtacaacctccgttctgagtatttgcacctcgttctcgagtatttgtaaaaaaaaaa

SEQ ID NO: 743 - DNA, 991 bp, Zea mays
  Clone ID: PAT_MRT4577_117130C.1
gtatatgtcatccctgactccctggatactgatgaaaatgattctcttcaggtaataacccagatctgggtgctattgctaggagggcttggattgggtgctttgttagatgtgtgggcaggacatgattttcctattgtgttttatcttgctgtgggtggctccttactttcttacatatattcagcaccacctctcaagctcaagcagaatggatggattgggaacttcgctctgggtgcgagttacatcagcttgccctggtgggctggccaggcgttatttggaactcttacaccagatatcattgtcttgactactttgtacagcatagctgggctagggattgctattgtaaatgatttcaagagtattgaaggggataggactctggggcttcagtcacttcctgttgcttttgggatggaaactgcaaaatggatttgtgttggagcaattgatatcactcaattatctgttgcaggttacctattgagcaccggtaagctgtattatgccctggtgttgcttgggctaacaattcctcaggtgttctttcagttccagtacttcctgaaggaccctgtgaagtatgatgtcaaatatcagcactggcaaccagccattaatgaaggcaaacttaaacagaacgagcaaccgttctgataccgaagaggcacgtctggtgaccattaataagctagctgcttgtgtgcagggtaggaagagaacgtctttttacttgtagaacacagatcgattttgtaagggttatgtggtgggaggaaaagttagcaatagcactggatgttgttgtagtaggatctgtagttgcacggtaagatcgttacttcgccattgttagcggttgaactggcaatgctttgaacaaacagttttgtgtatcgcccgtattgttgtatgaccacccctggaagattgtacacccaaaaaaaaaaaaaaaaaaaaaaaaaaaaaaaacccacaaacc

SEQ ID NO: 744 - DNA, 412 bp, Zea mays
  Clone ID: PAT_MRT4577_117161C.1
ttgagcacagcacagatcatatctgctaggggagcctgtgagatggggctcgcttctgctcactcggatgagtggccacgacctggcctccaagtgggtctgaccaacgatgcagctgcctactgcactggccttctgttgggtcgccgtgtgctcaagacccgcggtttagataaggaatatgagggcaatgttgaggccactggtgaggacttctgtgttgagccagctgatgagaggaggcctttccgtgctctcttggatgttggtcttatgtaggactacaactgggaaccgagtctatggtgccctcaagggagctcatggacggtggcctgcatatacctgacacagagaagaggcatgctggcttcaagcatgatgacaagcaggtggatgctgatatccatcg

SEQ ID NO: 745 - DNA, 377 bp, Zea mays
  Clone ID: PAT_MRT4577_117310C.1
gggtacaacagctgccttttttagggggcctaaaagaaaacagggttctgactggttgctcacaatccgaaaaaggttcagtctttgggtttaaataacagcattgccatttagttcgggggaataggtcccccaaacaaatgataatttactttaaaacaataaacaccccgtttaaaaaaatgcagaattcaaaatttacgctggtggccagcactacaagcaagggaaaaaggctccatgattgtttgaaggagccccgggccccaaaaagcttaaaaacaagggcattacttgggtgcaaatccatccttttttacaaaaaaaaattcccatttggccccctcaggtttttacacgggggggcaaatttttgg

SEQ ID NO: 746 - DNA, 407 bp, Zea mays
  Clone ID: PAT_MRT4577_117382C.1
gggtccagccacgcgtccgcaaaaacgtccgcccacgcgtctggcaccccgagctgtatagacgagctagtcggtagaacttgcacgagcggcgcagaacgaagtgcagataacaggacatatggctacgcctgcggtgaacgtttactgctgggctatctcaccgttcgtatcgcgggctctgctggccctggctgacgccggcgtcgactacgatctcgtccacatgaaccgccatgacggcgaccaccgccgcccggagcacctcgccagaaaccctttccggaacgtgccggtgctcgaagatggagacttcacgctcttcgaatcacgtgctatcgcgaagcatgttctccggaaacacaagccggcactgctgggcggcagcaagctggagcagacagtga

SEQ ID NO: 747 - DNA, 2474 bp, Zea mays
  unsure (1)..(2474): unsure at all n locations
  Clone ID: PAT_MRT4577_117391C.1
cgggccgccttcccgccggtgcctgagagtaaagcgaagtgcgcccgggcccccacaggaggtacacctaatctgtcacctcccccgccgcacctccgtagcctcttgaatctcgccggccacctcacgtcctcacctcgcgtggcctcccgttctgacttcggagtccctcggtctcaacgactagttgagagctcgcggctccgttcgggcgaggggaggaggttcatgaggctgctgtaggctccgttgcagccgccgcgggcgggagtccgtgattttggacgccccaccgcggcaagatccggaagcgcgttggctgttgtgccgtgagtttcagtttcggtggtcgattgcttcagcctgctgagaagtaggaggggcggccatggcggggtcgaggttcgggtcgttcaagtcggagaagggcgactccgcctccgcagcggcggcagcgggtggagcggcgcagaggagggacccgtacgaggtgctcggggtgggccgcaccgccaccgaccaggagatcaagagtgcgttccgacgcatggcgctcaagtaccatccggacaagaatggcgatgaccctgttgcatcagacaggttccaggaagtcacattctcctataacatcctgtcagatcccgataagaggcggcagtacgatacatcaggatttgatgcaatcgaatctgatagtcaggaactggagctggacttgtcgagtctcaacactgtaaacacggtgtttgcagctctttttagtaagcttggtgtgccaattaaaacaactgtttcagctacagttttagaggaggcattgaatggttcggttatggtttctcaactccagctaggaaactcagtgcagagaaaggtggaaaagcaatcggcccatttctattctgtggatataactgaaaaacaagctaaaatggggctagtttgtcgtgttcactcaaacgataaaagcaaattcaagttgctatattttgagcttgaagaaaatggcgggcttagtcttgcactacaggaagacagtgtgaaggttgggaaagttactgctgcagggatgtatttccttggttttcctgtgtaccgttttgaacaaaataacctggcagctgctgcaaaagattctgatggtgcattctttaaaagattggatagctttcagccatgtgacatacatgaactgaaacctggaacacacttctttgctgtctacggtgacaacttcttcaagagcgctagttatactatagaggttgtatgtggtgaatcttttcctgccgaaaaggagatgctacgaaatgtggaggccaagatactcacaaaacgagctgaactttccaaatttgagtcagagtatagggaggttttggcgaagttcactgaaatgaccagcaaatacacacaagaaatgcaagcgattgatggccttctgaaggaaaggaatgagatccatgcttcctataccaacaatccacctctaaaacggagttccagcaggaataaagccaagtcgccttcgaaagtggccaaaactggtacagaaaaacatcatcagaaggaaaagaaggtgaaggatcactgcatggagggatgtggaagtgacagcgataactcaagtgaaaagaaatcaaaagagcggttcccaaggaagaaatggctgaaccttccattcaaacttgacaggagaaagacgtgctgagcaatgtattatatgttccgttgctattctatcctgttatgcataatcctgagctgaactcacatttcttctctttctcatgcttttataggaagtccctctcggcccaacactagattgatatacagagaatttccactgtggcctcccgaaccaagccctctcccactgctaccaccttccttcgttgtacccggattatttcgtgtaaagatcacatgtgatcctaagaattaaaacgtgagtcgttttagcatatattgtgaagcacgtgctggcaagtttccgttcttggcattgggtcaaattgaggtgccctgcttccgattccctgctgcaccgtgcctatgtagcatgtaaagttgtatatgctgcgaatcgtagtacagctatatatttgtgtgtcctaaatcttgagtgtctttttactgccttctgtaaatgctccccaactgatgtaaatacaaaattccatgttcctcgccctaggatccgtgtgccaaattaaaaaaatttaaaaaaaaaaaaaaaaaataaaaaaaaaaaaaaaaaaaaaaaaaaaaaaaaaaaaaaaaaaaaanngggccgtgtggaaaaaatgggaaaagtttttcctgaaaaaaaaaaaaaaaaaagggccccttggtccgcaccttttttctctttttagtagggttaaatgccccctttgggcccccgtgggaaaaatttgggcatggttttcccccaaaaaaaaaaaaaaaacggcccccccgacccc

SEQ ID NO: 748 - DNA, 292 bp, Zea mays
  Clone ID: PAT_MRT4577_117490C.1
ggtacaggtctagaattcccgggccgacccacgcgtccacccacgcgtccgagtcagcaccgccttctgtgctgagattgttgagtccgcagatgcctacctctttgcaggccccattttcaatgactacagctctgttggctactcattcctcctcaagaaggaaaaggccatcatcgtccagcctgagcgtgtgatagtggggaatgggccggcattcggatgtgtgatgatgaaagagttcttgtctgaattggctaagaaggttaataagaacaccactgcctatgag

SEQ ID NO: 749 - DNA, 305 bp, Zea mays
  Clone ID: PAT_MRT4577_117564C.1
gcaaacgagaaccggggtcatttttttctcggctcgtttcatatcgggagcaaacaaagggaacaacaggggtaccaacacctaatccaaaggtagaacggacactaacacggtgacagaagccaacggttacaccattcttttgatagataagataaccttggccgaaaccagggaggggccaacaaataaattccttcaaaccgccgccgctcccctccgtatccgccacaaccacctttgggccgaccgccgtaaaccccaccggcttcatagtcggcggcaccaccctcgcgccgaccgcc

SEQ ID NO: 750 - DNA, 1912 bp, Zea mays
  Clone ID: PAT_MRT4577_117709C.1
ggaatcgcctattcccagtctgcatcgaacctgcatgattcctggtccatacgcatatgcgcatcagatgccaacaggcacacacagcatcacgtcctaaaagcgcgatgcgtgtgcttgcggccgtagatcacatacacacacacatggtaaaagaaacacacacgtccaatgcagccaattcatattattccgagacattaaaccaaacaaacagctttgcaaagccaccgtaacagaataccagtcaaatataggtcattctaaacaacaacgctgcaacaagggcaggtctttttttccctggaagaagcagcaggcttggagcacgaaaaccagcatccagccatcatttatcaacttgagaatcgaaacatagcatgcgggcataacatctagagtgtgtgcttaattaaaaacagcggcaaaggcaatggcaatggcaggcagcttcagcgcacgcgcaccggcgccgtgacgaagagaacaacacgaggtgtactagaagataagctatcagaaatcaagaacggcacagtcctggtaaactccccgacatcagcagacacgcatcaggtcgggagatcggatccgtcttactggccctcgggggcggattctttgggggcagcagctgcttccttgatctcatccccgccgtcctcgttggtgtcggaagtccataaggtcaagttgtcacgcaggagctgcatgatcagagtgctgtccttgtaggactcctctcccaggctgtctagctcggagattgcctcatcaaaggcctgctttgcaaggttgcaagcacggtcaggggagttgaggatctcgtagtagaacactgagaagttgagagcaagcccgagcctgatggggtgggttggagccagatcagcaagagcaatatcctacaaaccaaaagccaacaagaaagaaccacaattaacaatatatgcactgtcatcctatcagtatgaacacaatggtcaaacctgagcagctttgtaggcattcatggtgctctccgcagcatccttcctctctgcacctgacttgaactcagcaaggtacctgtggtagtcacccttcatcttgaggtagaagaccttggactcggcgccgccggcggatgggacgaggtgggagtcgaggagcgcgaggatgccgtcgcagatgcgggcaagctcggcctcgatcttggagcggtaggcgcggatggatgcggcgtgcgcctcgttcccgcggccttcctccttctgctcgatggaggagatgatccgccacgaggccctgcgggcgccgatgacgttcttgtaggcgacggacagcaggttgcgctcctccaccgagagctcgtccccgccgccggcgccgccggcggagcgcgcgacgcgctccatgaactcgaccatctcctcgtaccgctccgcctgctctgccagcttggccatgtacacgctctcctcccgcgtcggctccgacggcgacatagctgcgagcggcggtagggtgtggtgggacgggacgggtcggcggatcggggtcgccggcagcacggacggtcgcacggttgtgggtggcgcagaggatcctgtggagcggaagcgacgagtttcgctaggcatcatgatcatgcatcatggactcggcctactactgtggatttgtatgccattatagacttggtgctgtgaaagactgcttgatgatttgcgggtttgttgctgtgtaaaaaaaggtcccatggctcccagaagaccatgaaggttcggatctatcatgtaattccttgttatctgccaattatgtatggactatggacatgtgttgcgctgttcaacttactactacaaataagtaatcgataatgttcccttcacaaaaaaaaaaaaaaaaaagcccctagggccctcga

SEQ ID NO: 751 - DNA, 1407 bp, Zea mays
  Clone ID: PAT_MRT4577_117710C.1
cattgggtacctcgaggccggccgggctccgcacaaacgcgtcgcatccgctccacaggatcctctgcgccaccgcaaccgtgtgaccgcccgtgccgccggcgatcccgatccgccgacccgtcccagccccgctcgcagccatgtcgccgtcggagccgacgcgggaggagagcgtgtacatggccaagcttgcggagcaggcggagcggtacgaggagatggtcgagttcatggagcgcgtcgcgcgctacgccggggggcgccggcggcggggaggagctctcggtggaggagcgcaacctgctgtccgtcgcctacaagaacgtcatcggcgcccgcagggcctcgtggcggatcatctcctccatcgagcagaaggaggaaggccgcgggaacgaggcgcacgccgcatccatccgcgcctaccgctccaagatcgaggccgagctcgcccgcatctgcgacggcatcctcgcgctcctcgactcccacctcgtcccatccgccggcggcgccgagtccaaggtcttctacctcaagatgaagggtgactaccacaggtaccttgctgagttcaagtcaggtgcagagaggaaggatgctgcggagagcaccatgaatgcctacaaagctgctcaggatattgctcttgctgatctggctccaacccaccccatcaggctcgggcttgctctcaacttctcagtgttctactacgagatcctcaactcccctgaccgtgcttgcaaccttgcaaagcaggcctttgatgaggcaatctccgaactagacagcctgggagaggagtcctacaaggacagcactctgatcatgcagctcctgcgtgacaacttgaccctatggacttccgacaccaacgaggacggcggggatgagatcaaggaagcagctgctgcccccaaagaatccgcccccgagggccagtaagacggatccgatctcccgacctgatgcgtgtctgctgatgtcggggagtttaccaggactgtgccgttcttgatttctgatagcttatcttctagtacacctcgtgttgttctcttcgtcacggcgctggcgtgccggtgcgcgtgcgctgaagctgcctgccattgccattgcctttgccgctgtttttaattaagcacacactctagatgttatgcccgcatgctatgtttcgattctcaagttgataaatgatggctggatgctggttttcgtgctccaagcctgctgcttcttccagggaaaaaaagacctgcccttgttgcagcgttgttgtttagaatgacctatatttgactggtattctgttacggtggctttgcaaagctgtttgtttggtttaatgtctcggaataatatgaattggctgcattggaaaaaaaaaagtcgacgcgg

SEQ ID NO: 752 - DNA, 2754 bp, Zea mays
  Clone ID: PAT_MRT4577_117732C.1
gaaggtgacctcgagacggccggaatcgcgcgcacgaggccttccccacctacgtggtcatcctcactcccctcggcatcccgcagttgctcgtccccggacccgccgcactactgctataggcgcatccccggcgccttcgcacactctctccccggccacttcccaaatccgcccgccattcatgcacccttctgtgcactgtcagcgccaccattagctcgcagctcaagctcgccactaccattttggtcggttcttgaggaaatcgatcgaaccgttggagtgccaccactggcagaggctgttgcattcttgagttgagcaggaagaggagaggaagcaatggctctgtcgacgttctctgtcccaaggggattcctcggtgtgccggctcaggactcccatttcgcttcggcggtcgagctccatgtcaacaagctgctccaggccaggcctatcaatctcaagcctcggcggaggccggcatgcgtgtcggcgtcgctgtcgtcggagcgcgaggcggagtactactcgcagaggccgcccacgccgctgctggacaccatcaactaccccgtccacatgaagaacctgtctgtgaaggagctgcggcagctggccgacgagctccggtccgacgtcatcttccacgtctccaagaccggcggccacctcgggtccagcctcggcgtggtggagctcaccgtcgcgctgcactacgtcttcaacgcgccgcaggaccgcatcctctgggacgtcggccaccagtcgtacccgcacaagatcctgacggggcggcgcgacaagatgccgacgatgcggcagaccaacggcctggcgggcttcaccaagcgcgccgagagcgagtacgacagcttcggcacgggccacagctccaccaccatctccgcggcgctcgggatggcggtgggccgggacctcaagggcggcaagaacaacgtggtcgcggtgatcggcgacggcgccatgacggccgggcaggcgtacgaggccatgaacaacgccgggtacctggactccgacatgatcgtcatcctcaacgacaacaagcaggtgtccttgcccacggcgacgctcgacgggccggtgccgcccgtgggcgcgctcagcagcgccctcagcaagctgcagtcaagcaggccgctcagggagctcagggaggtggccaagggagtgacgaagcagatcggtggctcagtgcacgagctggcggcgaaggtggacgagtacgcccgcggcatgatcagcgggcccggctcctcgctcttcgaggagctcggtctctactacatcggccccgtcgacggccacaacatcgacgacctcatcaccatcctcaacgacgtcaagagcaccaagaccaccggccccgtcctcatccacgtcgtcaccgagaagggccgcggctacccctacgccgagcgagccgccgacaagtaccacggtgtcgccaagtttgatccggcgaccgggaagcagttcaagtcccccgccaagacgctgtcctacaccaactacttcgccgaggcgctcatcgccgaggcggagcaggacagcaagatcgtggccatccacgcggccatgggcggcggcacggggctcaactacttcctccgccgcttcccgagccggtgcttcgacgtcgggatcgcggagcagcacgccgtcacgttcgcggccggcctggcctgcgagggcctcaagcccttctgcgccatctactcgtctttcctgcagcgcggctacgaccaggtcgtgcacgacgtcgatctgcagaagctaccggtgcggttcgccatggacagggccgggctggtcggcgcggacgggccgacccactgcggtgcgttcgacgtcgcgtacatggcctgcctgcccaacatggtcgtcatggccccgtccgacgaggccgagctctgccacatggtcgccaccgccgcggccatcgacgaccgcccgtcctgcttccgctacccgagaggcaacggcgttggcgtcccgttgccgcccaactacaaaggcactcccctcgaggtcggcaaaggcaggatcctgcttgagggcgaccgggtggcgctgctggggtacgggtcggcagtgcagtactgcctgactgccgcgtccctggtgcagcgccacggcctcaaggtcaccgtcgccgacgcgaggttctgcaagccgctggaccacgccctgatcaggagcctggccaagtcccacgaggtgctcatcaccgtggaggaaggctccatcggcgggttcggctcgcacgtcgcccagttcatggccctggacggccttctcgacggcaaactcaagtggcgaccgctggtgcttcctgacaggtacatcgaccatggatcgccggccgatcagctggccgaggctgggctgacgccgtcacacatcgccgcgtcggtgttcaacatcctggggcagaacagggaggctcttgccatcatggcagtgccaaacgcgtagaacttgtgctgatctgggcctatagagatgattgtacattttgtcgttaactagagtgtctgaacttgggagattagtcttctttggatgaaagtgtcgccggaacaacagttaccgtttctttttttgaaagagaaaggcaaaagatttgccattccaatatattagaagaggtaaaaataaaaaaaaaaaaaaaaaaaaaaaaaaaaaaaaaaaaaaaaaagtaaaaaaaaaaaaaaaaaagcggcc

SEQ ID NO: 753 - DNA, 604 bp, Zea mays
  Clone ID: PAT_MRT4577_117733C.1
gaggtcggcaaaggcaggatcctgctggagggcgaccggggtggcgttgccacgcgaccggtcggcagtgcagtactgcctgaccgccgcgtccctggtgcagcgccacggcctcaaggtcaccgtcgccgacgcgaggttctgcaagccgctggaccacgccctgatcaggagcctggccaagtcccacgaggtgctcatcaccgtggaggaaggctccatcggagggttcggctcgcacgtcgcccagttcatggccctggacggccttcttgacggcaaactcaagtggcgaccgctggtgcttcctgacaggtacatcgaccatggatcgccggccgatcagctggccgaggctgggctgacgccgtcacacatcgccgcgtcggtgttcaacatcctggggcagaacagggaggctcttgccatcatggcagtgcctaacgcgtagaacttgtgctgatctgggcctatagagatggttgtacattttgtcgttaactagagtgtctgaacttgggagattagtcttctttggatgaaagtgtcgccggaacaacggttacagtttcttcactatgaaaatgggaaggagatgttcttg

SEQ ID NO: 754 - DNA, 2797 bp, Zea mays
  unsure (1)..(2797): unsure at all n locations
  Clone ID: PAT_MRT4577_117774C.1
gcggtgnngcggcccgctctagnnaactagtggnactcccccccgggcccttgcaggnaatnntcggcacccgagggattcgatcgctatctcctcttcgccctatagcaatgcgcggtaagcgcggcatttttcttatgcaggttgcataaccactggtgatatgagttgatctctattcgcttggaaagtagagataggttaaatttcggtctgaacggcgaaaccttaaataaaatcttaggatgctgtgtgagagaagcatgctggctccctcaaaggtatgtttgattgaagaatcaacggattgaaaatctcttatggatagaagtgcttattaactaaagattttgaagaagaagctgctgtctgctggaggtaggcttccttgaaatctaacgtcttaatgaacctttaagatcataacaacgtgcacgagtggtacatgctaacacgtcgaaacccttgtcacgaaagaatcatgtttctttcttccttccatttcctggcatttgatgctatgatgtgttcctcttgccagagaatggtgtggacaacgcggtaaatttggtgcagatggatggtgtgttcaaattgatcggagttctctggatggatacctatcgagtagtataattcctctctcagctcactgtccagacaattagtgctatctgtgactgttgggcaatcaggttatcgagattttgctggttggagctgtccggcattgctttcatcttttatcaatatgccggtctttggcagcatatggcgattcagaactgtgcgcagtggtttcctcgaatttaggaccccccaactgcattctgtattgagaacattcctgctaaatacatgatacttgcaggtattgtgttgtgtttgccagaaaccgtgtgctccccgaagcagtttagatatcttcctcccaaccttccctggcaaatcgcggtcactgctccgaagtccgaaccttcatacacatcgtctcgtttccgatttccccaaattcaggccacaggcgctacaggacccaggcaccactcggtcggcggccaccgcgtcgccccgcctgctcgattggggtcgcgtgtgcgataggaagtattgtgttgtgtttgcaacgtgatagcttgtactgggaacaaaggtcaagatgggcgccttggacctacaccttgactttgcttctgctcaacatggacaagccaagttaaaggaatatgccaagagctctttgttgtctgatggaaactacaatacagacaagatcaatggttcaaaccctgatgactatgagaaatttgagaaagggataatgcactatgggtgtccacattatagaaggagatgccgcataagagctccttgctgcaatgaaatttttgattgccgacactgccacaatgaaactaagaattccattaaaattgataaaatgaagaggcatgaacttccacgccatgaagtgcagcaggttgtatgctcattgtgtggcactgaacaggaggtgcgacaagtatgtatcaattgcggtgtttgcatggggaaatacttctgtggtttgtgcaaactcttcgacgatgatgtctctaaacagcagtatcactgcaacggatgtggaatatgtagaatcggagggagggagaatttcttccactgttcaaaatgtggatgttgctattcaattgcgctgaagaatagtcatgcatgtgttgaaggggcgatgcatcatgactgtccaatctgcttcgagtacttgttcgattcgacaaatgatgtttccgtcctgccttgtggtcataccattcatgtaaagtgcctgaaagaaatggaagagcactgccagtttgcatgccccctttgctccaagtcggtttgtgacatgtcgaaggcatgggaaaggctcgacatggagctggcaactctgtctgactcctgtgatcacaaaatggtccgcatattatgcaacgactgcggggcaatatcagatgtgcagttccatttgattgcgcacaagtgccagaattgcaagtcatacaacacccgccagatttgaagtaagaatcgcaagtcacacaacaccgtcagatctgaaatagcaaatcctgtgggggtttctgcatttcttcaagaagcgtgatggactgatggccccttcccgtgagctgctgagcaccgggatgtctggcaagacactcatcactgtatccactccactgggtcctgcggaggcaaacagctcgagattgtatatctgctgctagctgccgcccttcgttatgcataagcctactcttgccgttttactcctgtcgctccgtgattctagtgtaataatgttatatttagtgctgcttcaagcgtacggctgcggttgaacggcggcggcggctgctgagccacagtaccttgctgttgctgagactgcacccagccacagtgcgccgccgccgcagcagcttgtagctggactttatgaaggtgcctttgttccgcaaggaagagttcttggttgcgggtagctattaaggccatctccaatagatgtcctattatatcccttatttcatcctctatttcaaactttatataaatagtattaaatatctcatctacactgccctatctcctgatcttttaagacagtctttagttaggaaaatgtgaacggtgtgcacctgtggttgtacgtcaaatccggatcccattttctatgcatataattatagtgttgtgttcccaagttgtgatttactccccccgggcatagaagtacccatatagaaggtgc

SEQ ID NO: 755 - DNA, 3472 bp, Zea mays
  Clone ID: PAT_MRT4577_117777C.1
aattcggcacgaggcccgaatcctccagaaaccgtgtgctccccgaagcagtttaaatatcttcctcccaagcccttcggcacccctgccaaatcgcggtcactgctccgaagtccgaaccttcatacacatcgtctcgtttccgatttccccaaattcaggccacaggcgctacaggacccaggcaccactcggtcggcggccaccgcgtcgccccgcctgctcgattggggtcgcgtgtgcgataggaagttcgtcatacgcctcgcggtttttctagtttccgttttgatttctatgcgcccaatgttttgtccgattgattgatctgcttaggtacgtgagactgtctctattgttcgtgagtgcgtagatggtgggtgagtctggttgtttagatttgtgactggttgctcgacttgattgtgctgactgattgtttcatctatcgtgtaagctgtattaatgtctaatcccttaattgctttgaaaccactgcatgtgcttgattagtttggtttgtaccgacagcttttggtgcctatttgtgatgagattgaacatcctgctgcttgtgtttaatcttctaggttcgtgttcttgctgtatgcgtggttaatggttgactagtacttctctgatgctgaggatgattgctattgattgactagaatttaacatttccctgtggggaagtaatctcctatgttctgtcgaaagcagcacactctggcaactgtattgctgcatatattttccgtcaaaaaaatatttgctaaacatgaaaaccacacttattttgccttttcatctctccttgtggcacaatactatggcccagttttgaacctatggcccaacactcttagctaataactcaactaattgttaactaactcgcagctaacaattagttcattagctgcctcaatctagctaaccatttggttgctagtacttgttcgattcgacaaatgatgtttccgtcctgccttgtggtcataccattcatgtaaagtgcctgaaagaaatggaagagcactgccagtttgcatgccccctttgctccaagtcggtttgtgacatgtcgaaggcatgggaaaggctcgacatggagctggcaactctgtctgactcctgtgatcacaaaatggtccgcatattatgcaacgactgcggggcaatatcagatgtgcagttccatttgattgcgcacaagtgccagaattgcaagtcatacaacacccgccagatttgaagtaagaatcgcaagtcacacaacaccgtcagatctgaaatagcaaatcctgtgggggtttctgcatttcttcaagaagcgtgatggactgatggccccttcccgtgagctgctgagcaccgggatatctggcaagacactcatcactgtatccactccactgggtcctgcggaggcaaacagctcgagattgtatatctgctgctagctgccgcccttcgttatgcataagcctactcttgccgttttactcctgtcgctccgtgattctagtgtaataatgtcatatttactgttgcttcaagtatggcccgtacggctgcggttgaacggcggcggcggctgctgagccacagtaccttgctgttgctgagactgcacccagccacagtgcgccgccgccgccgcagcttgtagctggacttgatttatgaaggtgccggaagagttcttggttgcgggtagctattaaggccatctcgagtagatgtcctattacatcccttatttcatcctctatttcaaactttatataaatagtattaaatatctcataaaaaaaaaaaaaaaacgtgatagcttgtactgggaacaaaggtcaagatgggcgccttggacctacaccttgactttgcttctgctcaacatggacaagccaagttaaaggaatatgccaagagctctttgttgtctgatggaaactacaatacagacaagatcaatggttcaaaccctgatgactatgagaaatttgagaaagggataatgcactatgggtgtccacattatagaaggagatgccgcataagagctccttgctgcaatgaaatttttgattgccgacactgccacaatgaaactaagaattccattaaaattgataaaatgaagaggcatgaacttccacgccatgaagtgcagcaggttgtatgctcattgtgtggcactgaacaggaggtgcgacaagtatgtatcaattgcggtgtttgcatggggaaatacttctgtggtttgtgcaaactcttcgacgatgatgtctctaaacagcagtatcactgcaacggatgtggaatatgtagaatcggagggagggagaatttcttccactgttcaaaatgtggatgttgctattcaattgcgctgaagaatagtcatgcatgtgttgaaggggcgatgcatcatgactgtccaatctgcttcgagtacttgttcgattcgacaaatgatgtttccgtcctgccttgtggtcataccattcatgtaaagtgcctgaaagaaatggaagagcactgccagtttgcatgccccctttgctccaagtcggtttgtgacatgtcgaaggcatgggaaaggctcgacatggagctggcaactctgtctgactcctgtgatcacaaaatggtccgcatattatgcaacgactgcggggcaatatcagatgtgcagttccatttgattgcgcacaagtgccagaattgcaagtcatacaacacccgccagatttgaagtaagaatcgcaagtcacacaacaccgtcagatctgaaatagcaaatcctgtgggggtttctgcatttcttcaagaagcgtgatggactgatggccccttcccgtgagctgctgagcaccgggatatctggcaagacactcatcactgtatccactccactgggtcctgcggaggcaaacagctcgagattgtatatctgctgctagctgccgcccttcgttatgcataagcctactcttgccgttttactcctgtcgctccgtgattctagtgtaataatgtcatatttactgttgcttcaagtatggcccgtacggctgcggttgaacggcggcggcggctgctgagccacagtaccttgctgttgctgagactgcacccagccacagtgcgccgccgccgccgcagcttgtagctggacttgatttatgaaggtgccggaagagttcttggttgcgggtagctattaaggccatctcgagtagatgtcctattacatcccttatttcatcctctatttcaaactttatataaatagtattaaatatctcatctacactgccctatctcctgatcttttaagacagtctttagttaggaaaatgtgaacggtgtgcacatgtggttgtacgtcaaatccggatcccattttctatgcttaattatagtgttgtgttcccaaaaaaaaaaaaaaaaaaggccccta

SEQ ID NO: 756 - DNA, 2326 bp, Zea mays
  Clone ID: PAT_MRT4577_11786C.1
gggaccctcgaggccggccgggatcttcttggttggtcggaaatgagctcgacaggttgaggttgtcagccagcgagatatctgatctcctccggctccggtgcggtgaggaccccatcccgccggcggacaaaagttacatggcctgccccccgcccgaacaggaagagggcccacacgtcggccactctgtctgaccacagcacccccaccacctagcttgattcccaaaacgttttcccctggaaagagaaaaagagaaaaacggagattccttgcccccttttcccttccccatcgtcgaaaccctagccccgcctcgccgccggcacgccggatcggtcggcgccatgtccaaggccagggtctacgccgacgtcaacgtgctgcgccccaaggagtactgggattacgaggcgctcaccgttcaatggggtgagcaggatgactatgaagttgtcaggaaggtcgggagaggaaaatacagtgaagtatttgaaggtattaatgttaacaataatgagaaatgcatcatcaagatcctcaagcctgtgaagaaaaagaagatcaaaagagaaattaaaattcttcagaatctttgtggaggccctaacattgtgaagctgctcgatattgttagagatcagcattcgaaaacgcccagcttgatctttgaatatgttaacaacacagatttcaaagtgctgtacccaacattaacagattatgacattcggtattacatctacgagttactcaaggcattagattactgccattcacaaggtattatgcaccgagatgtgaagccccacaatgttatgatagatcatgagcttcggaaactccggctgatagactggggtcttgctgaattctatcatcctggcaaggaatataatgtccgtgttgcatccaggtacttcaaggggcctgagcttcttgttgacttgcaagattatgattactctttggacatgtggagtctgggctgcatgtttgctgggatgatttttcgtagggaaccatttttctacgggcatgacaactatgatcaaaggagtactgggactacgaggcgctcaccgttcaatggggtgagcaggataactatgaagttgttaggaaagttgggagagggaaatacagtgaagtctttgagggtattaatgttaacaataatgagaaatgcatcattaagatcctcaagcctgtgaagaaaaagaagatcaaaagagaaattaaaattcttcagaatctttatggaggccctaacattgtgaagctgcttgatattgttagagatcagcattcaaaaacaccaagcttgatctttgagtatgtcaacaacacagatttcaaagtgttgtacccgacactaacagattatgacattcgatattacatctatgagttactcaaggcattagattactgccattcacaaggtattatgcaccgagatgtgaagccccacaatgttatgatagatcatgagcttcggaaactccggctgatagactggggccttgctgaattctatcatcctggcaaggaatataatgtccgtgttgcctccaggtacttcaagggtcctgagcttcttgttgacttgcaagattatgattactctctggacatgtggagtctgggctgcatgtttgctggaatgatttttcgtaaggagccatttttttacggtcatgacaaccatgatcaacttgttaagatagccaaggtacttggaacagatgggctgaatgtctatttgaacaagtacagaattgagcttgaccctcagctcgaagcccttgttggaaggcatagcaggaaaccctggacaaagtttattaatgcagacaaccaacacctagtgtctcatgaggccatagatttcctcgacaagcttttgcgttatgatcatcaggacaggcttactgcacgtgaagctatgacacacccatacttccaacaagtgagggctgcagagaacagcaggacgcgggcatgagaggccaaagaccaaagaggcaaagactggtgctaaccgtggatcagatcatctgctcttggtggagccatgctcttaccagtgatgaatagtggtttgggggtttacttggcaaaaacaaacagtagctatggcgcctgttgtacccttaaccgcgtcgagacgtgactgaattactcaggtcatcggcttgtgggacgtgattgcgaacgagattattcatgtaagatgtttgtcataaaaggtcgtcgttggctgattgtgctgtttgtattgttgagctagtaaagaatatccaaaatttgtttggacttc

SEQ ID NO: 757 - DNA, 1620 bp, Zea mays
  Clone ID: PAT_MRT4577_11789C.1
ttgggtacctcgaggccggccgggggatctatccccccacgtagcacatcaactcggagtcggagattcccctcccagccgtcgaaagtcgaaaccctagccccgcctcaccgccggcggtggtggcagcctcagcaccggcacacagcccgccgtacctctcctcgtacgctccctcccggtgtgccgtcgccccctcgaccggtccatcgttcgtcggctcggtagccgccggatcgggatcggccggcgccatgtccaaggccagggtctacaccgacgtcaacgtgctgcgccccaaggagtactgggactacgaggcgctcaccgttcaatggggtgagcaggataactatgaagttgttaggaaagttgggagagggaaatacagtgaagtctttgagggtattaatgttaacaataatgagaaatgcatcattaagatcctcaagcctgtgaagaaaaagaagatcaaaagagaaattaaaattcttcagaatctttatggaggccctaacattgtgaagctgcttgatattgttagagatcagcattcaaaaacaccaagcttgatctttgagtatgtcaacaacacagatttcaaagtgttgtacccgacactaacagattatgacattcgatattacatctacgagttactgaaggcattagattactgccattcacaaggtattatgcaccgagatgtgaagccccacaatgttatgatagatcacgagcttcggaaactccggctgatagactggggccttgctgaattctatcatcctggcaaggaatataatgtccgtgttgcctccaggtacttcaagggtcctgagcttcttgttgacttgcaagattatgattactctctggacatgtggagtctgggctgcatgtttgctggaatgatttttcgtaaggagccatttttttacggtcatgacaaccatgatcaacttgttaagatagccaaggtacttggaacagatgggctgaatgtctatttgaacaagtacagaattgagcttgaccctcagctcgaagcccttgttggaaggcatagcaggaaaccctggacaaagtttattaatgcagacaaccaacacctagtgtctcatgaggccatagatttcctcgacaagcttttgcgttatgatcatcaggacaggcttactgcacgtgaagctatgacacacccatacttccaacaagtgagggctgcagagaacagcaggacgcgggcatgagaggccaaagaccaaagaccaaagaccaaagactggcgctaaccctggatcagatcatctgctcttggtggagccatgctcttaccagtgacttgcttcagtcgtatgtgatgaatagtggtttgggggtttacttggcaaaaacaaacagtagctatggcgcctgttgtgcccttaaccgcgtcgagacgtgactgaattactcaggtcatcggcttgtgggacgtgattgcgaacgagattattcatgtaagatgtttgtcataaaaggttgtcgttggctgattgttctgcttgtattgttgagcttgtaaagaatatccaacatttgtttggacttcatcgagctctccaggtttttttctcg

SEQ ID NO: 758 - DNA, 298 bp, Zea mays
  Clone ID: PAT_MRT4577_117985C.1
cgcgttagacgttacaacaccctaaagtgagtcgtattaaccgcggctacggccattccatcttcgagtgccccgcgatcgtcgctgaggcgtgaccggcagacagacatccgcggcgccatcaacgagcaggtgcggcaggaagatgacagcatcggcgtcgccgtcctcaaggggaatgtataatgtgtcgaggaagtatagccgtgactcgtcacagcgccggacgcgcacgtcatcatcgctgtgaccggagtctccagcacgatccagacggccggcggggcagcgatacgcc

SEQ ID NO: 759 - DNA, 1977 bp, Zea mays
  Clone ID: PAT_MRT4577_118142C.1
ccatcaaacaagctcttgggggttcaccacaaattgtttgcaaaaggggttcaatcaaagaacttaggtaatgcttcgccaaaaaattgagtccgagaaactgcgtacccaggttgatcccccccacggccatcgccccaggagaggcaggcgatgacgatggcgacgaaggcggcgtgcgtctggcggtgtgggtgctcgtcgccttgggcctgtgcgacctgggctcaacgcgcgcgcccctgggcagcccgccgcagccggagctcgacgacttcgcgctctccctccagtcgcccgccaccgtctccgcccccacccgcctcccccccgccaccgacggctgcgctcaggcggcgtccctgcggagcctagcgagcgctggccatggcgccggccacgagcgggcggtgccggccggcgctgtgtgtccccgttgccccggccccatccgccccgcgacccgccactgctgcgccaccaacggctcctgccgctcggagcctctccagacgttcacgatccacgggctatggccggactacgacgacgggacctggccgtcgtgctgccgccgcacccaattcgagatggacaagatattgccactgaaggaggtgcttgacaagtactgcccgtccctctactgctccaaatatgccgcccggtgcatggatagagggtcgggggtggaaagggtggtggtacagttgtactgagctgagctgccggaggcagaataggagaggcaggcgatgacgatggcgacgaaggcggcgtgcgtgctggcggtgtgggtgctcgtcgcctcgggcctgtgcgacctgggctcagcgcgcgcgcccctgggcagcaagccgcagcgggagttcgactacttcgcgctctccctccagtggcccggcaccatctgcgcctccacccgccactgctgcgccaccaacggctgctgccgctcggagccgctccagacgttcacgatccacgggctatggccggactacgacgacgggacctggccgtcgtgctgccgccgcacccaattcgagatggacaagatattgccactgaaggaggtgcttgacaagtactggccgtccctctactgctccaaatctggaacatgcttcagcggcaagggactcttctgggctcacgagtgggagaaacatggaacctgctctgcccctgtggttcaggatgaattacagtatttcacccttgcccttgacctctactccaagtataacgttacggaaatgctgtcaagtggagggatacaggtttcaaatggtaaggaatatgcactgagcgatgtcatcgataccatcaaacatgcttttgggggatcaccacaaattgtttgcaagaggggttcaatcgaagaacttaggttatgcttcgacaaagaattgaagcctcgtgattgccttaccacttctttggcgaatggaagtgtatcaaaaagcaagcactgcccgcggtacatcaccttgccaacatatgatccccttgtgcttgccaattcaactgtagagatcatgacacagttcgatgaatttgaggtgcctgcagctctttatacagcttaaaatgcaattgttgcaatagcagaaggtgctcgcgtgagcacctagaaccaggcacatttatcctgggatattcaatcatttgtacatgtacacttgaaagagaactgacatcttttcaacctgaaaatttataagctttatgtaaccgtgaaggtcggatattgcacatgtaattcgctaaatcaaaactgtatcttgaggtagaattttcaagtagtaataatagagatataagaaacttatcgcccaaaaaaaaaaaaaacgtgtattcttgaaaacaaacttgaatctttcaaaaaaatttccaaatgacctttatgtacccttcaaggtcggatattgcacatgtaatctcgttaaaccgtaagtgttcgttgaggtaggt

SEQ ID NO: 760 - DNA, 382 bp, Zea mays
  Clone ID: PAT_MRT4577_118357C.1
cgacccacgcgtacgcgagaagacgagtgttaagtgaacctgttactttcggtgccactggctgcgtacctgagtgtgagcgagtgatcgagctagctgagctccgatcctggctagctaggatacgcggcatacctcaagtacctttcacaagtttacgagtgacagcaacaagagatcgatggcctctgccaccgtgctcaagtcctccttccttcccaagaagtccgaatggggcgccaccagtgcatgccgccgctcccaggccgaccaccgtctccatggtcgcacgcgcctgcgtctacgccgatgagctcgagaagaccgctaaaacgatcgcgtcgtcatcgcggggcattctggccatggacgagtcgaacgc

SEQ ID NO: 761 - DNA, 1477 bp, Zea mays
  Clone ID: PAT_MRT4577_118397C.1
ttgggtacctcgggccgggccggaggcacatatatatacacgcggcggcggccagatccatcttggtatacacgtaatatatatacacgcacgatgggcagcgccggcggcggtggcgagagcaagctggagagcccgctgctgggcgcgtcgtcgacgggcctcgctcggcaacaccggcatccaggtcttcgcctacggcctcatgctgggcatggggagcgcggtggagacgctgtgcgggcaggcgtacggggcgcacaagtacgacatgctgggcatctacctgcagcgctccaccgtcctgctgatggccacgggggtgccgctggcggcgctgtacgccttctcccgccccgtcctgctcctgctgggggagtcccccgagatcgcgtcggccgccgccgtcttcgtgtacggcctggtcccgcagatcttcgcctacgccgccaacttccccatccagaagttcatgcaggcgcagagcatcatggggcccagcgcctacatctccgccgccgcgctcgccgcccacctcgccctcagctacctcgtcgtctaccgcctcggcctcggcctcctcggcgcctcgctcacgctcagcgccagctggtgggccatcgtcgccgcccagttcgcatacatcgtcaccagcagccgctgccgcctcacctggaggggcttctcgtggcaggccttctccggcctgcccagcttcttcaggctctccctcgcatccgccgtcatgctctgcctcgagacctggtacttccagattctcgtgctcatcgccggcctcctcaaggaccccgagcttgccttggcctcactctctgtctgcatgacaatttcagggtgggtgttcatgatctccgttgggttcaatgcagcagccagcgtaagagtgagcaacgagctaggcgccggcaacccaagggcggcggcgttctccgtggtggtagtgacgctgctctccttcgtcctgtcggtcataatctccgtcgtcatcctgctgtgccgggactacatcagctacatcttcaccgagggcgacgacgtgtcgcgggcggtcgcccagctcagcccgctgctggcggtcaccctcatcctcaacggcatccagcccgtcctctctggggtagctgtggggtgtggatggcaagcgttggtcgcatacgtcaatgtcggctgctactacatcgtcggcatcccccttgggtgcctcctgggattctacttcgacctaggagcagcgggtatctggagcggtatgatcgggggcaccctgatgcagaccatgatcctggtgtgggttacattcaggacgaactggaacaaggagattcggaaattgatgcaaggttgcaattcagtgtcctgaaatgtctacgaggagaggagaggagaggagatgagatggctggaattttaaatactactcttgcatcacccaaaaaaaaaaaaaaaaaaagcggcc

SEQ ID NO: 762 - DNA, 408 bp, Zea mays
  Clone ID: PAT_MRT4577_118552C.1
gcgacccgcaccttttggacatgcgcgacatgctcattgggccctacaacccgggcgcagtcttgaccggcgggacgcgcgtcgtcttgtccctcgacacgcaagtggaggagcacgcacgcgtcaagaccttaatcatggacctactccaccgctccgtccgtacctgttccgccgactttcgcgcgagcgtcggtgccatgctggacgccgaggacgctgatttctgaaaggacgactgcagtgtcaagaagccctccgccagctacctattacccctgcatcagtgcatgttccaggttactctgcaaggcgttcgtgggcgccaacccgttcaccgactggctggtggacaacttccgcttcaccattctggacatatagctggcactatagatcctgcccacg

SEQ ID NO: 763 - DNA, 1527 bp, Zea mays
  Clone ID: PAT_MRT4577_118564C.1
atgtaatgggtggtatttcaagatgaacagcaaaacttgtatacagtcttggagccctagtagtacatgcaccaagacagcacattgcaacgattaacaaagggaaaaagactgcaaaacggcatgaatcctgttcgccgcaccaaacggatctattcgtcgtttagctgtagacattgttgaggtagaagtacaggccagccaaggcaatgatcccgacgacgatggcaataggcaagggtttccccatgctctcctccttcttcagctcctccttcctcgcctttctggcatcggtggcgttcgcgttcttggagactgctggctcgtagggtctgaacctttttttcattgctgtacaaacagggcaaggccggttgtcctacagcttgtgtgagccgccgtcgcgcacttcgagctccgccccgacgcgcagtcgccacgggagctcgttcctctccggcggcagcaccctccacccctcatcaacccaacccgcaagaaaaaacccgcagcagagaagaggagtcgccgcgaccgagagctccagagcacgcccccgccacagcctccgacgatggatccaaagatgacagaggtgacccagatgttcgcccgcttcaaggcggcctacgcccgcaacgacctcaacacctgcgtcaccctcctctcgcagctcaaggtccatctcacccaattccccagccttccgcccttgtttcagcagacaccgaacattgtggaggagctcaaacttgcaagggacatttatgagcatgctgttgttttgagtgtgaaacttgaggaccaagatgcgtttgaacgcgatttctgccagctgaagccttattacatggatacatgtggcataattcccgcctcgccagaggagtacccaattttgggactcaatcttctgaggctgttggttcagaatagaattgccgaattccacactgagctggagcttttacctgccaaggcactcgagcatccttgcatcaagcatgctgtagagcttgagcaatccttcatggagggtgcctacaaccgagtgttaagcgctcggcaggctgtgccacatgagacctacgtttacttcatcgaccttctcgccaaaacagttagaggtgagatcgctgggtgcagcgaaaaggggtatgattctctatctgtgagtgatgcaaagcaaatgcttatgttcagttctgaccaagatctgcacgagtacatcactgaggagcacccggaatgggagattaagaacggtgctgtcttcttccagaaggcgaaggaatcacagccctgcaaggagatcccatccttgcagcttatcaaccagacgctcagctacgccagggagctggagcgtattgtatgatttaaaccaatccctggtggttctttccccccctgtggccgcttggcatggcttgtactgtcctttgcatttgggatgatctttgatcgcagctctcatctgactgaaacatcatgtgaatctctgaagggctcagtctctccggc

SEQ ID NO: 764 - DNA, 2569 bp, Zea mays
  unsure (1)..(2569): unsure at all n locations
  Clone ID: PAT_MRT4577_118567C.1
tttttgtttttttttttttttttttttttttttttttttttttttttttgctggttatgtaatggggggtttttcaagatgaacagcaaaacttgtatacagtcttggagccctagtagtacatgcaccaagacagcacattgcaacgattaacaaagggaaaaagactgcaaaacggcatgaatcctgttcgccgcaccaaacggatctattcgtcgtttagctgtaaacattggtgaggtaaaagtacaggccagccaaggcaatgatcccgacgaccatggcaataggcaagggtttccccatgctctcctcctttttaagctcctccttcctcgcctttttggcatcgggggggttcgcgttcttggaaactgctggctcgtagggactgaacctttttttccgttcccaccaaacacaaagcattttcagccgccccaccgcagcagcagagaagaggccgccgccgccgcgaccaagagccgatggatccgaagatgacagaggtgacccagatgttcgcccgcttcaaggcggcctacacccgcaacgacctcgacgcctgcgtcaccctcctctcacagctcaaggtccatctcaccaaattccccagccttccgccctcatttgagcagacacctaaagccgtggaggagctcaaacttgcaagggacatttatgagcatgctgttgttttgagtgtgaaacttgaggaccaagatgcatttgaacgtgatttctgtcagctaaagccttattacatggatacatgtggcataattcccccctcaccagaggagtacccaattttgggactcaatcttctgaggctgttggttcagaatagaattgctgagttccatactgagctggagcttttacctgtcaaggcacttgagcacccttgcatcaagcatgctgtagagcttgagcaatccttcatggagggtgcctacaaccgagtgttaagcgctcggcaagctgtgccacatgagacctatgtttacttcatggaccttctcgccaagacagttagagatgagatcgctgggtgcagcgaaaaggggtatgattccctatctgtaagtgatgcaaaacaaatgcttatgttcagttctgaccaagatctgcacgagtacatcacagaggagcacccggaatgggagctaatgggagcttaagaacggtgccgtcttcttccagaaggcaaaggagtcacagccctacaaggagatcccatccttgcagctcatcaaccagacgctcagctatgcgagggagctggagcgtattgtatgatttaatttcacagtaatccctggttgatgtttatttctgtggtcacttggcatggcatgtactgtcctttacatttgagatcagctctgatcgcagctcatgtcagctctgatcaatctctgaagggcttgatctctgcggcattgtttcaccacattaactgcattgcttgaaagatgcctgtcatccattgctgctgttaacttttgatgggcttaatattgaattattacatcgaaattgcactgattgtctttttttatttaaaaaaagacaaattatgttgacaagattagtcatactggaaaacagagattgctcattcaagtatgcttgagcgaaacatgagactacgcatacccctttttgtagggaagtcttatttaaaatcacggtactacttcgctatcggtcacccagggagtatttagccttgcaaggtggtccttgctgattcacacgggattccacgtgccccatgctactcgggtcagagcgtaagctagtgatgctttcggctactggactttagccatctagggtgcggcactcaaccgcttcgcctagcagcacaacgcttgtccgggttctcccccaaccccgttttcacggtttaggctgctcccatttcgctcgccgctactacgggaatcgcttttgctttcttttcctctggctactaagatgtttcagttcgccaggttgtctcttgcctgctcatggattcagcaggcagttcaaaaggttgacctatttgggaatctccggatctatgcttattttcaactccccgaagcatttcgtcgcttgctacgcccttcctcgtctctgggtgcctaggtatccaccgcaagcctctcgtgccgaattcctcgccattaacgttaaggctatgccatcctaaggtgctactaaatggaaggatcttatcaacgtccatgaacccgcgtgcgctacactccgcaaccgaccctcgacgtcctgcgtcanccctcctctcacagctcaaggtccatctcaccaaattccccagccttccgccctcatttgagcagacacctaaagccgtggaggagctcaaacttgcaagggacatttatgagcatgctgttgttttgagtgtgaaacttgaggaccaagatgcatntgaacgtgatttctgtcagctaaagccttattacatggatacatgtggcataattcccccctcaccagaggagtacccaattttgggactcaatcttctgaggctgttggttcagaatag

SEQ ID NO: 765 - DNA, 181 bp, Zea mays
  Clone ID: PAT_MRT4577_118732C.1
accacaggtaccttgctgagttcaagtcaggtgcatagaggaaggatgcttcggggaggaccctgaatgcctacaaagctgccaggatattgctcttgctgatctagcttcaacccaccccatcaggctggggcttgctcttaactgctcaatattctactactagatcctgaacttccct

SEQ ID NO: 766 - DNA, 261 bp, Zea mays
  Clone ID: PAT_MRT4577_118915C.1
tatggacaaggacaggaagaaggcccccgtgtcgcgctcctcccgcgccggcctccagttcccggtgggtcgcatccaccgccagctcaagtcgcgtgcctccgcgcacggccgcgtcggcgccaccgccgccgtctattccgccgccatcctcgagtacctcaccgccgaggtcctttagctgaccgacaactccagcaaggaccttaggggcaagctcatcacccctcgccacttgtgtctcggcatccatgattacaa

SEQ ID NO: 767 - DNA, 425 bp, Zea mays
  Clone ID: PAT_MRT4577_119034C.1
ggcagcaccaaggggcaccgggttttccttaagattaacttaaaataaagcctgtcgggggtaacagcatccatcgatccccagtccatgctgtttgttgcatgggcctcttttaaaccgaggatgaacacagttctaacaactgacacaaagcgaccttgcaatcaaaaacacagatgggcaacaacaaacacgacacgaacgaagattaaccctctggactagggtaaacatcacgggagcgaacaggataacttggccgcgcgggccccaccgtttaattcctccagttcccgtcggagttgccgtatccgccgccacggttgccaccgccgtagccgtcgccaccaccaccgttgccgccgccgtcaccgtagtcgtcgtcaccgtcgtttccgtcaccgtcatcacggtgcccgccaccg

SEQ ID NO: 768 - DNA, 208 bp, Zea mays
  Clone ID: PAT_MRT4577_11925C.1
tcgcaggcggacttcggtcgcctcgatattgatctggcctttgtcgaaatgcccggcctgggggggtgccttgccgagttcggcccgtccaatcccttcgtcggcgctaggatcttggggtctatttacatgaaccatccagactcgccgtcctcattgagacctttaccccgctcggcgccgaagtccgctggtgcttcttgcaaca

SEQ ID NO: 769 - DNA, 126 bp, Zea mays
  Clone ID: PAT_MRT4577_119501C.1
gtcgtcgtggagacgctccctatggtgctggatccgtcggaggccaaaaataacgctgcggtggaggcgacaggcgaggaggctgccaacgggaggagggagtacgtgatgtggaggaacgtcaca

SEQ ID NO: 770 - DNA, 283 bp, Zea mays
  Clone ID: PAT_MRT4577_119533C.1
cacacgcgtccggttggattctcctccccctccggttcgggttcgggctcgtgatgatctccggtgttcggtttcgtggttgggcggatcgatatttctgcgtcgtatgttgagtaccgctgcttcgtagtcagcgtctcctggaccacggacgatcactccctgcagaacgccttcatcaactactgcgacgtcctcgagttcaagatcatccgcgatcttgagacgcagatgtcccgcggcttcgtcttcgtcaccttctccactgaggatgcgatgctgg

SEQ ID NO: 771 - DNA, 2173 bp, Zea mays
  Clone ID: PAT_MRT4577_119594C.1
tttgggtccctcgggccggccgggctcgcgcacacgagctgtgcggtactgctcgctcatgcagcgactgccacgctaccaccgcttcctttcctcttcggctgctccgcctcgcctcccagttcacagcccctcccaggctccgaatcggcggccacttctcattcctcacttccgtcctcgcgcaccaccccctccatccgttccggatggtgccttcgaaatcccgtccggcgccctagcgtagctcgggctcggccaggctccgggcccgccgcgccgttccgcagtccagctccacctccagatcttttcttgagtttaaggaagatgcttgcctttatttagaaggccctttttggtacgtcagcagtgttctttcctataggagtaaatgccattccgtagcatcgtgcgtgatgtaagggatggtttcgggagcttgtctaggaggggatttgaggtcaggtttctgagtcatcgcagagggaaatctcatggtgctgtccatgagctgcacgacccagtgcttgtggtacagagtagctgctgggctagcttgcctcctgaattacttcgagatgtgattgagaggttggagaccagtgaggatacatggccttctaggaaacatgtagttgcttgtgcagctgtctgcagaacatggagagagatgtgtagagagattgtcaagagcccagagttttctggaaaaatcacttttcctgtttccttgaagcagcctgggcctcgagatggaactattcagtgttttattaagagggataaatctacccaaatctacagtctgtaccttagttttagctctgccgtgcctgtcgaaaatggcaaattccttctatccgcaaaaaggaactgccgtgcaacatatacagaatatataatatcaataaattctggtgatacatctaggtgtacaagtaacaacacatacattgggaaattaaggtcaaatttccttggcacaaaatttgtaatatacgatactcatccgccatacaatggaactagtcaaacagtggcagggaaaacaagtcagagattctactccaagaagggatcaaccaaggtttcttgcaggtggtacagtattgcacaaatctcatacgagctgaatgtcttgggaactcgaggcccaaggcggatgaactgtgtaatgcactccatcccagcttcatgccttgaggctggtggcagtgtcccttgccagccggacagcattgcagcccactctgttggcggatcattcagcagtgtgtccttgtcaaagtcatcgactatggaccactctatgcatttcaccagttcccggctctctgatgccataacaggagatggcattgtgaacagaggccaggcattgaatgatgctgacgatgaagagtgcaaggacatgcctttgatcctccgcaacaaggccccaaggtggcacgagcagcttcagtgctggtgcctcaacttccggggccgggtgactgtcgcctcggtcaagaacttccagctagtcgcggcgacacagcctgccgccggagccctgaccccatcacaggcagccccgcagccagctccgcctcctccgccggaccaagagaaggtcatactgcagtttgggaaggtcggcaaggacatcttcaccatggactactgctacccgctgtcagccttccaggccttcgccatctgcctgagcagcttcgacaccaagttggcctgcgaataaatcctacctacaattctggtacctaccaaataatcaaaaacactgattgtcgtggtgttcgtccaagaaccgagtttagctgagacgccattgggcaccatgtgctggtgccttgttaactcagaaacgcgtgggggctgaatctgtttcagcagcttccttgtgataatctgtagctgctgcttcgctgctgttgtatcctatgctttcatttctttccggttccgctgtagcttcttaccccccggtgacattagttcggtacccgtatctggatatttttttagccttcttcgttggattgttcaccggtgatggcatgtattaacagagatagttacatacagatgtaatgaattcaggtctggataattttgctttcggaaactaaaaaaaaaaaaggccacgacggccgtcatcttcagcagggtt

SEQ ID NO: 772 - DNA, 836 bp, Zea mays
  Clone ID: PAT_MRT4577_119602C.1
taggggccttttttttttttttttttggtcaaagaaagctcaggcttcacttggttagttgtttactccaaatctacagcaaacatgcggttcagcgcctcaagtttcttgaccattggctcaagacaaaaaaagaaaaatgttacacgagtgagttgacaccacactagctgttggtcaaagagacacaattatgctgccgatcttgttttgaggaccctgcacttgagcactctatcttgcacgtaaaaccccggcgtcaccatgatcttcacttgacaaggactctgcaccggctgcctgtcatgcaggatgtcttccatgtacagctcatcaaatgcacggccgtcttggacgcgcaggatcgtcagcggcgggccgaaggagaaggccagcaggtggagcagccagacgcacttggcggcgacgaagaagcactgaagcagctgctcgggccacggccgggaccaggcaagcgtcgccacgacgacgctcatcttccggtcgcagaaacggctgaagtcctcgctgtagtacttggtgcccttccgcagaacctcgttccagctaaggttgcgcagcgccacgaaggctgcgaagctctgccggctgtcttccgccgggtcgaggcacctcggcgagccgttccgctggaacgcggggttctcgaagtcctggaacatgacctggttcatgatcgcctcaagatggtacagcacggccttcgagcagtgtttgtgacgctgccgctgctgagcgcgagctggtacgggcgaaggagcaggttcagcttgtcggacaggccgtcactgcggacgcgtgggcggacgcgtggg

SEQ ID NO: 773 - DNA, 398 bp, Zea mays
  unsure (1)..(398): unsure at all n locations
  Clone ID: PAT_MRT4577_119628C.1
taatggaggctaagggnggcagagggtctagcagtcgtcgttccatgatgtatgaagctccccttggctacagcattgaggacgttcgacctgccggaggcgtgaagaagttccagtctgttgcttactccaactgcgcgaagagggggggctggtatcccttttggcttcctcattctagtcgtttaggatttcttttctggccctttgattctgaccaatctctctggcctgctgcttcctgctgttcgtcccgttccccagtgcttgctccttgcgctccttcctccgtctcctagcttgtgttctgattcacctgctccccgggctgttctttctgttgctgttgcttccccggccccggccctcgggtttgggggctctgagatgcgccttgg

SEQ ID NO: 774 - DNA, 413 bp, Zea mays
  Clone ID: PAT_MRT4577_119804C.1
accacgcgtgcgtccacgcgtgcgcccacgcgtgcgaccacgcgtacggcagaggatcccgcggcttttgcttcggcaccttctccacggaggaggcgacgcgcaacgccatcaagggcatgaacggcaaggagctggacggtcgcaacatcaccgacaacgaggcccagtcccacagcagccggggaggcggcggccgtgggtacagtggcggccggggaggctgcggctactgcggcagcgggcgccgtgatggcggaggcagatacggaggtggcggcagatacggtggccgccgccgatacggtggaggcggcggcggctacggaactagcaaccgaaggggatgctacagcaactgcgacgggaactggaagaactgagctgtggggctcgcgcggacaagttatgct

SEQ ID NO: 775 - DNA, 1988 bp, Zea mays
  Clone ID: PAT_MRT4577_119841C.1
gctataaacatggtttgtatttttgtatcttcatataaatccgaccgaagctacaaaagctgagcagctgaacttaagaatacaagttaaattagaagggagggagcgccaccggccaccctatgggtgtcggtgagcttactaatcagacagaaacagttcactaatcggagccggtaattagaccgagtcactgaactgaagtttgtacaaagtaacaaagacaggcaaccaaaaaaaaagaaagacgatcccgtatcacgttcctaaacacaaagctggcagtgagtggagttccccgatatctcaactaaacgggagctacagctagacttcaaaagagatcccgaagacgagaccaacgcacgccgactacagtctacagctcgtccttgtcgaaggacggctccgacccctccttggccgccggctccttctcttccacctccggctgctcctcggcctcgtcctcctcctccacggccgcgtcggggctcaggtccaggctcttgtgcaccgacttgtagatgctggacgcgaactccttggggtcggggaggttgaacccgctctccataagggccgtctggtacaccagcctcgccgtctgcttcagctcctcgctctcgttgtcctgggcgaccttgtcgcggagctccttgatgatggggtgcctggggttgatctccagcaccctcttgccgcgcatgtacgcctgcttgctcgagtccgacagcgtctgcgcctgcatgatcttctccatgttggcgctccacccgtacttggaggtgacgacgacgcagggggtgtcgtgcagccggctgctgaccttcaccgagtccacgctctcgctctccagggccttcttccaccactccgtcagctccttgaacgactccttgaggtccttgagcctcgagtccttgcccagcttcaggccctccttggacacgttctggaacttcctgtcctcgtagtccatcaggtactgcatcaggtactcgtccatagggtcggtgaagaagatgacctcgtagttcttcttggttagcctctccaggaacggagacttctccagctgatctttgctgcttcccgtgaggtagaagatgtctttctgccctggcttcatccttgaaatgtactcgtcaagggaggcaagtttgccatccgacttggtactttcaaatctaagaagcttcgcaaggcggttcctgttagttgcgtcttcaatgatacccagcttgattgatttgccaaactcattccagaacttggcgtactggcccttcttctcctccatctcatttttctcttcatctgtcttatccttgttgctgtactcatcagggtcttcttcagcaagtttcctaatcatgtcaagagctttgcggatcagcttcttcttgatagtcttcagactgctatgttgttggagcatttctcgtgacacattcagcggcagtgtgtctgagtcaacaatacccctcaaaaagctgagatacttcggaagaaggtcatcaaattcatcagagatgaacactcttctaacatacaacttgaggtttgacttgttgctgttgtagtaactctcatagagatcatgcggagccttcggtggaatgaagagcaaagctttgaactcaacatctccttcagcagtgaagtggctccaacccataggcttgtcatcaccgaagtccttggctagtgagtggtaaaactttgagtattcttcgtcagtaacctcctttgggctgcgaagccatacagccttcatatcattcagaagttcccattcagaagtagtctcctttatcgtcttcgtcttaggctttttctctttctcttcgtcttcgtcttcttctgtctcttcctctgtagtttctggagttgaatcctcttcttcacttgtctcatcctcatcagttggcacttcaacatcaacctcccggacgcgtggacggacgcgtgggcggacgcgtggg

SEQ ID NO: 776 - DNA, 2870 bp, Zea mays
  Clone ID: PAT_MRT4577_119850C.1
gtatcttcataaaaatccgaccgaagctacaaaagctgagcagctgaacttaagaatacaagttaaattagaagggagggagcgccaccctatggatgtcggtgagctcactaatcagacagaaacagttcactaatcggagccggtaattagaccgagtcactgaactgaggtttgtacaaagtaacaaagacaggcaaccaaaaaaaaagaaagacgatcccgtatcacgttcctaaacacaaagctggcagtgagtggagttccccgatatctcaactaaacgggagctacagctagacttcaaaagagatcccgaagacgagacgagaccaacgcacgccgactacagctcgtccttgtcgaaggacggctccgacccctccttggccgccggctccttctcttccacctccggctgctcctcggcctcgtcctcctcctccacggccgcgtcggggctcaggtccaggctcttgtgcaccgacttgtagatgctggacgcgaactccttggggtcggggaggttgaacccgctctccatcagggccgtctggtacaccagcctcgccgtctgcttcagctcctcgctctcattgtcctgggcgaccttgtcgcggagctccttgatgatggggtgcctggggttgatctccagcaccctcttgccgcgcatgtacgcctgcttgctcgagtccgacagggtctgcgcctgcatgatcttctccatgttggcgctccacccgtacttggaggtgacgacgacgcagggggtgtcgtgcagccggttgctgatcttcaccgagtccacgttctcgctctccagggccttcttccaccagtcagtcagctccttgaacgactccttgagctccttgagcttcgagtccttgcccagcttcagtccctccttggacacgttctggaacttcttgtcctcgtagtccatcaggtactgcatcaggtactcgtccacggggtcggtgaagaagatgacctcgtagttcttcttggttagcctctcgaggaatggagacttctccagctgctctttgctgcttcccgtgatgtagaagatgtctttctgccctgacttcatccgtgagatgtactcgtcaagggaggcaagtttgccatccgacttggtactctcaaatctaagaagcttcgcaaggcggtttctgttagtcgcgtcttcgatgatacccagcttgattgatttgccaaactcattccagaacttggcgtactggcccttcttctcctccatctcgcttttctcttcatctgtcttatccttgttgctgtactcatcagggtcttcttcagcaagtttcctgatcatgtcaagggctttgcggatcagcttcttcttgatggtcttgagactgctatgttgttgaagcatttctcgtgacacgttcaggggcagcgtgtccgagtcaacaatacccttcaaaaagctcaggtacttgggaagaagatcatcaaattcgtcagagatgaaaactctcctaacatacaacttgaggtttgacttgttactgttgtagtaactctcatagagatcatgtggagccttcggggggataaagagcaaagctttgaactcaacatctccttcggcagtgaagtggctccaacccataggcttgtcatcaccgaagtccttggctagtgaatggtaaaacttcgagtattcttcatcggtaacctcctttgggctgcgaagccatacagccttcacatcattcagaagttcccactcagaagtagtctcctttattgtcttggtcttgggctttttctctttctcttcgtcttcttctgtctcttcctctgtagtttctggagttgaatcctcttcttcacttgtctcatcctcatcagttggcacttcaacatcaacctccttggtcgaccacaaatagatagggaagttgatgaactcagagtacttcttcaccaaatcctttagcttatcctcttccaagtactccttggcctcatctcgcagatgcaatcttatctcagttccacggccaaggggctcattccatgtatcctcagagatggcaaatgatccatcagcttttgattcccacacatactgtttatcatcattgtgcttgctgaccacttcaacatagtcagcaaccaagtacacagagtagaagccaacaccaaactgtccaataagattgaggtcacctccagactgcatcttttccacaaaagctgaagtgccagatttagcaatcgttccaaggttattaataagatcctccttggtcataccaatacccctatcccgaatggagaggattttcttctctttgtccaacttaatctgaatctcaagctttgcagtgtcaccttcacccagaacttccttatcagtaagggaaaggaacctgatcttatccaatgcatcagaggcattggatatgagctccctcaggaagatatccttgttgctgtagagtgagttgatgatgatgtccatgagtctggaaacctcagcctggaactcaaacttctcggctgagctcctgagagtcttcctagagatagactcagcttccctctgggcaacctcagagtcggtggacaggccatgagggacagcaccaagcttctcctctaccttgggtgggttagctaagtcatcgctgctctcctcggcattcacctgtagcttcttagctgggtcggggagggtggtgaggaggaagaggaggaggaggagcgcggaggagagcgcccacttgcgcatcgtcgtttcgtctcgcttcactctgcggcgtacagccacggcccacaccagtgacgagcggacgcgtgggcggacgcgtgggcggacgcgtggg

SEQ ID NO: 777 - DNA, 770 bp, Zea mays
  Clone ID: PAT_MRT4577_119851C.1
agacagaaacagttcactaatcggagccggtaattagaccgagtcactgaactgaagtttgtacaagtacaaagacaggcaaaaaaaaaaagatcccgtatcacgttcctaaacacaaagctggcacctggcagtgagtggagctccccgatatctcaactaaacgggagctacagctagacttcaaaacagatcccgaagacgagaccaacgcacgccgactacagctcgtccttgtcgaaggacggctccgacccctccttggccgccggctccttctcttccacctccggctgctcctcggcctcgtcctcctcctccacggccgcgtcggggctcaggtccaggctcttgtgcaccgacttgtagatgctggacgcgaactccttggggtcggggaggttgaacccgctctccatcagggccgtctggtacaccagcctcgccgtctgcttcagctcctcgctctcgttgtcctgggcgaccttgtcgcggagctccttgatgatggggtgcctggggttgatctccagcaccctcttgccgcgcatgtacgcctgcttgctcgagtccgacagcgtctgcgcctgcatgatcttctccatgttggcgctccacccgtacttggaggtgacgacgacgcagggggtgtcgtgcagccggctgctgaccttcaccgagtccacgctctcgctctccagggccttcttccaccactccgtcagctccttgaaaaactaattgaggtccttgagcctcgagtccatgca

SEQ ID NO: 778 - DNA, 2588 bp, Zea mays
  Clone ID: PAT_MRT4577_119950C.1
ccggccgggaaaaaaaaaaaaaaaaaaaaaaaaaaaaaaaaaaaaaaaaaaaaaaaaaaaaaaaaaaaaaaaaaaaaaggacttttgacaccacacgtgcagtactcatatggtacaaatacccaaagtctcacggttgcgggggttcgggctcctcctccagactccagggatggccgccggtgcgggaggcggcgaactggaggcgctggagggcgtgcgctccatcgtgctcaagccgtcggagtcgctcgacgagtcgcggttcacgaggatcgccggcgccgacttcaacgacccggccatcggactccaggggctgctcgcctcgctcgcgtccaccgggttccaggcatccaacctcggcgacgccatcgacgtcgtcaaccagatgttagactggaggttgtcgcatgagaagcccagcgaggattgtgatgaagctgaacttgaccctaaatatagagcatctgtgaagtgcaagatatttctgggcttcacctcgaacctcgtgtcttctggcatccgggatataatccgttttctagctcagcatcacatggtggatgttattgttacaagtgctgggggtatagaggaggatctcattaaatgccttgcaccaacttacagaggcgatttttctttacctggagcactgctgcggtcaaaaggactgaaccggataggaaatctgttggtgcccaatgacaactattgcaagtttgagaactggatcatgccactcttcgaccagatgctacaggagcaatctactgagaatgtttggacaccgtcgaaggtgatagcgcgccttggcaaagaaataaatgatgaaagctcctatctttattgggcatacaagaataacatccctgtatactgcccagcattgactgatggatcacttggagacatgctgttttgtcatgcagttcgtaatcctggccttattattgacattgtacaagatatacgtctgatgaatggggaagccatccatgcaacaccaaggaagacagggattatagttcttggtggaggccttccaaagcatcatatatgcaatgccaatatgttccgcaatggtgcagattatgctgtgtatattaacacggctcaagagtttgatggtagcgattctggagcacaccccgatgaagcagtctcatggggcaagattaagggttcagcaaaacctgtaaaggtgcattgcgatgcaagtatcgctttcccgcttcttgttgcagcaacatttgcacgtaaggttcataactccaaatgaacagactgaatgggattcggtggagtgaatgggcaacagaattttgttgaactctccaaatgaccttttggagcacgaggtctacttcacttgcacagggatcatgtgcaaattttttcggtgactcgcggcaaccacatgccatcattcttcgatgttcacttgatgctgtactagctggttgatagcatttttgttacaacagataatttattgaaatacagacatacgattgtccatccgagtcgtctgcttacgatttttttgtagacgaaacatctgcttacgaaatcgacaaatggcctgttttatgaacacgttttttttttcctcagctagtacctaccggccagtagtcgtcgcgtctgcaggcagatctgagttagccggcggatccgatccgtgcgcgtgctgctgtgtgtgtgtcggtggagatggccacagcttacgctcccatggcgagccaggtgatgaagagcagcctcgtcgtgcactcgaggccgaggggcctgtcaggcgctgctgcgctcacgaggcggcccggccggttcaccgtcaaggccatccagcccgagaaggcaacgtaccaggtggtgcagcccatcaacggcgacccgttcatcggcagcctggagacgccggtcacctccagcccgctcgtggcgtggtacctctccaacctcccggcctaccgcaccgccgtgagcccgctgctgcggggcgtcgaggtcggcctcgcgcacggctacctcctcgtggggcccttcgcgctcacgggcccgctccgcagcacgcccgtgcacggccaggccggcgcgctcggcgccgccggcctcgtcgccatcctcagcgtctgcctcaccatgtacggcgtcgcctccttcaacgagggggacccgtccacggcgcccacgctcacgctcaccggcaggaagaaggaggccgacaagctgcagaccgccgacggctgggccaagttcaccggggggttcttcttcggcggcatctccggcgtgctctgggcctactttctcctctacgtgctcgacctcccctacttcttcaagtagaaatcatcaaagatgcgtatatatatagctccggccgatcctcctctctagctgcatggtatgtaggtggtgtggtccttgtttcatttcactccagcggtgatcagcgccgtgtataaatgtaattcctctgctttgcacatggatggattgggatgtaacctgttcaacttttttttaccttattggatgcatcattcagagccaaaaaaaaaaaaaaaaaatttgcggcc

SEQ ID NO: 779 - DNA, 1430 bp, Zea mays
  Clone ID: PAT_MRT4577_119971C.1
actttcttcttttttttcaagctaaaccacgagcgggcgcggggcgactgggcgaggcgagctgccaaggattcgaccgttgcgttctccgcccaaatcttagaaatcccaatccccgagcggcgtccggccggaaacttcgcctcgccgctccccctccctacgcaagcttcctccccctccgcgccgctcctccaggttccagccatggcgatcgccaccgagtcgcgcggcagcgaggacagggcttcagcccatgcaaacgaggagaagcggtgggtgctgtctgatttcgaggttgggaagcctcttgggaggggcaaattcggccacgtatatcttgccagagaaaagaggagcaatcaaattgtggctttgaaagttcttttcaagagccagcttaagcaatcacaggtcgagcatcagctgcgacgcgaagtggagattcagagtcatcttcgtcatcctaatattcttcgcctgtatgggtacttctatgatcagacccgggtttacctaatcctggaatatgctgccaagggtgagctgtataaggaactgacaaggtgtaaacatttttctgagagacgttcagcaacttatattgcatcattggctagagctctgatctacctgcatgggaagcatgttatccatcgggacattaaaccagaaaatcttttggttggagcccagggtgagatcaaaattgccgactttggctggtctgtgcataccttcaacagaagaaggactatgtgcggaaccctggattacctgccacctgaaatggttgagaagacagaacatgattaccatgttgacatatggagcctgggtattctgtgttatgagttcctttatggggtcccaccttttgaagctaaggagcactcagaaacatacagaaggatagtaaaagtcgacttgaagttcccactgaaaccattcgtttcgcccgccgcaaaggatttgatttcccagatgctggtcaagaactcggcccagcggctgcctctccacaaggttcttgagcacccatggatcgtccagaacgccgacccttccggtgtgtgcagaggatagaaccaccaccaccggctgaagggagtgcgattctttccactctccccatttcgaggggagtgcgattctttcgactgtttatggcttctgtcgcccgaattgccccaccccgaactgtatcttgtagcaccgtgtactgtgtagttggggccgtgggcaaattgccctgtacccttgaacaaccttctttactcgtagtctcgtatgagagagccttgtagagtctcgtccgtccaattatgaactcgagggcaatgtgcaggaaaatgttgaaggtatcgtccataaccagcaaaacttatgtagcgagctcaatttagaatttaaaaaaaaaaaaaaaaaaa

SEQ ID NO: 780 - DNA, 1321 bp, Zea mays
  Clone ID: PAT_MRT4577_119972C.1
gggtacctcgaggccggccgggtgaagctgctaatcatcccaggtattcactacttccccattcctctgcgctgcgcttctgctccccccttctctctccctcctcgctcgttccctctcatcccacgcgcgtgcggcctgcggtgcctgcgccgctgtccgcgccgctcctccaggctccaaccatggcggtcgccaccgagtcgcgcggcagcgaggacagggcttcagcccatgcgaaccaggagaagcggtgggtgctgtctgatttcgaggttgggaaacctcttgggaggggcaagtttggccatgtttatcttgccagagaaaaaaggagtagtgagattgtggctttgaaagttcttttcaagagccagctcaagcaatcacaggttgagcatcagctgcgacgtgaagtggagattcagagtcatcttcgccatcctaatattcttcgcctgtatgggtacttctatgatcagaccagggtttacctaatcctggaatacgctgccaagggtgaactgtataaggaactgacaaggtgtaaacatttttcagagcgacgcacagcgacttatgtcgcttcgttggctagagctttgatctaccttcatggcaagcatgttatccatcgggacattaaaccagagaatcttttagttggagttcagggcgagatcaaaattgccgactttggctggtctgtgcacaccttcaacagaagacggactatgtgcggaactctggattacctgccacctgaaatggtggagaaggcagaacatgattaccatgttgatatatggagccttggtgttctgtgctatgagttcctttacggggtcccacctttcgaagctaaggagcactcagaaacctacagaaggatagtgaaagtcgacttgaagttcccactgaaaccattcgtttcacctgccgcaaaggacttgatttctcagatgctggtcaagagctcggcgcagcggctgcctctccacaaggttcttgaacacccgtggatcgtccagaacgccgacccttccggcgtgtacagagaaggtagatccatctaagcttctgtcgcagtgtcgcccgagctgccccaccccaaactgtttggattagcgtctgtttgatgggtgggccctgggacgtgacttgatacggcaaattgccctatactgatgtatcctaccctgttgaacaatcttcttgcctctctctatatatatgaatatgaatgtacatgttctaagcctctctgaagatttttgtaacatattcaatatgacagccaatattagccctaaaagagtct

SEQ ID NO: 781 - DNA, 339 bp, Zea mays
  Clone ID: PAT_MRT4577_120168C.1
ctatttttatatcgcgagctcctataggttgtcttctttcgaggtgggtgtgaccagcggagtcttctgtttgtgaaaacccaattcttcaaccctacagggtccaacaggcaatcacaggtggcatcgcacctatatcacccttgttcctccaacactcatcagccctattacatctgttacctttggtgcatttattggcacaaaacatgagggcgcagcaacttcaacaacttgtgctagcaaacactagctgcctactctcaacaaccgcggattcttacattcaacctactagctgcgttgaactctggttcttatttgcaacatcaacaacta

SEQ ID NO: 782 - DNA, 586 bp, Zea mays
  Clone ID: PAT_MRT4577_120187C.1
cttcttgttgccaaatattccctcccctagccgccgccgccgctcgtctccctgagagtgccgggaccgaggaactggccgagttctaggtagagaatcggttttgcttgtctcatgggcgtggtttgcgtgccctctccaggcccagattgactctgttctggatcttgcacggtgcacaattgtgtccgagctctccaacaaggatttcgactcatatgtcctctctgagtcaagcttgtttatctatcctctgaagattgtcatcaagacctgtggcactaccaagctcctgctcaccattccaagaatccttgagcttgctgaagagctgtctatgccacttgctgctgtgaagtactcccgtgggacgttcatctttcctggtgcacagccagccccccacaggagcttctctgaggaagttgctgcacttaaccgctactttggcggcctgaaatctggtggtaatgcttatgtgattggagatccagcaagacctggacagaagtggcacgtcttctacgccactgagtacccagagcaaccaatggttaaccttgagatgtgcatgactggtctggac

SEQ ID NO: 783 - DNA, 700 bp, Zea mays
  unsure (1)..(700): unsure at all n locations
  Clone ID: PAT_MRT4577_120189C.1
aagccgcacgcttcttgttgccaaagaattccctcccctagccgccgccgccgctcgtctccctgagaggtgccgggaccgaggaactggccgagttctaggtagagagtcggttttgcttactccaactgcgcgaagaagccatcctgatatcccttttggcttcctcattctagtagtttaggatttcttttctgacacttagattctgaccaatctctctggcctgctgcttcctgataatcgaccagttccccagtcttgctccttgcactcctccctcctccatctccagcattgtgttctgattcacctgctccaatggctgttctttctgctgctgatgcttccccggtctcagctatcgggtttgagggctatgagaagcgccttgagatcacattctctgaggcacctgtctttgtggaccctcatgggcgntggtttgcgtgccctctccagggcccagattgactctgttctggatcttgcacggtgcacaattgtgtccgagctctccaacaaggatttcgactcatatgtcctctctgagtcaagcttgtttatctatcctctgaagattgtcatcaagacctgtggcactgccaagctcctgctcaccattccaagaatccttgagcttgctgaagagctgtctatgccacttgctgctgtgaagtactcccgtgggacgttcatc

SEQ ID NO: 784 - DNA, 1967 bp, Zea mays
  Clone ID: PAT_MRT4577_120192C.1
gggtacctcgaggccggcccgggaggcccacgctttgttaacaaagaattccctcatagccgccgccgccgccgctcatctcgccgagaggtgacgggaccgaggaactcgccgagttctaagatagagaatcgcttttcacagcctgtggtctgctgcgtagggtggtgttgaaggggagaagtttgagatctgttccagatcacgcgtgcgcgctcgcgaatcgggggttccacacatagcttcgtcgttttgaatttgatgtactaatggagtctaagggtggcaagaagtctagcagtagtcgttccatgatgtatgaagctccccttggctacagcattgaggacgttcgacctgccggaggcgcgaagaagttccagtctgctgcttactccaactgcgcaaagaagccatcctgatatcccttttggcttcctcgttctagtagtttaggatttcttttctgacacttcgattcttaccaatccccctggcctgctgctttcctgataatcgaccagttccccagtcttgctccctgcagtcctccctcctccatctccagcgttgtgttctgactcacctgcaccaatggctgttctttctgctgctgatgctcccccggcctcagctatcgggtttgagggctatgagaagcgccttgagatcacattctctgaggcacctgtctttgtggacccccatggcagcggtttgcgtgccctctccaggtcccagattgactctgttctggatcttgcacggaagattgtcatcaagacctgtggcactaccaagctcctgctcacaattccaaggaatcctagagcttgctgaagagctgtctatgcctcttgctgctgtgaagtactcccgcgggacgttcatctttcctggcgcacagccagccccccaccggagcttctccgaggaagttgctgtacttaaccgatactttgggggcctgaagtctggtggcaatgcttatgtgattggagatgcagcaagaccaggacagaagtggcacatctactacgccactgagtacccagagcaaccaatggtcaaccttgagatgtgcatgactggtctggacacgaagaaagcttcagtcttcttcaagactaatgctgatggcaacacaacatgtgccaaggaaatgacgaagctctctggtatctctgaaattatccctgagatggagatctgtgattttgacttcgaaccctgcggctactccatgaatgcaatccatggctctgcgttctccacgatccatgtgacgcctgaggatgggttcagctacgccagttatgaggttatgggcttggatgccactgccctgtcttacggtgaccttgtcaagagggtccttgggtgcttcggcccctcggaattttctgtcgccgtgaccatcttcggcgggcggtgccaatctgggacatggggaaaagaacttggggcggaggcttatgactgcaacaacatggtcgagcaggagctgcctggaggcgggctcctcatctaccagagcttctgtgctgctgaagacgccgttgctagctcgcccaaatccgttcttcgctgctttgatggcgagaatgcttcaccttttgtgaaggactgcaagctggctaatcttgtctgcttggaggaagttggatgctatcgaggagaggatggagtgcttgatgagtaagacgggtttctggtgtcgatttgcttctgagttttttctttttatgtcgttgcgatctcgtggttgtcgtttggttagcagccaagccaggctattagtacgaagaatgtcatctataaacatgtgttcctatgttgccacacgctgagtcaaatacatctagctctaggtggtcagctgcgtctaccacaatgagcatacatgtatggataaatcttctgtgaaagcattcgatgaataagggttgttttcgtgattcgttttg

SEQ ID NO: 785 - DNA, 2246 bp, Zea mays
  Clone ID: PAT_MRT4577_120193C.1
cctcgaggccggccggcgatatgatgaccctttcccagatgatcgacgctgaacatactgagcgctacattttctcgttcgagaaagccaagccggaactctgattctatcaggcccacgctttgttaacaaagaattccctcatagccgccgccgccgccgccgccgccgccgccgctcatctcgccgagaggtgacgggaccgaggaactcgccgagttctaagatagagaatcgcttttcacagcctggggtctgctgcgtagggtggtgttgaaggggagaagtttaagatctgtttccacagatcacgcgtgcgcgctcgcgaatcgggggttccacacatagcttcgtcgttttgaatttgatgtactaatggagtctaagggtggcaagaagtctagcagtagtcgttccatgatgtatgaagctccccttggctacagcattgaggacgttcgacctgccggaggcgcgaagaagttccagtctgctgcttactccaactgcgcaaagaagccatcctgatatcccttttggcttcctcgttctagtagtttaggatttcttttctgacacttcgattcttaccaatccccctggcctgctgctttcctgacaatcgaccagttccccagtcttgctccctgcagtcctccctcctccatctccagcgttgtgttctgactcacctgcaccaatggctgttctttctgctgctggtgctcccccggcctcagctatcgggtttgagggctatgagaagcgccttgagatcacattctctgaggcacctgtctttgtggacccccatggcagcggtttgcgtgccctctccaggtcccagattgactctgttctggatcttgcacggtgcacgatcgtgtccgagctctccaacaaggattttgactcctatgttctctccgagtcaagcttgttcatctatcctctgaagattgtcatcaagacctgtggcactaccaagctcctgctcacaattccaaggatcctagagcttgctgaagagctgtctatgcctcttgctgctgtgaagtactcccgcgggacgttcatctttcctggcgcacagccagccccccaccggagcttctccgaggaagttgctgtacttaaccgatactttgggggcctgaagtctggtggcaatgcttatgtgattggagatgcagcaagaccaggacagaagtggcacatctactacgccactgagtacccagagcaaccaatggtcaaccttgagatgtgcatgactggtctggacacgaagaaagcttcagtcttcttcaagactaatgctgatggcaacacaacatgtgccaaggaaatgacgaagctctctggtatctctgaaattatccctgagatggagatctgtgattttgacttcgaaccctgcggctactccatgaatgcaatccatggctctgcgttctccacgatccatgtgacgcctgaggatgggttcagctacgccagttatgaggttatgggcttggatgccactgccctgtcttacggtgaccttgtcaagagggtccttgggtgcttcggcccctcggaattttctgtcgccgtgaccatcttcggcgggcggggccaagctgggacatggggaaaggaacttggtgcggaggcttatgactgcaacaacatggtcgagcaggagctgcctggaggtgggatcctcatctaccagagcttctgtgctgctgaagacgccgttgctagctcgcccaaatccgttcttcgctgctttgatggcgagaatgcagcaccttttgcgaaggactgcaagctggctaatcttgtctgcttggaggaagttggatgctatcgaggagaaggatggagtgcttgatatgagtaagacgggtttctggtgtcgatttgcttctgagtttttttttctttttatatcgttgcgatctcgtggttgtcgtttggttagcagccaagccaggctattagtacgaagaatgtcgtctataaacatgtgttcctacgttgccacatgctgagtcaatctgtatacagctagctctaggtggtcagctgcgtctaccacaatgagcatacatgtatggataaatcttctgtgaaagcattcgatgaataagggttgttttcgtgattcaaaaaaaaaaaaaaaaaaaagaagaaataaaaaaaacaaggaaagaaaaaaaaaggaaagagaaaaaaagaacagatgaggacaagag

SEQ ID NO: 786 - DNA, 941 bp, Zea mays
  Clone ID: PAT_MRT4577_120194C.1
aattcggcacgagggccaaagagattacctcccctagccgccgccgccgctcgtctccctgagaggtgccgggaccgaggaactggccgagttctaggtagagaatcggttttgcttgtctcagcacggggtctgctgcgtctggtggtggtgaaggggagaaattcgtgagatctgttccggatcaggcgtgcgagctcgggaatcaggggtttcacacatagcttcgtcgatttgaatttgatgtactaatggagtctaagggtggcaaaaagtctagcagtagtcgttccatgatgtatgaagctccccttggctacagcattgaggacgttcgacctgccggaggcgtgaagaagttccagtctgctgcttactccaactgcgcgaagaagccatcctgatatcccttttggcttcctcattctagtagtttaggatttcttttctgacactttgattctgaccaatctctctgacctgctgcttcctgataatcgaccagttccccagtcttgctccttgcactcctccctcctccatctccagcattgtgttctgattcacctgctccaatggctgttctttctgctgctgatgcttccccggtctcagctatcgggtttgagggctatgagaagcgccttgagatcacattctctgaggcacctgtctttgtgaccctcatgggcggggggttttgcgtgccctctcagggccaagattgactctgttctggatcttgcacggggcacaattgtgtccgagctctccacaaggatttcgactcatatgtcctctctgagtcaagcttggttatctatcctctgaagattgtcatcatgacctgtggcactaccatgctcctgctcaccattccaagaatcctgagcttgctgaagactatctatgccattgctactgtgagtactccgtgggac

SEQ ID NO: 787 - DNA, 257 bp, Zea mays
  Clone ID: PAT_MRT4577_120207C.1
agaacaggggacacaccaaaacgacttttttggtcagggggatacacaggcccgaagggcagggaccacgagtttgatacaaagacgagcagagttgcaaaagccatggggatttgttcttcttggatccatccacccctgggggggctgaaatgaaagcttccgtccggccgatttttcctgaagttgtgttcttgcatttctccaagggccttggcgccaggccaatggcttttgatcctttcatgatccaaagg

SEQ ID NO: 788 - DNA, 1572 bp, Zea mays
  Clone ID: PAT_MRT4577_120229C.1
caactcatcgggcgcggagaccaccgcggggggaaaagcgagggaggggggagaggactgaagagaaatcatggagccgatttgctgtggagattcgggcgcgtgatccggtcggatcttgctttcccggggggcgatcgaggccacgccgctgctgccgcggtgccctccctctgcctctgggctctgcgtgtgacgtgccgtgccatggcgctcgccctcgcctatatccccagcctccctcgccccgccgccggcccccgcgtccggtaaaaagccacctaccctaccctcctgcgctggtactacttactacctagccaggccaaggagcccaacgagggggaacgctgcggtaggcgcgcgctgctcgtcccaccccacgccgccatgacggtgccagatgccgagtcgcgcttccatgtcctcgcggtggacgacagcctcgtcgacaggaaactcatcgagatgctgctcaagacctcgtcctaccaagtgaccacggtggattccgggagcaaggcgctggagctgctggggctgagggacgcgtcgtcgccgtctccgtcctcgcctgaccaccaggagatcgacgtgaatctcatcatcactgactactgcatgccaggcatgacaggatacgatctgctcaagagagtgaaggggtcctcctcgctcaaggacattcctgtggtgatcatgtcgtctgagaatgtgcctgcccggatcagcaggtgcttgcaagacggcgcggaggagttcttcctgaagcccgtgaagctggccgacatgaagaagctcaagtcgcacctgctgaaacggaagcagcccaaggaggcgcaggcgcaggcgcaggcgcaggcgcagcagggacaggcggtggagctggagcctgagcagcagctggacccgcgcacgcagccggcgcacgacgcggaggaaaccgcggcagagccgccgccggccgcatccaacggaaccaccgatggcggcaacaagaggaaggcggcagccatggaggaggaggggatgctggccgtgatgacggtggcggcgccggagagcagcaccaagccgaggctgtccaccaccaccagcagcctggcggtggaaacctgagctgagaatcggacggcgaccggatcacatactactacctacgtacattaatccaccattgcgggcagtcgagaggcaaccaaccaaccaagaaccaaccgaccaaacccaggccaccgccgagaaagagctcgtcctccttttctttcgctggttcttttggttctcggagctaattaatggaatgaaggtgtgagctcctggggatggaggggcggttacgggctctaagtgaagaacaattacgacgtaccttacctagcggctgctgcttcggccggcaaattttgttgtgctcgtggtcatggacacccttgtgttcgttaggagggggtcggggtggaacggtgaaaaggaagctgtagatagaaaaggcaggcgtctcatgctcttgttgtctagtctaatttttaattttactcggcttattaatcacggtactgactagctgcc

SEQ ID NO: 789 - DNA, 1923 bp, Zea mays
  Clone ID: PAT_MRT4577_120230C.1
cattgggtacctcgaggccggccgggaccatccatcgcatccaagaattgaccgactcccagtgacgccctgtgtgctggcttggctctgcctctgtgtgttggcctgttgggtagagagagactggtgaccgaagaagcaaggaaggcagctgtgctgtgcagtgagaggtccgtgcaggcaaagcctagctgcagtggctggcttgccatccacaccacacacccacagcaaagccacgaaccaactcatcgggcgcggagaccaccgcggggggaaaagcgagggaggggggagaggactgaagagaaatcatggagccgatttgctgtggagattcgggcgcgtgatccggtcggatcttgctttcccggggggcgatcgaggccacgccgctgctgccgcggtgccctccctctgcgctctggcctctgcgtgtgacgtgccgtgccatggcgctcgccctcgcctatatccccagcctccctcgccccgccgctggccgccgcattcagtaaaaagccacctaccctaccctcctgcgctggtactacttactacctagccaggccaaggagcccaacgagggggaacgctgcggtaggcgcgcgctgctcgtcccaccccacgccgccatgacggtgccagatgccgagtcgcgcttccatgtcctcgcggtggacgacagcctcgtcgacaggaaactcatcgagatgctgctcaagacctcgtcctaccaagtgaccacggtggattccgggagcaaggcgctggagctgctggggctgagggacgcgtcgtcgccgtctccgtcctcgcctgaccaccaggagatcgacgtgaatctcatcatcactgactactgcatgccaggcatgacaggatacgatctgctcaagagagtgaaggggtcctcctcgctcaaggacattcctgtggtgatcatgtcgtctgagaatgtgcctgcccggatcagcaggtgcttgcaagacggcgcggaggagttcttcctgaagcccgtgaagctggccgacatgaagaagctcaagtcgcacctgctgaaacggaagcagcccaaggaggcgcaggcgcaggcgcagcagggacaggcggtggagctggagcctgagcagcagctggacccgcgcgcgcagccggcgcacgacgcggaggaaaccgcggcagagccgccgccggccgcatccaacggaaccgccgacggcggcaacaagaggaaggcggcggccatggaggaggaggggatgctggccgtgatgacggtggcggcgccggagagcagcaccaagccgaggctgtccaccaccagcaacagcctggcggtggagacctgagctgagaatcggacggcgaccggatcacatactactacctacgtacattaatccaccattgcgggcagtcgagaaccaaccgaccaaacccaggccaccgccgagaaagagctcgtcctccttttctttcgctggttcttttggttctcggagctaattaatggaatgaaggtgtgagctcctggggatggaggggcggttaccggctctaagtgaagaacaattacgacgtaccttacctagcggctgctgcttcggccggcaaattttgttgtgctcgtggtcatggacacccttgtgttcgttaggagggggtcggggtggaacggtgaaaaggaagctgtagatagaaaaggcaggcgtctcatgctcttattgtctagtctaatttttaattttactcggcttattaatcacggtactgactagctgcctcaaaacctgtgatggatcagttggctgctgatgttgttttcgctcagttcttttcccacaaatatgtacactcaatattcaaataaactcttttccaatatctaagatttagaattccacaaaaaaaaaaaaaaaa

SEQ ID NO: 790 - DNA, 2008 bp, Zea mays
  Clone ID: PAT_MRT4577_120420C.1
aaaaaaaaaaaaaaaaaaaaacgctgcaactgcagcttgctcgctgacttgccgccggcgagccccgctccgagcatctccgctgctgcttctgccgaatcccagagctccttctcccgcttgccccctttccctcctgtcacattgattcgattttcgtcgcccatggagctacaaattaagtgtaggaaccaattaaaagcttgccaaaactaggtgcggcggcatcagcattcagcaataccctaggcgggctctcctcgccttcacagctccaagccgtttcatcagtgaaggagcagcacagcgtcgccccctctgtctctctccgcctcggaagcgtaggcggcgcctccctccacttataccaccagctccagcttctggagtctactgcagcgccgccctgccgctcctctgcctgctcttggtcacataaactgtaactgctgggtttggctgcaagggaaagacctgaggcgtggcgttctcttgatcctctatttgtccctttattacccgctgcttgatggacgcatggttgcaggcatgggataggccaaaaatctgccgcaactgtacaatacaaccctgtgtaacttgtaaacaagaggacttgtttggaagaaacactgtgcaacaatgtgtatagaagtactagctgattttgatacgcggcctttcttgaaacaattgaatgtgttaggccgctatgaaccaatcaagcggaatgtatattgcactaagagatacattgaagattatggcatttcttgtcactgtaagccttctcctggttcatcagttgtgtgtggcagagactgctattgtagcatgcttttctcttgctgttcatcacaatgtgaatgtgatattgcgtgcaccaataaatcattccagcacagacctcttacgaaaaccaaattgattaagacagagaaatgtggtcatggattggttgctgaggatgaaataaagaaaggagaatttgttattgagtatgttggagaagttattgatgacagaacatgtgagaataggctatggacaatgaaaaggctggatgacactgacttctacctttgtgaggtcagcagtaatatggtcattgatgcaacaaacaagggaaacctgtcccgatttataaaccatagctgtgaaccaaacacagcgatgcagaaatggactgttgatggagagaccagggttggaatttttgcacttcgtgacataaagataggggaggagctgacctatgactataacataatgtacagatttgtccagtttggagcagctcaagtttgtcattgtgggtcttcgaactgcagaaaaatgctaggcacgacgaagtattcaggaagctcacagaatcatcatgccaagaagaaaaagcggaaaacaagttgtgagaattgcatacagcagtttcttcggctgtggcatccacataaaaaaatgtatgttggttgttggataattgacttcgatcaagaaactaaaatgcatactctgaagttcaatgatctccatactgaaaagttcaatttgaaggaagaagaatggcacttcttagaggtcgattttgatgaagattgatcattgaaggtaactgcaagagttggctgccatggtttgtgacagggttgccatggtttgctgcaccgccggcctactagttgggggttcatttgcgatggcagcatagacagacggacggccatttttcttccattttggagtaatagtccaagcctgaactgtgacattcgtgcatgcttatacgtgaaagtgtacctgagagcagattatacgtgaaagtgtatcagcgttgcatatgcataaaaagttgggtcccccaccgttttttttaatataaaagaaatgcttgctccctcgacaaacaagcattttcccccccctgcagctaaagtggtggcctacaaccgcaaccccccttccgttaccatcttccttttactacagtacagtactgtttccccccccc

SEQ ID NO: 791 - DNA, 2258 bp, Zea mays
  unsure (1)..(2258): unsure at all n locations
  Clone ID: PAT_MRT4577_120422C.1
cgaggccggccggggcttgtctaatctctggaactgcagcttccctcggtcacttgccgttggcaagccccgctccaagcatctccgcgcctgcttctgccgaatcgcagagcccctctcccgcttctcccctctcccctcttctctcatcgttgattcgattttcctcgcccctggagcttcaaattcaagtgaaggagccagttaaggcttgccaaaactagcggcggcatcggcaatgctctagttggcctttccttccctcccagctcgagcagcgcagcgcggccctctttatctctctcggcagtggaggcagcgtcacccttcgcctaaatcaccaccaccagctctggagcgctgcgtcgccgctcctctaccatttcctggtagattggaccggaacggactaacggagtggagttctgctattgatcattgtgagttcatccccactccaatccatctgtccatggtccgtatgagctcatcttcctcggcgtctggggtcaatctgacagagcaaatcgagaatgtttttgaccaactgatcagcaaaattgaacaagcggatccagattttgacccgcggccctttttgaaacaattgaatgtgttaggccgctatgaaccaatcaagcggaatgtatatttcactaagagatacattgaagattatggcatttcttgtcactgtaagccttctcctggttcatcagttgtgtgtggcagagactgctattgtagcatgcttttctcttgctgttcatcacaatgtgaatgtgatattgcgtgcaccaataaatcattccagcacagacctcttacgaaaaccaaattgattaagacagagaaatgtggtcatggattggttgctgaggatgaaataaagaaaggagaatttgttattgagtatgttggagaagttattgatgacagaacatgtgagaataggctatggacaatgaaaaggctggatgacactgacttctacctttgtgaggtcagcagtaatatggtcattgatgcaacaaacaagggaaacctgtcccgatttataaaccatagttgtgaaccaaacacagcgatgcagaaatggactgttgatggagagaccagggttggaatttttgcacttcgtgacataaagataggggaggagctgacatatgactataaatttgtccagtttggagcagctcaggtttgtcattgtggatcttcaaagtgcagaaaaatgctaggcacaacaaagtattcaggaagctcacagaatcatcgtaccaagaagaaaaagaggaaaacaagttgtgagaattgcatacagcagtttcttcgtctgtggcatccacgacaaaaaatgtatgttggatgttggatagttgacttcgatcaaggaactaaaatgcatactctccagttcattgatcaccatactgaaaagtttgatttgaaagaagaagaatggcacttcttggaggtcgactctgatgaagattgatcattgaagttttattgcatccttgtacaaggaatagtcgtgcaagatgatattggcatgaggtgtggttaagtctcaacttccaattatgttgtgcatctttggaaaatgtaatctggccagtaacctttggaggatgaccgacttcagccgctcttttctgtgtttggtaagttggaacggagcggctctgtttttngctaggctgcagagggaggcgcgtgagctgctgcgcacggatgggagagcgagctgtgggagcgggctgggaacggagcggctccgtcccattgattttttggagcgggatggttccggatctgaggagaatatttcctaattggagccactccgttctagttactttgtaaccaaacaataacaaaactggaacagaacgactctgttctacttggctcttcaaccaaacgctacctaagtgaatcctttagctacaagcctagctttatatctttctagtttctacgttctctttagagtcacgcttgcttttgttggtccacttgcagcctattgttttggctcctttagaaatgacctttaggtcacaaactttatttattctcatagactgcattttgattcaacaacacctgttataatgtgttgggtaatctgacaatgtacaatgagttaaatatgtgttattctaacttatataagtatgggtaatgagttttatggttggaccaataaacttattagtgctttaatatttaattcatcatgtgcctct

SEQ ID NO: 792 - DNA, 913 bp, Zea mays
  Clone ID: PAT_MRT4577_120660C.1
cggccgctcgaggcggcgggccgggttacattgtacttgtggcaagtaatgttttgaactcagagcttaagttcgaggtgttttgatctgcgtatggtggacatgatctgtttatcgcaccgtttatctgaagtgattcgatatattactgttgatctttgaaaaaaaaaaatacgaccaacacgcaccggatcttgaccgatcaaaccattcagtgctcgcgctcactcacgcatcatagccaaattaagcgggaaggaaggaagggagggaggaagccatgtctgccgcggagggagccgtcgtcttcagcgaggagaaggaggcgctggtgctcaagtcatgggccatcatgaagaaggattccgccaacctcgggctccgcttcttcctcaagatctttgagatcgcgccgtccgcgaggcagatgttcccgttcctgcgcgactccgacgtgccgctggaaaccaaccccaagctcaagacccacgccgtgtccgtcttcgtcatgacgtgtgaggcggcagcccagctgcggaaagccgggaagatcaccgtgagggagaccaccctgaagaggctgggcgggacgcacttgaaatacggcgtggcagatggccactttgaggtgacgcggttcgctctgctcgagacgatcaaggaggcgcttccggcggacatgtgggggcccgagatgaggaacgcgtggggcgaagcctacgaccaactggtcgcggccatcaagcaagagatgaagccctctgaatagctcatccattgtactcatatgccacaccacttccgtctattatccctccaacttttgttgcctggccggttcactcatgtcaccatattgtatttgtattgtgtgtttatgtgtactgacgcctatgtaaaatgagcattcaat

SEQ ID NO: 793 - DNA, 1292 bp, Zea mays
  unsure (1)..(1292): unsure at all n locations
  Clone ID: PAT_MRT4577_120664C.1
ccggccgggaagtccctaacccgccctcgctttgtcgccgcggcacacggttttggccgtggacaggacagttgcaccctagccccattagccgattccgagctaggagtatatgcgtatcggtagtaaccgaggagcaacgcaacatgtccacagcccgcgcgctggtaacggatccatgcgtcttggctcatcaggtgctccaagggccaccctcgcccggcctgacccacctatataaagttataaacttgtgccccaacatcatcagttcgtatcacacccaacctcccactgtaaaaaagagcagcggaacgtgcgtgcatccatccatccaattccaatcccaatcccaatcccaccagtgtccagtgctcggggaaccgacacagctcctcagcagagaagccagcacgacaagcccgatcagcagacagcaggcatggcgctcgcggaggcagacgacggcgcggtggtcttcggcgaggagcaggaggcgctggtgctcaagtcgtgggccgtcatgaagaaggacgccgccaacctgggcctccgcttcttccttcaaggtcttcgagatncgcgccgtcggcgaangcagatgtntctcgttcctgcgcgaactccgacgtgccgcttggagaagaaccccaagctcaagacgcacgccatgtccgtcttcgtcatgacctgcgaggcggcggcgcagcttcgcaaggccgggaaggtcacggtgagggagaccacgctcaagaggctgggcgccacgcacttgaggtacggcgtcgcagatggacacttcgaggtgacggggttcgcgctgcttgagacgatcaaggaggcgctccccgctgacatgtggagcctcgagatgaagaaagcctgggccgaggcctacagccagctggtggcggccatcaagcgggagatgaagcccgatgcctagtagtggcgattgcgaccagtgtttaacccatgacgcagcgccgtcacagatgtcccgtgtggtcttgcgctttagcaatttctctctggagggagcgtgtattgttatcttgtgatcgagagcctgtgtgctgcctttgcttcttgtgattatatagctactgaataaagatgtagcgttcttcagcctgttacatcgaattcaaaaagaaaaaaaaaaaaaaaaaaaaaaaaaaaaaaaaaaaaaaaaaaaaaaaaaaaaaaaaaaaaaaaaaaaaaaaaaaaaaaaaaaaaaaaaaaaaaaaaaaaaaaaaaaaaaaaaaaaaaaaaaaaaaaaaaaaaaaaaa

SEQ ID NO: 794 - DNA, 1843 bp, Zea mays
  unsure (1)..(1843): unsure at all n locations
  Clone ID: PAT_MRT4577_120666C.1
accatccccgactcaccagagcacacaagaagacacgacctccatcggaagcacaggacagagatgagctcgtcggcggccaagaagggggcgtcgatggtggtggcgacgagcatggcggccgtggaggcgctcaaggaccaggcggggctgtgccgctgggactacgcgctccgctcgctctaccaccgcgccgtcgtcaccggccgccgcgccgtcccggcgtccctcacctccacctcctcctcctcccaggccacgagcggcagtgtggccgtcgtcgggagggctgcccggcccaggcgatccgaggaggagaagctgcacatggcgtaccacatcgtctgctggggccccaactgattatagaactaatagtagcacatttttgttctgctgtctatcgattcttttccagcctctctctttctccgtttcggtctcttccccgagcatctgtgaatggcgtgtaaaccgcatatatgtttgcttccacgcagaaagaaagaaagtgagatatgtaaacggaagagttcctaaaaaaaaaaactcccgcccaactcgctccgctcccaacgtccaacagaacggaagagcagcggaacgtgctgtgcctccatccaattccaaccccagtcccaatcccaccagcgtccagggctcgcagaagccgacccagctcctcaacagaccagccagcccgatcagcagacagcaggcatggcgctcgcggaggccgacgacggcgcggtggacttcggggaggagcaggtggcgcaggcgctcgacgtcgtgggccgtcatgaagaagaacgccgccaacctgggcccccgcttcttcctgaaattcttcgagatcgcgccgtcggcgaagcagatgttctcgttcctgcgcgactccgacgtgccgctagagaagaaccccaagctcaagacgcacgccatgtccgtcttcgtcatgacccgcgaggcggcggcgcagctccgcgaggccgggagggtcaccgtgagggagaccacgctcaagaggctgggcgccacgcacttgagggccgccgccccggagggacacttcgaggttgacggggttcgcgtaccggatcttgaccgaccgaaccattcagtgctcgcgctcactcacgcatcatagccaagttaagcgggaaggaaggaaggaaggaagccatgtctgccgcggagggagccgtcgtgttcagcgaggagaaggaggcgctggtgctcaagtcatgggccatcatgaagaaggattccgccaaccttgggctccgcttcttcctcaagatcttcgagatcgcgccgtcggcgaggcagatgttcccgttcctgcgcgactccgacgtgccgctggagaccaaccccaagctcaagacccacgccgtgtccgtcttcgtcatgacgtgcgaggctgctgcgcagctgcggaaagccgggaagatcaccgtcagggagaccaccctgaagaggctgggcggcacgcacttgaaatacggcgtggcagatggccactttgaggtgacgcggttcgctctgctcgagacgatcaaggaggcgcttccggcggacatgtgggggccggagatgaggaacgcgtggggcgaggcctacgaccaactggtcgcggccatcaagcaagagatgaagccctctgagtagctcatccattgtactcatatcatatgccacgcaacttccgtccatatccgtccaactttcgttgcttgaccggttcactcatgtcaccatattgtgnttgtattggggtgtttacgtgtactaacgcatattgtaaaatgggcattcaataaaggaacaaattgtgcgc

SEQ ID NO: 795 - DNA, 802 bp, Zea mays
  Clone ID: PAT_MRT4577_120668C.1
cattgggaccctcgaagccggccgggatatcccatccatacagctagctagcgtacggacgaataatctctatcttcacctcactagataacaccagctagcagctcgatcgctctgtcctgcaataatggccgctcgctcctcctcccaacagctggccgcggcggcggacctggcagcggcgctgctgctgctggcggcgagagccgagacgacgtctgcggcggagagctgccgcgaggtgactgcgacggtggcgccgtgcctcgggtgacgcaaagggcagcgcggcgtagccctccgcgagcgtgctgcacgagggctgcgctcgctcaacagccgcgcgtcgtcgacggcgagaacgtatttcacctgcaactgcctcaacagcatgacgggccggatcagcggcggagacagcatgaccaacgccgccaacatccccgggaagtgcggcggctccgtcagcgcgaccatcagccccaccgacaactgcaccaagatcaactgatcgatggaaccatagcggaggtatctcgctcgttggatggcagcgcacgtggacatcaccacgatgcagtcgtcaacgaatcagagatgtcctagctacgtgtgtgtcatgcatcagactggcacataataaagagacagatcatgcacccactagtgatcacttcgtctagtgtccctccgtacaatgacgccgtcgtcgacgtgtaccttacgtgacatgctgtagcacgtacgctagcagagcagcacctcaatgtccttgggtttgctttgctgggtctctgttatc

SEQ ID NO: 796 - DNA, 393 bp, Zea mays
  Clone ID: PAT_MRT4577_120776C.1
gcgcgcgtgtccccacgcaccattattgagaccaactagcaacatagaaagcacaatagtgtaccaacaatggcagccaaaatattttgcctccttatgctccttgctgtttctgcaagtgctgctacggcgaccattttcccgtaatgctcacaagctcctatagcttcccttcttccctcgtacctctcaccagcgatgtcttcggcatgtgaaaacccaattcttcaaccctacaggatccaacaggcaatcgcacctgggatcctacctttataccccttgtacgtccaacaatcatcagccatattacagcagcacacgctttggggtatttattgcaacaaaacatcgggtcaccacaaataccaccacttgtgctagcaaaccctg

SEQ ID NO: 797 - DNA, 420 bp, Zea mays
  Clone ID: PAT_MRT4577_120809C.1
cctatgcgtgcggagaaatggctccaactctcggattagtaggacctacatctttggtgccgatgattgagacagcaattggaattgttgatagcactggtggttaatctcatgttcttgtgataagtcgccgatggacaggttaccctaagggtcgttgcacaatatggacagtggactccacaggagccggatactattggtgcagtagcaagagcaagccagtttcccctggcaatcgattttgtaggggttggggatggaccatgggacatgatgcaccaagttgaagacaatatacctgttaggtcatttcacagtttccagtaagtgaatttgacggagatcaatgacgagagctttaccactgatagaaaggaggcagaatttgcattgtctgcgcttgtggaaatgccttca

SEQ ID NO: 798 - DNA, 401 bp, Zea mays
  Clone ID: PAT_MRT4577_12083C.1
cattgggtacctcgaggccggccggggtgctttcttataggtgtgttggcttctcctccccctccggttcgggttcgggttcgtgaggttctccggcgttcggtttcgagggtgagcggatcgagatggagaagacagatggtgagtaccgctgattcatcggcggactctgctgggccaaggtacgaccactccctccagaacgccttcatgacctacttcgagggcctcaagtctgagatcatcctcgatcgttagacccataggtaccgcggcttcggtttcgacaccttctccacggaggaggcgatgtgaaacgccatagaatgcatgaacagtgaggagatgtacggacgcaacatcaccgacaacgaggtccagtcccgcggagatcgcggagg

SEQ ID NO: 799 - DNA, 539 bp, Zea mays
  Clone ID: PAT_MRT4577_120886C.1
atgggagcacgtcatgtgccagggacatgacgccgctctctggcgtctctgacatcatacctacgatggggatctgcgagtctgactgtgcaccctgtggctacttcatgaatgcgatccatggctctgcattctccacagtccatgcgacgcccgacgacggatataactatgccagtgatgaggttgtgggcttggatgccactggtctgacctatggtgaccttgtctagagggcccttgagtgcttcggccccctcgattatttcgatgccgggaccatattctgcgtgcgtggccttgccgggacatggggaaaggcacttggtgcatgaggactatgactgcaacaacatggtggagcaggagctgcctgtatgcggactcctccagaaccatatcttctgtgctgctgaaaacgctgttgctaccttctccaaatctgatgttcactgctttgaccgtgagaacgtggagagtgctcctactgctatgaagaaggactacacagtgcctaatcttctatgctgggaagagga

SEQ ID NO: 800 - DNA, 136 bp, Zea mays
  unsure (1)..(136): unsure at all n locations
  Clone ID: PAT_MRT4577_120955C.1
tngtagaggatgaccactgcgttgctggtgcccttgagaaagaggaggattccgggaagatgaagcggtccccgagccatagcagcgtcgccgcctcctccgccgccgtgctggctgaccccgccgagaagccgcg

SEQ ID NO: 801 - DNA, 207 bp, Zea mays
  Clone ID: PAT_MRT4577_121027C.1
cacagtcaaccagcaacactcttctcttatacatactacgtcgaaggtaactcacatgccaacttccatgggtggtctcgtgcttgatctgactactgtattctctccgtcccaatgccgtgcttgcccacccaggggggggcttcctcccacagctctatgaccattcgcgccccaaggccaaggagatcgtgcagcccatgggcg

SEQ ID NO: 802 - DNA, 1727 bp, Zea mays
  Clone ID: PAT_MRT4577_121045C.1
tcggccaaaaaaaaaaaaaaaaaaaaaaaaaaaaaaaaaaaaaccccaccctggtctggtctcctctccaagcgggcagcgccgctttataactcgtcctcgggagccgggaccccaacgccgcctactccgcgctcctccaaacactgaaccctatcctagcacgagtgcacgacggtggcagcaggagatggtggggacggcggaaggcggcgcggagagggcggtgcggcggtgggtggacgccgccggcgggcgcctggtcctggacggcgggctggccacggagctcgaggccaacggcgccgacctcaacgacccgctctggagcgccaagtgcctcctctcctccccgcacctcatccgcaaggtccatatggactacctagaagctggggcgaacattataatcacagcatcgtatcaggctactatccaagggtttgaatcaaagggcttttcaaaagaacaaagtgaaaacttgttaacaaagagtgttcagattgcactggaagcccgtgagatgttcttgaaggaacatttggagaaatccactcctatacagcatcctattctggttgcagcagctctagggagttatggggcttatcttgctgatggctctgagtacagtggggattatggtgaagctggtacgaaagagttcctgaaggactttcatcggcggaggcttcaggttcttgctgaagcaggcccggatttgattgcttttgaaacgatccccaacaaattggaagctcaggcatatgttgaactccttgaggaatgtaacattaatatcccttcatggctttccttcaactcaaaagatggagtgcatgttgtgagtggtgattcgttaattgaatgcgctactattgctgacaagtgtgcaaaggttggtgcagtcgggataaattgcacacctccaagatttattcatggactgatactctccattcgaaaggtcacagacaagcctattctgatatatcccaacagtggtgaaagatatgatggtgaaaaaaaggagtgggtggaatccactggtgtgtcagatggtgattttgtttcgtacgtaaatgaatggtgcaaagatggggctgcgcttatcgggggctgctgcaggacaactccaaacactatcagggccatacacagaactcttaaccaaggctgccacaagcatcagttacctgtaggctgtagcatagatctgtgctccactcctgatgctctcctcccagcagtaccttgagctgtatccccgagattccttaaccagcgcgaaccaatatactgttgcgtgttctcctgcaaatgagatgttctgcacctatgtttgtaatgttgtatttctgggtttttaagctatccaacttggagatacaaccggtgaggaagcagcaacaataggtagttctacttctgagtgaggaaaaacaacttgcggctgagttaatgaagcttagtagctaccaccgttgtatgacagttgctcagagatgttatcttcattaagtgcttatattaccgctagttccctgtgaaatttgttaaaccattatatgtaagttttgtttgacaagactgcatctcctgaaactaagatcttagtttcctgctatttccctgtgaactgtgttaaattgtatgcaagttttctttaacgcatctcctgaaacgaaggtcttaatatatttctgctacccgccgtgtattgtatt

SEQ ID NO: 803 - DNA, 2162 bp, Zea mays
  Clone ID: PAT_MRT4577_121053C.1
cccacgcgtccgcccacgcgtccgatacgtacgtgaagaaccaacaggagggccgggctctcgctcgccgcgcgcacccccctctctctatctctcccgccgccgttgatctatcaccgggccgccggtccgtgactgtcgccagcggctgctggttgttgcttggttgcgtcgccgcgggagccgtgtgacccgggcgcaatgccgggagccgtgatcgtgcaccaccacacgaggtacaagacgtaccccggcgaggtcaccggcatcgccatcttctcgtgcttcatcgcctccgtcgccggctgcatcttcggctatgacatcggcctcacatccgggctgacgtcgacggagccgttcctggtcaagttcttcccctccatctacgaggagatgaagaggcaggtggtcgtcaaccagtactgcaagttcgacagccaggtcctgacgctgttcagctcctccctcttcctcgccgcgacggtggccaccttcttcgccggcccgatgacccgcgccttcgggcgcaagtggaccctgttcgccgccgcgtccgcgtacgtggtcggcgcgtgcatcggcggcgtgtccgtgaacttcccgatgctgctcacgggccgcgtcctcgttggctccggcgtcggcatctccatccaggcggccccgctctacatctccgaggtggcgccggcgcagcagcgcgggatgctcaacatcctgttccagctcatgatcacggtgggcatcctgacggcgaacatgaccaactacctggcgtccaaggtctcgggcggctggggctggcgcacccccgtgacgttcggcgccatcccggccgccgtcatcgcgctgggcgcgctcgccatcccggacaccccggcgtcgctcgtcgagcgcggggacacggccacggcgcgcaagacgctgtcccagatccggggcgtcggcgacgtgcgcgaggagttcgacgacctggccgccgcgagcgaggacgccaaggccgtgcagtgcccctggcgggagctcttcttcggcggcaagtacaagccccagctcacgttcgcgctgctcatccccttcttccagcagctcaccggcatcaacgtcatcatgttctacgcgccggtgctcttcaagacagtcggcttcaagcagaacgccaccctcgtgtcctccgtcatcaccggcctcgtcaacgtcttctccaccttcgtcgccatcgccaccgccgacaagatcggacgccgcgcgctcttcctgcagggcggcacgcagatgatcatctcccagatccttgtggggacgttcatcgggctgcagttcggcatgagcgggacgggcgacatctcggagcagtacgccatgtgcatcgtgctgttcgtgtgcgtgtacgtggccggcttcgcgtggtcgtgggggcccatggggtggctggtccccagcgagatctacccgctggccgtgcggtcggcggcgatgagcgtcacggtggccgtcaacatgttcttcacggccttcatcgggcagatcttcctcacgctgctctgccacctccgcttcggcctcttctacttcttcggcgcctgggtgctgctcatgacactcttcatcgccatgctgctcccggagaccaagagcgtgcccgttgaggagatggcgcacgtctggaagaagcactggttctggcgcaagttcgtcatcgacaccggcaacgacgcccgcaacgccgagatgaggaagaggatagcgctagagatgagctgatcatcgtcgtccatgcatgcagtctccatcgcccatgcatcatatatatgcagtaggcaggcaggcagatgaaggaaattacgtacacaagcgccaactaaaactaaacccaagtcaattacttcatatatcactcaatagctgctagaacatatatgaatggttgttgtagactgatcgtaatcccagatagttatgatatacatctttcattttaactagctagcgtatatatgtattgtacgggtatctagatttttatctgtttattctaacattcgagatctacatattttgttttggccgttcaccgtatgagatcttttgacaattttaatgccaaattatgagaacttgagtcatacttttgggaattataaaatataaatataatt

SEQ ID NO: 804 - DNA, 392 bp, Zea mays
  Clone ID: PAT_MRT4577_121091C.1
gactttcttatttctgggaagccacatacatcaaacacaaaaactttattattcgaactgtaactcataagaaatctaaaaaaggcaccacctatgatgggttgttggtataacactgttgggtttgtcaaagcaagttggctgaatggcaacaattgttgcacttgtaagagggtgccagcgttaggcgcagcgtgctggtagaacggcaactactgtggttgtgtcaagaaggcagcaaggctcacaccatctagctggctaaatggcaacatatgttgctgctgtaaataagcaggaaagctcaatgctttcaggtggctgaatggaataaactgctggtggtaggcagctgctagctacgctaatggcattttacgactgtgccaata

SEQ ID NO: 805 - DNA, 514 bp, Zea mays
  Clone ID: PAT_MRT4577_121092C.1
tttcttatttctgggaagccacaaacatcaagacacaaaaactttattattcgaactgtacctcataagaaatctaaaagaaggcaccaccaatgatgggttgttggtataacactgttgggtttgccaaagcaagttggctgaatggcaacaattgttgcagttgtaagagggtgccagcgttaggcgcagcgtgctggtagaacggcaacaactgtggatgcgtcaagaaggcagcaaggctcacaccaactaactggctaaatggtagcagctgttgatgctgtaaataagcaggagagcctaatgctttcaggtggctgaatggaagaaactgctgctagtaggcagcagctagctacgttaatggcatttgacgatggtgcaaataagaagcatagatcaatgcagctagttgcgatgaatggaagaaactgatgttcctgaaagtatgcagcaaggcctgctagcacaagctgatgaagtacatgtgccttgatgatttgtgccaaca

SEQ ID NO: 806 - DNA, 2680 bp, Zea mays
  Clone ID: PAT_MRT4577_121097C.1
actccttggggtaccctcgaggtctgcggggtaaaccaaaaccctaaagcccgggtcgggctctcttttcccctcccttttccagcacggggagcgacctgcgccgccgccacgatgccgaagcactaccgccctgcgggtaagaagaaggaagggaatgcggcaaagtacatcacgaggaccaaggcggtcaactacctgcaagttagcctcgcaatctttaggaagctatgcattctaaagggtgtctttccacgtcagccaaagaagaaggtggaagggaaccacaagacctactaccacacaaaggatattgcattcctcgctcatgaccctttgatcgagaagttcagggagattaaggtccatcgaaggaaggttaaaaaggctgttgctaagaaaaacagggatcttgcagacaggctgttgaatcggccaccaacttacaagcttgataggcttgtccttgaaaggtatccaacattcgttgatgctcttcgtgacttggatgactgccttacaatggtgcatctgtttgcggcattacctgctgttgacggtgaacgtgttgaggtcaaacgaatccataactgccgcaggttaagccatgaatggcaagcatacatatcccgaacccattctctgaggaagacatttatttccgtgaagggcatatattatcaggctgaagttcaaggacaaaagatcacctggctaactccgcatgctcttcagcaagtattaactgatgatgttgatttcaatgtgatgctttcttttctagaattctatgagactcttctaggatttgtgaacttcaaactctatcattcaataaatgtaaattatcctcctattctggatccacgtctggaagctttagctgctgagctctatgcattgtgccgatacatgtctgctggttccagaagaatgattgggaattcacaaactgacgaagtaatggaagataaggatgagaaaagtaaagctgaggaagtaattaaggaagagaaggttgtgaagaataaagcaagctcaaaagcagatgaatctgagctcagattagcacagcttcaacatcagctcccaaccaatgaacctggtgcactgatgaatcttgtagaagaatcaactgccgatgatgcagatgatgatgatactaaagattgtaaaggtttatttaagaacttaaagttctacttgagtcgagaggtgcctagggagtccctgttatttataattccagcgtttggagggactgtttcatgggaaggagaaggagctccatttaaagaaatagacgaagatatcactcaccagattgttgataggccgacacaaagccatgttttcctctccagggattatgttcaaccacagtgggtctttgattgtgtaaatgctcgtatcatattgccaacagaaggttatcttgttggaagagtacctccaccacatttgtctccttttgtggacaatgatgccgagggctacatgcctgagtatgcagagacaataaagaggctccaagctgctgctcgcaatgaggtgttgcctcttccaggtattggtgatgaagatctagacaattcactggtagcagcaatgatggatcgaacagcttctaacgaagctgctgaaaagaagaggaagctggagatgctagagaagcaatacatcgatgaactgaagaaggaaattgatggcgttgctttctctagtttgtcaaacaaggaagcagataaatcaccgaatgcaaaagatgatactcagtcagatcgtgaggaggatgccagtaaacaagaggaggatgatgatgatgatattggtactgctctcatgtctcgcaagcagagaggcctttataaggctatgaagatgggcaaagaaaagaaaaaggagaaagttgagctactcaagaagagaaaaaagaacgcggattctggcgcttcttccaagaagcggcactgatgtgtcacaaatcttcatcgcattggtgtgtcatctctagtagaaatgttaccatgatcagctctgcgtgccaatcccccatgatgggtgggttgccttttgatatctgctatgtatgcttaagatgagttcaaggatatgtaacatgaaacttgaatagaaaagttttgatctgtcttacgaagcatttagactcgttattattgtgaaacttgaatagaaaagttttgacctgttttacgaagcatttatagttattattgagaagcctggatatattgcttgccccgttttataggaaagaattattttttgggtctggaaacattgtgaacaaaccaaacttcagcttgtcagcttcagatttgatagatatcccaagcttagccagaagcatcggaaatagattcatgacccagatctgggtaagtggcgggcggaaaatggtaggcgacgaagctcgaagccatcttaagccggatgacgaagctgaagattgacaatgctgatgtttaacaaaactgaaaacgaagccttagctgaagcttcccgttgcttataatgtgctttcctgcaaaaattcttggagaaactcttgtaatatagatatggaacaactcatgtaaatttgtacataccttgtaatatatcctgtctcccttatccgtaaaaaaaaaaaaaaaaaaaaaaaagttctagatcgcga

SEQ ID NO: 807 - DNA, 175 bp, Zea mays
  Clone ID: PAT_MRT4577_121167C.1
ggggggtcctaaccatttccaccccacccttccacttttgcgttccttcgatggaactcgcgagccctcggaataaaagaaagttttggatatatactaaggcttaacctcttctacttgttttgtaaatctaatgatacatatatttaaacccacgttgtttcccttgtctctc

SEQ ID NO: 808 - DNA, 259 bp, Zea mays
  Clone ID: PAT_MRT4577_121283C.1
gccttgagggcaatccccacggggacatggggcggagcgcaggaggccctctccctggtgggcacgatgggcgggcataaccgcgaggtgacggcgatcgccaccccgatcgacaactcgcctttcatcggctcctcctcccgggacaagtccgtgctggtgggggacgcgaccaactgggtccacttcaccccggaatccggcgcaaccgccgactacggcgtccccttccgtcgcctcaccgggcactcccacttcg

SEQ ID NO: 809 - DNA, 337 bp, Zea mays
  Clone ID: PAT_MRT4577_121297C.1
cttatcctccccctcttaccaagtccttctcgggttagggttccttagggttttatggaggggcgatggcggcagctgatgtggaataccattgattagtcagcgggcttgcctgggccaccagcaacgagtagatggagaatgccttcatcttctacggcgagatcctcgactgcaaggtcatgaccaaccgggagacggggaggtatggcggcatccgcttcattaccttgctcttcaagaactacatgctcgacgctatcgacaacaagaactgcatggagctcgactgcagaaacatcaccgttgacacgacccagtccccttgcagctgctg

SEQ ID NO: 810 - DNA, 268 bp, Zea mays
  Clone ID: PAT_MRT4577_121344C.1
gcaacttcagttagcttctgtattcttcacttttcatcttggaacaaagactcactactatggcaggacgatacttcatggtggagcaaagtatagagctactgggagagggtttgttgtgcgtcatgcaaagttcgctgagaattatcggatgtactcccggagtcactttgtcaaagcactggagctgcttattcttttggttgtctacctagcttatgggagttcatacagaagctcaagtttgtatttgtatgtcacagtttcg

SEQ ID NO: 811 - DNA, 233 bp, Zea mays
  Clone ID: PAT_MRT4577_121449C.1
acaaactcatccaacatattttgggtacgtatactcataaatctctctgcaaccgctactacgccaaccatttttccacaatgctcacaagctcctataactacccttcttcccccgatcctctcaccatcttcgtcttccatatgtcaaaacccaattcttcaaccctatagcatccatcaaccaatcgcaactcacatcttacctttatcacccttgctccttcaacaatc

SEQ ID NO: 812 - DNA, 939 bp, Zea mays
  Clone ID: PAT_MRT4577_121699C.1
tcattgggtccctcgaggccggccgggggtttcgttccctctccttggccttcgtctccgccttccgacttcctctagaattcgattccctttcccaagaaaccaagaacccagccccccaccatgacgagctcctcctctccttccagaaaggcgctgagcaagatcgcttgcaatcggctgcagaaagagctcgccgagtggcagcaaaacccccccgccgggttcaagcacaaggtctccgataacctccaaaggtgggtaattgaggtcaccggagcggcgggcaccctttacgccggcgaggcttaccagttgcaggttgacttccctgagcattatcctatggaggcacctcaggtcatttttctcaatccagcgccaatgcatccacacatttacagcaacgggcacatctgcttagatattctgtatgactcgtggtcaccagcgatgaccgtgagctctgtctgtatcagtatcctgtctatgttgtctagttcgccagcaaagcaacgcccggcggacaatgaccgctatgttaggaactgccgcaacgggaggtcgccaaaggagactagatggtggttccatgacgacacggtgtaatgatctccgtggcattgcctgtcagccttctgtactgtgaactgtgatatatctcttcaagggggagatgagatgatttaggcctatttctaagcagccctctattggattgcgaagcttaccttgctgtggtggtatgtaaatgagttgctcacatgtgtcagtctgggaatatgtgttatcaccatcaatgatataatatatagaataaagcaagattgtaccctgcctgagtcactgaaacgagctcaaaagtaatgtgcaggtttgactatgatttgttttggtcaatgtgcctttgtatcagtctgcagtctgcttatgcatttg

SEQ ID NO: 813 - DNA, 886 bp, Zea mays
  Clone ID: PAT_MRT4577_121701C.1
cgcccacgcgtccgcccaccccacgcgtccggtctccgccgtgggcggacgcgtgggcgattccctttcccaagaaaccaagaacccagcaacccagccccccaccatgacgagctcctcctctccttccagaaaggcgctgagcaagatcgcttgcaatcggctgcagaaagagctcgccgagtggcagcaaaacccccccgccgggttcaagcacaaggtctccgataacctccaaaggtgggtaattgaggtcaccggagcggcgggcaccctttacgccggcgagacctaccagttgcaggttgacttccctgagcattatcctatggaggcacctcaggtcatttttctcaatccagcgccaatgcatccacacatctacagcaacgggcacatctgcttagatattttgtatgactcgtggtctccagcgatgaccgtgagctctgtctgtatcagtatcctgtctatgttgtctagttcgccagcaaagcaacgtccagtggacaatgaccgctatgtcaggaactgccgcaacgggaggtcgccgaaggagaccagatggtggttccatgacgacacggtgtaattgagcgcctgacagccttccatgctgtggtatatctcgtcaaggggagattggggatgatttaggcctatttgtaagcatccctctatcggattgcgaagcttaccttgctgtggtggtgtgttaaatgagttgcacacatgtgtcgagtctgagaatacatattaccatcatcaatgatataagtaatatagaataagcatgagtgtaccctgcctgaatcactggaacgagctcaaaaggaattacctgtgcaggtttaactataaaaaaaaaaaaaaaaaagcggccgcc

SEQ ID NO: 814 - DNA, 1573 bp, Zea mays
  Clone ID: PAT_MRT4577_121705C.1
cccacgcgtccgtcaccttactattctacattagaaaatctatactgagtgtgaaaggaagcatataccctgttggacgttgttttcacaagttctttgttgaccttggtggatttttctcagtttgtgaatgagatgaaaataatgaccttggagccccgtcaaccatggtctacaatcgccttgtaaattgtataatagctaaagcctacatcaaagtatttataccctttacatttgcgtctggagaatttactctcttctgttttccattaatccactgtccacttactcatgagttctctgagatattgaatggaacgtaaacaatttttgtggagccttgatggatgtggattacagtttactgtatggtttgtgattaacaaattcctgctgttactcttggctcgggccgggccggggggaataaagaaaaaacggaagcatcaagtctgaaactgaaaagaagggcgaatagcggtttctctgattctctccctcccttgccttcgtctccgcctcccgtctttcctcaagaagtcgattcccttccccaagaacccaagcccccaccatgacaagctcctcctctccttcccgaaaggcgctgagcaagatcgcttgcaatcggctgcagaaggaactcgccgagtggcaactcagcccccctgctggattcaagcacaaggtctccgataacctacaaaggtgggtaattgaggtcactggagcggcgggcaccctttacgccggcgagacctaccagttgcaggttgacttccctgagcattatcctatggaggcacctcaggtcatttttctcaatccagcgccaatgcatccacacatctacagcaacgggcacatctgcttagatattttgtatgactcgtggtctccagcgatgaccgtgagctctgtctgtatcagtatcctgtctatgttgtctagttcgccagcaaagcaacgtccagtggacaatgaccgctatgtcaggaactgccgcaacgggaggtcgccgaaggagaccagatggtggttccatgacgacacggtgtaattgagcgcctgtcagccttccttgctgtggtatatctcgtcaaggggagattggggatgatttaggcctatttgtaagcatccctctatcggattgcgaagcttaccttgctgtggtggtgtgttaaatgagttgcacacatgtgtcgagtctgagaatacatattaccatcatcaatgatataagtaatatagaataagcatgagtgtaccctgcctgaatcactggaacgagctcaaaaggaattaactgtgcaggtttaactatgacttgctttgctcaatgtgcctttgtatcagtctgcagtctgcttatggatttgcctatgtaaatgagttgctcacatgtgtcagtctgggaatatgtgttatccccatcaatgatataatatatagaataaagcaagattgtaccctgcctgagtcactgaaactagctcaaaagtaatgtgcaggtttgactataaaaaaaaaaaaaaaaaaaaaaaaaaaaaaaaaaaaaaaaaaaaaa

SEQ ID NO: 815 - DNA, 278 bp, Zea mays
  unsure (1)..(278): unsure at all n locations
  Clone ID: PAT_MRT4577_121749C.1
gacgcgcagcccgagctcttcatccacatcatccccgacaaggcgaccaacacgctcacgatcgttgacagcggcattgggatgaccaagtccgacctcgtcaacaacctcgggaccatcgccaggtcggggaccaaggagttcatggaggccctcgccgccggcgccgacgtgtccatgattgggcagttcggtgtcggtttctactccgcctacctcgtcgccgagagggttgtcgtcnccaccaagcacaacgacgacgagcagtacgtgtggga

SEQ ID NO: 816 - DNA, 1776 bp, Zea mays
  Clone ID: PAT_MRT4577_121828C.1
cattgggtccctcgaggccggccgggaaagcctcgggggccaatcgtctctccaccaggcaactcctcctgcctgtgctctcctcctttttctccactccgcttttgcttggttccatcgggccggagagggagaagctagctagctagcagcagctctgttggtgtgtgtgtgtgtgtgtgtgtggagggtagctgcagctggggctagctggaaaggtcgggagccatggggaggggccgggtggagctgaagcggatcgagaacaagatcaaccgccaggtcaccttcgccaagcgccgcaacggcctgctcaagaaggcgtacgagctctccgtgctctgcgacgccgaagtcgcgctcatcgtcttctccaaccgcggcaagctatacgagttctgtagcggaccgagcatcacgagaacacttgagaggtacgaaaaaaacagttatgcaggcccagatactgctgtacagaacaaagagaacgagttagtccagaacagccgcaatgagtaccttaaactgaaagcaaaggtggataatttacagaggactcagaggaatttgcttggtgaagatctgggttcacttggtgtcaaagagcttgatcagcttgagaagcaaattgattcatccttaagtcacataagatccacaaggacacagcatatgcttgatcagctcactgatcttcagaggagggagcaaatgatgtgtgaagcaaataagtgccttagaagaaagctggaggagaccagcaaccaggtgcatggccaagtgtgggagcacggtgccaacttattactcggctacgagcggcactcctcgccacagcaagccccatcacatgttggcaatggattattctttcatcccctggaagctgcagcagagccaaccctgcagatcgggttcgctcccgagcatatgaataacttcatgccggcatggctaccctgaagatggatctttgaggcaaagggaataaataaagatgcgatggcagaatcatattgtactgcaagagtgacaattgtgtgttccactcacatatatgacctagttttgtgtgtctatatgtcgaaacccatatgtctgtgattttattatatgttatgtaagcacaaatgaaacatgccggactagttgcttttgcttgtctatgtatttgtttattccctttgcctcaaagatccatcttcagggtagccatgccggcatgaagttattcatatgctcgggagcgaacccgatctgcagggttggctctgctgcagcttccaggggatgaaagaataatccctagttctagatcgcccaacatgtgatggggcctgctgttgaggagagtgcctctcgtagccgagtaagttggcaccgtgctcccacacttggccatgcacctggttgctggtctcctccagcttttttatttgcaaaacaatcacgtgaagaaaccacattaattttttatacgaaacaagaaacctcattgatctcagaaaccccccttaaaactcatttagttggtaaatactgttatcacatgcatactgtaatagcagtcaaatgtaacaatatgcacaatgcatattttgagaggttaatatatgaattacagttatgctgccacaactgaacaacagtattccttatgcaaaacatcctgtggcggatgtattaagacaaacaccatgcatatagaagtattatccacagcagattgtgtaaaatatagaatttgtctgtatattacacatttaataagcccgg

SEQ ID NO: 817 - DNA, 1626 bp, Zea mays
  Clone ID: PAT_MRT4577_121831C.1
gggtaccttcgagccggccgggaaaggccgcccactaccctctccggctctccgctaacaaaatctagaaccctctgaaccctccacattcctccagatcgaataataacctagctctgcacaccgcccagccaccagtggcagcaggagcaggggtcggaacaagatggtggggacggcggccggcagcgcggaggaggctgtgcggcggtgggtggacgccgccggaggacgcctcgtcctcgacggcgggctggccacggagctcgaggccaacggcgccgacctcaacgacccgctctggagcgctaagtgcctcctctcctccccgcacctcatccgcaaggtccacatggactatctggaagctggcgcaaacattataatcacagcatcgtatcaggccactattcaagggtttgaatcaaagggtttttcaaaagaacagagtgaaaacttactaacaaagagtgtcgagattgcactggaagctcgtgagatgttcttgaaggaacatctggagaagtccactcctatacagcacccggttctggtcgcagcgtctttagggagttatggagcttatcttgccgatggctccgagtacagtggggattatggtgaagctggtacgaaagagttcctgaaagatttccatcggcggaggctccaggttcttgcggaagcaggccccgatttgattgctttcgaaacgattcccaacaaactggaagctgaggcgtatgtcgaacttctcgaggagtgcaacatcaatatccctgcatggttttccttcaactcaaaagatggagtgcatattgtgagcggtgactcgttaatcgaatgcactactattgctgacaagtgtgcaaaggttggtgcggtcgggataaactgcacacctccaagatttatccatggactgatactctccattcgaaaggtcacggacaagcccattctgatatatcccaacagtggcgaaagatacgatggtgaaaaaaaggagtgggtggaatccactggtgtgtcagatggtgattttgtttcttatgtgaacgagtggtgcaaagacggggctgtgcttatcggtggctgctgcaggacaactccaaacactatcagggccatacacagaactctgaacaaaagccccaacaagcagcagttacctgctgtagaataagagctgtgctctactcctgatgcgcccgccttcctcctagcagtacctcgccttcctcctagcagtacctcgagggtatatccccatgattccttaaccgtacgtgtacgttctcttgcaaacgagatgtttgtaaataacgttgtatttctgggttctgagatatgcaacttggatggaggtacaaccggtgaaggggggtgaggaagcagcaacaatggtaagagttctactactgagtgggggaaaaacaacttgcggctgggttagtgaagcttagtagctaccactattcaagagttaaagggagttcgtatgacagttcctctggagatgttatcttcaaagtcttatatcactgctacttgtgagctgtgttaaaacctatatatataagttttgtttgacgtgactgcattaaagatagtacaaaaagaaaa

SEQ ID NO: 818 - DNA, 932 bp, Zea mays
  Clone ID: PAT_MRT4577_121923C.1
gtcaagcaccgccgaggtgtccggagatattttctcatatgcatgttttgccagcatgtaaaaagtcatcttcagaaatacagaacagctagatacagaccagagttatctgaaggctcttctgaaaagaaagtggcatcaaaagaagatataccatctattgacttgaaagggagttttgatctcactgaagcacttaggctccagttggaacttcaaaagcggcttcatgaacagcttgagatacaaagaagtttgcagctaagaatcgaggaacaagggaagtgtcttccagatgatgctagagcagcagtgcatacccgggggcagaaaaaggcgcaggatgccttcaaccgctggccagatggaatttgaggtcaccttctggagattcccagaatcttctaccgtcaaggaagtttccagaaaaccgtcaaaatgggatccacccagccaaccaaattagctaaggggccgatggaagttgcaagcaggaaatgtgtttcatgatccgattgggctgtttccaggcttaaatcaagttgtttttgtccttccgtgggaacagatgaacgctatagttaacttccttgcaaagcctggctaggtgcatgtaactaggagttagctgtatattacctaccctcacggtatcactgaatcccagtgttatgcggatgatgtagtcttcagaagacagcgcaagcacattgtcaggggtttgacttgttttgccccccattacttaggtatcaagtagcgtctcctaggcatttgattatgggctaattcaagtgtttacaataatgtttagcacctgttgtttaaaacatgtcatggtaccaaatatgacgaagatgtattgcatttatatgagagaatgagagatttgaactgctttagtttggtcaaaaaaaaaaaaaaaaaaaaaa

SEQ ID NO: 819 - DNA, 530 bp, Zea mays
  Clone ID: PAT_MRT4577_121990C.1
gggttcgtgaggttctccgtggttcggtttcgcgggtgggcggatcgagatggcggggtctgatgttgagtaccgctgcttcgacggaggactcaactgggccacggacgaccactccgtccacaacgccttgcacaacctacggctaggtgctctcattccaagatcatagcttgatcgggagacggataggtcccgcgggttacgcttcgtcacacttctccacgggaggaggcgataccggaacgccatttgagggcactgaacgggaaggagctggactgcctcaacatcaccatcaacgagggccaatcccgcggcggccgttgaggcggatgaggcggatacggtggtggtcgtggatgcggaggctaccgaggtggccggcgccgtgatggcggaggcgactactgcggcggcgatggcggctacggcggcggcggtggctacggctgtggtggcggtggctaccgcggtggcaaccgcggcggcggctacggcaactccgacgggaactggaggaactgaac

SEQ ID NO: 820 - DNA, 300 bp, Zea mays
  Clone ID: PAT_MRT4577_122082C.1
gcgctggggaaagcgaacagcttgattcacagttgtgaatgtccgagtgaggcgtgcttaatgggctcaatgaacctgagctggataatatagcacggaacattcatgagctggagaggggacgcatagatgaagggaactcgactcaagttagcgaccaatcagagctgaacgacaacttgtgatccgagctcttaggggaagactttggagacacggcaagacagccatgagttggaaggaagaactgaagacgagaatgacctcgctcaacaactggggtatctgagttgtaacagc

SEQ ID NO: 821 - DNA, 455 bp, Zea mays
  Clone ID: PAT_MRT4577_12220C.1
gagttggcttctcctccccctccgggtcggtttcgtgttcgtgaggttctccggggttatgtttcgagggtgagcgtatccagatggcggcgtcctatgttgagtaccgctgcttcgtcggcggcctctcctgggccacgtacgaccactccctccacaacgccttcatcacctacggtgaggtcctggagttctagattattctcgatcgtgagacgcagaggtcccgcgggttcggcttggtaaccttctccacggaggaggcgatgccgaacgccatcgatggcatgaacggcaaggatctggacggtcgtaacatcaccgtcaacgaggcccattcctgctgaggacgtggaggcggctgcggtggctacggtggtggtcgtgcatgcggcggctaccgcggtggcggtcgccgtgatggcagcggcagctactgcggtggcggctgctgc

SEQ ID NO: 822 - DNA, 848 bp, Zea mays
  Clone ID: PAT_MRT4577_122249C.1
cccggataaaaagctttgggtacctcgaggccggccgggacttctagagtttagctatagcctcactgctagagcgccgccatggctcaggtaaggggcagtgctcgtggcactggcagtggcagcagcgccgccgcgctggcgctggtcctcctgtgcgcgctcctccgcggcgagttcgccgagtcggcggtgtacacggtcggcgaccgcggcgggtggagcttcaacaccgccagctggcccaacggcaagcgtttccgcgccggcgacgtcctcgtgttcaggtacgacgccagggcgcacaacgtggtgcccgtgagcgcggcggggtacagctcgtgcagcgcgcccgagggcgccagggcgctcgccaccgggaacgaccgcgtcacgctgaggcgcggcgccaactacttcatctgcagcttcccaggccactgccaggccggcatgaaggtcgccgtcaccgccgcctaggcactgcagggcggccaatcagccggcggagagcgccgcgctcacggagtagtaaagcacgtagctaattagacggtgctgcccttgttgttcaataatatcgtctgtcgtcccgtacttcataacctgcgcggcgtgttagtagttgtttggtggtgtttggcgactggcactataaagaagggtcagatcgagtgatgtacttgctaccaacaataaaggtatacggtttgtgtgttcaaaaaaaaaaaaaaaaaagcggccctattccaaacctatagagagctaatgaaaaaaaaaaaaaaaagttagggttgagaaagtatattaaataattagctagcctaaaaaaaaaaaaaaaagcgggc

SEQ ID NO: 823 - DNA, 384 bp, Zea mays
  Clone ID: PAT_MRT4577_122255C.1
gcaacatagaaagcacaagattgttccaataatggcagccaaaatattatgcctgatgtatgcttcttggactttttggaagcgctgctactgcgagcattttgccgcaatgctcacaagctcctatagcttacattcttccatcatacctcttaccagcgatgacttcagaatgagaaaatccaattcttgtaccctacaagatccaacacgctatcggagcaagcatgttacctttatcacccttgttccttcaacaatcatgagccctattacagcagctacctttggtgcattgattggcacaaaacataagggcacaacacctacaacaactcgtgctaagctaccttggtgcctactatcagcaacagcaaatacctt

SEQ ID NO: 824 - DNA, 1450 bp, Zea mays
  Clone ID: PAT_MRT4577_122271C.1
cattggggacctcgaggccggccggggttgttttttcttcttccgttacctctccaggcagctcctctccctctctgtcgccgacgactacgccaggtcttcttcggggcccaggtcgctgccgcctacatcaggggccccaagttttcctaggacccctcgccggcgacgagcaccaccagcttggttcactcccaacaaaatgtcagccaatgtgggtgaatcaactagcggtgtcagcagcagcgatgcagctggggggagctttgagtgcaacatatgcttcgagctgcctcaggagccaatagtgactctctgtggccacctcttctgctggccgtgcctttaccggtggctgcacattcacgcacactcgccagagtgcccagtgtgcaaggccctcgtggaggaggacaagctcgtccccctttatgggcgtggcaaggatcgcgtcgacccgaggtcgaagaacatgcccgagggcgagattcctcaccgcccaacgggccagaggcctgccacagccccccgggcccatgctaacagcaactttgccaatgccaatgccaatccatggttcccgggcgcaggagtccctctggcaaatgcgcgatgggggaactacgcattctcagctgctttcgggggactgttccctatgcttagcttccaagttcatgggtttccagatgccgccgcttacgcgcagcctgctgggttccactatggatacgggcatgggcatgggcatgggttccaccatggcgggcatatgggacaagcacaagcccatggcgtccaccgacaggcaccgttggggcaacaacagcagcaggcagatatttatctgaaggccctgctcttcatgattgtaattctagtgctcgcaagcctcctcgcgttttaaagcttgtttggcaacgtctcctcgtcatggtttggaaattgtaattctggggagtgctcctcctggcatttcagtgctgttggcatggcagtttgacattgtgatggcgtattggcctatgagaatcgccagaatatttcactgttggatctgtactatagcctggtgctgaatgtcgtataagggctagttttgcaacaccattttctaagagatctctattttctcaaagaaaattgaactggttttcttttagaaaaatggaaatcacttgacaaactagtcctaagtattgtatttgcatggactgtccatagaatatgcatctgcgtctagctaagtatctgagtttcacaacacaataaaaaagtgtgaatagaatcccgtctaaacaaggctaggctctattgggtcgtattatacaaacacataatcaattaaatacactatttctcatcgagatctgtagaatctactggaatgtaaacaacatcttaggccttgtttgggaacacagtttttccgaactacagttttttaaat

SEQ ID NO: 825 - DNA, 2586 bp, Zea mays
  Clone ID: PAT_MRT4577_122410C.1
gtcagaagaaaatacggatgacattaacattcgtggatgttatctgactgtggttgacttgtttggggcatgcttgtcacgtgactgaaagtgcccaagtgcacaagagacttcacgatattctccaaacactttcactcggttaataattgatctcttcccgcattttggcgttgtgcacatggcgaatgctgcgatgagcagctggcatatataaaactgaccgagcaagcagagatgggcagcaggagcactattatacccacaataataaacgtaagaagtttgcaggctagcagaagtaaaaaaaaacacacgcacacacacaaattaagacacgatagccagactagtccacctcctccatcttgctctcgccagcgtcatcctccagaggaggcatgtcggtgtcggcctccggagcctcgtcctcgtcgatgctgaggcccagcttgagcatgcggtggatgcggctgccgaaggtgttggggtcgtcaaggctgaagcccgaggtgagcagcgccgtctcgaacagaagcatgacaaggtccttgacagacttgtcgttcttgtcggcctccgcgcgcttgcgcagctcctccatgatggcgttctccgggttgatctccatggtcttcttggaggacatgtacccagacatgctcgagtccctgagcgcctgtgccttcatgatcctctccatgttggccgtccagccgtactcgcccgtcaccaggcagcagggggagtccaccacgcggtcagagaccacaaccttctccaccttgtcgcccagcacctccttgatcaccttgcacaggccctcgaacttctccttgagctcctccttccgcttcttctcatcctcactctcgtcgagcttcaggccctccttggtggccgagacgagcttcttgccctcgaactccttgagctggccaatagcatactcatcgatggcgtccaccatgtacaggacttcatagcccttcttcttcagcttctcgaggaagggggagttctccacggccttcttgctctcgccagtgatgtagtagatgtcattctggccctccttcatcctcgtcacatagtccttgaggcttgtcagctcatctccgctcttggtggagtggtacctcagcagctccgcaatcttgttcctgttcgtggagtcctcatggatgccaagcttcaggttcttcgagaaggactcgtagaacttgttgtagtcctccttgttctcagcaatctcaaagaacagctcaatgcacttcttcaccaggttcttccggatgaccttgaggatcttgttctgctggagggtctcacgggagatgttgaggggaaggtcctcagagtcaacaatgcccttgacaaagctcagccactctgggatcagctcctcacagttgtccatgatgaagacacggcgcacatagagcttgatgttgttcggcttcttcctggtgtcaaagaggtcaaagggggccctcttcggcacaaacaggacagccttgaactcaagctgaccctcaacagagaagtgcttcacggcgagatgctcctcccagtcgttggtcaagctcttgtagaaagcagcatactcttccttggtaatatcctcaggcttcctcatccagataggcttctgcttgttaaccaattgccactcatgagaaacctccttgatcttcttcttcttcttttccttttcttccttctcatcaacatcctcaaccttgccctcctcgtccttcttatcttcctcatcctcatcatcagaaatttccttctcagtggtcttctcagtccagagagagattgggtagctaatgaactctgagtgcttcttgatcagatccttcaggcggcgctcctcaagatactccaactgatcatccttgaggtacagggtcatctttgtacccctgccaagttgctccccagaggtatcacgtgtgacagtgaaggagccaccggcctgagactcccatacatactgctcatcatcgttgtgcttggtggtcacgacaaccctctcagcaacaaggtatgccgagtagaaaccgacaccaaactgaccaatcatggacacatcggcaccagcagccagtgcctccatgaactcttttgtgccagatcgtgcaatggtaccaaggttgttcacaaggtccgacttggtcataccaatgccactgtcaatgattgtcagagtattgttggccttgtcagggacgatgtggatgaacagctccggctgggcatccagcttgctcttgtccgtcaaactctcgaacctgatcttatccaaggcatcggaggagtttgaaatgagctccctaaggaagatctccttgttggagtagaaggtgttgatgatgagcgatagcagctggttgatctccgcctggaaggcgaacgtctccgtctcggaggccatggcgagacgaccttccacggacgcgaggatgagagcgcagagcgctagcaagcggttgcggcggcggctagaagagaagagcaccggaggagggtttgtggtgggaggcagtgtgggaccccggccggctccgagggtacccc

SEQ ID NO: 826 - DNA, 2449 bp, Zea mays
  Clone ID: PAT_MRT4577_122412C.1
ctctaaacacttttcactcggttaataattgatctcttcccgcattttggagttgtgcacagggagaatgctgcgatgagcagctggcatatataaaactgaccgagcaagcagagatgggcagccggagcactattataccgacaataataaacgtacgaagtttgcaggctagcaaaagtaaaaaaacacacgcacacacaccaattaagacacgatagccagactagtcgacctcctccatcttgctctcgccagcgtcatcctccagaggaggcatgtcggtgtcggcctccggagcctcgtcctcgtcgatgctgaggcccagcttgagcatgcggtggatgcggccgccgaaggtgttggggtcgtcaaggctgaagcccgaggtgagcagcgccgtctcgaacagaagcatgacaaggtccttgacagacttgtcgttcttgtcggcctccgcgcgcttgcgcagctcctccatgatggcgttgtccgggttgatctccatggtcttcttggaggacatgtacccagacatgctcgagtccctgagcgcctgtgccttcatgatcctctccatgttggccgtccagccgtactcgcccgtcaccaggcagcagggggagtccaccacgcggtcagagaccacaaccttctccaccttgtcgcccagcacctccttgatcaccttgcacaggccctcgaacttctccttaagctcctccttccgcttcttctcatcctcactctcatcgagcttcaggccctccttggtggccgagacgagcttcttgccctcgaactccttgagctgaccaatagcatactcgtcgatggcgtccaccatgtacaggacttcatagcccttcttcttcagcttctcaaggaagggggagttctccacggccttcttgctctcgccagtgatgtagtagatgtcattctggccctccttcatcctagtcacatagtccttgaggcttgtcagctcatctccgctcttggtggagtgatacctcagcagctccgcaatcttgttcctgttcgtggagtcctcgtggatgccaagcttgaggttcttggagaaggcctcatagaacttgttgtagtcctccttgttctcagcaatctcaaagaacagctcaatgcacttcttcaccaggttcttccggatgaccttgaggatcttgttctgctggagggtctcacgggagatgttgaggggaaggtcctcagagtcaacaatgcccttgacaaagctcagccactctgggatcagctcctcacagttgtccatgatgaagacacggcgcacatagagcttgatgttgttcagtttcttcctggtgtcgaagaggtcaaagggggccctcttcggcacaaacaggacagccttgaactcaagctgaccctcaacagagaagtgcttaacggcgagatgctcctcccagtcgttggtcaagctcttgtagaaagcagcatactcttctttggtaatctcctcaggctttctcatccagataggcttctgcttgttaaccaattgccactcatgagaaacctccttgatcttcttcttcttcttttccttttcttccttctcatcaacatcctcaaccttgccctcctcgtccttcttatcttcctcgtcctcatcatcagatatttccttctcagtggtcttctcgatccagagagagattgggtagctgatgaactctgagtgcttcttgatcagatccttcagccggcgctcctcaagatactctaactgatcatccttgaggtaaagggtcatctttgtacccctggccaagttgctccccagaggtatcacgtgtgacagtgaaggagccaccggcctgagactcccatacatactgctcatcatcgttgtgcttggtggtcacgacaaccctctcagcaacaaggtatgccgagtagaaaccgacaccaaactgaccaatcatggacacgtcggcaccagcagccagtgcctccatgaactcttttgtgccagatcgtgcaatggtaccaaggttgttcacaaggtctgacttggtcataccaatgccactgtcaatgattgtcagagtattgttggccttgtcagggacgatgtggatgaacagctccggctgggcatccagcttgctcttgtccgtcaaactctcgaacctgatcttatccaaggcatcggaggagtttgaaatgagctccctaaggaagatctccttgttggagtagaaggtgttgatgatgagcgatagcagctggttgatctccgcctggaaggcgaacgtctccgtctcggaggccatgtcgagacgaccttccacggacgcgaggatgagagcgcagagcgctagcaagcggttgcggcggcggctagaagaaaagagcactggaggagggtttgtggtgggaggctgtgtctgtgtcccggccg

SEQ ID NO: 827 - DNA, 145 bp, Zea mays
  Clone ID: PAT_MRT4577_12247C.1
acgcctttctttctcaacgccgtcatagaggagcaggaggagatcgcgcggtccaaaggctcctccggtgagcccctgacgtgggctggcaccaggcggatgcgcacgactagccgtgtgatccacgagactatgcgggtggcgt

SEQ ID NO: 828 - DNA, 439 bp, Zea mays
  Clone ID: PAT_MRT4577_122615C.1
gaaagcacaatattgttccatctatgggagccataatatcctgtcttgctatgctacctggtctttctgcaagtgctgttgcgagcgccattttcccacaatgctaagacgctcctatagacttacctttcttcccccgtacactctcaccagcggtgcttgtggtgtgggaaaacccgaccttttaaccctatatgatccaacaggcaatcgaagctggcatcttacctttatcacgcttgtttctccaacaatcatcagccgtattacagcaattacctctggtgcatgtattggcacaaaacatcaaggcgcaacaactacaacaacttgtgcttgcataccttgctgcctactctaagaaacaacagagtcttccattgaatcaacttgctgtattgaactctgcttcttatttgcaacaacagcaactaccatt

SEQ ID NO: 829 - DNA, 580 bp, Zea mays
  Clone ID: PAT_MRT4577_122667C.1
gatgctagagaagcaatacatcgatgaactgaagatggaaattgatggcgttgctttctctagtttgtcaaacaaagaaagcagataaatcaccgggatgccaaaggtgatactcagtcagatcgtgaggaggatgagagtaaacaagaggatgatgatgatgatattggtactgctctcatgtctcgcaagcagagaggcctttataaggctatgaagatgggcaaagaaaagaaaaaggagaaagttgagctactcaagaagagaaaaaagaacgcggattctggcgcttcttccaagaagcggcactgatgtgtcacaaatcttcatcgcattggtgtggcatctctagtagaaatgttaccatgatcagctcatctgcgtgccaatcccccatgatgggtgggttgccttttgatatctgctatgtatgcttaagatgagttcaaggatatgtaacatgaaacttgaatagaaaagttttgatctgtcttacgaagcatttagactcgttattattgtgaaacttgaatagaaaagttttgacctgttttacgaagcatttatagttattattgag

SEQ ID NO: 830 - DNA, 1458 bp, Zea mays
  unsure (1)..(1458): unsure at all n locations
  Clone ID: PAT_MRT4577_122922C.1
cttgtcactcatcagcacggttagtatagctagccaccatgaaggtagagcgcgatctccacatgagccggggcgacggcgaggacagctacgcctccaactcaaggcttcaggagaagtccatactgaagacgaggccggtgctgcacaaggccgtggcggcggcgcacgccttgtcgctctcctcaggaggacccggcggcggcgccatggtcgtcgcggacctcggctgctcgtcggggcccaacacactgctcgtcgtctcggaggtgctagcagcggtggcgatggtggccggcggcagcgcccaaccgcagcacgtgcagttcttcctgaacgacctccccgggaacgactttaacctcgtcttccggtcgctggacctgttgaagaacaagaagctggccgccaaggacaggcgggaggagtcgctgctaccgccgtactacgtggccgggctgccgggctccttctacacccggctgttcccggaccactgcgtccacctcttccactcctcctactgcctcatgtggcgctccaaggtccccgacgagctcgccggtggcgcggtcctcaacgagggccacatgtacatctgggaaaccacgccgcaggcggtggtggccctgtacaggaggcagttccaggaggacatgtcgctgttcctcaggcttcgccacagggagctcgtgcccggtggccacatggtgctggcgttcctgggcaggaagaagagcaaggacgtgcttcgtggcgaggtcagctacacgtgggggctcctcgcgcaggctctccagtccctcgtcaaacagggccgtgtgaagaaggataagctggactccttcaacctgccgttctacgcaccttcgatggacgaggtgagggacgtgatcacgcggagccaggcgttcgacatcacccacatccagctcttcgagtccaactgggatccacacgacgacgacgacgtggagatgaagatggaagaagacgtcgccgccgtccagagcggcgtcaacgtcgccaggtccatcagggccgtgatcgggcccctcatcgcccgccactttggcgagcacatactcgacgatctcttcgagctgcatgccaaaaatgtcgcagtgcacctgcagaaagtgaagaccaagtaccctgtcatcgtcgtttccctccaggcgaaatgagccgcgcgccaaataaaggaccaagctagctgatgcaaaatctggcgtcaagttagctattagtaccgctactattatatgcatgcagaataattagtcaaacaatcagaaaaataaagtgcctcagagactgttagtggcagatccaatgtttcgttaattatatgtagtgtaatggtaatggtaatggtaatggtagacatcaggtttcatcgtccnnnnnnnnnnnnnnnnnnnnnnnnnnnnnnnnnnnnnnnnnnnnnnnnnnnnn

SEQ ID NO: 831 - DNA, 318 bp, Zea mays
  Clone ID: PAT_MRT4577_122969C.1
tctccttactaaaatcctgccttcgtattagacggatttttggcataattagcccaaatactccacttccatcaaagaaatctgaaatattgccagctcctgcctgccaacaccccatggcccgcctgaaatcaagccactagacccaataaaaacaccagttcatcgaatggcgcaggccttaaccaaggtctgtcctacagcgaagcactctagataaacacccagaaaacgtggatcctcctcgctttgggacactgttacagaaccttctataatttggaactgcttcacctctataggaaccgggaaatacaa

SEQ ID NO: 832 - DNA, 1866 bp, Zea mays
  Clone ID: PAT_MRT4577_122972C.1
aattcggcccgaggcttcagcgtatggcccgtaccccctatatggcaaccaccagctagtgagctagagagctcccctccgacgtgtcccctttgacggggagcaaaggttggggtccggtgagcatagtagcgtcaggtgagaaggtgcctttataaggctgtcctaagaagtgggcgagatatgttgttgcatcgttatcgttatggtgcctgtaactgttgtgtgtgccgtgtgcgtccggaagaattggatggaatggaactcgtggcttgttgtagtacatcagagagtcatgttattctttcaagaaattttgacttggtaataaattaaactattgtttgtgcgtcaaaaaaaaaaaaaaaaaaaaaaaaaaaaaaaaaaaaaaaaaaaaaaaaaaaaagaccatcaaacaagtgccagcgccctgctcgcagtcgccgcaatggagagcaccttcatcatgatcaagcctgacggcgtccagaggggcctcattggtgagatcatcagccgttttgagaagaagggcttctacctcaaggccttgaagcttgtgaacgtggagaggtcgtttgctgagaagcactacgccgatctcgcctccaagcccttcttccagggcctcgtggactacatcatctctggccctgtggtggccatggtctgggagggcaagagcgtcgtcacaactggccgcaagatcattggcgccaccaaccccctggcttctgagcccggcaccatccgtggcgactttgctgtcgacattggcaggaatgtcattcatggaagtgacagcattgagagtgctaataaggagattgccctgtggttccccgagggccctgctgattggcagagcagccagcacccctggatctacgagaagtaaacatggaaagtttcacatcaaaccttgagagccagaggaagcatgtcaccatttgtgctttagcaatgttttcgaaaagattatgatctgtatcttggaaccttatttcaatggaccaaatttctttctttgccaaaaaaaaaaaaaaagtcagccgccatcaccgctgttaggttctaccaggagaccttcggcgtccctccggccacgcgagctcgccgaaatggtcgcccacaggttccatcagtaccaggtggtgggtcgcgcgctgccgaccccaaccgatgagcaccccaagatctaccgcatgaagctctgggccaccaacgaggttcgcgccaagtccaagttctggtacttcctgagaaagctcaagaaggtgaagaagagcaatggccagatgcttgccatcaacgagatctttgagcgcaacccgaccaccatcaagaactatggcatctggctgcgctaccagagcaggactggttaccacaacatgtacaaggagtaccgcgacaccaccctgaacggcgcagtggagcagatgtacaacgagatggcctcccgccaccgcgtgaggtccccctgcatacagatcatcaagacagcgacggtccacttcaagctgtgcaagagggacaacaccaagcagttccacaactccgagatcaagttcccgcttgtgtaccgcaaggtcaggccgcctaccaggaagctccggaccactttcaaggcttccaggcccaaccttttcatgtgagaggtatatcgtacccgtgttctgtgtcttgagcgcccgagagataaggattcttcctgtgcaagtttttggtgccctgttcgttgagcactttgtttgattccagttaaggatttgaatgatgctgtgtaaaacaatgacttgtctgcaattagttatcaactactgctatttacctgccctgaaaaaaaaaaaaaaaaaagcggcc

SEQ ID NO: 833 - DNA, 1594 bp, Zea mays
  Clone ID: PAT_MRT4577_12310C.1
aatccaccaccgaaccatccagaagcggccgggagccgcctcctgctcttaaaaaactctcgtctctggtccggcccggcacacacccaacatcacgaaaccacgcgcagatccaaacgaacccgagcccttccaaaccctaagctcgcctcccctcccccccaaacaccaccgcgcacctatggcgaagtacggcgagggcgacaagcggtggatcgtggaggagcgcgccgacggcaccaacgtccacaactggcactgggcggagcgcgactgcctggagtggtcccgcgcgcggctctcttccctgctcgcgggcctcaccatcctcgacggcgagggcggcctcagtctccgcaccgtcgcgctcgacaagcttgatggcgaggcctacgtcaacatccgcaagggcaaggtcatcccggggtacgagctctcgctcaccctctcctgggaggccgaggccgcctcggagtccggagctgcgaaggtcaccggcaccgctgaggttccctacctcgccgacgagaacgccgacgaggaccccgacctccgcgtcaccgtgcgcggcgacgagacgcccctcgcgctccgcgccaaggacgccttcctctcccgcgggaaacccatggtgctcgagaagatccgggagttcgtcgctgccatggccaagggtggaccggccaaggacgagctggactccaagaaaactcccacgaaggtcgccggctccgcaccggcgaaggaggcggtactggctcctgcgccggctgtggagaagaaaaaggccaaggggaaggacaaggagggcttcaagaccattgagatgacggagaagttctactgccgctcaaaggacatatatgagatcttgatggatgagaacagatggaaagggtttacgcagagcaatgcgaggatcagcagagaggttggaggggaatttagcctcttcgacgggtccatcactggcgtcaacgaggagctgcaggaagggaagctgattgcacaaaagtggcggtttggaagctggcctgacggcttgtactcctcggtccggttggtgtttgatgagcccgagtctggagttacaatcataaagctcaaacaaactgatgtgccagaggaagacaagtatggaaattcaactgtggtagagaacaccgagagaggctggagagaactcatattccagcggatacgcggagtgttcggttttgggatctaaagaatctaaagaggcgatttggcatgaagttagatttcaaatttttacggggtcagaccatgcacgtcatagcaatccatgttttattcacccatttgttttccatgtccttaaacacagaacactgcatatcgtggggggtttaaaaacatctgttattcgaacgctgcaatgttgcttgctcccgaaatgagtcgacgctgatctgggttggttatcttgttgcaatgattaagaatgtgtgtcggtgtgaagcgttttagtggctatatactcggtcctcgtgttgtgttttcgttgcatttggacttcaattgagtcaatgtgtcctatagtaacgatcagatcgaaaagataaggagaaaa

SEQ ID NO: 834 - DNA, 1385 bp, Zea mays
  Clone ID: PAT_MRT4577_12313C.1
ttggggtacacctcgggcttgccgggacgcgcagatccaaacgaatgcgagcccgtccaaacacttgaggcctcgagcccgcctctccctcctcttcctctcaacaccaccggcatacccatggcgaagtacggcgagggcgacaagcggtggatcgtggaggagcgcgccgatggcaccaacgtccacaactggcactgggcggagcgcgactgcatcgagtggtcccgcgcgcggctctcctcgctgctcgcgggcctcaccgtcctcgacggcgaggacggcctcacgctccgcaccgtcgcgctcgacaatctcgacggcgaggcctacgtcaacatccgcaagggcaaggtcatcccagggtacgagctctcgctcaccctctcttgggaggccgaggccgcttcggagtccggagctgtgaaggtcgccggcaccgccgaggtcccctaccttgccgacgagaacgctgacgaggaccccgacctccacatcaccgtgcgcggtgacgagacgcccctcgcgctccgcgccaaagatgccttcctctcccgcggcaaacccatggtgctcgaaaagatccgggagttcgttgctgccatggccaagggtggaccggcgaaggacgagctggattccaagaaaactcctgcgaaggtcgccgctgcagcgcctggcgccgctccggcgaagaaagaggaggtggtggctcctgcgccggctgcggggaagaaaaaggccaaggggaaggacaaggaggggttcaagaccattaagatgacggagacgttctactgccgctcaaaggacatatatgagatcttgatggatgagaacagatggaaagggtttacacagagcaatgcgaagatcagtagagaggttggaggggaatttagcctctttgatgggtgcatcactggcgtcaacgaggatctgcaggaaggaaaactgattgcgcagaaatggcggtttggaagctggcctgacggcttgtactcctcggtccggttgatgttggatgagcccgagtctggagttacagtcataaaactcaaacaaactggtgtgccagaggaagacaagtatgggaattcaactgtggttgagaacacggagagaggctggagagatctcatattccagcggatacgtgggatgtttggttttgggatctaaagagtctatagagaggcgatttaatttggcatgatgtcctaattcaaatttttacggggtcaggccatgaatgctatagcaatccatgtttctcacccagttttttttcttcatgtcggcaaaacgcaaaactctgcatatgatggggatttgaaaacatctgttattcatcaggctaaaacgctgcagtattccttgccccc

SEQ ID NO: 835 - DNA, 3137 bp, Zea mays
  unsure (1)..(3137): unsure at all n locations
  Clone ID: PAT_MRT4577_123163C.1
atttcggcacgaggccctcttccgtctctctcctatgctccacacctccacgcctctcctcaccaatggagctccccacagcccgtaactacctgcccccagtccccgccgccccgcctcgcctgaccccagtccccgcggtttatccaccacgacaccaccacctctccaccgctgggccggatcgatcgggatcgcgccgccgccgccgccctccgcactcgcgggatcctgctcctaccatgcagcagcgctgcgcccttgcccgaccgcgccggcccgccgaaccgcgcgtcccgctccccgacgaccaccccttcgtcgccgtcttctccttccttttcatccccacctaaaccaacctcctcgcagcgtaattctgccagtatctcctcatcttctctcgtcgccgggagagcgaacggatcgccgcgtgctcggccgacgggatgagccgggaggcgcagaaactcgattgcgccaccggcggcggcggcggcgtcgggataggggtcttgtcgctggacctgctgggccaggtgctggaccgcctacgggagccgcgggaccgcaaggcgtgccgcctcgtcagccgcgccttcgagcgctccgaggccgcgcaccgacgcgcgctgcgggtgctccgacgcgagccgctcccgcgcctgctccgcgcgttcccggcgctcgagcggctcgacctctctgcctgcgcttcgctcgacgacgcctccctcgccgcggctgttgccggtgccggtgggggcctcgccggcctccgcagcgtgtgcctcgcgcgggccaatggggttggctggcgcggcctcgaggcgctcgtggctgcctgccccaagctggaggcggtcgatttgtcgcactgcgtcagcgccggggaccgcgaggccgctgcgctggcggcggcggccgggctcagggagctgaggctggacaaatgccttgctgtcaccgacatggggctcgccaaggtggctgttggctgccccaggctggagaagctcagcctcaagtggtgccgtgagatctctgatatcggaattgatctgctggccaagaagtgccccgagctccgcagcctcaacatatcctacctcaaggtgggtaatggatcccttagatcaatttcctcacttgagaggcttgaggaattggcaatggtttgttgttcatgtattgatgatgaaggcctggaattgctgagcaaggggagtgattcgctgcagagtgttgatgtgtcaagatgtgatcatgtgacttcccatgggttagcttcactcatagacggtcgcaattttctccagaagttatatgctgcagattgtttgcatgagataggacagcgttttgtatccaagttggcaacactgaaggaaaccttgacaacattgaaactcgacggtcttgaagtctcggactctcttcttgaagccattggtgaaagctgtaacaaattggttgagattggacttagcaaatgcagtggtgttacagatgaaggaatctcatctcttgtagctcggtgtagtgacctaagaacaattgatctcacatgctgcaacctcagtaccaacaatgctcttgattcaatagctggcaactgtaagatgcttgaatgtttgcggttggaatcctgctctttgataaatgagaagggactaaaacgaattgcaacttgttgccccaatcttaaggagatagacctcactgactgcggagtggatgatgcagcattggagcacttggctaaatgctctgaattgagagtattgaaattaggcctatgctcaagtatttctgacaaaggcattgcgtttattagttcaaattgtggaaaacttgtggagcttgatctctaccggtgcagctctattaccgatgatgggttggcagctttagcaaatggatgcaagaggatcaagttactgaacttgtgttactgcaacaagatcactgatactggtttgggtcacttaggctccctggaggagctcacaaaccttgaactgaggtgcttggtccgcataacaggcattgggatttcctcagttgcaatcggatgcaagaacctgatagagctggacttgaaacgatgctattcggttgatgacgctggcctgtgggctcttgctcgttatgctttgaaccttagacagcttacgatatcgtactgccaagtcacggggctgggcctgtgccacctgctgagctccctgcggtgcctccaggacattaagatggtgcacctctcatgggtctccatagaagggttcgagatcgcgttgcgagcagcctgcgggaggttgaagaagctgaagatgctctgtgggctgaagaccgtgctgtcccctgaactcatccagatgctgcaggcgtgtggctgccgaataagatgggtcaacaagcctcttgtctacaaggactagaccacctgttcctcatcgtttgtgaagtttcagcgctgccatggattgccaagagcccaagacctaccaggtttgccctgtgagccatgtgagatgttctgcaatagtccttgtgagatattccgcaataatcgttgggggcgtaacatatctagcggcgattatcggctctgctccagtgtatgtacactgaggcatcggttatgttcatgtgtatagcctgcagtgggatgatccacttcctgggattactttagtgtgtttgttacttcattccgcatggtttgggcctttgaagttaaaagaatcataagaccttgttcggttattgatattacatgtgtattggagtgtattaggtgggattaggatggattttgacttgttatggatttaaaccggctcaatcctattcaatacatgtggattatccccaaaaaaaaaaaaaaaaaaaaaaaaaaaaggaaaaagaaaaaaaaaaaaaaaaaaaaaaaaaaaaaaaaatatgatccatgctttggttctttcttacttttggctgacactaccttatctgataatatgtatatgggggntctgtttcatgttatgaggtgttcaaacagcagtgggtctatgaagacattgtagtctttgtcgaatggtccatgttggggacttgttctcaaatgctatgagataagaacaatgcaacac

SEQ ID NO: 836 - DNA, 2926 bp, Zea mays
  Clone ID: PAT_MRT4577_123164C.1
ggcatcacctatccacatctttctccctctctctctcctcttccgtccctcctctctctccctctctacgccacgcctccacctccacacctgcacgcctctcgctctctctcctaacctgtcgagctgcccacagcccgtacctacctgcccccagtccccgccgccccgcctgcccgacccgcggcttatccaccacgtccaccgctgggctggatcgatcgggaccggggtcgcgccgccgccgctgccctccgcactcgcgggatcctgttcctaccatgcagcagcgctgcgcccttgcccgaccgcgccggcccgccgaaccgcgcgttccgctccccgacgatcactccctcgtcgccgtcttctccttcctcttcatccccacctaaatcaacctcctcgccgcgaaattctgctacaatttcttcatcttcccttgccgccgggagcggacggatcgccgcttcctcggccggcgggatgagccgggaggcgcagaaactcgactgcaccgccgccggcggcgggatcggggtcctgtcgctggacctgctgggccaggtgctggaacacctgcgggagccccgggaccgcaagacgtgccgcctcgtcagccgcgccttcgagcgcgccgaggccgcgcaccgccgcgcgcttcgggtgctccgacgcgagccgctcccgcgcctgctccgcgcgttcccggcgctcgagcggctcgacctctccgcctgcgcctcgctcgacgacgcctccctcgccgcggccgtcgccgacgccggcggggggctcgccggcctccgcagcgtgtgcctcgcgcggaccaatggtgtcggctggcgcggcctcgaggcgctcgtcgcggcctgccccaagctggcggccgtcgatttgtcgcactgcgtcagcgccggggaccgcgaggccgctgcgttggcggcggcgaccgagcttagggagctgaggctggacaaatgccttgccgtcaccgacatggggctcgccaaggtggctgttgggtgccccaagctggagaagctcagcctcaagtggtgccgtgagatctctgacattggaattgatctgttggccaagaagtgccctgagctccgcagcctcaacatatcctacctcaaggtgggcaatggatcccttggatcaatttcgtcacttgagaggcttgaggaattggcaatggtttgttgttcatgtatagatgatgaaggcttggaattgctgagcaaggggagcgattcgctgcagagtgttgatgtgtcaagatgtgatcatgtgacttcccaggggttagcttcactcatagatggtcgcaattttcttcagaagttatatgctgcagattgtttgcatgagataggacagcgttttctatccaagttggcaagactgaaggaaaccttgacatcgctgaaactcgacggtcttgaagtctcggactctcttcttcaagccattggtgaaagctgtaacaaattggttgagattggacttagcaaatgcagtggtgttacagatgaaggaatctcatctcttgtagctcggtgtagtgacctaagaacaattgatctcacatgctgcaacctcagtaccaacaatgctcttgattcaatagctggcaactgtaagatgcttgaatgtttgcggttggaatcctgctctttgataaatgagaagggactaaaacgaattgcaacttgttgccccaatcttaaggagatagacctcactgactgcggagtggatgatgcagcattgcagcacttggctaaatgctctgaattgcgaatattgaaattaggcctatgctcaagtatttctgacagaggcattgcatttatcagttctaattgtggaaagctcgtggagcttgatctctaccggtgcaactctattactgatgatgggttggcagctttagcaaatggatgcaagaggattaagttactgaacttgtgttactgcaacaagatcactgatactggtttgggtcacttaggctccctggaggagctcacaaaccttgaactgaggtgcttggtccgcgtaacaggcattgggatctcctcagttgcaatcggatgcaagaacctgatagagctggacttgaaacgatgctattcggttgatgacgctggcctgtgggcccttgctcgttatgctttgaaccttagacagcttacgatttcgtactgccaagtcacggggttgggcctgtgccacctgctgagctccctgcgatgcctccaggacattaagatggtgcacctctcatgggtatcaatagaagggtttgagatggctctgcgagcagcctgcgggaggctgaagaagctgaagatgctctgcgggctgaagaccgtgctctcccctgagctcctccagatgctgcaggcttgtggctgccgaataagatgggtcaacaagcctcttgtctacaaggactagacagactcgtgttcctcattgtgtgtgcagtgtcagcatcagcatgtattgtcaagatcttgcaggtttgccctggctcacgttgtgagccatgggagatattccgcaataatcgttgggggcgtaagctcccgtccccaagatgtggttatggtgtttacctttggggcacatcttgcgccatttgtcactctctgctccggtgtatttgtgtatgcaaacggaggcaccggtaatgttcatgtgtatatagcgtgcagtagaatgatcccactttctgggattagttagtgtgtaatttttacctcatttcgcatgattcgaatcttgagatgaaagaatcataaggggtatgatcgatgcattgcattcaaaaaaaaatacatgtggattttcccccaaacgaaccagcccagggatattatccgggtttggttaaaaaaaaaaaaaaaaaaaa

SEQ ID NO: 837 - DNA, 2185 bp, Zea mays
  Clone ID: PAT_MRT4577_12327C.1
ccggccgggacctccttctacaaataccctggagccctagccgcccgcgacatccgctccccgccttccgcttccctaccccccgcatcacctaccaacgccggcgccatgggggccttcgcgaaggaggagcaccagttcctagccgagctcggcctcgcgcagcgcaacccaggcgcgttcgcatgcggtgcgtggggcggctcaggtcccaccgtcacctccacgagcccgaccaacaatcaggtcatcgcagaggtcgtggaggcgtccgtgcacgactacgaggagggcatgcgcgcctgcttcgatgccgccaagacatggatggcgattcctgctccaaagcgaggagagatcgttaggcaaatcggtgatgcactgagagcaaagctccatcaccttggcaggcttgtgtcacttgagatggggaaaattcttcctgaagggatcggtgaggttcaggaaatcattgacatgtgtgattatgctgtgggactaagtcgccaactaaatggatccattataccatctgaacgaccaaaccatatgatgatggaggtgtggaatccccttggagttgtgggtgttataacggcatttaatttcccttgtgctgtgcttggttggaatgcttgcattgctttggtctgtggaaattgtgtcgtctggaaaggtgctccaacaactccactgatcactattgcaatgacaaaaatagtggctagtgtattggagaagaacaacttaccaggcgcaatttttacatctttttgtgggggcactgaaattggtcaagcaattgccccttgacattaggatacctttggtttcattcactgggaagtacaagggctggtctaatggttcattcctgagttaggtacaggagggggccgacctagagggaggtcctagaggtagtgcatcacttggttactcccatgatgaccatagcgagcagaatgcgatcattgttatggatgctacacctagaaagattgaaggtctttctgttgggtgcacctcggtttttagagctggatatccctacaacagaggactacacaacgttctctgattctacatataaccccacgcctccgcttccttgatcagcttgttgaggtatacaaacaagtccgaattggggatccgttggagaaaggcaccttactgggaccactgcacactcctgcttcaaaagagaactttttgaaaggcattcagactatcaaatctcagggagggaaaatcctttttggaggatctgccattgaatcagaaggaaactttgtgcaaccaacaattgtggaaattacaccttctgcaccagttgtgaaagaagaactctttggtcctgtcctttatgctatgaaatttcagaccttgaaggaagcaattgaaatcaataactctgttcctcaaggattgagcagttctatatttacaaagaggccagatattatttttaagtggctcgggccccatggtagtgattgtggcatagtgaatgtgaacatacctactaatggtgctgaaattggtggagcatttggtggagaaaaagcaactggtggtggacgagaagcagggagtgattcctggaagcagtacatgaggagggcgacttgtacaatcaactatgggagcgagctacctctagcccagggaatcaattttggttaatcctgcagaaatgttgcgcgtggatctcggtgttttctgcagacgtggatgccgtacggaaagaactgatgcaaccgcatttgagatctcagcagacttgagcagcatttattggcgtcagttgtgaaacttaaactgcaggagcatcttgtacataaataaaataagatgtttgttgctcgtgggccgtggcacattttggtaccggtgtccagtctactaataaaatctaatgcaaaacggtcataactacattctcatgcagtatgattttccggccttttgatctggaattgaaatgagcgttattcgttttgagcaaaaaaaaaaaacggcacgagggccaaacttagtgttggtgctgcttattttgatctttattacaacaaaagtaaacttgtgaactttatgtatgaatgcagtacaattgttattgtcatgaatgaaaacatgagctatgtatgaatgcaggccaattgctatgtatgaatgcggt

SEQ ID NO: 838 - DNA, 776 bp, Zea mays
  Clone ID: PAT_MRT4577_123298C.1
taccagaacaagcaagaacagctgtcgatccaattgtcacttgctctccctccaacaagctaattaaggccggtccatccctcttctagctcgtttcattatccatggctgaggagaagcaccaccaccaccacctgttccaccacaagaaggacgaggagcaggccgcggccggcgggtacggcgagtccgccgagtacacggaggccacggtgacggaggtcgtgtccacgggcgagaacgagtacgacgagtacaagaaggaggagaagcagcacaagcacaagcagcacctcggcgaggccggcgccatcgccgccggcgccttcgcactctacgagaagcacgaggcgaagaaggacccggagcacgcgcaccgccacaagatcgaggaggaggtcgcggcggcggcggccgtcggctccggcggcttcgccttccacgagcaccacgagaagaagaaggaccacaaggacgccgaggaggccggcggcgagaagaagcaccacttcttcggctgattgatcctcccgtatcgtcgtccctccccgtgtgctacgcgtgcgtgtgtgagagtgatatcgagcgcccgcccgtgttgtgcgcgcgtacgtatgtatgcgctcgtgtgatgcacgaataagcgtggctacgtaatctatcgtatgtatacgtgtgtgtatgcatgtgcttgtgtatgatcgtggtacgaggaccgaaaaaatgtatgcaactctgatttacttacatgtttagttgtttacgcactacaccgc

SEQ ID NO: 839 - DNA, 835 bp, Zea mays
  Clone ID: PAT_MRT4577_123299C.1
gctttttttaagcaaaatcagagctgtacgcatttttcagtcatcatatatcacaatcatacacaggtacatatacacacacgtatacacgacaggttacatatagtaaccgcttattcatccagaacgcatatacatgtacgtcgagcgggcccacctctcagtctctcgatctcactctcacacgcacgcgtagatacatatacgtgtacaacatacatatacatacatgtggccgtacgtgcacgcacacgtacgtcgtcgacgggacgtatacgattgatgggccgggagaaatgaaatcagccgaagaagtggtgcttcttctcgccggcggcctcctcggcctccttgtggtccttcttcttctcgtggtgctcgtggaaggcgaagccgccggatcccacggccgccgccgccgcgatctcctcctcgatcttgtgccggtgcgcgtgctccgggtccttcttcgcctcgtgcttctcgtagagtgcgaaggcgccggcggcgatggcgccggcctcgccgaggtgctgcttgtgcttgtgctccttctcctccttcttgtacgtgtcgtactcgtcctcgccgccggtggacaccacctccgtcaccgtggtctccgtgtactcggcggcctcgccgtacccgtacccgccgccggcgacgggctgctccagctgctcctcgtccttcttgtggtggaacaggtggtggtggtggtgcttctcctccgccatgtgtgctgtgtgcagtagtggatagtgatcgagatgtgacctttaatttgctggaggaaacagatcgagcgagtgacaatgacgctgggtcgagc

SEQ ID NO: 840 - DNA, 360 bp, Zea mays
  Clone ID: PAT_MRT4577_123323C.1
aaaaatctaaaagtgggctttcttatttctgggaagccacaaacatcaaacaaaaaactttattattgaactataactcataagaaatctaaaagagggcaccaccaatgatgggttcttggtaaaatgctgctggctttgtcaaaacaagttggttgaatggcaacaattgttgcacttgtaaaagggtgccatcgttaggcccaacgtgctggtaaaaccgaaacaactgttgttgtgtcaaaaaagtatcacggctcacaccacctaactggctgaatggtactagttgttccttctttaaataagcaggaaagttcaatgctttcaattggatgaattgaagaaattgctgggggt

SEQ ID NO: 841 - DNA, 213 bp, Zea mays
  Clone ID: PAT_MRT4577_123326C.1
aacacctatagtgagtcgtattaaccgggaggccactggctaaggcaacacaaaccgcagatcaccgatatgcacgtacggcagccaccgaagcacacgggcggagaacgactcggatatcatcagcatccacatcggcaaggccggggtccaggccagcacatcctgcgtggaggtcgactgcctcgagcagggcatcgagcacgatgggtc

SEQ ID NO: 842 - DNA, 335 bp, Zea mays
  Clone ID: PAT_MRT4577_123379C.1
agattttatttttggcaaacgtggtctacgaaggtggtgttgaaacatacattttcaatcacatcaagtaccttaaacaccttactaacataacctgtatcgtctccttgaactaccaaggctgctgacctcagtaatcctatcataatctctgattagctgtacaactgtttctggaagtatacggtgagagactcacggtccctttcatgtgttaataactctaaggagcacactcgataagttacagctactactagatagcgtgttgaggaaactctgctttgttttcttaccgtgcttaattcttttcatgtataaaaaaatatagtatc

SEQ ID NO: 843 - DNA, 3706 bp, Zea mays
  Clone ID: PAT_MRT4577_123397C.1
cggacgcgtgggcggacgcgtgggggcagttcgaatgctgagttgttggctaccttctgcgacaatattctgaagaaaggctgcagtgaaaagctcagtgatgaagccattgaagatgcccttgagaaggttgtgagattgctggcatacatcagtgataaagacctgtttgccgagttctatagaagattacttttcgacaaaagtgctaatgatgagcatgagagaagtattctgacaaagctcaagcaacagtgcggggggcagtttacttccaaaatggagggcatggttacggaccttactgtcgctagagatcaccaaactaagtttgaagagtttgtagctgggcatccagagttgaatcctggcatagatttggctgttactgttttgacaacgggattctggccaagctacaaaacttttgacataaaccttcctgcggagatggtgaaatgtgtagaggttttcaaggaattctatcaaacaagaacgaagcacaggaagctgacatggatttattccttgggaacctgcaacatcaatgcactatagaagagctatgacgtcgcatgcacgcgtacgtaagctcggaattcggctctgcgaacaagggaggatgtacacaggacgtatcctgtgtgctgaaatgcaaaacacgcccaacccttcatgacgctccacgcgctcgtctctctccttccttccatcctccctccctccttccctccctcgctcgcctctggaggaccctcgccatcctccccaagcgcaccaccaaacccccagcagcggcgctagggttcgcgcctcggcgcgtcggcaccgtcacctgcggtgatggcagggcaggagcgtaggacaatcgatctggaggagggatgggcgtttatgcagaagggcatcaccaagctgaagaacatcctcgagggcaagcccgagccgcagttcagttccgaggactacatgatgctctacacgacgatatacaacatgtgcacgcagaagccgccgcaggactactcacagcagctctacgacaagtatcgggagtcgttcgaggagtacatcgcctccatggtactaccttcattaagggagaaacatgacgagtttatgctgagggagctagtgcaaaggtggtcaaaccataaagtcatggttcgctggctgtcacgcttcttttattaccttgaccgatacttcatatcaaggaggtcacttacaccacttaaagaagtgggtcttacttgcttccgagagttgatctatcaagagattaaaggacaagttaaagatgcagtgatagctctgatagacaaagaacgtgagggtgaacagattgaccgggctctgttgaagaatgttttggatatttttgttgaaattgggttgggtcaaatggagtgttatgagaatgactttgaagatttcttgctcaaggatactacagagtactactctgtcaaagctcaaagctggattcttgaggactcatgcccagattacatgattaaggctgaggagtgtttaaagcgggagaaggagcgagttggtcactatttgcatattagcagcgaacagaagttattggagaaagtgcaaaatgaattgcttgctcagtatgcaaccccgctgttagagaaggagcattctggatgttctgctttgcttcgcgatgacaaggttgaggatctttctaggatgtacagactcttctccaaaatctcccgtggtctggagcctatttcaaacatgttcaaaacgcatgtcacaagtgagggtacagccttggtcaagcaagcagaagattctgctagtaataagaagccagaaaagaaggatatggttggcatgcaggaacaggtctttgtgtggaaaatcatcgagctgcatgacaaatatgtagcttatgtgacagaatgtttccagggacatacactcttccataaggcacttaaagaagcctttgaggtcttctgtaacaaaggtgtctctggcagttcgagtgctgagttgttggctaccttctgcgacaatattctgaagaaaggctgcagtgaaaagctcagtgatgaagccattgaagatgcccttgagaaggttgtgagattgctggcatacatcagtgataaagacctgtttgccgagttctataggaagaaacttgccagaagattactttttgacaaaagtgctaatgatgagcatgagagaagtattctgacaaagctcaaacaacagtgtgggggacagtttacttcaaaaatggagggcatggttactgaccttactgtcgctagagatcatcaaactaagtttgaggagtttgtagctggacatccagagttgaatcctgggatagacttagctgttactgttttgacaacgggattctggccaagctacaaaacttttgacataaaccttcctgccgagatggtgaaatgtgtagaggttttcaaggaattctatcaaacaagaacaaagcacaggaagctgacatggatttattccttgggaacctgcaacatcaatgctaagtttgatgctaaacctattgaacttattgttacaacatatcaggctgcattgctactactgtttaatggatctgacaggcttagttattctgagattgtaacacaattaaacctgtcagatgatgatgtagtgcgtttgctccattctctttcttgtgcgaagtacaagatccttaacaaggaaccggcaaatagatccatctcgcccaatgatgtttttgagttcaattcaaaatttactgacagaatgagaagaattaagattccactgcctcccgttgatgagaagaaaaaggttgttgaagatgttgacaaagacaggaggtatgcaattgatgcatcaattgtgcgcattatgaagagccgcaaagttatgggtcatcaacagctggttgctgaatgtgttgagcagcttagccgcatgtttaagccggacttcaaagccataaagaagaggattgaggatctcatcacaagggactatttggagcgcgacaaggacaacgccaatacgtacaaataccttgcctgattggtggttagtgacaaagtccaaaacagctccgggactatgcgataccactgggatggcaatcttcctgcaatgtcgtggtgcgtccacttctaccatgatttgcagcacgttttggtgatttgccctgccacagcacgggctgctcacattttgtacattggtcgttaaataggataagcgtgttggcctacattagatataatgatgattgatgatatgaggaataggagaggcattcaagtacttgtatgtgtcttctatgccaatgctttatctatatagctgtatcagtgttccagtcaattgatatgagatgatgcttggagtcgttttgctatatgaagtgacggatacaatgggaatttgcagcatccgtttgtatctgaatgcacctgcttttgttttataggtagatgcgtattctggctccgttgtcacctgttggtttgtggaggcagagtggattggtcagctagctgacggaagtcactgactcactagaagctattaagtggttttgtacttactgagtcaaatatatgtcatacgttgaaaccatgtttcgtaattatgaatagtttctttaaaattaaatttaaaaaaaaaaaaaaactcgagagggggc

SEQ ID NO: 844 - DNA, 287 bp, Zea mays
  Clone ID: PAT_MRT4577_123473C.1
gttggcgtctcctcgcgctccggttcgggttcgggttcttgaggttctccggggttcggtttcgtgggtgggctgatcgagatggcggcgtcggatgttgagtaccggtggttcgtcgtcgagctcgggtgggacacggacgagcagtcactccacgacgccttgagcagctacggcgaggtcctcgactccaagatgatcctcgatcggtagatgcagaggtcccgctgcttcgggttcgtcagcttctccacggacgaggcgatgcggaagcgatcgatggcatg

SEQ ID NO: 845 - DNA, 225 bp, Zea mays
  unsure (1)..(225): unsure at all n locations
  Clone ID: PAT_MRT4577_123484C.1
acggcnatccaattgtacttgctctccctccaacaagctaattttttccggttttccctcttctagctcgtttcggtatccgtggcggatgagaagcaccaccaccaccacctgtttcaacacaagaaggacgaggagcagctcgccgcccgcgggtaccgcgagtccgccgagtacacagaggccactgtgaccgaagtggtgtccaccggccaaaaccatttc

SEQ ID NO: 846 - DNA, 744 bp, Zea mays
  Clone ID: PAT_MRT4577_123502C.1
caacggcgctccaactgcactactgcagccaggctttttgcttgcttccgcgggctccgcgtccgcgtgcgataggctcaatatcctcgccagcggatcccttccttgcgaggccggaactgagctgccgccggcgctatggtgagcggcggcctggcggctgcgtcggaagtcgccgtcgttttcctcatccgccctgtccttgccatcgccttcgtcttcaccctcatcctcctcagctggtacgtggcgtggaggacggtgctggtgcacgtgccgctggtgcaggagatcgccggcctgcgcccgaaaaagccctctaaacccaagccagccaaccgcggccgcttcgccaagttctaccagaaccaggccgaagccgcccaaaggaacagcaaatcagaaggggcatcatcttaagagaaagcagtcaccgccttgtaatgagtacctgccgcagactttgttatgcagttctaattagaatgcaagtactaccagtgacggcgtctttttaggagagaatgtatatcagcatgtgatgggagcatccctgcctgacgatacatcaggcttatgatagtagcgtatcaactgtttattgcatgaccttgtaaaggaccttatgattgtacatatatatacacctgtatacaagaaataaagagaagcacatgtcctttgaaaaaaaaaaaaaaaaacttctcctgcgtaaaaaaaaaaaaaaaaaaggcccctagggcc

SEQ ID NO: 847 - DNA, 287 bp, Zea mays
  Clone ID: PAT_MRT4577_123508C.1
gctggctttttcttcctctcttaccaagaactcttcgggttagggttacttaaggttttgtggaggggcgatggctgctgctgatgtggaataccgttgcttagtcggcggacttgcctgggccaccatgaacgagtctgtggagaatgccttcgcctcctacggcgagatcctagactacaaggtcatcaccgaccggaagacagggaggtctcacggcttcggcttcgttaccttatactactagaacttgatgctagacgctatacagaacatgaacggtaagg

SEQ ID NO: 848 - DNA, 2472 bp, Zea mays
  Clone ID: PAT_MRT4577_12375C.1
gccggccccctcgtcattttccccgcagcgacgacgattcagtgaggcacccctctcctggcctcttctcgccttctccgtttccgcgaacccagctgcctcgtagccccaccacaccgccgagcacgcggtctcccgcgccgccttccacccaagcgaagctacccctactcgacccagaattatcttctaccagcgctagtccgctccgcctctctactggctgccgtggagtggggatccgtccggacttccttctttcgctgttgatgtcatcatgctgagcattttgtggtagagacgatcatctctttgggttccagcatataactcatgcccataaaatttgcactagaaaatatgtcgacacaagcctctaaccggtcatacagatatccagacagaacccaactgccgtaccacaatggcaatccaatgcatgttgggggcaatggtaattactgtgtgcaacaaaatcacgatgatgttaactacatttcctctgatgatggatcacagagcagtagttctagagttcaagattttcaagcacagttttgcaccctagattcgtcttcggccaattgtgtttatcctgcacatagttctacctcttctcagagcataagtggaagccctctgtctcagcaggagagccactctgatcatgcatatggttcctctccaagtgcatcgtgcatcactcaggttcccacctggacacttaaggatctagaaaatgtgatgcttggacccgattctgacataggtagccctgacagttcctttctgcttgacactgccttgcatggaaataactggagagaacttttgggaattcaaactggggatttgaggcaggtaattgtagcatgtggtaaggctgttgacgagaatgctgtctatatggatgcattgatgtctgagttaagggagatggtttctgtctctggtgaaccgatgcaacgtctgggagcttacatgttggaaggcctcattgcgaggctttctttcactggacatgccttgtataaatctctgaagtgcaaagagcctgtggctacgagttctgagctcttgtcctatatgcatcttctttatgagatctgtccattcttcaagttcggttacatgtctgccaatggtgccatagctgaagcggttaagggggaagacattattcacatcatcgattttcaaatcgctcagggtagtcagtggatgactatgatacaggcccttgcttcaaggcctgggaggcgaccatacctaaggatcactggcatagatgactcgaattctgctcatgcccgaggtggtggactggatatggttggacagaggttgcacagaatggcccagtcatgtggtctgcccttcgagttcaatgctgtgccagcagctagtcatgaggttgtgtttgaagatctttgtctaagatctggggaggccatcgttgtcaattttgcttatcagctgcatcatactcctgatgagagcgtgggcatagaaaaccatcgtgatagaatactgagaatggtcaagagcctctctcctaaggtggtaactcttgtagagcaggaggcaaacacaaacacagcacctttctttcttagatacatggagactcttgattattacacagcgatgtttgaggcaatagatgttgcttgccccagggatgataagaagcgcattagcacagagcaacactgtgttgcaagggatatcgtcaatttaattgcttgtgaaggtgcggaaaggatagagaggcatgagccttttggaaaatggagggcaagacttgtaatggctggttttagaccatacccgttaagtccagtggtgaacagaaccatcaaaacactgcttgacagttaccacagccattacaggcttgaggagagagatggcatcctttatcttggctggaagaacagaaagctggtcgtatcttctgcctggtgctgatatttccaacttcttctaagaagcattgttaagattctttcgtggcttggggttcaggcgttcagcacatgaatccaaggtggaaccgaaacttcagtatgaagactgcacaatcaaaaaagaacaagctggttgcttccttactatttgttgcccagccttgaaactctcccacgctcaccatcatcgctgatgtacttaccatgactcagttccatccttatatataggtgcaaacaatggtttcatcaccccccttgtactggtcttaatattgtatgttggtagaatctggtggtattagcttccaaatctggattgctgaatcgtttgtgttactacatttagccaggatttgacagtagacacaaggagtgctgtaagatcctgtatgtacaacgtgcttcagttggtgtattgtacgtacttgggtgctatggctggtttggttatcacagtgctgagtgctgcactgttcggcgttttttaaaagccatgggg

SEQ ID NO: 849 - DNA, 601 bp, Zea mays
  Clone ID: PAT_MRT4577_123928C.1
gtaagacatcgattctatgctgttggatttagcatactaatatgccatgagctgcggaactgcatctggagcaatgttcaggaatcttcgtctattgatactgtaggttcaattgcttcagcagttggcattgttttagacaatttttgtttgattctgcattgatgacaaaggttttcccaaatggtttcccacttaggttgaaaatgatgatttgattgcctacggcctgatcccagaatttattggaaggttgccaataacagttggcctgaccaatcttagtgaagagcaattggttcaagtagtaaatttctttgattttataatttaaagcaatatttcttaaaattaccatctcaaatatttccaccacctcaaaatattagaaattctctttgcaggtgctcatggagcccaaaaacgcaataggaaagcaatacaagaagctattcaaaatgaatgatgttagtttgtgattcgtttcggccaacgaaataattgcaagatttggccgattttttttactttaaacgataatttataaccaagaaagttatttttggtcatgtttcctccataaagtcaagcttcattttac

SEQ ID NO: 850 - DNA, 804 bp, Zea mays
  unsure (1)..(804): unsure at all n locations
  Clone ID: PAT_MRT4577_124010C.1
cgggactcccccaccacacaccccaccccaagcccccacctccattttttccagtcaggttcacagcgagaagcaacagcaaggcaagctagctacacgccgatggccaaggacgaggtgatggagaccggcggcggcggcgacttcgcggccaaggactacacggacccgccgccggccccgctgatcgacgcggcggagctggcctcctggtcgctctaccgcgccgtcatcgccgagttcatcgccacgctgctcttcctctacatcaccgtggccaccgtcatcgggtacaagcaccagacggacccggccgtgaacaccgccgccgacgcggcgtgcggcggcgtgggcgtgctcggcatcgcctgggccttcggcggcatgatcttcgtcctcgtctactgcaccgccggcatctccgggggccacatcaacccggccgtcaccttcggcctcttcctggcgcgcaaggtctccctggtccgcgcgctgctctacatggtggcccagtgcctcggcgccatgtgcggggtcggcctcgtcaaggccttccagagcgcctacttcgtcaggggcacggcggcggcgccaacacgctcgccgccggctactccaagggcaccggcctcgccgcggagatcatcggcaccttcgtgctcgtctacaccgtcttctccgccaccgaccccaagcgcagcgcacgcgactctcacgtccccgggctggcgcccctcccgattggcttcgccgtgttcatgggtcacctggncaccatccccatcaccggcaccggcatcaacc

SEQ ID NO: 851 - DNA, 1287 bp, Zea mays
  Clone ID: PAT_MRT4577_124012C.1
attgggtccctcgaggccggccggggtcaaaagcgagagagctaagctaagccgagctaagaagcacagcaagtctcaccagactagcggctagcgcgagaatggccaaggacatcgaggccgcggcggcgcacgagggcaaggactactcggacccgcccccggcgccgctggtggacgcggaggagctgaccaagtggtcgctgtaccgcgcggtgatcgccgagttcgtggccacgctgctcttcctctacatcacggtggccacggtgatcgggtacaagcaccagacggacgcggcggcgtcgggccccgacgcggcgtgcggcggcgtcggcgtgctcggcatcgcctgggccttcggcggcatgatcttcatcctcgtctactgcaccgcgggggtgtcgggtgggcacatcaacccggccgtcaccttcggcctcttcctggcgcgcaaggtctcgctggtgcgcgcgctgctctacatcgtcgcgcagtgcctcggcgccatctgcggcgtcgggctcgtcaagggcttccagagcgccttctacgtgcgctacggcggcggcgccaacgagctcagcgccggctactccaagggcaccggcctcgccgcggagatcatcggcaccttcgtgctcgtctacaccgtcttctccgccaccgaccccaagcgcaacgcccgtgactctcatgtccccgtgcttgcccctctccccatcgggttcgcggtgttcatggtccacctggccacgatccccatcaccggcaccggcatcaacccggccaggagcttgggcgctgctgtcatctacaacaacgacaaggcctgggatgaccactggatcttctgggtgggtccattcatcggcgccgccatcgccgcggcgtaccaccagtacgtgctgagggccagcgccgccaagctgggatcgtctgcctccttcagccgctagatcgatggcctcccgccggacaaggacagccggaggcgtgaactgtagatataccagaggctggacaaggacagcgtgtcgtcgttggttgcctctagccatgatgcgtcgttatatatgcatgccttatgatcagtttgtatttccactgcattttgcttgctttaattttccttccaagctagtgtgattgttgtgctgtacttatccgtgtacgacgagtcgacgactgggtaaaatgaaaaagaaaagaaaaaaatgcatatatttaagtttttaaaaaaaaaaaaaaaaaaaaaggacgaccgttcgcgatcctagaactagt

SEQ ID NO: 852 - DNA, 1369 bp, Zea mays
  Clone ID: PAT_MRT4577_124015C.1
gacctcacgcactcatccattcgaccattccttaacatccttgttgcaagcggcgccagctttgctcgcgctctctcgcagctgctacgctaaagcaagcctagtctctagaggaggaggcggagggggaggccatgggcaaggacgacgtggtcgagagcggcgcgggcggcggggagttcgccgccaaggactacacggacccgccgccggcgccgctggtggacgcggcggagctgggttcgtggtcgctgtaccgcgccgtgatcgccgagttcatcgccacgctgctgttcctgtacatcacggtggccaccgtgatcgggtacaagcaccagacggacgcgtcggcgtcgggcgccgacgcggcgtgcggcggcgtcggggtgctgggcatcgcctgggctttcggcggcatgatcttcgtcctcgtctactgcaccgccggcatctcggggggccacatcaaccccgccgtcaccttcggcctcttcctggcgcgcaaggtctccctggtgcgcgcgctgctctacatcgtggcgcagtgcctcggcgccatctgcggcgtcggcctcgtcaaggcgttccagagcgcctacttcgacaggtacggcggcggcgccaactcgctcgcctccggctactcccgcggcaccggcctcggcgccgagatcatcggcaccttcgtgctcgtctacaccgtcttctccgccaccgaccccaagcgcaacgcccgcgactcccacgtcccggttctggctcccctccccatcggcttcgccgtgttcatggtccacctggccaccatccccgtcaccggcaccggcatcaacccggccaggagcctgggcgccgccgtcgtctacaacaaggacaagccatgggatgaccactggatcttctgggtgggccccctcctgggcgctgccatcgcggccttctaccaccagtacatcctccgggcgggcgccatcaaggctctcggctccttcaggagcaacgcgtgatgagcggggcttggctgtggagcaatggcgggcgacctacgggcggggggccgtgagcgaggagaatgccatcattcatcgatcgacttggtggttggttcgggtcgccttttttttgtttcagcagctgctgcgttgcgcgcgtgcgtgagatttggtttggtttcgttcccctgcaatgtaatcatgtcgtgactctcaagggattattccgctctgctcttatggcctctgttttctatttaatgattgttattaccatgtagcagtaatcatcgtcatcagtgagaatcttgttgcttctgtctaaatcaaccgagacgtgtggagtggatggatcgttcattcaaaaaaatgaaaat

SEQ ID NO: 853 - DNA, 2744 bp, Zea mays
  Clone ID: PAT_MRT4577_124085C.1
atatctcgagaacgaggcaccaatcttaggtgacttggtgtgcgcaatgaggggctgtgtcagaaataagtgaattggattgtagaatttcagaaataagtgaattggattgtagaaaaaaaaaaaaaaaaaaaaaaaaaaattaaaaaaaaaaaaaaatttccggatcttccgaggcatcgtgctcttcgtctccttcgtcgtcctatcttataatcgcatttcgaaatccccaaacggaagcatcgccactcttccgaacctgaacaatcaccaccgttattaagaagatgatgcgctgcgctgcaacgggcggcgggtgcgtcgcttcgtggagcggcgatcggagattgccggcggtcaacccctgcagcgtgcggatgccgacgggcaacgatgggtggtgcgccggcctgaggtcgcgggcggcggatctcgccggcctcgagatggccaacctgcgcggcggcgtcggggggctcttccgcgcgagcccgcgctacgggcgcttgcaagccacggcggcagttgaccctgaagatattccattggagaaggttcaagttaaatcctcaggacatgttctgccatatgttggcgttgcttgtttgggggctattctgtttggttaccatcttggtgtggtcaatggcgcacttgaatatctcgcgaaggatcttgggattgctgaaaatgctgtcttgcaggggtgggtggttagcacatccttggctggtgcaacactaggttcttttactgggggttctttggcagataaatttgggcggacaagaacattcatcctggatgcagtcccacttgctctaggtgcattcttgagtgcaacagctcaagatatccgcacaatgattattggccgattgcttgctggaattggtatcggggtctcatctgctcttgtacccctttacatatctgagatctcaccaactgaaattcgtggaacacttggtaccgttaatcaactttttatttgcattggaattcttgcagctttgttagctggattgcctctggcaggaaatcctgcctggtggaggacaatgtttggaattgctgtagttccatccattctgctggctgtaggaatggccttttcgcctgaaagccctcgttggctattccagcaaggaaaggttactcaagcagaattagctgtaaaaagactgtatggaaaagaaatggttaccgaaattatgtttgatctgagagctagtggccaaagttcttcggagtccgaagccggctggtttgatcttttcagcaagcgttactggaaagttgtgagtgtgggggcagcactgtttttgttccagcagcttgctggtataaacgctgttgtatattactctacatcggtgttccgtagtgcaggcattgcatctgatgttgctgctagtgctcttgttggagcagccaatgtttttggtactatggttgcatcttctctaatggacaaacaaggaaggaaaagccttctgataacaagcttttctggaatgggtgcttcaatgctactcctagcattgtccttcacctggaaagctctggcaccttattctggtactcttgctgttgttggcactgttctgtacgtgctgtcatttgctctaggagcgggccctgttccagcgctacttcttcctgaaatatttgcctcgagaataagggccaaggctgtcgcattatctctaggcatgcactgggtatctaactttttcattggcctgtacttcctgagtgtcgtgagcaagtttgggatcagcaacgtgtatctgggatttgcatcagtatgtgcccttgcagttctgtacatagctgggaatgtggtcgagaccaaggggagatcacttgaagagattgaaagggagctaagtgtagcagaatgatgtacttttgctagtcatgctgtggcgccgttttggttatcgagaatgcaaccaagcgctcaaccgagcatccttggacctggagactctttctagtttcatgtagttttagaaataagcgaacggcaagagtaccaatcttaggtgacttggtgtgggttgtgtctgaaataagtgaattggattgtagaatttcagaaataagtgaattggattgtagaatttcagaaagtgtgttccccttattttttcgctgcagttccttccatgctagacaaaaaaaaaaaaacagttaccaatcagattcagaaacaatgaactcgtcgatgtttctggagataagttttcattttttgttctaaaatttcttgtttctcttgtataggagactttgagatagtttcagctctaaagacgtgaatatggagcagctccgctaacgaatctaggattcactagtaaaatgtttagctatacactagctctagatttacgaaacagaggtctcccttggaatgacttgttttgctcttgatgttggctgacatccttcgaagcaatttggagtaaaaatacacaatgaaatactgtcatgttaaaaaaaaaaaggcttgttcggttatttccaatcagtattgtttggttatttccaatccgtatggatagtggattgagcgggattgatatgtattttgacttgttatggatttaattcggctcgagatctcatccaatgtacatggattaacatcaaaccgaataagccctgagttggactgtgaatttcagaaataagtgaattgagaaataagtgaattggattgtagaatttcc

SEQ ID NO: 854 - DNA, 195 bp, Zea mays
  unsure (1)..(195): unsure at all n locations
  Clone ID: PAT_MRT4577_124209C.1
ngcaggaaggcgcccgcccgaacgggattaaataccgcggggcgcgcccgggcttgagcgagctgcggggccccatcaaccacgtcaagtgcatgagggaggttctctggcagcgctttggcttccccagcgacggcgttatcatgctcactggcgaccagaaggagccgtttcgggtgcccaccaaggacaaca

SEQ ID NO: 855 - DNA, 679 bp, Zea mays
  Clone ID: PAT_MRT4577_124368C.1
acactcctatgggcgattgggaccctcgaggccggccgccggccggcataccttatcacttccatccaacgactctacctactacacttcagtatacacccagcgtgtataactttatcatcacaaccgttactacacacctcaaacaatcaacatgactggacgcggcaagggcggaaagggtctcggcaagggtggtgccaagcgtcaccgaaagatcttgcgagacaacatccagggtatcacaaagcccgccatccgacgtctcgctcgtcgtggtggtgtcaagcgtatctctgccatgatctacgaggagacccgcggtgtcctgaagaccttcctcgagggtgtcatccgtgacgccgttacctacacggagcacgccaagcgaaagaccgtcacatctcttgacgttgtctacgccctgaagcgacagggacgtaccctctacggtttcggtggttaagctctttttgttttacatgcctgttacgaatctttgcggtcgactgcttgcagcgcaggaccttgtagggtgtttcatgatgacattgggtccggttattgtttttgggtgttatgtatcataagggatttgggggattacattcggggataatcgaaaatgcccctcgaggcgatattgatcaccaaaaaaaaaaaaaaaaaacccgcggcc

SEQ ID NO: 856 - DNA, 655 bp, Zea mays
  Clone ID: PAT_MRT4577_124370C.1
ccggccggactcttctcactcagcatctcaaacgcgtcttccaaccaaacgtcatttgcaacatcgcgataacgcgccacattcatctcttttcatcaaacacttatcttcatctatcaatatgactggacgcggaaagggcggcaagggcctcggcaagggtggtgccaagcgtcaccgaaagattttgcgagacaacatccagggtatcaccaagcccgctattcgacgtctcgctcgtcgtggtggtgtcaagcgtatctctgccatgatttacgaggagacccgtggtgttctcaagaccttcctcgagggtgtcatccgtgacgccgtcacctacactgagcacgccaagcgcaagaccgtcacctctctcgacgtcgtttacgctctgaagcgacagggccgtaccctctacggtttcggtggttaagcagctatctgcacaccgaatggttcgtttggctttgcgaatgattgcacagtcgcacatttgcagatactgggatggatgtacttgactacggcgttggggaaacacggatatgatattaccatcaggcgtcatggaagacgaccttgcgaaatgaataccacattgaacattgattaatcaataaaaaaaaagaaaaaaaaaaaaaaaaaacccgcggcc

SEQ ID NO: 857 - DNA, 444 bp, Zea mays
  Clone ID: PAT_MRT4577_1243C.1
tgcagtgcccgtagcctccctttacccttacctcccttcctatccccgcgggccgccagaggcaatttcgccctcgattcgaccccgattcgtacgcccgtgaccgggattgcctgcgccaagcgcggatctgaacgctgcgctacgtgtcgaccactcgaatccggatgaagggggccaaattcaagggcgccgccaaggccgatgccaagctggcggtgaagagcaagggggcggtgaatcccgccaaggccaggatggggaaggccggcatggaccccaacaagcctaagagggctcccagcgcttgcttcgtgatcatggaggaattgcgcaaggagagcaaggagaagaaccctatgaacaagactgtcgctgctgcgggaaaagctgctggcgacaggtggcaatccctgggcgagtgggacatggctccctatgtag

SEQ ID NO: 858 - DNA, 319 bp, Zea mays
  Clone ID: PAT_MRT4577_124450C.1
aaggaaaaacaaaatggggggacatatatttctccatacatctatgctcattgggggagacgcaactgaccacctagagctgcctacttacttattcagactgatccagcatgtgggaacatcggaagtttacatgcgtacagacgacaaattttcataacaatagcctggcttggctggttcacataataaccaaacgacaaccacgaaattgtgacgatttaaaataaacaactcaaaagcaaatcgacccccgaagcccgtgttactcataaagcactcccgtcttcttcttcatggcatccggttcctcctccca

SEQ ID NO: 859 - DNA, 384 bp, Zea mays
  Clone ID: PAT_MRT4577_12447C.1
ccgactcgtacggagcggattatcctaccactacggttcgggttcggattcgggagggtcatcctcgttcggcttcgtgggtgagcggatcgagatggcatgcgtccgatgttgagtaccgctgctacatctgcggtctctcctgggccactgacgaccactgcgtccacaacgccttcagcacctacggcgaggtcctagagtacaagatcatcctcgatcggtagactcagacgtccagcagcttcggctttgtcaccttcttcacggatgaggcgatgcggaacgccatcgcaggcatgaacggaaaggatctggacggacgaaccatcaccgctaacgatgcccaatcccgctgcggactctgaggcagaacaggtgggt

SEQ ID NO: 860 - DNA, 1806 bp, Zea mays
  unsure (1)..(1806): unsure at all n locations
  Clone ID: PAT_MRT4577_12449C.1
cgaaaccgctagaggcagagggaggcgcagcacgaggaactcgttggtggcatcgagcgagcggtgcgagtggcacgagtgcgtgcgcgagcaagatcggagcttttccttcgtcgcagttgtggggaacgcggcgagcgcttccgtgatgggcgccggcgcccaggaggatgaggaggagataaccacggtggccgagggaggagtcggagaggaggagcaagcggcggctgagggcgcaggggaggaggagcagttggagcagggtgcagggggcgagggagagggtggggaggagaaagctccggcggtgatgttgtgctcgatctgcctcgacacagtggtcgccggaggcgaggagaggtccaccgcgaggctgcagtgcggtcacgaatttcacctcgattgcattggttcagcatttaatgccaaaggaatcatgcaatgccccaattgtcgcacgattgagatggggaactggctttatgcgaatggttctcgatcatcacaggacgtaaacaatgatgaatggggttatgatgacctatatgatcatggtcactcagagctggcaacctttgtgcctcttcgcattcagtggtgtcctatggggcgcctagaacttcaatccttatttgatgatggagagtccccccctccatctacttttcatgatttcacgggacaattcaactctgagcccatggtaccggtacctgccacacctcatcctggtccgtatctagcttattttcagcctgccctgccaccggtatcatcaagctcccttgtcgctgagagaacaatggatggtgctgcatatcatgatcactggaacactctggctgggctatcagatggccggcgaccctgggcgtactatcctcaacccaacagtgataatggtatagctgagcagcaaggactccctctgggggcaatggcggttggaggggttgatagtgaaagccaacaacgaggatctctctccttattttatggaaacgggtctggaagaccaaggatcccaggtgttcctcctatggcaccacaatttacaagagcgcatggcaacataaacgatcagttccagcagacagctagcttatttgctgggtcacagcaatcaggaggtatgcgtccattgggagcagtagggccttccgtgccaccacctccggagaacacctccttctgtctgttcccgccagcttcatccgtccccagtacaatggaggccgaggatgtcaacagagcaaaccagttctatgcatgggagagggatcgcctggctccttacccgctgatgcctgttaatagtgaaggtacctggtggagctcttcacaacagcagccccctccggagcctgctgcatctgcttcgaggaggctttctgggcagtggattggtaggttgccattgccaccaccagagaatagatcgccagacggctcgtccttccgtccactgcacatccctcggatgtagcgcaggaactggcaaggcgtaagttaatagtacaaacgtgggaaaccctgttggttgtaagtggtaacgccactgtaagaaagccccgtcggatggtaaaccttgtgataaaattcaggatgttgaagaaaccgaccctgaggtgaaaacatttttggcccggggtttatgcatttcgatcaagtacatatttccggtcatgttaatgaatttctaagaatcgcagttctgcttatagctgcatcgtgctacaaaaatgcaggatttgtaaaaggtgagtcgtatcatagtngagaccnntnnaagggaaggggggg

SEQ ID NO: 861 - DNA, 618 bp, Zea mays
  Clone ID: PAT_MRT4577_124572C.1
ctcgagttttttttttttttttttttttttttttttttttttttttttttttcccttaggattaaacttaaaataaagcctgacgggggtaacagcacccatcgatccgaagcccatgctggttgatgcatgggtctgctggacccgaggataaacacagcattaacaactgacacaaagcgaccttagatcaaaaacacagaggggcaacaccaaacccgggacgaacgaaaataaaccctttggactaggggaaacaacacggtagcaaacaggataacttggccgggcgggccccaccgttaatttcctccagttcccgtcggagttgccgaaccccccgccacggttgccaccgccgaacccgccgccaccaccaccggagccgccgccgccaccaccgtagccgccgccaccgccgaaaccgccgccgccatcacggggcccgccaccgccgtagccgccgcctccacggccaccaccgtacccgccgccgccgccgttttcaggggcggggggggactgggcctctttgacggggatgttggggccgtccagctccttgccgttaatgccctgaagggcgttcccgatcgcctcttccggggaaaaggggac

SEQ ID NO: 862 - DNA, 699 bp, Zea mays
  Clone ID: PAT_MRT4577_124601C.1
cattgggacctcgaggcggcaagcctattgatggcctgatagctttcgtaggtgctagctactaccatataccatatactctcacacaaagattagtacagctagcatggctaatgactccttgacgaggggccacataatcggggatgtcttagacccgtttactagctcagtgtctctaagtgtcctgtatgatggcagaccagtgtttgatgggatggagtttcgggcgtcggcggtgtcggtgaaacctagagttgagattgaaggtgatgattttcgagtggcctataccctagttatggtggatcctgatgcgcctaatcccagcaaccctagcctgcgggaatacttgcattggatggttactgacatcccagcatcaacagatgatagcttcggccgagagctcataccatatgagagcccaagccccaccatgggcatccaccgtcttgtgttggtgctctaccagcaattggggcggggcacggtgtttgcgccgcaagttcgtcagaacttcaacttgcgtaatttcgcacgccgtttcaacctcggcaagcctgtggccgcgacgtacttcaactgtcagcggcaaacaggcacagggtgggagaaagttcacttgagtaatggacctacgtacccctgatcatgtcgttcaaggggaaggccggcaaggcttgacctactactact

SEQ ID NO: 863 - DNA, 1191 bp, Zea mays
  Clone ID: PAT_MRT4577_124603C.1
ctgatagctttcgtaggtgctagctactaccatataccatatactctcacacaaagattagtacagctagcatggctaatgactccttgacgaggggccacataatcggggatgtcttagacccgtttactagctcagtgtctctaagtgtcctgtatgatggcagaccagtgtttgatgggatggagtttcgggcgtcggcggtgtcggtgaaacctagagttgagattggaggtgatgattttcgagtggcctataccctagtaagccatcacgtactccgcagatcgagtccatttggcgcgcggtaggccatatctatggccaagatgtctcgactactctccaaactctcatgtccaagtgacatccatggcttttggctcactgtgtgtgacggctaaatcagtctcctcgatcgtgcccatagctcggttgactacaaagattggctcatgctaataaatatatagtagtattatacactgagagagacactaacacccccccccccaaaaaaaaagtgcagggatttctgatcagcccagccccgaaaaaatgctcaggtttacttttaattccctaacatgttgaccatgtgtttgtgttaatgtaaatatattaggttatggtggatcctgatgcgcctaatcccagcaaccctagcctgcgggaatacttgcattggatggttactgacatcccagcatcaacagatgatagcttcggccgagagctcataccatatgagagcccaagccccaccatgggcatccaccgtcttgtgttggtgctctaccagcaattggggcggggcacggtgtttgcgccgcaagttcgtcagaacttcaacttgcgtaatttcgcacgccgtttcaacctcggcaagcctgtggccgcgacgtacttcaactgtcagcggcaaacaggcacaggtgggagaaggttcacttgtgtttttgatcatgtcgttcaaggtgaaggccggcaagcttgaacctactactactagtaacgttcgcgtgtgcttatatggccgtatcggcgtacactacgtagcatgaaagctagctagaaataaataaagatgtatttctttcgcacatgtagctaggcttttataaaggcgtacctccaagggtattatgtccggcttttaattaataatcgcgtgataagggtggttagtat

SEQ ID NO: 864 - DNA, 266 bp, Zea mays
  Clone ID: PAT_MRT4577_124769C.1
gcgctattcctcgccccgtcgccaacgcaatctttgcagccccaatccctcacagcaaccatggctgttgcgcaggagtccctttctgtggtgggcactatgcgcggccacaacggtgaggtgacggccatcgcgaccccgatcgacaactagccgttcatcgtgtcctcctcccgcgacaagtgcctgctggtgtgggacctgaccaacccggtccactacaccccggaattcggcgccaccgtctactactgagtacccttttg

SEQ ID NO: 865 - DNA, 2105 bp, Zea mays
  Clone ID: PAT_MRT4577_124783C.1
gccggctctcgtttgttatcccgtacccactctggcctactccatccaccaaaagtgcagggccccaaacggccaaacgcaaaagcgagagcaaagcaagcttcggcctcacctccagcggcaggtggtgctgcggagcttctcctcgccctagatcccgcgcacccaacgccagatcagagatcagggcgcgccggccgtctccattgcccggcggatcctgcgatgcgagctggaccgagagggaggagcgagggagcgcgcgggtagagaaggcggggcggggggaggaaggaaggaaggaaggagcgccggccggagcagacgtcccctcggggccctcggtcggatgagatcgacgatgaaggcgcagcacgccaacgggcgggggagcaggagccccttcctgacgtcctacgcgctcacgctcgccttcatcaccttcgtctccgtgctctactttaaggacttctcctccacgctgcaccgccccttcctccaccgcccccgccgccacgccgccccagacaaaagccaggcggggcgccgcgcggcggcggagcggctgccgttcgcggtgggcgcggcgccggcggggtgtgacgtcgggcgaggggagtgggtgtacgacgacgcggcgcggccgtggtaccaggaggaggagtgcccctacatccagccgcagctcacgtgccaggcgcacggccgccccgaccgggcgtaccagcactggcggtggcagccgcgcgggtgctcgctgcccagcttcaatgcaactctaatgctagagatgttgcggggtaaacgaatgttgtttgttggagattctctgaaccgtgggcaatatgtatctttggtttgcctcctgcaccgaatcatccctgagagctccaagtcaatggagacagttgattcccttacagttttcaaagcaaaggactacaatgccaccattgagttctattgggctccctttctggccgagtcgaattcggatgatgctgttgtgcaccggatcgcggatcggattgtaagagggacatccattgagaagcatgccaagttttggaagggggctgacatcttggtattcaacacctacctatggtggatgactggacaaaagatgaagattttgcggaactccttcgaagataaaagcaaggatatcatagagatggaaacggaggaagcctatgagatggtacttaatgctgtgctgaaatgggtggagagcaacatgaaccccaggacatcaagaacattctttgtcactatgtcacccacccacacaaggagcagagactggggcgatgatactgacgggaactgctacaaccagacagcccccatcgaggacctgtcctactgggggccagacaccagcaagggcctgatgcgcgtgatcggagaagtgttcagcgcgtctaagtccaggatccccgtgggggttgtgaacatcacccagctctccgagtacaggaaggacgcgcacacccagatatacaagaagcagtggaacccgctgaccccggagcaggtcgcggaccctaagagctacgcggactgcacgcactggtgcctgccggggctccaggacacgtggaacgagctgctctactccaagctctttttcccctgagttaaaggtttgagttgcgaggtgcacggtgaagttggggtctctctctggcattggcacgctgcacaatactagttagcttggcattggcccagcagtctgaagatggatgctctgctgcggtatggcatggcatggtattgttgatgtacgattcattcgttggaaaacctggacgtgagtgctggaattgcaccatctggccttttctgtacatgcctgatgtaacggtggtgttgtgtttccccaccaccacctctcttttcacgatgatgacacagtgcatgaatagttgtatggggtaatgtgataatacatactgtaattctctggttccttcccttcgccttgcggagtgggccggtagacaaacatttcggcggctggtcacttggtcagtgacccgttgatattattattattattggatctaatgcaacaaccagttctggtgttggtgtcc

SEQ ID NO: 866 - DNA, 2387 bp, Zea mays
  Clone ID: PAT_MRT4577_124848C.1
cctcgaggccggccgggaagctcacctgctggcaccgcgaaactatcgagggggcatgcttccaattttctgcaagtcgagagtcgagaccgccatcgaagcaccggcgccaatgaagacttgaagagggctaaaacgaaaaagatgccaggatgacaaaatttcccactccactcgaattaaaaccctagcggcaaaaccttcgctctgcgccgccgtcgcctgctcccgtcccgccaccacatccgcccaggagctcgccgtcggggaggctgctcgaggagccgcgctgtctctcccgcgccgcgaccttcgccctcgccgccgccatgatctgcgcgatctccggtgaggtgccggacgagccggtggtgtcgaagaagtcggggcttctcttcgagcggcggctcatcgagcgctacattgaggaccatggcaagtgccccatcaccaaggatgagcttactatggatgatatcgtgccggtcaataccaacaaggtcgtgaagcccaggcctttgcaggctgcaagcattccaggactccttgggatttttcagaacgagtgggatgctctcatgctttctaattttgctttggagcagcagctacacacagcaagacaagaacttagtcatgcactctaccagcatgacgctgcctgccgtgttatagccaggttgaagaaggaaagagatgaggctagagcacttttggctcaagctgagagacagattccagcatcagttgcaggagctgctcctgcagctgttgtttccaatggaaaaagagcaatggaagatgaaattggccctgacggaaagaagattcgtcctggtatcaaccctgtcatgattgatgaacttacagagtgtaataccatgctttcagcacagcgtaagaaaagacaggttcctccaactctggcaccattagatgcactcgagagatacactcaaatctccagccatccccttcataagacaaacaaaccaggcattttgtccatggatgttcatccttcaaaggatgttgttgcaactgggggtatcgatacaaatgcagtaatctttgatcggtcatctggtcaaatcttgtgcacgcttactggtcactcaaagaagataaccactttaaagtttgttccacgggatcaactctttgtaactggatcagcagataagactgttcgcatttggcaagagaacgagaatggaaactataactgcgtccatacattgaaagatcatactgctgaggttgaagctgttacagtacatgcgactcagaagtattttgtgagtgcttccaaggataattcgtggtgcttctatgatatttcaacaggatcttgcctgacacaggttggcgaggcttcaggacaagagggatatacatccgcgtctttccatccagatggtcttatccttggaacaggaactactgatgctgttgttaaaatttgggatgtgaagactcagtcgaatgtcgcgaagtttgaggggcatgtaggaccagtcactgctatgtccttctctgaaaatggttacttcctagcgactgctgctcatgatggtgtcaagctttgggatcttcggaaattaagaaattttaggaccttctctccctatgattcagatacgccaacaaatactgtggaatttgattttagtggaaactatcttgccattggtggttcagatataagggtctaccaagtagctaatgttaaggccgaatggaatctcatcaagacattaccagatttatctggaacagggaaagtaacttcggtaaagttcggagcagatgctaagtacatagccgtaggttctatggaccgcaatctacggatatttggcctccctggagacgaccaaatggaggaatcaaccacagcggcagagtgaggaaaatccatggtacctaatttcctcctcctggtatactccgcaatatgttctgatgatgggtagactgagtgcaaatggatacatcacgagagaagggtcctcgcggcgatgaactggcttgagcttcggtcggtgtaaacaagctgtgacattattgtattgtaggcctcactaattcgtctgatggggatacaatttgttttgatgagtacgagtgtacgacgctaaacagccaaagttctatgcatagattccagtgattcaaaacaagctactacagtactactacttgctagtcaacttttacataggccaatggacgcactggtgtcggagcgtttagtctttgcccctgcgagtgtgcagtgcgcactgtgatctgggaagcttggttgttctctagttggtgcaatttcttttgtttccgagtttcttaaaaaccgtgcgttaaaaaatcaatggcaggttatcggt

SEQ ID NO: 867 - DNA, 2315 bp, Zea mays
  Clone ID: PAT_MRT4577_124849C.1
gccgggtccgattatttgcgccagagggcatgaatggaatctcatcaagacattaccagatttctcccgcctagggaccggccgggaggaggcagccgtcgcctgctcccatcccgccgccggccgtgccccgcatatgcggggggtcaaatttctcctctcgaagaaccctagcggcaaaacctttgctccgtcccgccgtcgcctgctcccgtcccgccgccggcgctgccacccgcatctgccgaggggctcgccgccggggaggctgctcgcggtgccgcgctctctcccgcgcccgaccttggccctcccctcctccatgatctgcgcgatctccggcgaggtgccggacgagccggtcgtgtcgaagaagtcggggctactcttcgagcggcggctcatcgagcgctacattgaggaccatggcaagtgtcccgtcaccaaggaggacctcaccatggatgatatcgtgccggtcaagaccaacaagatcgtgaagcccaggcctttgcaggctgcaagcattccaggactccttgggatttttcagaacgagtgggatgctctcatgctttctaattttgctttggagcagcagcttcacacagcaagacaagaacttagtcatgcactctaccagcatgacgctgcctgccgtgttatagccagattaaagaaggaaagagatgacgctagagcacttttggctcaagctgagagacagattcctgcgtcagttgcaggagctgctcctgcagctgttgtttccaatggaaaaagagcaattgaagatgaaattggccctgacggaaagaagattcgtcctggtatcaaccctgtcatgattgatgaacttacagagtgtaatgccatgctttcagcacagcgcaagaaaagacaggttcctccaactctggcaccgatcgatgcactcgagagatacactcaaatctccagccatccccttcataagacaaacaaaccaggcattttgtccatggatattcatccttcaaaggacattgttgcaactgggggtatcgatacaaatgcagtaatctttgatcggtcatctggtcaaatcttgtgcacgcttactggtcactcaaagaagataaccactttaaagtttgttccacgggatcaactctttgtaactggatcagcagataagactgttcgcatttggcaagagaacgagaatggaaactataactgcgtccatacattgaaagatcatactgctgaggttgaagctgttacagtacatgcgactcagaagtattttgtgagtgcttccaaggataattcgtggtgcttctatgatatttcaacaggatcttgcctgacacaggttggcgaggcttcaggacaagagggatatacatccgcgtctttccatccagatggtcttatccttggaacaggaactactgatgctgttgttaaaatttgggatgtgaaggctcagtcgaatgtcgcgaagtttgaggggcatgtcggaccagtcactgctatgtctttctctgaaaatggttacttcctagcgactgctgctcatgatggtgttaagctttgggatcttcggaaattaagaaattttaggactttctctccctatgattcagacacgccaaccaatactgtggaatttgattttagtggaaactatcttgccattggtggttcagatataagggtctaccaagtagctaatgttaaggccgaatggaatcttatcaagacattacccgatttatcaggaacagggaaagtaacttccgtaaaattcggagtagacgcgaaatacatagccataggttctatggaccgcaatctacggatatttggtctccctggagatgatcaaatggaggaatcaaacacagcggccgagtgatgggaattcatggtgcctaatttgtttcttctgccatcatcctcattatactgtggtgatggatagactgattgcacatggatacatcaccgtcacaagagggaagggtcctggcggggattactggtctgagcttcggtcggtgtaaaacaagctgtgatattgttgtactgtaggccttactaattcttctgatgaggatacaatttgttttgttgagtacgatgctaaacagctaaagttctctgcgcagattccagtgattcaaaacgaactacttgcttctcagcttcttttattacataggtcaatggaagcactataagatgtgcccacgcgagtgtgcagtgcgcgccgtgaactggtaagcttcgtagttctctaaaaaaaaaaaaaaaaaaaaaaaaaaaaa

SEQ ID NO: 868 - DNA, 1108 bp, Zea mays
  Clone ID: PAT_MRT4577_124955C.1
ctgagaaggaaaagcagcggcttctcgcgcggcgcttcgatctaccggggagtcaccaggcatcaccagcacgggcggtggcaggcgcgcatcggccgcgtctcgggcaacaaggacctctacctgggaacgttcagcacgcaggaggaggccgcggaggcgtacgacgtggccgcgatcaagttccgcggcctcagcgcggtcaccaacttcgacatcacgcggtacgacgtggacaagatcatggagagcagcacgctgctcccgggcgagcaggtccggcgcaggaaggaaggcgccgacgccgcggtctcggaggccgccgccgcgctggtgcaggccggcaactgcatgacggacacctggaagatccaggcggctctgccagctgccgcgcgggccgacgagcgcggcgccggccagcagcagcgccaggacttgctgtcgagcgaggccttctcgctgctccacgacatcgtgtccgtcgacgctgctgctggtacagggacagggacagggggcatgtcgaacgcgtcgtcgtcgctggcccccagcgtgagcaactcccgggagcagagcccggaccggggcggcgccagcctcgccatgctcttcgccaagcccgtcgcggcgcccaagctggcttgcccgctgccgctggggtcgtgggtgtcgccgtccgcggtgtccgccaggccgcccggcgtgtcaatcgcgcacctgccggtgttcgccgcgtggaccgacgcatgaacaaacatccgtgtcattaccagggtatggttcttttggtttgcttagagcgtgctttttagctgggtaaggttagctgcgtagcggtgatctgatcagcatatgtgagaggaactagccatgcgtgtctgctttgtcctcctgcgattcctcctccagttgcgttgcgaggaggtttctttttgtaataccggggctagatagcacagcatggatctcctcctgtagccaacactaatttggagtaggatggttagtgttgatctcctaacttcaattaggaaaaatatgccaagtaagataagtttaaacctgtgcgctttgcaattcatcaatgagctgggattcagacctc

SEQ ID NO: 869 - DNA, 1793 bp, Zea mays
  Clone ID: PAT_MRT4577_124970C.1
gttcggcacgacgttgttaccagcctgatcgggttatggagttctgcaacaacaatgatcttcagttaattgtacgagcacatgagtgtgtgatggatggctttgagcgctttgctcaaggtcacttgatcactcttttctctgcaacaaattattgcggttagatgtcttgtgaaggtctgctttctctctcctcacttaaaccctcctccgctcgacgacaccacacgaaaatatacgtcagaataaaccgcagcaaatcttctccggcaccggcagcgcccaaatccggcaatccgctgctccgaatggactcaggttacaatccccggacggtggaggaggtgttccgggacttcaagggccgtcgtgccgggataatccgcgcgctcaccactgatgcggaggatttcttcaagcaatgcgacccggaaaaagaaaacttgtgcctgtatgggtttcctaatgagagctgggaagtaaatttgcctgctgaagaggtgccacctgacctcccagaaccagcattaggcataaactttgcaagagatggaatgcaggaaaaagagtggttgtccatggttgctgcacacagtgatgcatggttactttctgttgcattttacttcggtgctcgattcggtttcaataaaaatgacaggaagcgcctctacagtttgattgatgatcttcccatggcttttgaaattgttagtgggaagagtgaaaccaaggcaccagcaccaccaagcagtagtaaccacagcaatatcaaaccgaagtccaacaacaaaaagaaaccaccggagcctaaggtgaagcagccaaagccgcgtgcccctgcagaggaaggcgaggaggaagatggcagtgcaagcgagggcgagcacggggagacgctgtgcggcgcgtgcaaggaaagctacggccccgacgagttttggatctgctgcgacctctgcgagaagtggttccacggcaagtgcgtcaagatcacggcggccaaggccgagcacatcaagcagtacaagtgcccgtcctgcaccggcggcggtggcgtcggcaacagcggcaccaagcgagcccgcccatcatagctgcgacttttagtgatgtaaactgcttagaaaaactgttgcggacatagcgcccatcatagctgcgactttttaaatggtggtgtaaacttttgtagtgcgactaggccgtttgtcaccctatcatacttggcttcaagtaggttttctgtttttcagttttcattatcatactcgattaaagtagtgtggatgaatggcgtaaaacatctagcattctctataaaaaaccaaaaaattattgcgggactgcaaataatgccggtgcgatcttggttttgggtagagatcttgtggttgcgccaaaactaatccatcctttgccccctgcaattacgtcacctgaggcgtcgccggatcatattgaggacacatggatgcaggagctaaatgctaacagaccaccaactccgaccagggggcgtccccaagcagtagctaatgacaagggttctcttgcctggatatagtagattgaccacacattggttggtatgattcatatgaagcctgagtggtctggatcttgttattttcatttgtgttcgggagaggggctggtcgacagccgtaccgaaacgaaagattgatgttcaggggagcatagggactataaagttggtagaagggagcttaatctaggacaacgctcttcaattcgtaattattgtacacgtagttgcattgccaatagaa

SEQ ID NO: 870 - DNA, 669 bp, Zea mays
  Clone ID: PAT_MRT4577_124977C.1
gggtacctcgaggccggccgggaaaatctccgcccgtcggccgtcgcccgccaaaggtctcttcgatccggcctctccgggccacccagtcggccagtcccacacaaggatggatcgctagcgccgatgagctatactctttgctcactgtactagtcacacgattggctacacgacacgagctcagagctctcaggtttcccaacgccggctgctggccaatggcgcagcaccacggcagccactccctggaggtcggcggcgtcggcgccggcggcgtcgagctcgacgacgacggccacgccgcgcgcaccggcaacctatggacctgcttcgcgcacatcatcaccgccgtgatcggctgcggcgtgctggcgctctcgtggagcgtcgcgcagctgggctgggtgggcggccctgtcgccatgctctgcttcgccttcgtcacctacctctccgccttcctcctgtcccactgctacaggtcccctgcctccgatgatggctccctgaaacgccagaggaactacacctacatggacgccgtcaggacgcacctggtacctcaacatgtacgggaccgcaatcgcctacaccatcaccacggcgacctgtctcagggcgatcgtgagggccaactgctaccacagccagggccacagcgctccc

SEQ ID NO: 871 - DNA, 1955 bp, Zea mays
  Clone ID: PAT_MRT4577_124979C.1
caaaagtctccgcccgtcggccgtcgcccgccaaaggtctcttcgatccggcctctccgggccacccagtcggccagtcccacacaaggatggatcgctagcgccgatgagctatactctttgctcactgtactagtcacacgattggctacacgacacgagctcagagctctcaggtttcccaacgccggctgctggccaatggcgcagcaccacggcagccactccctggaggtcggcggcgtcggcgccggcggcgtcgagctcgacgacgacggccacgccgcgcgcaccggcaacctatggacctgcttcgcgcacatcatcaccgccgtgatcggctgcggcgtgctggcgctctcgtggagcgtcgcgcagctgggctgggtgggcggccctgtcgccatgctctgcttcgccttcgtcacctacctctccgccttcctcctgtcccactgctacaggtcccctggctccgatgatggctccctgaaacgccagaggaactacacctacatggacgccgtcaggacgcacctgggtacgcgttgctcctgcatccttgttcttgttcctatcctacctatcggctagcgtattagcctttggtggcgactccacttacgagagctagcaagagcaacgcgcgcaggggagaagcgcacctggctctgcggcctgttccagtacctcaacatgtacgggaccgcaatcgcctacaccatcaccacggcgacctgcctcagggcgatcgtgagggccaactgctaccacagccagggccacagcgctccctgcggcgccggcggcgaccacctctacatgctgctcttcggggcggcccaggcggtgctgtccctcatacccaacttccacagcatggcctggctctccgccgtcgccgccgtcatgtccttcacctacgccaccattggcctcggcctcggcctcgccaagaccatagaaaatggggcgatcaaaggaagcgtcgccggagttccgatgagcaccgcgccgcagaaagtctggcgagtcgcgcaggccatcggcgacatcgcgttcgcctacccgtacaccattgtcctactggagatacaggacacgctcaaatcgccgccaccagagagcgagacgatgcagaaggggaacgtgctcgcggtcctggccaccacgttcttctacctcgccgtggggtgcttcgggtacgccgccttcggcaacgctgcgccgggcaacctgctcaccggcttcggcttctacgagccgtactggctcatcgacttcgccaacgcctgcatcgtgctccacctgcttggtggctaccagatgttcagccagcagatcttcaccttcgcggaccggtccttggcggccaggttcccgaacagcgcgttcgtgaacaaatcctacgccgtgaaggtgcccggcgcgccggcgtcgtggagctacagcctcaacctgcagcggctgtgtttccggacggcgtacgtggcgagcaccacggggctggccctcctcttcccctacttcaacgaggtgctgggcgtgctgggcgccgtcgtcttctggcccctcgccatctacctccccgtcgagatgtactgcgtccagcgcggggtcctgccgtggacgcggacgtgggtcgcgctccaggcattcagcgtcgtctgcttcgtcgttggcaccttcgccttcgtcggctccgtcgagggagtcatccgcaagaggctcggctagttgtggtattagcgccttttctgtcgtcaaccatgtcatgaatggtggaagtgtgtaaagagagtgtactgtatctaagttttttttatttccccgtgttcgcttagccatgagcccatgaccatgatgattgatgaatatatctacccgtgcgtgtttagatccaaagttttttttgtgatgctgtgtcactgctacgtaaatgatttttgcaacag

SEQ ID NO: 872 - DNA, 2297 bp, Zea mays
  Clone ID: PAT_MRT4577_124982C.1
accccctcgaggccggcccgggaaaaaaaaaaaaaaaaaaaaaaaaaaaaaaaaaaaaggcctcgtcctgcttcgtactaccagtagtagcacgtaaaccagggcgccacgccagccggatcggatcgtcttggatgtgggcatgtggctgtggacgagacaaaagtctccgcccgtcggccatcgcccgccaaaggttctcttcgatccggcctctccgggccacccagtcggccagtcccacacaaggatggatcgctagcgccgatgagctatactctttgctcactgtactagtcacacgattggctacacgacacgagctcagagctctcaggtttcccaacgccggctgctggccaatggcgcagcaccacggcagccactccctggaggtcggcggcgtcggcgccggcggcgtcgagctcgacgacgacggccacgccgcgcgcaccggcaacctatggacctgcttcgcgcacatcatcaccgccgtgatcggctgcggcgtgctggcgctctcgtggagcgtcgcgcagctgggctgggtgggcggccctgtcgccatgctctgcttcgccttcgtcacctacctctccgccttcctcctgtcccactgctacaggtcccctgcctccgatgatggctccctgaaacgccagaggaactacacctacatggacgccgtcaggacgcacctggcaagagcaacgcgcccaggggagaagcgcacctggctctgcggcctgttccagtacctcaacatgtacgggaccgcaatcgcctacaccatcaccacggcgacctgtctcagggcgatcgtgagggccaactgctaccacagccagggccacagcgctccctgcggcgccggcggcgaccacctctacatgctgctcttcggggcggccccaggcggtgctgtccctcatacccaacttccacagcatggcctgggctctccgtcgtcgccgccgtcatgtccttcacctacgccaccattggcctcggcctcggcctcgccaagaccatagaaaatggggcgatcaaaggaagcgtcgccggagttccgatgagcaccgcgccgcagaaagtctggcgagtcgcgcaggccatcggcgacatcgcgttcgcctacccgtacaccattgtcctactggagatacaggacacgctcaaatcgccgccaccagagagcgagacgatgcagaaggggaacgtgctcgcggtcctggccaccacgttcttctacctcgccgtggggtgcttcgggtacgccgccttcggcaacgccgcgccgggcaacctgctcaccggcttcggcttctacgagccgtactggctcatcgacttcgccaacgcctgcatcgtgctccacctgcttggtggctaccagatgttcagccagcagatcttcaccttcgcggaccggtccttggcggccaggttcccgaacagcgcgttcgtgaacaaatcctacgccgtgaaggtgcccggcgcgccggcgtcgtggagctacagcctcaacctgcagcggctgtgtttccggacggcgtacgtggcgagcaccacggggctggccctcctcttcccctacttcaacgaggtgctgggcgtgctgggcgccgtcgtcttctggcccctcgccatctacctccccgtcgagatgtactgcgtccagcgcggggtcctgccgtggacgcggacgtgggtcgcgcttcaggcattcagcgtcgtctgcttcgtcgtcggcaccttcgccttcgtcggctccgtcgagggagtcatccgcaagaggctcggctagttgtggtattagcgccttttctgtcgtcaaccatgtcatgaatggtggaagtgtgtaaagagagtgtactgtatctaagttttttttatttccctgtgttcgcttagccatgagcccatgaccatgatgattgatgaatatatctacccgtgcgtgtttagatccaaaaaaaaaaaaaaaaaaaaaaaaaaaaaaaaacaaaaaaaaagaaaaatccagatgcggacaagaaccaagtcgccatgaaccccatcaacaccgtctttgatgccaagcgtctcatcggcaggaggttcagtgatgcgtctgtccagagtgatatcaagctgtggcccttcaaggtcatttctgggcctggtgagaagccaatgattgttgtccagcacaagggtgaggagaagcagtttgcagctgaagagatctcctctatggctcttatcaagatacgtgagaatgctgaagcttaccttggttgcaccatcaaaaatgc

SEQ ID NO: 873 - DNA, 368 bp, Zea mays
  Clone ID: PAT_MRT4577_125022C.1
tggattctcctgcccctacggttcgggttcgggttcgagaggatctacgctgttcggctccggggttgagcggatcgagatggcggcgtctgatgttgagtaccgctgcttcgccggcggcctcacctgggccactgacgaccacttcgtgcacaacgccttaagcacctacggcgaggtcctcgatgtccaacatcatcctcgatcgggagacgcacaggtccgagcgctcttgcttcatcaccttctccacggatgaggcgaggcacaacgccatcaacggcatgaacagcacggagcttgacgggcgtaacatcaccgtgaacgatgcccatgcccgcggcgtacggggaggtggttgcggtggg

SEQ ID NO: 874 - DNA, 357 bp, Zea mays
  Clone ID: PAT_MRT4577_12507C.1
gcgttcgtgaggttctccggggttcggtttcgtgggtgagcggatcgagatggcggcatcggatgttgagtaccgctgcttccacggcggactgcactgaaccacagacgaccactccctacacaacgccttcagcacctacggcgaagtcctcgagttcaagatcatcctcgatcgggagacgcagaagctccacggctactgcttcaccaccttctccacggaggacgcgatgcagaacgccatcaagggcatgaacagcgaggaactggacagacgcaacatcaccgtcaactaggcccagtcccgatgaagccgcggatgcagacgcagctgcaggtactgctgtagccgatg

SEQ ID NO: 875 - DNA, 875 bp, Zea mays
  Clone ID: PAT_MRT4577_125103C.1
caaccagttgcatatgcattttgtgcctactctacctttaaggcattcatttataaatggagtattctaatttgcagcagcaggcagcgtccttgaaaaagaacctctttgatcagggatacttggatgagcaattttgtcagattgaggacttgcaggatgaagcaagccctaattttacagaagaagttgtttccctgttcttcaagaactcaaccaggctaatgacaaatattgagcaagctatggacaggaatcccagagatttcagtaaatgggatgtaaacatgcagcaattaaaaggaacctgttctagcatcggtgcttgcaggatgaagaacgagtgcacctcattcagaaatagatgtggagacgagaacgttgaaggttgtatgaggtccttccagaacctgaagagggagcatggagtcctcaggcagaagctggaatcctacttccagctgctgcgacaagccggtcctgccgtgactgcaaccaggcctagaggcatgtaaggaacggctgttggcgtgcagggagcagtgcaagggacagacagcgtcatagcgatgctccactacgccattgttgaggctagctgtaacgatgggccacgaataagaagtttgcctatggcctgtgggggagttccctgcgggttttaaagtgtaataacacccttcataatcgatgccttaagctggtgctgccgagtgccgactagctaggccggcatgtaagagcagcctagactgatgttgatgtggtctggcagacgtcctgtgctgtgcctgcctctgtatttcggtcaaataaataaactagatggagtttgcatgtttgcatcagacaaggataacgagaaagtaaaaggg

SEQ ID NO: 876 - DNA, 1159 bp, Zea mays
  unsure (1)..(1159): unsure at all n locations
  Clone ID: PAT_MRT4577_125324C.1
accatgtgcttgtggagatgacaggcatcggcgtggccgcgacctcctcgtcgagcttccgccatgtggccgacatgtcgcangcgccggccgggaacctttgcttcttcctccccctaatcgcgaacgagcgtctttctcctccgtccgcgcccgtttgctcatcggttttgcctgccggtgggggaccgcctgcacgagcagcggctagccagacgtacgggcttcgtttgaggctggagtcctgattggcaggtgcaagcacagagctcgatcgccatgtctttcaccggcacgcaggacaagtgcaaagcctgcgacaagacggtccacatcatcgacctcctcaccgccgacggcgtctcgtaccacaagacatgcttcaagtgcagccactgcaagggcgtcctctcgattagcagctactcttccatggacggcgtcctgtactgcaagacgcactttgaacagctcttcaaggagacagggaccttctcaaagaactttcaaggtggagcatcttcaaacaagaacgaccaggcaaaggctccaagcaagctatcatctgcattctctggaactcaagataaatgcgcggcctgccagaaaacagtgtatccattggagaagatgactctggaaggcgagtcctaccacaagagctgcttcaaatgctcgcacgggggctgcatcctcaccacgtcctcctacgccgcgctcaacggggtcctctactgcaagatccatttctcgcagctgttcaaggagaagggcagctacaaccacctcatcgagacggcgcagaccaagaagaacgaggccgcggaggccggaccggagccaccggcggacgcaggcgcgggtgagccggaagcacccgcgcaatcggcgtagaacgtacaaagattagcagcaacgcaaagagaaatagagccgtacgtgtctatctcctctatatatacgaaccctgcattattagtaagtagtcgtcacaagtatatgttcttattttgtaaccttggcagcttggttcagtctgggattgtaacaagtgcatgttgaattgcttgttatgtattatgaggctttggattcatgacgatgaaatgagtatatgggtgtaaacatttggcttccaacaaaaaaaatgatgaaaaat

SEQ ID NO: 877 - DNA, 1025 bp, Zea mays
  unsure (1)..(1025): unsure at all n locations
  Clone ID: PAT_MRT4577_125327C.1
ccggccgggcgattgggttactcgaggccggccgggaacctttgcttcttccttccggccgaattgcgagcgagcgttcctctccgtccgcttccgccgtttgcccgtcgatcagttgttggctgccggccgggtactaccgcctgcacgagcagcggctagccacagcccacagacagacgacgtcaggtcttggcaggtgtgcaagcagacagagctcgctcggtcgccatgtctttcaccggcacgcaggacaagtgcaaagcctgcgacaagacggtccacttcatcgacctgctcaccgccgacggcgtctcgtaccacaagacctgcttcaaatgcagccactgcaagggcgtcctctcgattagcagctactcttccatggacggcgttctgtactgcaagacgcacttcgaacagctcttcaaggagacagggaacttctccaagaaattccaaggtggaggtggagcatcttcaaacaagaacgacccggcaaaggctccgagcaagctgtcatctgcattctctggaactcaagacaaatgcgcagcctgccagaagaccgtgtatccattggagaagatgacgctggaaggcgagtcgtaccacaagggctgcttcaagtgctcgcacggcggctgcatcctgaccacctcctcctacgccgcgctcaacgggatcctctactgcaagatccatttctcgcagctgttcaaggagaagggcagctacaaccacctcatcgagacggcgcagaccaagaagaacgagggcgcggaggccgcagaggagccatcggtggacgcaggcgccgcggctgaggcggaagcgcccgcggaatcggcgtagaacgaagagtagccgtgtgtgtatctcctaattatacgaactctgcattcagtaagtagttttcacaaatctatatatgttgttgttatgctgcagcttggttttggtcagtctgggattgtatttgtaacacgtgcatgttgaattgcttattttgtattcgaggcntc

SEQ ID NO: 878 - DNA, 378 bp, Zea mays
  Clone ID: PAT_MRT4577_125341C.1
gttggcggcaccaagaagcaccatggtttccttaagattaacttagagtaaagcctgacgggggtaacagtattcatggatccgcagtgcatgctggttgatgcatgggtctgctgaaaccgaggatgaacacagcactaacaactgccacagtgcgaccttgcagtcaaaaacacaaatgggcaacaacaaacacgacacgaacgaagatatagcctatggactcgggtaaacattactgtagcgaacaggataactcggtcgttcggtcccgaccggtcagtttgttcagatcctgacagagctgccggattcgacgtcacggatgtcaccgtcgtagacgccggcaccaccaccgtagtcgtcgtcgtcaccgta

SEQ ID NO: 879 - DNA, 535 bp, Zea mays
  unsure (1)..(535): unsure at all n locations
  Clone ID: PAT_MRT4577_125744C.1
agaactagccccgccgccggccacgccgccgcctgtaccagcggagtcaagatgagtcggcaccctgaagagaagtgggctcagatgatcgacagggtttacataactgaacagtaacctgatgcctaggacgctaaggcctatctggacactcattatggagactacacattctctggcagggctggtacaaacttatatgaattgaaactagatgtgaatgacgaagtaaacgatgaggctagcgacaataactgtgggtgttaggtacactattgtggattgaacaaaaagctgaggccaaatggaggaataaacttggtccacatgatcagagggcacctcactttgagaaagttgattgggacttgatgggatgacgaagatgatgatggtgttgatgactacttggatggcatggacttctcgaattttgacgcgatgggagggatgcgtggcatggttgatatggctggcttgngtggtcttgctggaatgagtgttatgggaatggatgattctgaggatgatagtg

SEQ ID NO: 880 - DNA, 1524 bp, Zea mays
  Clone ID: PAT_MRT4577_125748C.1
ggcagaggctgcagaagcagaagcccaagccccgccgccagggatcgggcgtaccccggtgcccgttcaccgccgttcacgccgcgtgtgcgctctggctctgccgctctctctccctcgtctgcgcgtggcgcagctgccgtcctatcccaggcgcccccgtctagcctcgccggtgcctccgccgggtcgttctcgggcccttcgccaacgacgagcgcccgctaggtgaaaaggtgcgcattccggttcatcacaccctagtagactgggacgccggtgcccgttcaccgccgttcacgccgcgtgtgcgctctggctctgccgctctctctctctctcctgcgcgtggcgcagctgccgtcctataccaggcgcccaggtctagcctcgtcggtgccttcgccaggtctttctcgggcccttcgccaacgacgagcgcccgctaggttagaaggtatgcattcgtgttcataatattgtatttgactaaaaagactgggcctacgcatgggggctccaaaacagaggtggacttctgaggaagaggctgctcttagagctggagtagccagacatggagttggaaattggcgcatgatattgaatgatccagaacttagctccacattgcgctaccgctcgaatgttgacctaaaggacaaatggcgcaacatgaatgtaattgtcacttcatcgagtactcgtgacagggggagaacttccacgaggagaacccgagctgctcctaagaataatgaccaattgttggcaatgagcacaatcacttctgaggttgatgatgagattgttgatgtaaagcccatagtatcaatgtctgttgaaggatggaatacttcaaattcaaagaaatctcactcaaggctagacaatattataatggaggctataaagaacttgaatgagcctacagggtcccacagaactactattgctaattacatagaggagcaatattggccacctagtgattttgatcacttattgtctgcaaaactgaagtatttagctaccagtgggaaattgttgaaggtgaatcggaagtacaggatagcacctagtttgctggaagacgtgcaaagagaacccttgaaattagggagtgatgctagtagaacccttacaagatcccaagtcgatgctgaattggtccgtatggcaactatgactgttgaggcggcggcggcagctgctgctcatgcagttgcagaggcagaggctatcatggcagaagctgaagcagctgctagggaagcagaagctgcggaagcagaggcccgagctgcacaggcctttgctgaagcagcagttttgacactgaagaacagaaatgctgcgaaattggtatagctcgagtccatgaatcttagatatgccctcttgtccttccacacgtagaatccagttccgtagctctgtatgcaactaattggttactaaaagaacctgaaatcagaagttttcacaaacacaccgacttattcaccgaagattatgatttcc

SEQ ID NO: 881 - DNA, 3054 bp, Zea mays
  Clone ID: PAT_MRT4577_125772C.1
caagagcaagagcaagagcaattactgcaaaaccctaaattagctacgtatagcttctcttctcacccatggccaagtcaagcagctacggccttgggcttgcttgcttcttcgccattgccgctgcggtcgccggcgggacgcagttcatggtcggcggcgccaatggctggagcgtgcccaccgccggcgccgagcccttcaacacttgggcggagaggacgaggtttcagatcggagactccctagtgttcgtgtaccccaaggaccaggactcggtgctgctggtggagccggcggactacaacgcctgcgacacgtcgtcgtacgtgaggaagttcgacgacggcgacaccgtggtcacgctcgaccgctccggcccgctcttcttcatcagcggcgtcgaggccaactgccgcgccaacgagaagctcatcgtcatggtcctcgccgcccgcagcaacggcaacggcaccggcggcggcgcgcgggctccgagcacggcgccgcagccggcgtcaccggcggcatcgccccctcccgccagctcgaccccgcccccgccgtcgtcgcccgctcccaagggcgcgtcgccgcccccggcctctgctcccacaacgtcaccgggtacgacgccgccccctgctccgagcgcgtcgtcgcctgctccggcggggagcgagacgcggacgaggagacgcggaaccagatgatgcagaacctattcggagaccagtcggaggacgaggacgatgcggacgacgacgacggccagcagcaacagctgcagtcacccccgcaccaccaccacgagatagaggacgacgccgatgaagacggcgacgacgcccgcagcgacgcgcctgcccgccacggcggataccactcggaagaagtggatggagaggcagagaatggaggagaaggtgaaggcgaaagtgaggggcaagttgaaatggaagaggaaagtgaaggcgaagctcatcgtgctgaccttgatcaaggagaaagtgatggggacaaagtccatagctccccagaaagagaactccatgaccagaggatggaatctgatgcaaaaggacttggacagtgaagatgaaggctaccagcagaggacagtatctggcagaagaaggggagttattgcctccgaatcggagggatctgaagatagttactatgctgctggagctcaagaagacgaggaacctcgccaaacaaggaaacaaagctctccgttggaggaagaaagagatcatgaagtagttcgggatgtgtttggtgatagcgatgaagatgaaccagctccatatcgtgttcgccatgaaatcgatgaagattctcataggtctcacatggaggatgaaggccattatgagaaggacatgcaaccagatgaagttgtggctgacgaagatatgcgatatgaatctgatgataatcgtgaactgaaaccaaaagagaaaccagtcggtccacccctcggctcggcggcgccgtttggccgtcctcctgctcgaccgcgccgagggcttgtgtgcgtcggaccagacattctgggggttgaccctaaaccctttgatccaaaaacgtatgtggaagaagatgtttttgttacagatgaatctgggactaagaaaaggatacggctagaggacaatattgtgcggtggagaaccattaggaatgcagatggcactacatcttgtgaaagcaatgcacgctttgtaaaatggaaggatgggactatgcagcttctgattggcaatgaggttcttgatatatctgtacatgaggcgcatcatgaccagtcccatctgtttttgaggcatgggaagggaattctacaatcacaaggaaggcttttgcacaaaatgcgatttatgccatcctccttgtcttcaaagtcgcatcgcttattaactgctctggttgattctcagaataagaaaactgttaagatgcaaaaatggtttgagactaaggatcctgagaaagcgaaaatggaaaaagaaagggttttgggccaaaatattcgagcccattcaatccttcaacgcaaaagagaaaaagtgaaccgcaagtacacacagcctgcccggccaaggcggcagctttctccagggttcttggaagacgctctagatgaggatgatgagcctggctatgattctcggcgaatgccaggccgtaggcgttttgaggatgaattggaggctgaagcactagctgagaggcgtatcattaacgcgaagaagtcaaatatgagcagaaatgttccccacaaaccaccgtaccctcctgcccgtccaccgagacgtcaagcggatgaatactcggggagtgagagggaggagtcagagtacgaaacggatggtgaggatatcgaacattcaccgcctcgtggaagaagggaggacgagctggatgaggaggaagaatacgaggaagatgttgaagaagaagaagcgcctctgtcggatgaagaaatggaggcaccgaaacgtaagagagaatcagggggtggtgggcaaaggcgcgaggagctggtgtctgaggaggaggacgaggaccacgacgattctccgccaaggaagcagccggctgtttcgcatcgtagaaaggctgtcgtgtttgatgacagcgacgaggactaaaatttgtaaaacgttggtgtgtgtatgacgacctgacatgatacgcttgcttttttttccccatttgtttaagagaatgattagttatttttcgtcatgctggtgtaatatggttgcaattctacctacagaggtgagattgtacatcgcaagcatgaaacatgaagaaatcgataattggattggagcaaaaaaaaaaaaaaaaaaaaaaaaaaaaaaaaaaaaaaaaaaaaaaaaaaaaaaaaaaaaaaaaaaaaaaaaaaaaaaaaaaaaaaaaaaaaaaaaaaaaaaaagggggggcccgttttaaaggatccaagtttacttccccgtgcttgggaatttatagttttttttttggggcccctaaattaaattccctggccgttgtttt

SEQ ID NO: 882 - DNA, 581 bp, Zea mays
  Clone ID: PAT_MRT4577_125823C.1
actgttattaaacaggatgaagggcgggcctggtgcagtggtagagtctaccgtctgtaaccggaaggtcccgggtttgagccccagcctctgcatattatgcgggtaaggcttggcacttaaagatacccttctccagaccccacacagtgcgggaagcctacggcactgggtacgcccttttactgttatcaaacaggatgaaccaaagataatataataatgacaagaagagtaaaagagtagtaacatatacacgctattatttactaaaagtatcctaacacatgcaagtactgtattcaattgacaaggaaatcatgtacctaatagatgtacataatcaataatgctccatctccctatcattccacccaacaaaaaaatgcacattgcagaattggtttataacaacatcataatgacctcggaagaagctaactctacaactaaaacaacctttggagaaacaaatccaaaggtagccaaaattcatcatgtcacaagttaccacgtgccaccaagagtttcttaatccttaattaagaaaagaacctgctattatttatctgctacagtag

SEQ ID NO: 883 - DNA, 520 bp, Zea mays
  unsure (1)..(520): unsure at all n locations
  Clone ID: PAT_MRT4577_125903C.1
tattgagaccaatngcaacatagaaagccaatagtgtgccaacaatggcagccaaaatttttgcttccttatgctccttggtctttctgcaagtgttgctaccgcaaccattttcccacaatgctcacaagctcctatagcttcctttttttccccatacctctcaccagcggtgtcttcagtgtgtgaaaccccaattgttgaaccctgcaggatccaacaggcattggcaacaggcatcttaccattttcacccttgttcctccaacaaccgtctgtcctattacagcagtttcctttggtccatttggtggctcataacatcagggctcagcaactacatcaacttgtgctagcataccttgctgcatactgttagcttcttcattttctttccttcaaccaactggctgcgttgnactctgttgtttatttgctacaacaattaccgtttcatccagctaggttgctgcctcccccccgttgtttcttccatttngcctacttgcagcttttaact

SEQ ID NO: 884 - DNA, 407 bp, Zea mays
  unsure (1)..(407): unsure at all n locations
  Clone ID: PAT_MRT4577_126100C.1
gtagccgccgccaccgcctccgtagccaccgccgccgccgcctccgccgcgggactgggcctggttgacggtgatgttgcggccgtcgagctccttgccgttcatgttctcgatggcgtttatcatggactgctcagaggagaaggtgacgaggccggacccgcgggacctccccgtctcccggtcggtgatgaccttggagtcgatgacctggccgaagttggcgaaggcttgctcgagggtctcgttgttggtggcccaggcgagcccaccgacgaagcaacggtactccacgtccgccgncgccatatctcccctccacaaaaaccctaacgaaccctaaaccgaggacgaggacttggtaagagggggaggagaagccacccacgcgtncgcccacgcgtccg

SEQ ID NO: 885 - DNA, 238 bp, Zea mays
  Clone ID: PAT_MRT4577_126197C.1
ctttctgcaagtgctgctacggcgaccattttcccgcaatgctcgcaagctcctataagcttccttctttccccgtacctctcaacaggggggtcttcgggatgtgaaaaccccattcttcaaccctacagggtccaacagggaatcacagctggcattttaactttattaaccttggttcttccaacattattagccctattacatcaggtacctttgggggatttattgggacaaa

SEQ ID NO: 886 - DNA, 1325 bp, Zea mays
  unsure (1)..(1325): unsure at all n locations
  Clone ID: PAT_MRT4577_126268C.1
acgaggaccggacgacgatgcgggggcggggctcctcgggcgcgcgcatgagcnangggnacgcggcggaggcggcagtnggcgcggtcgggtgcggctacgacctgacgggggncctccgcctgggccgcgccaagcctggtggccggctcgtggacctcgacggcgccgggaagtgggcggggacgtccccgtcgccgcgggagctggcgttccccggcggggccgccgtggcgggcgtgccggccggggtcgtcgccggcaagggcgagcgcgcgcggttccgctccgacgtgctccccttcgcgcagatggcggaggaggtgaaccgctcgctgtcgctgcccgccagcaagatcccctcgggcgccttcaacgccatgttcgactaccgcgggtgctggcaccgcgacgccgccgccacgcgcagcctctgcttcgacgcccgcctcgtcgagctctacagcgtcgaggccgtgcgcgccagcctcgccctcagggaccacgtcaggcgggacctcccgcccgtctgggaccccgccgcgctcgccgagttcatcgacaagtacgggactcacgtcatcgtcggggtgaagatgggaggcaaggacgtggtgtgcgtgaagcagctcaagggctccagcctcacgcagagcgacgtgcaggcccggctcaaggagctcgccgacgacaggttctcggaggattccacagcaagttccaattcttccaccgcgggaggcggcaggttgtcgcaggggctaaacgttgggcccggatcggccgcctggcagtccttcagatcacccgtcgtgtctcacaaggatgacatggtgtgcattcacgtcaggagaggcggcgtcgacagcgggcagggccacggcaagtggctctccaccatcaccggcttcccggacgtcatctccatgtcgttcgtgcccataacgagcctgctcaccggcgtccggggcagcggcttcctcaaccacgctgtgaacctctacctcagatacaagccgcccatagaggagctgcagcagtttctcgagttccaggtgcctcggctctgggctccagagttcggtcagctcccgctctcgctccagaggcggaagaacatcctgccgtctctccagttcaccctcatgggccctaaacttcacgtcaacactgccaaggtcgactcctgcctccgcccggtgaccggcatccggctgttcctggaaggcaagaagagcgaccagctgggcgtccacctgcagcacctgtcggcgacgcccagcgcgatcacggtgctcagcgaggccgcgtcctcggcggacgac

SEQ ID NO: 887 - DNA, 431 bp, Zea mays
  Clone ID: PAT_MRT4577_126272C.1
ctccgctgcagcagcgcccggagcctccgttttcctttttctgcctccctatggaagggggccgacagaggcagatatcgccctcgattctaccgcgattcgttcgaccacgagcgggattccctccgccaagcgcggatctgaacgctgcactccgtgtcgtcgctcgaatacgacatgaagggggccaaatacaagggcgccgtcaaggtcgatgccaagctggcggtgaagagcaagggggcggagaagcccgccatgggcaggaaggggaaggccggctaggaccccaacaagcctaagagggcttccagcgctttcttcgtgttcatgcgggaatatcgcaaggagttcaagggagaaaaaccctaacaacaagtctgtcgcttgggtgggaaaagctgatggcgacaggttgaaatccctgaacg

SEQ ID NO: 888 - DNA, 221 bp, Zea mays
  unsure (1)..(221): unsure at all n locations
  Clone ID: PAT_MRT4577_126415C.1
tcaacttttcaatgagcttcaaaaatactacctgcgaagacctcgaactggggcacgggcacncaaacaggaaaaaagagatttatttccaatgaatagagaaggctatcatgcaggttttcaggatttccagtatttgctaacaacgttcactcaatacaggcgactacttgtaattgcggaactaaaacatggagacttgtttaactttgccaatattt

SEQ ID NO: 889 - DNA, 2606 bp, Zea mays
  unsure (1)..(2606): unsure at all n locations
  Clone ID: PAT_MRT4577_126568C.1
ggggtaccctcgaggccggccggggggcgcccaccgtttccgcccctcgtcctcgcctcttctttcttcgcctcttctgcaccgcgctctcgctcgcccctccgccgcttggcctccaccctcccgctgccggctccgccgattggacttccgcccgtcgctggccgtcggcgcgcccgttcctcgcaggtgaattgttcaggctgaattgatcggtggaagctgtgcattgactatttttttaatctcagaatcaaagagagaaattgaactgggaggctgggaatcgcgagagaagtgatgtctttcgttaggcaagcagacccatcagcgtcctgtgcggagaccacttacatccacaaatttgtgccaccaggaccagttttcccagcacagagatttgtctctggcaccgacttgcttcaccacgggcctcaaccatataatgctgagggctacaagcagtctggtttcaatggcacagcgcctcatgcatttcagagcttttacaatactgatagctatgctgaatctcactttaatgaagcaccatattctcctgcaatcttcgatatatctcagcagaactctcaatctttatcggataaccaggcctctgatcttgtagagttcgatgaggatgagatgagagtaaagcttcaggagcttgagcatgctttacttgacgatggtgatgagatcttttttgacttgtcagggagcattaacgatgagtggaatgataacattaagacaaacaatgaatgggtcaataccatgaagaatattgtgagccccgactctccaaaagaggcatcacctgagtcaagcatctgctgtctcgacaacaatgttggagaagcgcggaacccgaaacagttgctttttgactgcgcagaagcgatatccgaaaatagcatcgatgaagcacagtcaatcatagcagaactacggcagaaggtggcaattcaaggagaaccttctcagagacttgcggcctatctcgtggagggccttgctgccacactacagtcttcaggaaagggcatctacagggccctgaggtgcaaggaggcccctactctgtaccagctttcagccatgcagatcctcttcgaaatctgcccatgcttcaggctaggcttcatggctgctaactatgctattctcgaagcctgcaaaggcgaagatgtcgtgcacatcattgactttgacatcaaccagggtagccagtacataactcttatccagttcctaaagaataacagtaacaagccacgccttttgaggataactggtgtcgatgatccagagtcagtgcacagagctgttggaggactgaatgttgttgggcagcgactagagaagcttgcagaggactgtgaggtacggtttgagttcagggcagtggctgctaacattgaagatttgactgctggaatgctaggtcgccgtcccggagaggccctcattgttaactttgcattcctgctgcaccaccttcctgatgaaagtgtctcaattatgaaccaaagggatcggcttctccgtatggtgaagggtctccgaccaaaactagtgacgttggtggagcaggacgcaaatactaacactaccccattcccttccaggttccgggaggtctatgactactattcggcactttttgattcactggatgccacccttccaagggaaagcccagatagaatgaacgtggagcgccagtgcctcgcacgggaaatcgtcaacatcttagcttgtgaaggtcctgaccgtgtggaaaggtatgaagtggctgggaaatggagagctagaatggcaatggcgggctttgtgtcgtccccatttaacagcggcgcgattgatggcataagatctctactgaaatcgtactgcgataagtacaggttcgagaaggtccaggacggtctccactttggctggggcgacaagacgctcgtcttctcttcggcgtggcaatagaagcttgcttgtactattgcctatctgagcactttccagcgtttttaggagcatctggggcaagggctgtaaagagatttctgtcgccgtattgttgacctaccatataagtacactcgtagctaaccttagcgtgctgcctgcctgtaggcttgtgacttgtgaggtctacggtttacctagtttcttagatgaaagtatgttgtgcattgtacacctactgaactacatgtagactgtagagtcgcgggtgtatttaattttgcccttcttttggaggggcagaatcacaatacgcgtgattggatacctggccgcgtgcgtctgggctctccacattccgttgaccgcatttaaccagtgattggtgggctgtatgtatggaggcgagcttgcacgcaccgatgcaactcagtggctttttgttgtgtcaatttgcatgcgtggagatacggtgagggagcatccctgcgcatccagaccaccgcgagccttgcgcccacgagctggacgtcccatcatgctgaatatgtcgacatttgttcgtgtatnaagtactggatgatgatgatgctctaaaaaaaaaaaaaaaagcggcgcttttttttttttttttttac

SEQ ID NO: 890 - DNA, 160 bp, Zea mays
  Clone ID: PAT_MRT4577_126700C.1
gacaacaaaattccgcactcaatggttgcttaaaacggggatgtggttatttgctaacacattgatgttgggatgaaacaatggcttaccccgttaattgggccattaaaccattttttacttattccacataaatgggcttaatggacccattatgggt

SEQ ID NO: 891 - DNA, 446 bp, Zea mays
  unsure (1)..(446): unsure at all n locations
  Clone ID: PAT_MRT4577_126775C.1
tttnatggtccaactagaaacatagcaagcgcactggtgtaccaacaatggcaggcgagatatttagtcttcttatgcttcctggtctttctgcaagtgctgctactgagaccatttttccgaaatgctcgcatgcttctatagcttccctatttcccccgtacctttaaccagcggagtcattgtgttgtgaaaacccaattcttcaaccctacaggatccaacaggcaatcacagctggcatcttacctttatcacccttgttccttcaacaattattagtctctattacatcaggtacctttgttgcatttattggcacaaaacattagggcacaactaactacatcaacttgtgcttgcaaaccttacttcctactctcattaacatgtgtttcttccatttaaccaacttgctgaattgaacttttgtttttatttgcaat

SEQ ID NO: 892 - DNA, 2325 bp, Zea mays
  Clone ID: PAT_MRT4577_12685C.1
ctccatttccccccgcaccaaaccagccaaaccactggcgcacgccgaggagagagaaagggggtgtgcggggcggcgaccggcctccgacgacgcggggcgtcgcggcgtcgtggcggtgaagcggatgaggctgtgggaggaggaggacgatgacgaggacgaggaggggatggaagtggacggggaggcggaagatgagccggggtggccgtgtggggcgccggaggcggggcccggcgagacgaggccggcagcgatcctcgtggcggacgcggcggaggtcgacttccccgtcatctacgtcaacgccgccttcgaggccgccacggggtaccgcgcgcacgaggtgctcgggcggaactgccgattcctacaattccgggatccacatgcccaaaggcgacaccccctcgttgatcccatggtcgtttcagagattcggcgatgtctcagcgaggggatcgaattccaaggcgagctgctgaatttccggaaggacggtgctccacttcacaacagattaaggctcgttcctatgcacggcgatgatggctatgtgacgcatgttatcggaatccagctattctctgaggcgaacatcgatctcagcagcgtatcttatccggtgtacaagcaaaagtccagcagcaggcccagcattcaagatctgaactcatctccccacgagcacgctccgaaaatccagagcgcagaccactgcggcatgcttcagttgtcagacgaagttctcgcacacaacatcctatcccgcctgtccccaagagacgttgcgtccatcggatcggtgtgcaccagaatgcatgagctgaccaagaacgatcacctgaggaagatggtctgccagaacgcgtggggaagggacgtcaccgtgaggctggagatgagcaccaagatggtaggatggggccgtcttgcgagagagctaacaactctcgaggccgcctcatggcggaagttcacggtcggagggcgtgtcgagccttcccggtgcaacttcagtgcctgcgctgttggcaaccggcttgtcctgttcggaggggaaggcgtgaacatgcagcctatggacgacacgttcgtgctcaacctggaggccgcaacgccggagtggcggcgcgtcaaggtttctgcctccccgcccggccggtgggggcacactctgtcgtggctgaacgggtcgtggctggtagtgttcggaggctgcgggcagcaaggtctgctcaacgacgtcttcgtcctcgacctcgacgcccagcagccgacgtggagggaggtcgcgagcgagggccctccgctgccgcggtcctggcacagctcatgtaccctggacggctcgaagctcgtggtctcaggtggctgcgccgagtctggtgtcctcctcagcgacaccttcctcctcgacctcaccaaggagaagcctgcgtggagggagatccctacgtcctggtcgcccccgtcccgcctcggccacaccacgtccgtctacggcgcgaccaagctgttcatgttcggtgggctggcgaagagcggctcgctccggctgcgctccagcgacgcctacacggtggacgtcagcgaggacagcccgcagtggaggcagttggccacgacgaccgggttcccaaacgtcagtccgccgccgaggctcgaccacgtcgcggtgagcctgccctgtggacggatcatcatattcgggggctccatcgcggggctccactcccccgcgcagctgttcctgatcgatcccgcggaggagaagccgatctggaggatcctgaacgtgcctgggcagccccccaagttcgcatgggggcacagcacctgcgtggtcggcggtaccagggtcctggttctcggaggccacactggcgaggaatggatactgaacgagctgcatgagctctgcctggcaagcaggcccgacgaggacggctgatgacttcttttcgttgcacttgcacacatatggttcgttcgtctctctctgttttacgtcctatatatgcgcgctatgtcttgtttgtgtatcatctactttcagtctgttgctgcgtcgtgtcggtccgtcggtatgagaaaaaaaaaagcggaaattgattttttaaaaattagtctggatgagtttagtctattttattgtcattggagaagttctctttcatcggtctaggataagattctatggtctatatgtatgtatattttcatgtctcagaaaacacaaaaaaaattattgaaggtccaatgtcttgtactcgtattttgtctacacgtttcaaaactgtgtattatgtcttttggatg

SEQ ID NO: 893 - DNA, 526 bp, Zea mays
  unsure (1)..(526): unsure at all n locations
  Clone ID: PAT_MRT4577_126890C.1
aagggaaattgggagggaggaagtcttcggtccagtcctgtgggtaaagaanttagccctgaagaagaagccantganctggccaatgatacccagtatggtttagntggtgctgtaatttctggtgatcgtgagcgctgccagagattatctgaggagattgatgctggaattatctgggtaaactgctcacagccctgcttctgccaggctccctggggcggtaacaagcgtagtggatttggacgtgagcttggagaagggggcattgataactacctgagcgtcaagcaagtcacggagtacatctctgatgagccgtggggatggtatcgatccccctccaagctgtaaactggcatgaaattttgtttgttccattagaataaatatatctcgatgctatacagaacgaacccgtgtatcaaatggagtatgacattgtgaaaaaggcacatcagcggaacaaatgtcagagttgacaattccctctaatgcaaatagttaactcgcccttgagtaccct

SEQ ID NO: 894 - DNA, 597 bp, Zea mays
  Clone ID: PAT_MRT4577_126925C.1
cgatccaattgtcacttgctctccctgcaacagctaattaaggccggcgcatgcgctcttctagctagatacattattcatggggggagagtaagcaccaccaccaccacctgtttcatcacaagaaggacgaggagcagctcgccccccgacgatacaagcaagtccgccgagtacactgcggccactgtgacggagggggtgcccacggccgacaactagtacaacgagtacaagaaggaggagaaggagcacaagcacaagcagcacctgggcgaggccggcgccatcgccgccggcgccttcgcactctactgagaagcacgaggcgaataaggacctggagcacgcgcaccgccacaagatccatgatgaggtctcggcggctgcggctcgttgttccggcggcttcgccttccacgagcaccactagaagaagaaggaccacaaggaggccgaggaggccgttcggcgagaagaagcaccacttcttcggctgattgatcctcccgaatcgtcgtccctccccgtgtgctacgcgtgcgtgtgagagtgatatcgagcgcccgccgggttttgcgcgcgtacgtatgtatt

SEQ ID NO: 895 - DNA, 1594 bp, Zea mays
  Clone ID: PAT_MRT4577_126939C.1
atctcaaaaattcaaaccgcatcaagcttcccaagaccccagacgaacgccgcgcgctgcacacatcgcccgacccgaaccaaacccttcaaaccccagcgaaaagcgaaggcaatcggaggaacgaatccgcgcgaccaacacgttggcagcagcattaggatccggatccgaagaccgccagcccagagccggaggcgatgaagagaatcggagcactccgcgcactcggcgccgcctctcaacaggccgcgcgggaagcgcaaggccctggccgagctccccaagtccaacggactgaacatgaaccacgactcggcgccgcggccgtcgaagccgagaacgcggtcggcggcgcgagctgaggccgaggcggaggcggcgatgaaacggcggaaggccggagacgccgcgcgctggccgatggacacgaggcagcctgacgctgaagcggcggttgcgccatacgtcggggacatcgaccggtacctccggtccctggaggttgaaccgttgaggaggccaagccatagctattttcaggatatccagaaaaacatctgccccaaaatgagggctatccttgtggactggttggtggaggtggctgaagaattcaagcttcacgcagaaacactccaccttgcggtttcctacgtggaccgcttcctcacaatgaatgtcgttgctcggaacaagctgcaactactgggtgtcactacattgctcgttgctgctaagtatgaagaaattgagtcttctaagatgaaggtggtcaagatggagactgacttactaaaatctcttagctttcagattgggggtcccacagtgacaacatttctacggcaatttatagcttcgtgtcgtggaggcaatagtgcaagcagaggaaaacttgagtttgtgtgcagctaccttgcggaattgagcttgctggattatgactgcataagctatctaccctcagtagttgctgctgcctgcttgtttgtagccagattcataatccacccaaagactcgtccttggaacttgtcacttgaacaaagcacgggttatagagtctttgatctgcagaaatccatttatgtcatacatgaattgcagttgacaataaggtgcccaaatcaggtagccatcagggagaagtacaaggaccccaagtttgggtgcgtgtcgacaatggtttcaccacgagaaatccctacgtctttccttgaaggttgccataagtgaagtccggacttggacttggagaagggtttttgcagtaatgctgctggcgagtggcgatgcagaaaatagcttgatggtaggataatttaagggtaggtcggaaaatataccatggccagcgttgtagatcgttggtacggtactggtctcacagttggtagaatatgcaattgaaggctttttgtacaggagttaggctagtccgtgacacacacgtgtgcatcctctatggtctgtctttgcgcacattatgccgagcgccgaccatctcgtgctgttggcctgtctcaattaccaccagacatttgacacgtggaatctttttaagattcaatttttaaaaattgtatttctc

SEQ ID NO: 896 - DNA, 377 bp, Zea mays
  Clone ID: PAT_MRT4577_126959C.1
cgcatgcagaatatgcatttttcgcccacctgcggtgcgactactgctgctgggggaagggaggctgaaaaggaggcccttgctcccgaccgccgcccgaatcatagtcgtattaaccaccacccatggcggacgtgcacataacctttggtgcgccgtaacgaggaagaaggacttggaggactacttggtgaagttccggtggatactaacgatctttggggtccttactatttcaactctgatctacttcaacatcgtcctgggcgacatgtggtccgtcatgaattcagagaaaaagcgctctaatcagcacgacaagaacgtgcataaggtcgggaatcggctcaagcagatgaacccgaagaatgacggtc

SEQ ID NO: 897 - DNA, 810 bp, Zea mays
  Clone ID: PAT_MRT4577_127009C.1
agtctatactaggagctttggttcttatacttcgcgagaagagattttcctctcagaagcttggtagctttatggagttggcattcggcggacgatatgttattcttctgatggcaatattctaatatactgtggccttatatacaatgagttcttctcagttccattccatatatttggcaaatctgcatatgaatgccgggacaaaagctgcagcgatgcacatacttttggtctcatcaaagtccgtgaaccctatccttttggggtggacccaagctggcgtggaagtcggtctgagctaccctttctaaattcattaaagatgaagatgtctatactaatgggtgttgcccagatgaacctggggattgtattaagttattttgatgcacgatatcatggaaatgctcttgacataaggtatcaattcataccacagatgattttcctcaatagcctttttggttacttagcactcctgattcttatcaagtggtgcacgggctctcaagctgatctttatcatgtgatgatatatatgttccttgatcctgctggagatcttggagaaaatcaactgttctggggccaaaaggaacttcagatattgttgttacttctggcttgatcgctgttccgatgctcttcccaaaaccttttatctgaaaaacttcataggagagattcaggtcacacttatcgttctaggacatctgaaatggatccagattctgacctgattcgccgagcacgtatgatgatttcaattcagcgagttttgtgcatcaatgatacatccattgagtt

SEQ ID NO: 898 - DNA, 191 bp, Zea mays
  Clone ID: PAT_MRT4577_127074C.1
ggtccgtgaggttctccggggttcggttgcgtgggtgagcggatcgagatgacagcgtcgcgggttgagtaccgctgcttcgtcggcagtctctcctgtaccaccgacgaccactccctgcacaacgcctttagcacctacggtgaggtacctggagtccaagaacaatactctatctggagacgcatatg

SEQ ID NO: 899 - DNA, 377 bp, Zea mays
  Clone ID: PAT_MRT4577_127114C.1
ttcactcactctcgctccatttccccatatgccagatccaatttgagaggtctcccttctatgcggccatggggctctctgaggagaagacctggtctggacgggagtacaaggtcaaggatctgtcgaaggcggacttgggccgactcgagattgagttggacgaggaggaaatgccaggtctcatggtgtgccgcgccgagttcggcccgtacaagcccttcgacggcactaggatctcgggggctctccacatgaccattcagaccgtcgacctcatcgagaccctcaccgcgctggggcaccaggtcctatggcgctcactgcaacatgttcttcacgcaggaacacgccggcgtcgccattgcgcgcgactg

SEQ ID NO: 900 - DNA, 218 bp, Zea mays
  Clone ID: PAT_MRT4577_127137C.1
agcatacagacgaataatctctacttcactttactaacaccagctagcaactctttctcggctgcaggaatggccgctcgctcctactcctaccagccgcagctggtcgcagccgctgaggtactggcagcggagctgatgctgctggcggcggcggccgagacagcgtccgagctgtgagctgcagacaggtgacgtcgtcagaggcgccgagcctc

SEQ ID NO: 901 - DNA, 345 bp, Zea mays
  unsure (1)..(345): unsure at all n locations
  Clone ID: PAT_MRT4577_12720C.1
gcaaggcaagtccccgttgcgcggagctgtcacctgacctgactgccgtcccgggggcgggtccatactaacgctgttacggggccgcccaccgcgacggaacggaaaggtgctgtctacccaccccgtcccagncccatcaccgacgagggccgtgtggataaacaaacccagcggccccagccccctgttcacctcattcccttccttgctttgctcctcccctgcctagactctctcccctatcctcaactccagctcctgctcagcccgatagcgtccaactgcacgcgcgcctactatagccaataatgacagcccgaaggacgcaccgggtgcactgat

SEQ ID NO: 902 - DNA, 353 bp, Zea mays
  unsure (1)..(353): unsure at all n locations
  Clone ID: PAT_MRT4577_127230C.1
ggcttctccttcccctcttatcaagacctcctgcgctgagggtttcttagggttttgtggacaggcnatggcggcggctgatgtggagtaccgatgcttcgtcggcggacttgcctccgccaccaacaacaagtggctggagaatgccttcacctcctacggcgagatcctcgactccaaggtcatcaccgaccgggagactgggaggtcccgcggcttcggcttagataccttcttctacgagaactccatgctcgacgctatcgagaacatgaactgcaaggagctgcacagccgtaacatcaccgttaaacaggcccagtcccgtggcggcggccgctgtagccgccgcc

SEQ ID NO: 903 - DNA, 366 bp, Zea mays
  Clone ID: PAT_MRT4577_127244C.1
ggtggattctccttcccctccggttctggttcgggttcaagaggttctgcggaatgggagttcgtgggtgagcggatcgagatggcggcgtatgatggtgagtaccgctgcttcgtcagcggtctaatctgggccacggacgaccacttcctacacaacgccttcagcacctacggcgaggtcctcgagtccaagatcatacttgatcgggagacgcataggtcccgctgtttcagctccaacaacttgtacacggacgaggcgatgcagaacgccatcgagggcatgaacggctaggagctggacagccgtaacatcaccgttaacgaggaccagtcccgatacggtcgttgacgccgaaaccgt

SEQ ID NO: 904 - DNA, 536 bp, Zea mays
  Clone ID: PAT_MRT4577_127500C.1
gaatacatggacattgtacttattcaactacaagcatgcccatcgcttattacaatgctagcaataaagggtacgtcgaaataaacagggtgcccatccagcactgatgtgttagccaccagtgttgttctcttcatgacagactcctcacggccatcaggcaatgtcatcgtcaactggggaaagtccatgagaacctcagccatctcgtttcctcgttcaccacagcccacataaaccacagcttcggaattggagtacttggaaagtgcctgactaatgacagttttaccacagccaaatgctcctggaatagcacaagtgcctcccagaaccgaggggaatagtgcatccagtacacgctgccctgtcagaagaggtgtatccgcagcaagcttcgatgcaacaggccttggtgaacgcacaggccatgtctgaagcatggtaaatttcttttttatgccctgaaattccaattctagcactgtgtcctgcaggttgtactggccagctggtgcaatgtaacttattttccc

SEQ ID NO: 905 - DNA, 3844 bp, Zea mays
  Clone ID: PAT_MRT4577_127502C.1
tttttttttttttttttttttttccaaaaaggcaacatagttttttcaacaaacaaataaacatgacgctgatgtttgaatacatggacattgtacttattcaactacaagcatgcccatcgcttattacaatgctagcaataaagggtacgtcgaaataaacagggtgcccatccagcactgatgactaaaatagtggtggcaaagaaatgagtagcggtggggaaaattctcatacatggtctcaatctacaacttccgtaccttataaaacatttggcagccattattgtcttacacaaaatctacagcagttcaccgtgcctcatcttctaggttgcggaacccagtggtaaggtcgtcgtacagtttcttaaacttgccgaccaaagcttcttcgccttctgcaggatcctcgaacttttgggatactaggcgataaaatagatcccccaaccgatgctttatgacactgtatgttatcttatggccgtcagtaccagctgcccgctccacagcctgatttgccaatgtgttgaagtgaataatgttgcgcatcatccaaacggatttgtagaatgggcagaacttatcatatggggtgaatgcattttgtgccaaataatcttctctcaaaagctttgctgtctccagcgtaatcttgtcagattctgccagcgcatctttaccaacaagctgcacaatttcattcagatcgtcctccctctgcaacacctcacgtgcttttgtcctaatatcaatgaaatctggatcaaatttctcgtaaaaagactcaagggccttggagtatttcgaataggaaatgagccaattcacagatgggaaatgcttcctttgagcgagctttttatctaaaccccagaagacctgaacaatactgagggttgcggaggtaacagggtctgaaaaatcaccacctggaggagagacagctccaacaattgtgacactgccagtcctgtctggacttcccaggcatttcaccttaccagcacgttcataaaaggatgccaaacgcgcagccaagtaagctgggtaaccactatcagcaggcatttcagccaaacgccctgagatctcacgcaaagcctcagcccatcgtgaggtggagtcagccatcatactaacgttgtagcccatatcacgaaaatactcggcaattgtaattcctgtataaatggaggcttcacgagcagcaacaggcatatttgatgtgttagccaccaaggttgttctcttcatgactgactcctcacggccatcaggcaatgtcatcgtcaactgggggaagtccatgagaacctcagccatctcatttcctcgttcaccacagcccacataaaccacagcttcagaattggagtacttggaaagtgcctgactaatgacagttttaccacaaccaaatgcccctggaatagcacaagtgcctcccagaactgaggggaatagtgcatccagtacacgctgccctgtcagaagaggtgtatccgcagcaagcttcgacgcaacaggccttggtgaacgcacaggccatgtctgaagcatggtaaaattcttttttatgccctgaaattccaattctagcactgtgtcctgaaggttgtactgaccagctggtgcaatgtaacttattttcccccaaagaaactaggtgttggagatgtcatcacaggtggagatctatacgctactgtctttgagaacacattgatgcagcaccatgttgctcttccaccgggttctatggggaaaataagttacattgcaccagctggtcagtacaaccttcaggacacagtgctagaattggaatttcagggcataaaaaagaattttaccatgcttcagacatggcctgtgcgttcaccaaggcctgttgcgtcgaagcttgctgcggatacacctcttctgacagggcagcgtgtactggatgcactattcccctcagttctgggaggcacttgtgctattccaggggcatttggttgtggtaaaactgtcattagtcaggcactttccaagaattccaattctgaagctgtggtttatgtgggctgtggtgaacgaggaaatgagatggctgaggttctcatggacttcccccagttgacgatgacattgcctgatggccgtgaggagtcagtcatgaagagaacaaccttggtggctaacacatcaaatatgcctgttgctgctcgtgaagcctccatttatacaggaattacaattgccgagtattttcgtgatatgggctacaacgttagtatgatggctgactccacctcacgatgggctgaggctttgcgtgagatctcagggcgtttggctgaaatgcctgctgatagtggttacccagcttacttggctgcgcgtttggcatccttttatgaacgtgctggtaaggtgaaatgcctgggaagtccagacaggactggcagtgtcacaattgttggagccgtctctcctccaggtggtgatttttcagaccctgttacctctgcaaccctcagtattgttcaggtcttctggggtttagataaaaagctcgctcaaaggaagcatttcccatctgtgaattggctcatttcctattcgaaatactccaaggcccttgagtccttttatgagaagtttgatccagatttcattgatattaggacaaaagcacgtgaggtgttgcagagggaggacgatctaaatgaaattgtgcagcttgttggtaaagatgcgctggcagaatctgacaagattacactggagacagcaaagctactgagagaagattatttggcacaaaatgcatttaccccatatgataagttctgcccattctacaaatccgtttggatgatgcgcaatattattcacttcaacacattggcaaatcaggctgtggagcgggcagctggtactgatggccaaaagataacatacggtgtcataaaacaccgtttgggcgatctattttatcgcctagtatctcaaaagttcgaggatcctgccgaaggtgaagaagctttggtcggcaaatttaagaaactgtatgatgacctcaccactggtttccgcaatctcgaagacgaggcacggtgaactagtgtagattctgtgtaaacaaggactgccaaatgttttataagatacataaattgtagattgagatcatctgtaagaattattcccaccgttgcaccatctcttcgccaccactgttttagtcatcggtgcctgatgggcaccctgtttatttcatgtatcatttattgctgtcattgtaataagcgatgggcatgattgtagttgaataagtacaatgtccatgtattcagacaccagtatcgtgcttatttaactacaatcatgcccatcgcttattacaatgacagcaataaatgatacatgaaataaacagggtgcccatcaggcaccgatgactaaaacagtggtggcgaagagatggtgcaacggtgggaataattcttacagatgatctcaatctacaacttatgtatcttataaaacatttggcagtccttgtttacacagaatctacactagttcaccgtgcctcgtcttcgagattgcggaacccagtggtgaggtcatcatacagtttcttaaatttgccgaccaaagcttcttcaccttcggcaggatcctcgaacttttgagataccaggcgataaaatagatcgcccaaacggtgttttatgacaccgtatgttatcttttggccatcagtaccagctgcccgctccacagcctgatttgccaatgtgttgaagtgaataatattgcgcatcatccaaacgaatatgta

SEQ ID NO: 906 - DNA, 2725 bp, Zea mays
  unsure (1)..(2725): unsure at all n locations
  Clone ID: PAT_MRT4577_127503C.1
ttcggccgggtattctggtgtcctaggcgtagaggaacccaccaatccatcccgaatttggtggttaaactctactgcggtgacgatactgtaggggaggtcctgcggcaaaatagctcgatgccagaatggccctcctccccatcgcgtctgtccgctacccctccccgaccagatcgctacgagacgccgcgcgatccgacccaggccgacgccgacgacccctctcgccgccggcggccatggcgtacggcgaccggcgtcaccaccttcgaggactccgagaaggagagcgagtacggctatgtccgcaaggtctctggacctgtggttgtggctgatggaatgggtggtgctgccatgtatgaacttgttcgtgtcggacatgataacctcattggggaaattatccgtcttgagggcgattcagctacaatccaagtttatgaggaaacagctggactgatggttaatgaccctgtattgagaacaagaaagcctctttcagttgaattgggacctggaattcttggaaacatttttgacggtatccagcggcctctaaaaaccatcgctattaagtcaggagatgtgtatattcctcgtggtgtttcagttcctgcccttgacaaagatgtattgtgggaatttcagccaacgaagctaggtgttggagatgtcatcacaggtggagatctatacgctactgtttttgagaacacattgatgcagcaccatgttgctcttccaccgggttctatggggaaaataagttacattgcaccagctggccagtacaacctgcaggacacagtgctagaattggaatttcagggcataaaaaagaaatttaccatgcttcagacatggcctgtgcgttcaccaaggcctgttgcatcgaagcttgctgcggatacacctcttctgacagggcagcgtgtactggatgcactattcccctcggttctgggaggcacttgtgctattccaggagcatttggctgtggtaaaactgtcattagtcaggcactttccaagtactccaattccgaagctgtggtttatgtgggctgtggtgaacgaggaaacgagatggctgaggttctcatggactttccccagttgacgatgacattgcctgatggccgtgaggagtctgtcatgaagagaacaacactggtggctaacacatcaaacatgcctgtcgctgctcgtgaagcttccatttacactggaattacaattgctgagtatttccgtgatatgggctacaacgtcagtatgatggctgactccacctcccggtgggctgaggcattgcgtgagatctcagggcgtttggctgaaatgcctgctgatagtggttacccagcttacttggctgcacgtttggcatccttttatgaacgtgctggtaaggtaaaatgtctgggaagtccagacaggaatggcagtgtcacaattgttggagccgtctctcctcctggtggtgatttttcagaccctgttacctccgcaaccctcagtattgttcaggtcttctggggtttagataaaaagctcgctcaaaggaagcatttcccatctgtgaattggctcatttcctattcgaaatactccaaggcccttgagtctttttacgagaaatttgatccagatttcattgatattaggacaaaagcacgtgaggtgttgcagagggaggacgatctgaatgaaattgtgcagcttgttggtaaagatgcgctggcagaatctgacaagattacgctggagacagcaaagcttttgagagaagattatttggcacaaaatgcattcaccccatatgataagttctgcccattctacaaatccgtttggatgatgcgcaacattattcacttcaacacattggcaaatcaggctgtggagcgggcagctggtactgacggccataagataacatacagtgtcataaagcatcggttgggggatctattttatcgcctagtatcccaaaagttcgaggatcctgcagaaggcgaagaagctttggtcggcaagtttaagaaactgtacgacgaccttaccactgggttccgcaacctagaagatgaggcacggtgaactgctgtagattttgtgtaagacaataatggctgccaaatggtttataaggtacggaagttgtagattgagaccatgtatgagaattttccccaccgctactcatttctttgccaccactattttagtcatcagtgctggatgggcaccctgtttatttcgacgtaccctttattgctatagcattgtaataagcgatgggcatgcttgtagttgaataagtacaatgtccatgtattcaaacatcagcgtcatgtttatttgtttgttaaaaaaactatgttgcctttttggaaaaaaaaaaaaaaaaaaaaaaaaaaaaaaaaaaaaaaaaaaaaaaaaaaaaaaaaaaaaaaaaaaaaaaaaaaacccccnccttggggctttttgttttgcccccaattgggtggggggctttataaaacggagaaagggaaacacccttggcccgtttacttggggaacccaagggaattcccccttgcggaaccttgttgaaatgggaaggggtttgttaaccccaaatttaccggggccgatgcccgaaacccctcttgatatcccccgccgggggagcccggacttccccagggaaagggaggttttgggggggaac

SEQ ID NO: 907 - DNA, 2580 bp, Zea mays
  Clone ID: PAT_MRT4577_127724C.1
cgtcagcccctctctctcccggcgtggggtggccatagcttcgctgcctccacttgtcttctttgtttcaccatcagttcaattcagtttctcgccggtcgccgctggcttgctagttgctactgcgcgcacttcagctgcccgctgttgtaccgcggactctacctcatcattcgccttgctgcctccgccgcctaggtcgcgcaggttcggacgccatgaccgcgacgccggcggtgatcgggctgagcgcccgcggcaaccgcctcctggccacctcattcggttccgctgagctcgctcccccggacgcgtacccgtcgcggcagttcgccgccgcagcgcccaagctcaccgtcgtggcgcaccgcgcctccgcctccgcctcctccccggccgacatcgggggcgccggccacgcgcgcgcgcacgccatccgggcgctcaggaaccactccgcgccggcgctggccccgcctcctccggctgacccggctccggagctggactccaagttcgagttcgagttcgagtcctcgctggaggccatcgtgctgctgcagcgctccatgctcgagaagcagtgggagctgcccttcgaggacgacatctcctccacggaggacgaggacgaggacgagaggtccacggtggtggtggcgcggtcgggcgtctcggcgcggcagcggcggatgagcgggcggcggcggggcgctgtcgttggccggaagagcgtcaccgtcagcccggagctgatgcagagccggaaccgcatctacctccggggcaccgtcagcaaggacctcctcacgcacaagcaggtcgtccagctctccaggaagatcaaggacggcatctggcttcagcaccaaagatccaagctgaaggagaaactgggcaacgagccgtcatacaagcagctggcgcaatcgctgcggataccagctcctgagctgcgagcgaggatgcgcgagtcgtttcttgcgagggagatgctggcgatgagcaacacccgtctggtgatatccattgcccagaagtacgacaacctcggcgtcgagctgccagaccttattcagggtggtctgatagggctgctccgtgggatcgagaagtttgatgcctcaagggggtttaggatctccacctacgtgtattggtggatccgtcagggggtttcaagagcattggccgacaactcgagatcgttcaggctccctacttatttgcacgagaggttggtagccattcgcggcgcaaagtacgcgttagaagaccaaggaattgctccgacaatagagaacatagcagagtcgctcaatatatcggaaaagaaagtgcacaatgctacagaggctgtgaacaaggttctttcactggatcaacaggcgttcccctccttaaacggtctacctggggacacactccatagttacatagaggatcaaaacgtcgcaaatgatccatggcatggatttgaggaaatgtatctcaaggaggaagttaacagtcttataaattcaactctcaacgagcgcgagagggacattattcgattatatcatggcataggaaagcagtgccatacatgggaggatatcagcagacaattcgggttgtcgagggagcgcgtgaggcaggtagggctcgttgcgatggagaagctgaagcatgctgcaaggagggaacatttggatgcgttgcttgaggaatactgagtgagatgttcttcgcttgagtcggttaattccaccgttgcagtggttgtatatactccggaaacataggggggcaggcacatcatccttgaaaggcttcactgccactcactcactctgcagataactatacatgtacatctgtgacgatcagtaggcatgcatagttaaagcatctgtggctgcaaaatcgtcaaggcgatccaacaaaaggagaaccttttttttggtcttggaagctctacaaagtgtgatgtggtatgtatatgcaaatgtaatgtatcagtaattcagtagagcaataacgtttatgtcctggatttgtattcttgtccacctacatagaaggaaaaaatgcttaccacttaaaaaaaaaaaaaaaaaaaaaaaaaaaaaaaaaaaaaaaaaaaaaaaaaaaaaaaaaaaaaaaaaaaaaaaaaaaaagcatgctgcaaggagggaacatttggatgcgttgcttgaggaatactgagtgagatgttcttcgcttgagtcggttaattccaccgttgcagtggttgtatatactcggaaacataggggggcaggcacatcatccttgaaaggcttcactgccactcactcactctgcagataactatacatgtacatctgtgacgatcagtaggcatgcatagttaaagcatctgtggctgcaaaatcgtcaaggcgatccaacaaaaggagaaccttttttttggtcttggaagctttacaaagtgtgatgtggtatgtatatgcaaatgtaatgtatcagtaattcagtagagcaataacgtttatgtcctggatttgtattcttgtccagttacatagaaggaaaaaatgcttacaactgcag

SEQ ID NO: 908 - DNA, 1193 bp, Zea mays
  unsure (1)..(1193): unsure at all n locations
  Clone ID: PAT_MRT4577_127949C.1
gcgtgaggcgtgagtccgtgaccattcccgtcggccgtcccaaaagaagcgcaaatttacaacccagtccaccacgggccacacaatcccaaatctaaccctccgacggcgatggggatctcgagcatgccggagccgcgggacagcctgctggggtacctggtgtacaacacggtgatctcgatcgcggcgctggcggggctggtgcgggcggcgctggtgttcctggacctgcaggccgcgctgccgcccggggacgacggcggggaccgactggcggcgtcgggcccgggactggcggagcggttcctcagggccttccggccggcgctgtacgaggtgctggcgtcgacggcgacgacgtgcgaggcggacggcggcgccgacggcgacgactgcagcgtgtgcctggccgggttccgggcgagggccgtggtgaaccgcctcccctgcggccacctcttccaccgcgcctgcctcgagacctggctccggtacgagcgcgccacgtgcccgctctgccgcgcccacgtgcccctccccgccgacgagacgccgctgctccgctacccggagttcgagtgatccggtaaaaaccaccccggccccccaccccccggcgagcggtgaccgcccccgtcgcgcgcgcctcggctgtgtgctgcaagttccgtgtggccttccgtgtacgcgtagcaaaccaaagaagaagaaaaaaaaaagagaaaaaaaaaggtgtaggagcagtagtagactagtagtagtgcagggttgctgtcgcttgctttcccctttcgcttcttgtattccccctcccattctctttgcgttttccgttccgtgctgtcgcctgtagcgtgtaaatactccggttcgcacttggcagcagaggcagagtgtagagtgctcccgtggccgtggctgtggctgatggtgtagcactttttacgagctcagctcgtgtagtacattgcatcctcttctgttcgcaaaaaaaaaaaaaaaaaaaaaaaaaaaaaaaaaaaaaaaaaaaaaaaaaaaaaaaaaaaaaaaaaaaaaaaaaaaaaaaaaaaaaaaaaaaaaaaaaaaaaaaaaaaaaaaaaaaaaaaaaaaaaaaaaaaaaaaaaaaaanggggggggnnntttaaaggaaacaaattttaaaacgggggggagggagaaaaatatttttt

SEQ ID NO: 909 - DNA, 989 bp, Zea mays
  unsure (1)..(989): unsure at all n locations
  Clone ID: PAT_MRT4577_127956C.1
gccgcagcccgcaacagcagcgacacgcaaccccccgttcccctatcacgccacccggctccacggaggagggagaccgttcgccgcagatccttggtctcgatcgcggcgctggcggggctggtgcgggcggcgctggtgttcctggacctgcaggccgcgctgccgcccggggacgacggcggggaccgactggcggcgtnngncccgggactggcggagcggttcctcagggccttccggccggcgctgtacgaggtgctggcgtcgacggcgacgacgtgcgaggcggacggcggcgccgacggcgacgactgcagcgtgtgcctggccgggttccgggcgagggccgtggtgaaccgcctcccctgcggccacctcttccaccgcgcctgcctcgagacctggctccggtacgagcgcgccacgtgcccgttttgccgggcccacgtgcccctccccgccgacgagacgccgctgctccgctacccggagttcgagtgatccggtcggtaaaaactaccaccccggtcccccaccccacccaccccccggcgagcggtgaacggtgacccccggtcgcgcgcgcctcggctgtgtgctgcaagttccgtgtggccttccgtgtacgcgtagcaaaccaaagaagaagaaaaaaaaaaggtgtaggagcagtagtagtggtgtagggttgctgtcgcttgcttattgctttcccctttcgcttcttgtattccccctcccattctctttgcgttttccgttccgtgctgtcgcctgtagcgtgtaaatactccggttcgcacttggcagcaaaggcagagtgtagagtgctcccgtggccgccgtggctgtggctgatggtgtagcacttttacgagctcagctcgtgtagtacattgcatcctcttctgttcaaaaaaaaaaaaaaaaaaaaaaaaaaaaaaaaaaaaaaaaaaaaaaggacggcgctcgcgatnctagaacta

SEQ ID NO: 910 - DNA, 3186 bp, Zea mays
  Clone ID: PAT_MRT4577_127957C.1
attggttttcctagtttttgtacataaacatttggtctatgcgttagtgtctctcacattatccgctatataacattacaattaagattcatctaaatactggtaatttgaaagcgacagacataaaacttgtagatgaattattgtcttccaaaggtaaccgcgaacggatgagtagcagattaacaccagaactgtgaaaaacgaaagaaaagtttggtaagtgaagatggatcgacaaggagaatgaataggagctgatctggaccagagtgatgaaggatcgccgatagaatttgatgagaagagccggcgccggcggagggcgccgggtgcggtacgtgcggaggcgcgtccgggcgggcggatcggccgaacgggagccacgtgccggctttaaacgtaggaccagtggctatttaatcggacggtcgtgcggccgttggacggcgctgggtccaacgcgcggtggtccccccccgctccccgtcgtgcagccctcctctcgcttggcccctgacgccaccgctcccgccgcgattccgcccagttcttttcacgtttcgagtgctccgtaaatccgcactacgtatcccccactcctcccaccgctggccagagaccgtgtaaccgcgcgccgaatgttgcgggatccagtcaaaacttaccccagtcctgttgcgcgtaggccgtactttccacgttccgttaggccgtccgtgtagtcgtaggaagataaacaatcaggtacataagaagttcgacgagtcgttgtccagcggactgaataattggatcccctgcgctgcgctgcgcctcactacccgcacctctcattctctttgctgtttccgttccgtgctgtagcctgtagcgtgtaaatactccggttcgcacttggcagcagaggcagagtgtagagtgctcccgtgcccgtggctgatggtgtagcactttttacgagctcagctcgtgtagtacattgcatccttcttcctatccaaacaagatagagccagccgcagctataaaaatgcacgccaccccccctcgccgtgggggtgtgtgtgtgtgaccgtgcgtgaggcgtgagtccgtgaccattcccgtcggccgtcccaaaagaagcggaaatttacaacccagtccaccacgggccacacaatccccaaatctaacccctccgacggcgatggggatctcgagcatgccggagccgcgggacagcctgctggggtacctggtgtacaacacggtgatctcgatcgcggcgctggcggggctggtgcgggcggcgctggtgttcctggacctgcaggccgcgctgccgcccggggacgacggcggggaccgactggcggcgtcggcgcccgggactggcggagcggttcctcagggccttccggccggcgctgtacgaggtgctggcgtcgacggcgacgacgtgcgaggcggacggcggcggcggcggcgacgactgcagcgtgtgcctggccgggttccgggcgagggccgtggtgaaccgcctcccctgcggccacctcttccaccgcgcctgcctcgagacctggctccggtacgagcgcgccacgtgcccgctctgccgcgcccacgtgcccctccccgccgacgagacgccgctgctccgctacccggagttcgagtgatccggtcggtaaaaactaccaccccggtcccccaccccacccaccccccggcgagcggtgagcggtgacccccggtcgcgcgcgcctcggctgtgtgctgcaagttccgtgtggccttccgtgtacgcgtagcaaaccaaagaagaagaaaaaaaaaaggtgtaggagcagtagtagtagtgcagggttgctgtcgcttgctttcccctttcgcttcttgtattccccctcccattctctttgcgttttccgttccgtgctgtcgcctgtagcgtgtaaatactccggttcgcacttggcagcagaggcagagtgtagagtgctcccgtggccgccgtggctgtggctgatggtgtagcactttttacgagctcagctcgtgtagtacattgcatccttcttctattcaattctccccgactggctaaaatatcgaggattgttttggaattggaacggttgtgtgtgcgtgcagtgcatactgtaataataactccacagcaaaaattacagcaaaatctgcagaattcatgtgcgaaacacgaaggcatcttctacgtacgggtgttccgattcgttgaaaggcacggattggttgggcgtttgcttagacggggctgcgacaggtcacatggacgacggcgtggtggagtggtacgtgcgtgggccccggcgtcgccgatggcacatgcggtcctcgcacccgaaaggaacctcgcgagcgtgcgtgcagtgcaccaggccaggcatcggaatggatcaagaccaaccgtactgcacgtctgcaccggaagccggaagggatgaacatgaaccccggaaaagaggcgtcacagtcacagcagcatggcggcagaggcacgatacacgacaggagaagcaccatagctacaagagcacaggtgcgttggatgaggacgcgcagtagccgccagttctcatccgatccacggtacgggggcatggcttttgtcgcatcgcgccgcgcgaggatttgcctccttcggccttcggggtgaagtcgaaccggtgcgccgaccgcggagtgagtgagcgagtgagcgagcgagcgcaggtccttgttgtcgctcgcacaccaccgtccaacagcacgcagtacgcgactgcgagcagcaagtttgttgcgacgtcggcttcagaccagaacgtcgcgttgtgcaggcaggcaggcaggcatatcatcagcgcctggcttggcttctccactccacccagccagcgtcatctgataaagcttggccggctggcctcgtccgacagacgaagcaagcaaagcaaacgcgcgttttttgcctgtgtggactttggagtgtagacacgccgcacgcagtcacgagcacgcacacgcacagtaagcagctggagataaacgtggttcgagttggatgggatcggaggcccccaagcaggaacgcatctcctgtctcgcgtcgacacgacacggcttgactcttgagcttgtgttgtgctttggtaaccgatcgtctgcttgctcagc

SEQ ID NO: 911 - DNA, 648 bp, Zea mays
  Clone ID: PAT_MRT4577_128071C.1
gatacacatattattgagaccaactagcaacatagaaagcacaatagtgtaccaacaatggcagccaaaatattttgcctccttatgctccttggtctttctgcaagtgctgctacggcgaccatttttccacaatggctacaagcttctattggtttccttctttccccgtaccttttaccagcgggggttttgggttgggaaaacccaattttttaacccttttggatccaacagggaattggaggtgggattttacctttattacccttggttcttcaacaattattaacccttttacaggagttacctttggtgcatttattggcacaaaacattagggcacaacaacttccacaacttgggcttgcaaaccttggtggcttcttttagcaacaacaggttctttcattcaaccaactagctgtattgaactctggttcttatttgcaacaacaacaacttccattcaagcaggtatctggtggctacccccagcaatttctttcattcaaccaactgacaggtttgaactcttctgtgtttttacacgggcaacaactccttccatttagccaggttgctggtgtgagccctgcgtcctctttgtcacaaccacaattgttggcgttttaccaggacgctgtg

SEQ ID NO: 912 - DNA, 1171 bp, Zea mays
  Clone ID: PAT_MRT4577_128099C.1
cattgggtacctcgaggccggccgggattccccatctcccttcattgctcgctcgctcgctcgttgctcttctccagcagcagctccttcaaatgcaaatctctttgctgccgacgcagagactcgccaaatttccctccctcctcctagccttctcgtcgctcctgttcttctcgcatcctgctctcccatccccatccccagcccaggtggtgtcccctgtcgcgttgatgcatgctccctcggcggtggccttgagctgaggcggcggagcgatgccggactcggacaacgactccggcgggccgagcaacgccgggggcgagctgtcgtcgccgcgggagcaggaccggttcctgcccatcgccaacgtgagccggatcatgaagaaggcgctcccggccaacgccaagatcagcaaggacgccaaggagacggtgcaggagtgcgtgtccgagttcatctccttcatcaccggcgaggcctccgacaagtgccagcgcgagaagcgcaagaccatcaacggcgacgacctgctgtgggccatgaccacgctcggcttcgaggactacgtcgagccgctcaagcactacctgcacaagttccgcgagatcgagggcgagagggccgccgcgtccgccggcgcctcgggctcgcagcagcagcagcagcagggcgagctgcccagaggcgccgccaatgccgccgggtacgccgggtacggcgcgcctggctccggcggcatgatgatgatgatgatggggcagcccatgtacggcggctcgcagccgcagcaacagccgccgcagcctcagccgccacagcagcagcagcagcaacatcaacagcatcacatggcaatgggaggcagaggaggattcggccaacaaggcggcggcggtggctcctcgtcgtcgtcagggcttggccggcaagacagggcgtgagttgcgacgatacgttcagaatcagaatcgctgatactcctacgtagaattatacctacctaattgatgacaccgcaccgcacctcgttgtgctgcctgtccttgtacgtttactaattactgctgcctgtatgtaaatcaaaatctgaggctcccatttcgaaacggacggtgaactactcttcccgtttcgtttcatacgagaatcgaactcgttttcaatt

SEQ ID NO: 913 - DNA, 1685 bp, Zea mays
  Clone ID: PAT_MRT4577_12812C.1
atcatggccgtcgcgctcgcgaatggaggaaacaagccgcccgactggcaggacttcgtggggatcatcactctgctcattatcaactccacaatcagcttcattgaggagaacaatgcgggcaatgccgctgccgctctcatggcacgcctcgcccccaaggccaaggttctcagaaatggccggtggaccgaggaggaatcggctatccttgtgccaggagacatcatcagtgtgaagcttggggacatcattccagccgatgctcgtctgcttgaaggggatccactgaaaatcgatcagtctgcactcaccggcgaatcccttccggtcaccaaaggccctggtgatggagtgtactctggctccacttgcaaacagggtgagattgaggccgttgtcattgccaccggtgtgcacacattctttggcaaggccgcacatcttgtcgattcaacaaaccaagttggtcatttccagaaggttctcactgccatagggaacttttgcatctgttcaattgctgtgggaatgctcgtggagcttgtcgtcatgtacgctatccaacacagggcttaccgacccggaatcgacaatctattggtgcttctgattggaggaattccaatcgccatgcccactgtcctttctgtgaccatggcaatcggggctcatcgcttggctcaacagggagcaattactaagagaatgacagcaattgaagaaatggctggcatggatgttctttgtagtgacaagactgggacattaaccttaaacaagttgactgtggacaagagtcttgttgaggttttccaaagaggtgttgaccaagatacagtaattttgatggctgctagagcttctcgcacagaaaatcaggatgccatagatgccacaatagttggtatgctggctgatccaaaggaggctcgtgctggtgttcaagagatccattttcttccatttaacccaactgataaaagaactgctttaacctaccttgatggagaggggaaaatgcatcgtgttagcaagggagcaccagagcagatccttcatcttgcccacaacaagtcggatattgaaagaagggtcagagctgtgatcgacaaatttgctgagcgtggtctgcgagcacttggtgtggcttaccaggaagtgccagatggtaggaaagagagtcctggaggaccatggcagttcattgggctcttgcctctttttgaccccccgcgccatgatagtgcagaaactatcagaagggcactcaatcttggtgtcaatgtcaagatgattacaggtgatcaacttgctattgggaaggaaactgcacgtcgtttgggaatgggtactaatatgtacccttcttctgctttactcggacaaaataaggatgagtcaattgcttctttgccaattgatgatttgattgagaaggctgatggctttgctggtgtctttccagaacacaagtatgagatcgtgaaacgcttgcaagcaagaaaacatatatgtggcatgactggggatggtgtaaatgatgcaccagctttgaagaaggctgatattggtattgcagtagcagattctactgacgcagctcgtagtgcttctgacattgtcctaactgaacctggccttagtgtgattattagtgctgggctgacgagtcgggcaatttt

SEQ ID NO: 914 - DNA, 337 bp, Zea mays
  Clone ID: PAT_MRT4577_128163C.1
actagaaactcagtgccacatagcatgatttatccaatgtcaatgcacttacaatgcaaaaggaataagattagcccccgtacaggtacattcttatgcctgtgctgactgtcaaaacataagaaagaccagtgtgtttttaaacgaacaaagccaatcatcgcatggttcgatcatctcatatgagctatcccagcacttacaagctcctgaatcttctgtataacccaggcgttcttcaggagctcctgtgacggactaggactctcctggacaatattacaacctgcaccatgataaggtcggtaacaatgatctgtacctatggatcttgcat

SEQ ID NO: 915 - DNA, 1474 bp, Zea mays
  Clone ID: PAT_MRT4577_128306C.1
cgcttcctccctcccccactactccactagtcggattgctccgattgcccgcgggcacccatgtcgtgccccctcatgccgcttcctccggggctcgccgtatgtgaacaagcaaggaagagccagaggcgagcgagcaagccgcgggcggcgggggcgggactgaccccacccatccaccgagctgccctgctacacggtcccctgccaagatccatcttcccggttccgccgcctgatcgaagtgaacaagcaaggaagagccatggcgagcgagcacgcggcggggggcgaggctaagcatgaccagaagcagagcctgatggacaaggcgaaggggttcgtcgcggagaagatcgcgcacatccccaagcccgaggcgacgctggacggcgtgacgttcaagggcctgagccgggagtgcatcacgctgcacagcagcgtgaacgtgtccaacccctacgaccaccgcctccccatctgcgaggtgacctacacgctccggtgcgccggcaaggaggtggcgtccggcaccatgccggaccccggctggatcgccgccagcggctccaccgcgctggagatccccgccaaggtgccctacgacttcctcgtctccctcgtcagggacgtcggccgggactgggacatcgactacgagctccaggtcgggctcaccgtcgacctccccatcgtcggcaacttcaccatcccgctctccacctctggcgagttcaagctccccaccctcaaggacttgttctgatctagtagtagctcgcttgccttgtgttctgtgcgggcgcgcaccagcgatctgtacgacgagcttttgcaaataaacgacgcagctcctctgttctatatatctcaatgaatgcctaagctaaggggatggatggtttaatttgactaaataaagagctggatttcattcaggttcctgtctctaagctggatttcattcgggcatccaccgtgatctggatgtgcctgccgcgtccgtccacaagcccacctttaatttgcccctaaagataaggtgaggtagatgacaaagaaaactaagggtgtgtttggcatggctctgctccaccccagagcagctctactctaaaactctgggtggagcagctctgctccagagtttagattgtttctcataaccagtggcaatggcgggtaaataactcaaaactccatgactaggttgcttttttggagttttcagagcagcaaaagaggtactccaaaaaattgtactgcagctccaaaaactccatagagtttacaactctggagttagggtgtttggcatgctttggccagctcctccttggagttttgctctggagccatgccaaacaggccctaatactccttccgtttctttttagttgtcgctggatagtttaactttacactatacggagggtgtaataaccttacattatagccatcatatatgcccatt

SEQ ID NO: 916 - DNA, 586 bp, Zea mays
  Clone ID: PAT_MRT4577_128341C.1
gttggcttctcctccccctccggttcgggttcgggttcgaggggttctccggggttcgggttcgtgggtgagcggatcgagaggcggagtaagatgttgagtaccgctgcttcgtcggcggactcgcctgggccacggccgaccactacgcagcacaacgccttcagcacctacggcgaggtactcgagtccaagatcatcctcgatcgggagacgcaaagggcccgaggattaggttatcacaccttctccacagcagaggcgatgcacgaacgccatccagggcatgaacaggaaggagctggaccgccgtaacatcaccgtcaactaggcccagtcccgctgtggcacaacgaggcggccgcagtgggtacagtggtggccgtggaggcggcggctactgctgaggcggacgcccagatggcgggggaaggtactggggcggcagcggctaccggggcaacgcgttactaccgtggcggtggctgaggctacggcgggggcaaccgaggcgggggctacagaaactccgaccgcgaactggaagaactgaacggtggggcccgctcggacaagttatcctgaa

SEQ ID NO: 917 - DNA, 1588 bp, Zea mays
  Clone ID: PAT_MRT4577_128747C.1
ttgggtacctcgaggccggccggattgggccgcgggactcggcgacaggccttttgtagaccgcagccggcaccatctcttgccgcaccccccattcgaacgccggagctcgacaaggacgaccgacgacgcacgcggagatccggcgtactgcaaattttgaaaactgaactgtaagatggcatcagcagagctttcccgtgaggaaaatgtgtacatggcgaagctcgctgagcaggcggagaggtacgaggagatggttgagttcatggagaaggtagccaagactgttgactcggaggagctcactgtggaggagcgaaacctcttgtctgttgcatacaagaacgtcattggagcccgccgcgcctcatggcgcatcatctcctccatcgagcagaaggaggagggccgaggcaatgaggaccgagtaacactcatcaaggattatcgtggcaagattgagactgagctgaccaagatctgtgatggcatcctcaagctgcttgagacccatcttgtgccgtcttccactgcccccgagtccaaggtcttctatctcaagatgaagggtgattactacagataccttgctgagttcaagactggagctgagagaaaggacgccgctgagaacacgatggtggcatacaaggctgcccaggacattgctctggctgagcttgctccaactcaccctattaggcttggactggcacttaacttctcagtgttctactatgagattctgaactcacctgatcgcgcctgcagtcttgcaaagcaggcttttgacgaggccatctcggaactggacaccctgagcgaggagtcctacaaggacagcactttgatcatgcagctccttcgtgataacttgaccctatggacctctgacatctcggaggaccctgctgaagagattagggaggcgcccaagcgggactcgagtgaggggcagtaaagccggctttatgtgcctagaaactagtagctagtgtttgctgctgtcgaatgacactatgcaatgtgatctggaacctggtttcttgggtgcgacgcttgtagccgtgttatgactgtcgtccgtaaaatttgggggctccccgtaagggatgctgcctggcaaggcctcggtgtcccacctcgtctgtggcgtggggcgctggagcccggtctggttgggttgggaagccctttaaactgttgtcacttgcattttaccttttccatcgctgtttattgtgagtggtcctatatcaatggctggtctcagtggtctatacgtatgctttttggttctcttgattcctcacagggtgagtgggggcatgagcatttctctgtctcatctcaatgatgtaagttttctgtttggtgtctcgttccaagatgacttcagaatccgtaaatctctgaagtctaaacgctctatctaaacctttggattcgattacaattgtagatatagaaatctgtagaagggtgcaattcagaatactttgccatgaaatgaatatccttcttgtgagactctgtattaagactaaaacagctcaaattgatagagattctgtgattccttccc

SEQ ID NO: 918 - DNA, 1842 bp, Zea mays
  Clone ID: PAT_MRT4577_128748C.1
cccacgcgtccgcccacgcgtccgggtttccttcctcctccagtgctgtcatcgccgccgccgccgccccggtttccttcgtaagcccgtcgtcctccgtccgcgactctgcgcgagaagcgagagtatggacacccaagtgaagcttgctgttgtggtgaaggtgatgggaaggaccggctccaggggtcaggttacccaggtcagagtgaagttcttggatgaccagaaccgtctcatcatgaggaacgtcaagggaccggttcgcgagggagacatcctcacactgctcgagtctgagagggaggctaggaggctgcgttgaggcggaatagtgtcttggtagttttcgtatggagttggatgaccagaaccgtctcatcatgaggaacgtcaagggaccggttcgcgagggagacatcctcacactgctcgagtctgagagggaggctaggaggctgcgttgaggcgggatactgtcttggtagttttcgtatggagttggatgtcatctaattgtgctatgtttggcaaactttggtatgacctttaaaacacctgccttgtatgattatttgtgagcctggtggtaagattgcagtttggtttttaaaaaaaaaaaaaaaaaaaaaaaaaaagccgcaccccccattcgaacgccggagctcgacgaggacgaccgacgacgcacgcagagatccggcgtactgcaaattttgaaaactgaactgtaagatggcatcagcagagctttcccgtgaggaaaatgtgtacatggcgaagctcgccgagcaggcggagaggtacgaggagatggttgagttcatggagaaggtagccaagactgttgactcggaggagctcactgtggaggagcgaaacctcctgtctgttgcatacaagaacgtcattggagcccgccgcgcctcatggcgcatcatctcctccatcgagcagaaggaggagggccgaggcaatgaggaccgagtaacactcatcaaggattatcgtggcaagattgagactgagctgaccaagatctgtgatggcatcctcaagctgcttgagacccatcttgtgccgtcttccactgctcccgagtccaaggtcttctatctcaagatgaagggtgattactacagataccttgctgagttcaagactggagctgagagaaaggacgccgctgagaacacgatggtggcatacaaggctgcccaggacattgctctggctgagcttgctccaactcaccctattaggcttggactggcacttaacttctcagtgttctactatgagattctgaactcacctgatcgcgcctgcagtcttgcaaagcaggcttttgacgaggccatctcggaactggacaccctgagcgaggagtcctacaaggacagcactttgatcatgcagctccttcgtgataacttgaccctatggacttctgacatctcggaggaccctgctgaagagattagggaggcgcccaagcgcgactcgagtgaggggcagtaaagccggctttatgtgcctagaaactagtagctagtgtttgctgctgtcgaatgacactatgcaatgtgatctggaacctggtttcttgggtgcgacgcttgttatgactgtcgtcagtaaaatttgggggctccccgtatgagatgctgccgggcaaggcctcggtgtcccacctcgtttgtggcggggggcgctggagcccggtctggttgggttgggaagccctttaaactgttgtcacttgcattttaccttttccatcgctgtttattgtgagtggtcctatatcaaaaaaaaaaaaaaaaaaaaaaaaaactcgag

SEQ ID NO: 919 - DNA, 1351 bp, Zea mays
  Clone ID: PAT_MRT4577_128750C.1
gcaccccccaattcgaaagccggagctcaacgaggacgaccgacgacgcacgcggtgtatccggcgtactgcaaattttgaaaactgaactgtaagatggcatcagcagagctttcccgtgaggaaaatgtgtacatggcgaagctcgctgagcaggcggagaggtacgaggagatggttgagttcatggagaaggtagccaagactgttgactcggaggagctcactgtggaggagcgaaacctcttgtctgttgcatacaagaacgtcattggagcccgccgcgcctcatggcgcatcatctcctccatcgagcagaaggaggagggccgaggcaatgaggaccgagtaacactcatcaaggattatcgtggcaagattgagactgagctgaccaagatctgtgatggcatcctcaagctgcttgagacccatcttgtgccgtcttccactgcccccgagtccaaggtcttctatctcaagatgaagggtgattactacagataccttgctgagttcaagactggagctgagagaaaggacgccgctgagaacacgatggtggcatacaaggctgcccaggacattgctctggctgagcttgctccaactcaccctattaggcttggactggcacttaacttctcagtgttctactatgagattctgaactcacctgatcgcgcctgcagtcttgcaaagcaggcttttgacgaggccatctcggaactggacaccctgagcgaggagtcctacaaggacagcactttgatcatgcagctccttcgtgataacttgaccctatggacttctgacatctcggaggaccctgctgaagagattagggaggcacccaagcgcgactcgagtgaggggcagtaaagccggctttatgtgcctagaaactagtagctagtgtttgctgctgtcgaatgacactatgcaatgtgatctggaacctggtttcttgggtgcgacgcttgttatgactgtcgtcagtaaaatttgggggctccccgtatgagatgctgccgggcaaggcctcggtgtcccacctcgtttgtggcggggggcgctggagcccggtctggttgggttgggaagccctttaaactgttgtcacttgcattttaaccttttccatcgctgttcagtggtcctaaatctatggctcgtctcagtggtctagtatatgttttcttggttctctcttgattcctcacacggtgagtgggaccgttcgcatttgtctgtcccatcccatcttaaggtgaatgtgttctgtttggtgtctcgttctgatgtgaatttgcaccatatccatttcatcttcaataagatagtattttat

SEQ ID NO: 920 - DNA, 1520 bp, Zea mays
  Clone ID: PAT_MRT4577_128751C.1
ccggaccgggacacgactctcggcaacggatatctcggctctcgcatcgatgaagaacgtagcaaaatgcgatacctggtgtgaattgcagaatcccgcgaaccatcgagtttttgaacgcaagttgcgcccgaagccttctggcggagggcacgtctgcctgggcgtcacgcattcgaacgacggagcacgacgcacgcagagccgcagagatccgtcacactgcaagttttgaaaactgaactgtaagatggcatcagcagagctttcccgtgaggaaaatgtgtacatggcgaagctcgccgagcaggcagagaggtacgaggaaatggttgagttcatggagaaggtagcgaaaactgttgactcggaggagctcactgtggaggagcgcaacctcctgtctgttgcatacaagaacgtcattggagcccgccgtgcctcatggcgcatcatctcctccatcgagcagaaggaggagggtcgaggcaatgaggaccgtgtaacactcatcaaggactaccgtggcaagattgaaactgagctcaccaagatctgtgatggcatcctcaagcttctcgaatctcaccttgtgccgtcttccaccgctcccgagtccaaggtcttctatctcaagatgaagggtgactactacagataccttgctgagttcaagactggagctgagagaaaggacgctgctgagaacaccatggtggcatacaaggctgcccaggacattgctttggctgagcttgctccaactcaccctattaggcttggactggcactcaacttctcagtgttctactatgagattctcaactcacccgatcgcgcctgcagtcttgcaaagcaggcttttgacgaggccatctcggaactggacaccctgagcgaggagtcctacaaggacagcactttgatcatgcagctccttcgtgataacttgaccctatggacttctgacatctcggaggaccctgcggaagagatcagggaggcgcccaagcacgactcgagcgaggggcagtaaagccggctttacgtgcctagaagctagtacctagtgtttgctgctgtctaatgacactatgcaatgtgatctggaccctggtttcttgggtgcgacgcttgtagcagccgtgttatgattatttgtcgggaaaatttgggggctccccatatgagatgctgccgggcaagacctcgccatcccccacctcgtttcaggcgggggacgctggagcctggtccggttgggttgggaagccccttaaactgttgtcgcttgcattttaaccttttcatcgccgttcagtggtcctaaatctatggctcgtctcagtggtctagtatatgttttcttggttctctcttgattcctcacacggtgagtgggaccgttcgcatttgtctgtcccatcccatcttaacggtgaatgtgttttgtttggtgtctcgttctgatgtgaatttgcagcatctcgatttcatcttcaataagatagtattatatt

SEQ ID NO: 921 - DNA, 2429 bp, Zea mays
  Clone ID: PAT_MRT4577_128794C.1
ctcgaggccggccgggccgggatttcaactctggcaccggaatgtattggcccctcacctgctcggctgctccccttctgtccagcccacgggagggcgactagggttagggccttaggggcgacgccaaccatctagccaccggaggtcgccgcgcctgcccagatccactcatcccttccgttcaagccgccggagctcccaggacgctggtgtcgaagccgtcgtcccttccttccaggcccgcctcctctctgtccgttctgtcttggtcgccgaagctcaagaccacagtgtcaggaagctctccaatcttccagccaaacacaattcatcagtcagatacacttttaccaaggaatttttcagaatcactccacgagaggttcagctctcgaagctagagaagcagagctctaccaaacaggccaggacgtctctcaaatccccagctcagtaactagctaacagtagctggcggctcggcgcacctacagcgccgtataccgagtccgagaccacgactccacgagacgacacaaaccccagtttaggaacagttggaaaagagggagaaatggagaacggcggcggcaaaggcgacgttcccaacgatgcgaacgaacattgccctggaacgcagtcggaggaggcggggaaggcggatgcctgcgctgggtgccccaaccagcagatttgcgccaccgcccccaagggccccgatcccgatgtggttgctattgttgagaggttggctactgtgaaacacaaattattagttttgtctggaaagggaggtgttggaaagagcacattctcagcccaactctcctttgccttagctgaaatggaccatcaggttggccttcttgacatagatatatgtggccctagcatcccaaaaatgttaggcctcgagggacaagatattcatcagagcaaccttggttggtcacctgtgtatgtcgagtccaaccttggcgtgatgtcgattggtttcatgctgcctaatccagatgacgctgtcatatggaggggtccccgcaagaatggactgatcaagcagttcttaaaggatgttgactggggggagattgactatcttgtagtggatgctcctccaggaacatctgatgagcacatctcgattgtgcaataccttcaagccacaggaattgatggcgctataatcgtcacaactccgcagcaggtctctcttattgacgtgaggaaggagataaacttctgcaagaaggtcggcgttcctgtcctaggtgttgtggagaacatgagtggcctgaggcagccactttcagatctcagtttcgtcaagcctggtgaggcgggcgagacagacgcgacagagtgggccctgaactacatcaaggagaaagcccctgagcttctgtcagtcatggcctgcagcgaggtatttgatagcagcaagggaggcgccgagaagatgtgccgtgaaatgggggttcctttccttggcaaggtgcccatggatccgcagctgtgcaaggcggctgaggaagggaggtcatgcttcagtgatcagaaatgcggtgccagtgcgccggctcttcagagcattgtaaagaagctgatcaagactgggtgagaaaataatgttggcctgctgggaatctggtagtgagaattgagatgaacaggtgtcagagttgtcatgaccaatatatatgttattgtgttttgaacactgaatctgtgtattagactattagtgccagtactagtattggatctgtaagtttttttttgttcgtgaatcaccagtgggtggactgggtgtacaaactgcggccatatttctgctccacgaagtgaaatatgtttcgaggcactgcctgtatcccgaaagacactggatgggggttgcttctgtcagtgtggtaaggtgcccaatatatacctattgtgttttgaacgctgaatctgtgtattagtgctagtattggatctgtaagttttttttgttcgtgaatcatcagggggtgcacgggctattaaaagccaagtttctgctctaccaagtggactatgtttgcttgaacgatatgtactgtacgcaccagaactgaatgagagtgtacggtgtttgcaaaatataaaaaataaaaaaatcgtaaaataaaaaatctgaattaaaaaaaaaataaaaaaaaaaagtttttgtacgttaataatcagtgggtgcacgtaaaattaagtggagtagggggtgaggctttttaaaggtgctaattactgtccgtaggggagtgcacggtgtcaacaatatccctgggtgcgcctcattgctctctagtggcacgagcactacatgtttgtaatcaagctaccaggtagttggtctgtcgggcaagaaatcagatcggcaccttatacatgtttgtcatcattac

SEQ ID NO: 922 - DNA, 2187 bp, Zea mays
  Clone ID: PAT_MRT4577_128796C.1
cgacagaagagcgctcacgtccggtgccctcgtacgtcggctcgagtattcttcactgcacgacggctcggaattcgatcgtacacgatatgcggacaacgccgcacccttctatctaggccagactagaaggtagaagaagcaacgacggtcaggacgggctagctatttgttaactctggcccctcacctgctccccttctgtccagcccacgggagggcgactagggttaggggcgaccggaggtccccgcgcctgcccaaatccacccatcccttccgttcaagccgccggagctcccaggccgctggtgtcgaagccgtcgccccttccttccaggcccgcctcctctctgtccgttctgtcttggtcgccgaagctcaagaccacagtgtcaggaagttctccaatcttccagccaaacacaattcatcagtcagatacactttgaccgaggaattattcagaatcactccacgagaggatcagctttcgaagctagagaagcagagctctaccaaacaggccaggacgtctctcaaatccccagttcagtaactggctaactgtaggagaaggagagagagatggagaacggcggcgctaaaggcgacgtccccgacgatgcgaacgagcattgccctggaacacagtctgaggaggcaggcaaggcagatgcctgcgctgggtgccccaaccagcagatttgcgccaccgcccccaaggggcctgatcccgatgtggttgctattgttgagaggttggctactgtgaaacacaaattgttagttttgtctggaaagggaggtgttggaaaaagcacattctcagcccaactctcgtttgccctagctgaaatggaccatcaggttggccttcttgacatagatatatgtggccctagcatccctaaaatgctaggccttgaaggacaagatattcatcaaagcaaccttggctggtcacctgtgtatgttgagtccaaccttggtgtgatgtcgattggtttcatgctgcctaatccagacgatgctgtcatatggaggggtccccgcaagaatggactgatcaagcagttcttaaaggatgtcgattggggggagattgactatcttgttgtggacgctcctccaggaacatctgatgagcacatctcgatcgtgcaataccttcaagccacaggaatcgatggcgcgataatcgtcacgactccgcagcaggtctctctgattgacgtgaggaaggagataaacttctgcaagaaggtcggcgttcctgtcctaggtgttgtggagaacatgagtggcctgaggcagccgctttcagacctcagattcatcaagtcagatgaggcgggcgagacagatgcgacagaatgggccctgaactacatcaaggagaaagcccctgagcttctgtcggtcgtggcctgcagtgaggtatttgatagcagcaagggaggcgccgagaagatgtgccatgaaatgggggttcctttccttggtaaggtgcccatggatccgcagctgtgcaaggcggctgaggaagggaggtcatgctttgctgatcagaaatgcagtgccagtgcgccggctcttcggaacatcgtgaagaagctgatcaaggccgagtgagaaaatagtgttggcctgctggggaatctggtagtgagaaatgagatgaaatgacagatgccagagttctcgttaccaatatatatatatgttacggcgttacacactgaatctgtattagtgctagtgttggatctgtaagtttttgttcgtgaataatcagtgggtgcacagactattaagtggactatgttttgaggcgctgcttgaatgatctgtactgtacgtaggggagtgtacggtgttagcaatatccctggctgcgcttcattgctctctcgtggcacgagcacgacatgtttgtaataaagttaccaggtagtggggctgtcgggcaaaaaatcaggacagcaccttagacatgtttgtaataattagctgaatgcccatgcgttgcaacaggaatatataatactagtatactatgataacttatatacaaaatattaccagtatactacgataacttatatttttccaaaaaaaaaaacgaaagtaaaaaaaaaaaaaagggcggcaaaactagaggatccaagctcacgttgggtgttt

SEQ ID NO: 923 - DNA, 285 bp, Zea mays
  Clone ID: PAT_MRT4577_128800C.1
tttctattactacatcctatagtgagtcgtattaacaggagtaacaggccatcgccttaccagttctggtcccagatcacttaaggagtacgtgccgcgtgctcatcactcagccccaggggaggggagttcaagaacggccgcgtttctgcaacgaacatctattccctgtgcatggcgacgccccgctccgacccgcttaaatgggggaaggctggcgccgatctgatgggcatccaactgtacgaagtcaagcggatcgtggcgtagtatcggcatcccttg

SEQ ID NO: 924 - DNA, 2576 bp, Zea mays
  Clone ID: PAT_MRT4577_128868C.1
gccggccgggtcgggaaaaaaaaaaaaaataaacggtagcagtgcaagccccgcttttcatggcgtgagcgccggggcaaggcaagtagccgctgcgcggtgctgccacctgacctgactgccgtcccggtccccggtccatccgaacgccgttacggggccgcccaccgcgacggaacggaaaggtgcggtcaacccaccccgtcccagtcccatcaccgccgggggccgggtggataaacaaacccagcggccccggccccctgtccgcctcattcccttccttcctttgctcctcccctgcctcgcctctctcccctctcctcgcctccagctcctgctcggcccgctcgcgtccagctgcgcgcgcgcctgcggtggccgtgaaggacagcccgagggacgcgccgggtgcactgatctgggggccgcgtgtccccggtggtggggcgaggcggcgccggcttccaggaatgggcagcttgtagtggctgtttcttttgcatatgcactttctattgttgttgtcatttcaaaggaggccatagtctcctggattttgtatgccttgttatctggaattggtgaccatagatgtcatttcgtagcatagtccgtgatgttagggatggcttcggcagcttgtcgaggagaagctttgaggtgaccctcgcaagcatttatggccttactgggcatcacaaagggaagacccagagctcatcacatgtgctcgacgactcaccttccataatttgtgaaagtcgctgggcgaatctacctcctgaactcatccgtgatatcatacggagactggaggctgatgagagcacctggccagcgcggaagcacgtcgtttgcttcgcagctgtttgtaggacatggagagaaatgtgtaaagagattgtgttgagcccggagttttgtggcaagctcaccttccctgtgtctctaaaacagcctggtcctcgagatggaaatacaatggtccagtgttttataaagaggaataagtcaaaatccacttaccatctctacctgtgccttagcaatgttgttacttcagaaagtgggaaattcctcttatcagctaaacgacaccgcaaaaccacatgcaccgagtacactatatcaatggattctggcaacatctcaagatcaaaaagaacctacattggaaaaataaggtctaacttccttggcacaagatttttaatttatgatacacaaccgccctataatggggctgtagttcctcctgccggaaggacaagcaggaggttcaactccacaaaagtctctccaaagctgccttcagtcagttacaacatcgcacaggtatcgtatgagttaaatgtccttggcacgagaggtcctaggcggatgcgttgcatcatgcactccatacctgcatcatcagtggagccaggtggcacagtgcctggacagccagagcagattgtacctcgagccctggaggattcattccgcagcacggcttccttctcgcagtcgttccgtagcactgcctcattctccaagtccatcatggactcatccatggatttcaatagcgctcgcttctctgacatcgctggcagcagcgctcgcttcacgggcgttcctggtagcagcgctcgcttcgcgggcgttcctggcagcagcgctcgcttctcgggcattgctggcgccagactggacaacgacgaggagagtgaaaccaaggagaggccactggtgcttcgtaataagccgcctaggtggcacgaacagctgcagtgttggtgcctcaacttccgtggccgtgtgacaattgcctcggtgaagaacttccagctgatcgccgcggctaccccgccaccggcaggtgcgccaaccccctctcagcctgccccgtcagatcccgacaaggtgattctccagtttggcaaagtggcaagggatatgttcacgatggactatcgctaccctctctcggctttccaggcctttgccatttgtctgagtagctttgatacaaagttagcctgtgaataaatggagaagaacaaaggtaaaggagaacatcaggttgcttgcattaggccatcagtgtacctctttccatctggctctcgtgttgccttggttgtattttgtgcttaatgtagccatgaagttggtggcccatatatggacgcatgtgttgttgttggccctctcccttagaagtgattaaaagttgcatttggaccacatgttacccgatctgtaatatacttgcagtggcatcgcatgccgcgtgataacaaagttcccgttcgtgattggacttgtatggtttcagaaaagcagcaaacaaagtttggtacggtgtgcatacctctttccatctggctctcgtgttgccttggttgtatttgtgcttaatgtacccatcaagttggtggccatatatggacgcatgtgttgttgttggccctctcccttagaagtgattaaaagttgcatttggtccccatgtagcccgatttgtgatacacttgcagtggcattgcatgccgcgtcataacaaagttcccgttcgtgattggact

SEQ ID NO: 925 - DNA, 2339 bp, Zea mays
  Clone ID: PAT_MRT4577_128869C.1
ccggccgggatggcgtgagcgccggggcaaggcaagtagccgctgcgcggtgctgccacctgacctgacctgactgccgtcccggtccccgctccccggtccatccgaacgccgttacgggggccgcccaccgcgacggaacggaaaggtgcggtcaacccaccccgtcccagtcccatcaccgccgggggccgggtggataaacaaacccagcggccccggccgcctgggcgcctcattcccttccttcctttgctcctcccctgcctcgcctctctctctctctcccctctcctcgcctccagctcctgctcggcccgctcgcgtccagctgcgcgcgcgtctgcggtggccgtgaaggacagcccgagggacgcgccgggtgcactgatctgggggccgcgtgtccccggtggtggggcgaggcggcgccggcttccaggaatgggcagcttgtagtggctgtttcttttgcatatgcactttctattgttgttgtcatttcaaaggaggccatagtctcctggattttgtatgccttgttatctggaattggtgaccatagatgtcatttcgtagcatagtccgtgatgttagggatggcttcggcagcttgtcgaggagaagctttgaggtgaccctcgcaagcatttatggccttactgggcatcacaaagggaagacccagagctcatcgcatgtgctcgacgactcaccttccataattcgtgaaagtcgatgggcgaatctacctcctgaactcatccgtgatatcatacggagactggaggctgatgagagcacctggccagcgcggaagcacgtcgtttgcttcgcagctgtttgtaggacatggagagaaatgtgtaaagagattgtgttgagcccggagttttgtggcaagctcaccttccctgtgtctctaaaacagcctggtcctcgagatggaaatacaatggtccagtgttttataaagaggaataagtcaaaatccacttaccatctctacttgtgccctttagcatgttgtacttcagaaagtggggaattcctcttatcagctaaacgacaccgcaaaaccacatgcaccgagtacactatatcaatggattctggcaacatctcaagatcgaaaagaacctacattggaaaaataaggtctaacttccttggcacaagatttttaatttatgatacacaagccccctataatggggctgtagttcctcctgccggaaggaccagcaggaggttcaactccacaaaagtctctccaaagctgccttcagtcagttacaacatcgcacaggtatcgtatgagctaaatgtccttggcacgagaggtcctaggaggatgcgttgcatcatgcactccatacctgcatcatcagtggagccaggtggcacagtgcccccacgcgtccggcagattgtacctcgagctctggaggattcattccgcagcacggcttccttctcgcagtcgttccgtagcactgcctcattctccaagtccatcatggactcatccatggatttcaatagcgctcgcttctctgacatcgctggcagcagcgctcgcttcacgggcgttcctggtagcagctctcgcttcgcgggcgttcctggcagcagcgctcgcttctcgggcattgctggcgccagattggacaacgacgaggagagtgaaaccaaggagaggccactggtgcttcgtaataagccgcctaggtggcacgaacagctgcagtgttggtgcctcaacttccgtggccgtgtgacaattgcctcggtgaagaacttccagctgatcgccgcggctaccccgccaccggcaggtgcgccaaccccctctcagcctgccccgtcagatcccgacaaggtgattctccagtttggcaaagtggcaagggatatgttcacgatggactatcgctaccctctctcggctttccaggcctttgccatttgtctgagtagctttgatacaaaattagcctgtgaataaatggagaagaacaaaggtaaaggagaacagcaggttgcttgcattaggccatcagtgtacctctttccatctggctctcgtgttgccttggttgtatttgtgcttaatgtagccatgaagttggtggccatatatggacgcatgtgttgttgttggccctctcccttagaagtgattaaaagttgcatttggaccacatgttacccgatctgtaatatacttgcagtggcattgcatgccgcgtgataacaaagttcccgttcgtgattgcacttgtatggtttcagaaaagcagcaaacagagcttggtacggtgtgccttttttagacc

SEQ ID NO: 926 - DNA, 2233 bp, Zea mays
  Clone ID: PAT_MRT4577_128873C.1
ttttagcgcttgcttctcgggcgttgctggcgccagactggacaacgacgaggagagtgaaaccaaggagaggccactggtgcttcgtaataagccacctaggtggcacgaacagctgcagtgttggtgcctcaacttccggggccgtgtgacaattgcctcggtgaagaacttccagctgatcgccgcggctaccccgccacccgcaggcgcgccaaccccctctcagcctgccccgtcagatcccgacaaggtgattctccagtttggcaaagtggcaagggatatgttcacgatggactatcgctaccctctctcggctttccaggcctttgccatttgtctgagtagctttgatacaaagttagcctgtgaataaatggagaacaaaggtaaaggagaaacagcaggttgcaagtagccgctgcgcggtgctgccacctgacctgactgccgtcccggtccccggtccatccgaacgccgttacggggccgcccaccgcgacggaacggaaaggggcagcttgtagtggctgtttcttttgcatatgcgctttctattgttgttgtcatttcaaaggaggccatagtctcctggattttgtatgccttgttatctggaattggtgaccatagatgtcatttcgtagcatagtccgtgatgttagggatggcttcggcagcttgtcaaggagaagctttgaggtgaccctcgcaagcatttatggccttactgggcatcacaaagggaagacccagagctcatcacatgtgctcgacgactcaccttccataattcgtgaaagtcgatgggcgaatctacctcctgaactcatccgtgatatcatacggagactggaggctgatgagagcacctggccagcgcggaagcacgtcgtttgcttcgcagctgtttgtaggacatggagagaaatgtgtaaagagattgtgttgagcccggagttttgtggcaagctcaccttccctgtgtctctaaaacagcctggtcctcgagatggaaatacaatggtccagtgttttataaagaggaataagtcaaaatccacttaccatctctacctgtgccttagcaatgttgttacttcagaaagtgggaaattcctcttatcagctaaacgacaccgcaaaaccacatgcaccgagtacactatatcaatggattctggcaacatctcaagatcaaaaagaacctacattggaaaaataaggtctaacttccttggcacaagatttttaatttatgatacacaaccgccctataatggggctgtagttcctcctgccggaaggacaagcaggaggttcaactccacaaaagtctctccaaagctgccttcagtcagttacaacatcgcacaggtatcgtatgagttaaatgtccttggcacgagaggtcctaggcggatgcgttgcatcatgcactccatacctgcatcatcagtggagccaggtggcacagtgcctggacagccagagcagattgtacctcgagccctggaggattcattccgcagcacggcttccttctcgcagtcgttccgtagcactgcctcattctccaagtccatcatggactcatccatggatttcaatagcgctcgcttctctgacatcgctggcagcagcgctcgcttcacgggcgttcctggtagcagcgctcgcttcgcgggcgttcctggcagcagcgctcgcttctcgggcattgctggcgccagactggacaacgacgaggagagtgaaaccaaggagaggccactggtgcttcgtaataagccgcctaggtggcacgaacagctgcagtgttggtgcctcaacttccgtggccgtgtgacaattgcctcggtgaagaacttccagctgatcgccgcggctaccccgccaccggcaggtgcgccaaccccctctcagcctgccccgtcagatcccgacaaggtgattctccagtttggcaaagtggcaagggatatgttcacgatggactatcgctaccctctctcggctttccaggcctttgccatttgtctgagtagctttgatacaaagttagcctgtgaataaatggagaagaacaaaggtaaaggagaacatcaggttgcttgcattaggccatcagtgtacctctttccatctggctctcgtgttgccttggttgtatttgtgcttaatgtagccatgaatttggtggcccatatatggacgcatgtgttgttgt

SEQ ID NO: 927 - DNA, 3129 bp, Zea mays
  unsure (1)..(3129): unsure at all n locations
  Clone ID: PAT_MRT4577_128883C.1
gcagttcccccgtgcccgagacgcaaccccccgccaggagtaagtttgttcttttatcgatattatcgatatggcgagggaggagaatgcctacatgttcaagctgactgaccaggccgaaagggatgaagagcatgcatagccatatgcagcagatggctgacaacagcgttgagcaagcatcgatagagaagcctcctaatgcgcttgaatggcagccacaagaacgagctatgcggctactgcgatgcagacctgctgccgcggatcccaccgctcagaatcctgcaaaaaacgtttctttgcttaaagcgcaagagttattcaaggagaaaaggccgagcttnatgcttgcaggcctcctccttttcgcctacctactagtgccgggaaaaaaaaaaaaaaaaacaaaagggcgaacacaggagaggggagagcccgagagcttcccttgccggcgagatccagtccggctcacgcgatctgactttcccggaggtaaagaagctcgggatttgccgtagtctcttgatgccaaatcaaatctcgtttgcaagtagtacaagtgctgcttcggtctatgcatgtccatatctatgattatagcgagaactagttttctccttttctggattggacagggaattagctggtctggagtgaatactgaaccgaaatgcctctgctcccgtttgttctttaatcttacgttcttcaacagttgaaatccatcccaccccaatgtttccatgttcattccagaagcaattcttgcttgattcgtggacttctttcctaagctacagcttctttccaagtagagtaccagaaccagatacccgatctcaagggatgaagatagtgaccgggccatgggaattagaccgagaaagaaagggccaggttgagatatcgggggcaggttgcccttccggtgcctgaagggcaaacaaaatgtcataccaagtcaggctgctgcgcttttcctatgaattggccttctcgcaatcccttctgttttgcctcgcctcaatctgttgatggtaggtggacaacgctataatagttcatcatgcttcattgctgctgttcaatttgggttcatggtatctcaatttcaattaggcttggtcatctgtacaacctggttatatgtatcaggggaaaacctgtttatatgtagaatatgtcttgctgatgatctggatatcctcatatatatattctacctgtcattttatatgccagtacacattcagttctctgaaattccattggggagctcgagttcggccgattctcggccacctccggttgaggcgcggacaaaaggcgacgcgaacacaggagaggggagagcccgagagcttcccttgccggcgagatccagtccggctcacgcgatctgactttcccagaggtccttgaatgtgatcgcatcattgcagcagatccaggttaagcagatggctgacaacagcattgagcaagcattgatagagaatcctcctaatgcgctgaaatggaagccatcagaaagagctaaacggtttcgacgatgcaggtcaactccctcagatcccaccgatcaaaaacctgcagaaaacggatctgtgcttaaagccaaagagttattcaaggagaaaaggccgagcttcatgcttgtaggcctcctccttttcgcctacctactagtgggtgtcatcatcttttacctattcatggatcagttatctgggaagacaactgatagagtgcttgacgccttgtacttcgttattgtcacaatgacctcggttggctatggggatcttttcccaaacagtgacacaacaaagctgcttgcttgcgcttttgtattcacaggaatggcgatcattgctctcttcatcagtaaagcggcagattaccttgttgagaaacaggaggtgttgttcttcaaagcactgcacatgaatatgaagggcagcgaggccaaaatgctaggagcaatggaaacaaataggataaagtacaaattctacactgtcgctctgcttcttgcaatggttattgttgctgggactgtatttctgtggaaggttgagaagctcagccttgttgattccttctactgtgtctgtgccacgatcactaccctgggttatggggataaaagcttctcgtccaaactggggcgtgtttttgcagtgttttggataaccacaagtactctcatcatggctcagttcttcatgtaccttgctgagctctacactgagcgccggcagaaaatcctgaccaaatgggtgatcaacaggaggataaccaccatggatcttgaggcagctgatatagatgacgaccgacaagttggtgctgctgaatttgtactttacaagctaaaagagctgggcaagatcagccaagaggagatatcttgttttctcgaggagtttgacaagcttgatgttgaccagtctggcacactctcaacttacgaccttactctaggacaaaccagtcaatgactgatgatgcatatgtgattttgctgactgaatgattttgtttgatgtcgttagcatttctgttgtccatatgtaacacgctacaatgttgtaaagatgtaaattaagatgattgagaaattgtgccccgccttttctccaaactggggcgtgtttttgcagtgttttggataaccacaagtactctcatcatggctcagttcttcatgtaccttgctgagctctacactgagcgccggcagaaaatcctgaccaaatgggtgatcaacaggaggataaccaccatggatcttgaggcagctgatatagatgacgaccgacaagttggtgctgctgaatttgtactttacaagctaaaagagctcggcaagatcagccaagaggagatatcttgttttctcgaggagtttgacaagcttgatgttgaccagtctggcacactctcaacttacgaccttactctaggacaaacaattcaatgactgatgatgcatatgtgattttgctgactgaatgattttgtttgatgtcgttagcatttctgttgtccatatgtaacgctgtaatgttgtaaagatgtaaattgagatgattgagaaattgtgccccgcttttctcc

SEQ ID NO: 928 - DNA, 1338 bp, Zea mays
  Clone ID: PAT_MRT4577_128885C.1
cattgggtacctcgaggccggccggggggagcccgagagcttcccttgccggcgagatccagtccggctcacgcgatctgactttcccggagcagatccaggttaagcagatggctgacaacagcattgagcaagcattgatagagaatcctcctaatgtgctgaaatggaagccatcagaaagagctaaacggtttcgacgatgcaggtcaactccctcagatcccaccgatcaaaaacctgcagaaaacggatctgtgcttaaagccaaagagttattcaaggagaaaaggccgagcttcatgcttgtaggcctcctccttttcgcctacctactagtgggtgtcatcatcttttacctattcatggatcaattatctgggaagacaactaatagagtgcttgacgccttgtacttcgttattgtcacaatgacctcggttggctatggggatcttttcccaaacagtgacacaacaaagctgcttgcttgcgcttttgtattcacaggaatggcgatcattgctctcttcatcagtaaagcggcagattaccttgttgagaaacaggaggtgttgttcttcaaagcactgcacatgaatatgaagggcagcgaggccaaaatgctaggagcaatggaaacaaataggataaagtacaaattctacactgtcgctctgcttcttgcgacggtcattgttgctgggactgtttttctctggaaggttgagaagctgagccttgttgattccttttattgtgtctgtgccacaatcactaccctgggttatggggataaaagcttctcgtcccaattggggcgcactttcgcggtgttttggataattacaagcaccataattctggcgctgttcttcatgtacctcgctgagatctacaccgagcgacggcagaagatgctggccaaatgggttctcacacggagagtaacaaccatggatcttgaagcagctgatctggatagtgatcggaaagtgggtgcagtgctgctgaatttgtcgtgtacaagctcaaagaactggggaagatcagccaagaggacatatcttcttttctagaggagtttgacaaactcgacattgaccagtccggcacgctctccacatatgaccttactcaggcacaatccggtcagtgacgaacatatgggcttgtacttaatgttacagcttaaatggttgaatggttagttaatgctgttaattaattctgtaatctagtaaaagtgtcaaaagatacgaccttgttgagttaacacaatggatctgctcatatgcacctggacacgtgtaagaaagaagtatttggtgatgcttc

SEQ ID NO: 929 - DNA, 734 bp, Zea mays
  Clone ID: PAT_MRT4577_128901C.1
accagccgtataccacaccacaccgcctccgcacttcctcccggcgcctcgctttccattttacaaccgcggatcccctcggagtactgtagacatggccggaaggggcaaggcgatcggctcgggcgccgccaagaaggccatctccaggagctccaaggccgggctccagttccccgtcggcaggatcgcgcggttcctcaaggccggcaagtacgccgagagggtcggcgccggcgcccccgtctacctcgccgccgtgctcgagtatctcgccgctgaggttctggagttggccgggaacgcggcgagggacaacaagaagacccgcatcgtgccgcgccacatccagctcgccgtccgcaacgacgaggagctctcccgcctgctcggcatggtcacaatcgccagcggcggtgtcatgcccaacatccacaaccttctgctccccaagaaggccggaggcagcaaggccgtggctgccgacgacgatagctagatgacgactcctcggtggtcgtgggtgctcggctgtatccagttctgtgtagtagcgtgttcagttaaatgttgcctaggtgttgcgttttacttctaggatgttagtactactattagtttctgaatctgtgtgcttgtaccggtgctaaactaggtgtggacaatggttacatcctgtgtaagtcgttgctagttcgttctataaaagtgcacctatggattgcttacttgcg

SEQ ID NO: 930 - DNA, 1413 bp, Zea mays
  Clone ID: PAT_MRT4577_129094C.1
ccggccgggaaagtcccgcactcccgcctggcgcctaccgcggtgtttctttcctctcctccaagccagcgctcggcgcccgcctccggcgaccgccacccgcctttcttttataccttcgccgcggcgacccacgccaaccttcgacccccctaaccctaccaaagcccgaactctcgagatcacaggacgcggatccaaaccagaggcccctgcctgccctctactcccccaccacaccacagcctaccgccatgtcggcgaccgctacggacgaggccgcggtggaggcgcgcctccaggagctgcgggggaggctcgggaagaagcagcacttcgaggaggccgtaaacgagctcgccgccgccgtccgggaccgctacgccggcgcctcccccgccctccgcaaagcgatgtattcaacggtttgccgcgttgcaacagtgcttcaaaccagatatacagctccaggattctggcatgttggtctgaacctcttcgttggaatagagaagctggtaagtaatcctgctgaaaaggagcacctgaagacctgcatttcgagggcccgtgagcatcttgatgaaaaggaaaatgaggattctgtgccaagcaacagagaagcagacaccagatttctttttgaagggcaccttactgtgggacaggaacctccacctccagcatggctttgttgcccagaatttaacgagggaattgagcatactaactgaatcctctggtgatcaagatgcgagccaacaaccagaacagtgcctagagccgaggagattacacctgctataatgaacctcctagaaaccatatcaggcgacagggatctagaaactgctttggaagaatcactgcagggaatcattgagtatccacagagggcacccccggcttcaaaggaagttgtcgccaatcttcctgtcattgctgttaccgaggaagtcatgtctagattgggtagtgagacggagtgtgctgtctgccgcgaaaacttggttgtggatgacaagatgcaggagcttccctgcaagcatctcttccatcctctttgtctgaagccatggctggacgagaacaactcctgccctatctgccggcatgagctgaggacggacgaccatgtgtatgagagcaggaaggagcgtgaaagggaagaggaagaagatagaaggggtgcggcaaatgctgttaggggtggagaattcatttatatctgaactcaacagttccagaatgtaatccctttgatgaacttcgttattaccatgttgacatctatatatacctagttacttgttctagaatttaatccctttgatgaacttcgtgattaccatgttgacatatatatatacctagttacttatgcttgagttaaataaaaaaaaaaaaaaaaaa

SEQ ID NO: 931 - DNA, 403 bp, Zea mays
  Clone ID: PAT_MRT4577_12910C.1
gttacacattcggatcgccatgtcagactcggatgagcaccacttcgaattggatgggcgcgccggatcgtccaagacctacccagcacatgctggcaccgtccgtatgaactgcttcatcgtcatcaagaaccgaccctgcacggctgtggaggtttctaccttaaagactgataagcatggtcatgccaaatgctactttgtagccatagatatatccaacggtaaaaagttcgaatatattggtccttcatgacacatactgcatattacagctgtgaaccgtactgagtatcacatgattgatatatcagactatggattagcgagctttcttacttcagatggtaacactaatgatgatcttaaactcccaactgattatactcttgtagcccagatc

SEQ ID NO: 932 - DNA, 1691 bp, Zea mays
  Clone ID: PAT_MRT4577_129308C.1
aattcggcacgagggccggtcgcagtccgccggggtattcacacgcagccacgctaaacaaagcccgacgagagattcgtctccatctcccctcgtcttcctccctccttcagcccgaggaaaccctagcacgtcccgtctcgcctcgccgccggcgatggccgctgcatgatcggtttccccccttggaactgcctgcctaccggcatcgccaagatcgccgccgcggctgccgtcgtcgtagcggcgctcgcgtcctccgggatcgccctcccgcgtccacgcgccgcgccgcccccatcgggattcggcctcctcatgtcgaaggcgaaggtctacaccgacgtcaacgtcctgcgtcccaaggagtactgggactacgaggcgctcaccgtccaatggggtgagcaggatgactatgaagttgtcaggaaagttggaagaggtaaatatagtgaggtctttgaaggcatcaatgttaacaacaatgagaaatgcatcattaagatccttaagcctgtcaagaaaaagaagatcaaaagggagatcaaaatacttcagaatctctgtggaggtccaaacattgtgaaattgcttgatattgtcagggatcagcattcaaagactcccagtttgatatttgaattcgtcaacaacacagacttcaaagttttgtaccccacattgacggattatgacatccgctactacatatatgagctactcaaggcccttgattactgtcattctcaaggcatcatgcatcgagatgtcaagccccataatgtaatgatagatcatgagcttcgaaaacttcggttgatagactggggcttagctgagttctaccatccaggcaaggaatacaatgtccgtgttgcatcgaggtatttcaagggacctgaactccttgttgatttacaagactatgattattctttagacatgtggagtcttggttgcatgtttgctggaatgatatttcgcaaggaaccattcttttatggccatgacaaccatgaccaacttgtgaagattgcaaaggtccttggaacagatgggctgaattcttatttgaacaagtaccacattgagctggaccctcaacttgaagctcttgttggaaggcatagtagaaaaccctggttgaagttcatgaatggtgataaccaacatctagtatcacctgaggccatagattttctcgataagctcctgcgctatgatcaccaagacaggcttactgcacgggaagctatggcacatccctacttccttcaagtcagagctgtggagaacagtaggacgagagcacaataatcatggtctgcactcttgaaatggagttgttgctagttcgtgaaaatcataggcttaaatccatgttcagtattcacatcgctccaggaatctgggccatgactccatggcaatgaatcaaaatagtacgagccgcatcatgtggacaaccttggcagatctttttattcttgtctttattgctgggagcactgtagctttaaacctacaagtagtgcttgaatgagatgagattcatatcatctcctgtggtggaatgtgaaattgtatgtgacctttagactaattaaaaagtacaatacagcgctaagcatactgcttgtattaaaaaaaaaaaaaaaaaaaaaaaaaaaaaaaaagggcgcggccgc

SEQ ID NO: 933 - DNA, 1869 bp, Zea mays
  Clone ID: PAT_MRT4577_129310C.1
tctctggctgttcccaacagattattaaagaactcccacactacctcctttttcctttcttggtccatcacgagtctgtcgtccactttcacttgggaccggtcatcccaggtcccagtccaccggtatcctcacgcagccacgctaaattcgtctccacctcctccctcgtgacatcgtctcgcacggtcgctcccacctttccgcccgccgaaaccctagcccgccccgcctcgccgacggcgatgggcgctgcatgatcggtgcgtccccttggaaccgcctgccttctggcatcgccaagcccgctgccgcggctgccgtcgtcgtagcggcgctcgcgtcctccttcctcgccctcccgcgtcctcgcgccgccccgcccccagcgggatccgggcccctcatgtcgaaggcgaaggtctacaccgacgtcaacgttctgcgtcccaaggagtactgggactacgaggcgctcaccgtccaatggggtgagcaggatgactatgaagttgtcagaaaagttggaagaggtaaatatagtgaggtctttgaaggcatcaatgttaacaataatgagaaatgcatcattaagatccttaagcctgtcaagaaaaagaagatcaaaagggagatcaaaatacttcagaatctctgtggaggtccaaacattgtgaagttgcttgatattgtcagagatcagcattcaaagactcccagtttgatatttgaattcgtcaacaacacagacttcaaagtcttgtaccccacattgacggattatgacatccgctactacatatatgagctactcaaggctctagattactgccattctcaaggcatcatgcatcgagatgtcaagccccataatgtaatgatagatcacgagcttcgcaaacttcggttgatagactggggcttagctgagttttaccatccaggcaaggaatataatgtccgcgttgcatcgaggtatttcaagggacctgaactccttgttgatttacaagactatgattattctttggacatgtggagtcttggttgcatgtttgctggaatgatatttcgcaaggaaccattcttttatggccatgacaaccatgaccaacttgtgaagattgcaaaggtccttggaacagatgggttgaatgcttatttgaacaagtatcacattgagctggaccctcaacttgaagctcttgttggaaggcatagtagaaaaccctggtcaaagttcatgaatgctgataaccaacatctagtatcacctgaggccatagattttctcgataagctcctgcgctatgatcaccaagataggctcactgcacgtgaagctatggcacatccctacttcctccaagtcagagctgtggagaacagtagaacgagaccacaataatcgttgtctacaccctcgaaatgaagttgttgctaatttctggaacatcataggctaaaaccgttcaataagcatctcgctccaggaatctgggccatgactccgtggcagtgaatcagatagtatgggtcgcatcatgtgggcaaccttggcagatgtttttattgttgtctttaatcttgggactactgtagctttaaacctacaggctgtgcttgaatgacatgatattcatatcatatcgtctcctgtggtgggatatgaaattgtatgttatctttaaacataaacatactggttgtattatggtgtgctattatgtatgtatgattcttatttattttgtgtgatattgtgatgaaatactcatggatctcatagatgacatgagtttccgaaaaaaaaaaaaaaaaaccgattgttatttattttgggcgatagtcaccgtgatcaattgcttt

SEQ ID NO: 934 - DNA, 1535 bp, Zea mays
  Clone ID: PAT_MRT4577_12935C.1
gcttacctaggtccgcctccctatccccacctcctccaaacccccaccccaccccacccctcctccgctgcccatcccagcacagcggaagcgatcggcaatggcgtcctccacccagggccaggtcatcacctgcaaagcggcggtggcgtacgaggcgaacaagccgctggtggtcgaggacgtgcaggtggcgccgccgcaggccggcgaggtccgcatcaagatcctctccaccgcgctctgccacaccgactactacacctggagcggcaaggatcctgagggtctctttccttgcattctcggtcacgaggctgctggaattgttgagagtgtcggcgaaggggtgaccgacgtgcagcctggggaccatgtcatcccttgctaccaagcggaatgcagggactgcaagatgtgcaacagcgggaagaccaacctctgcggcaaagttcgcggcgccactggggttggggtcatgatgagcgaccgcaagagccgcttctcggtgaatgggaagcccatttaccatttcatggggacgtcgacgttcagtcagtacactgttgtgcatgacgtcagtgttgccaagatcaacccgcaggcaccccttgataaagtctgcctgctcggctgtggtgtttctactggccttggagcagtatggaatactgcaaaggttgaagcaggttccattgttgctgtttttgggcttggcacagtcggacttgcagttgctgagggggcaaaatcagctggtgcttctcggattattggcattgacattgataccaagaagtttgatgttgctaagaactttggcgtcacagagtttgtggacccaaaagagcatgacaacccaatccaacaggtcctggtcgatctaacagatggcggcgtggattacagctttgagtgcattggaaatgtttcggttatgagggctgcactggaatgctgccacaagggctggggaacttccgtcatcgttggtgtcgccgcctctggccaggagatcgccacacgaccattccagctcgtgactggtcgtgtctggaagggaaccgctttcggtggcttcaagagccggacccaggtcccatggcttgttgacaagtacatgaagaaggaaattaaggtggacgagtacattacgcacaacatgaacctggctgacatcaatgacgccttccacctgctccacgaaggtggctgtctgcgttgtgtgctggcgatgcagatctgaaattcctaagctaagcagtttttggatatgtgtcggcatagactgtcttttgttttggaactagaactcctttttgcctcgttaggcctggacccactgtataatgctatgttgcgttggatggctgacgatggttaccgctgtgttgctagcaatgtggtacttgatctgtatcacggttgcaaataagtgctgtttctaaaaaaaaaaaaaaaaaaaaaaaaaaaaaaaaaaaaaaaaaaaaaaaaaaaaaaaaaaaaaaaaggacttctgcgttgttaccactgct

SEQ ID NO: 935 - DNA, 667 bp, Zea mays
  Clone ID: PAT_MRT4577_129407C.1
cggtgcggacggcgtcatgatagacgtctggtgggggctggtggagggcaagggccccaaggcgtacgactggagcgcctacaagcaggtcttcggcctggtgcacgaggccgggctcaagctgcaggccatcatgtcattccaccagtgcggtggcaacgtcggcgacgtcgtcaacatccccatcccacagtgggttcgcgacgtcggcgccaccgaccccgacattttctacaccaaccgcggcgggacgaggaacatcgagtacctcacccttggagtggacgaccagcctctcttccatggaagaactgccgtccagatgtatgctgattacatggcgagcttcagggaaaacatgaagaagttcttggatgccggtaccatcgtggacattgaagtgggacttggcccagctggagagatgaggtacccatcgtatcctcagagccaaggatgggtcttcccaggcatcggagaattcatctgttatgataagtacctggaagcagacttcaaagcagcagcggcgaaggctggccaccctgagtgggaattgcctgacgatgctggagagtacaacgacactcccgagaaaacccaattcttcaaggacaacggaacatacctcacagagaaggggaagtttttcctgtcatgctactcc

SEQ ID NO: 936 - DNA, 428 bp, Zea mays
  Clone ID: PAT_MRT4577_129427C.1
tgggaccctcgaggccggccgggagatgtctggccggagaacgcggccccgctttggcccgccgtgacactatcaccgctaccatggaaggcgtcacctctctgctgactaccggatggaagactagtcaaggggcgatggagatgccgctaatgatccagggctacgagaagggactcatcgaatatccccatcatcacctgtcgcaagtcctggagacgcgtaggaggaggccaatgtatgcaccagctactagcacaagcacaggagtgccaagtgcgataacgtaaatccgggggaccatagccgtctactcgtctatactgcaccaaaatctccattctcctaggacatgtgaggtaatgtttctgacactcggctagatatttcaaattcactgctcctcacaggagacaaaaagagcggcc

SEQ ID NO: 937 - DNA, 220 bp, Zea mays
  unsure (1)..(220): unsure at all n locations
  Clone ID: PAT_MRT4577_129440C.1
ctcgtagcttgcgctccacaggagcctatgtgccacccacaaccgtgcgaccgtccgtgctgccggcgaccccgaaccgccgacccggcccgtgccaccacaccttactcgncgttggcaggtatggccccgacggagccgacccgggaggagagcgtgaacatggccaagctggcagagcatgcggagcgatactaggagatggtcgagttcattgagc

SEQ ID NO: 938 - DNA, 614 bp, Zea mays
  Clone ID: PAT_MRT4577_129576C.1
gtaaggactccataggaccacctgttgcgaatgcacggtctcgaccgccggtagcgtgtcaagcatactacccgcttcaggctgtaaccgctcgtagagaacggattcataggcatcaaaaaccgtccctgtaaggttgtggagggtgctacctgaaagaactggacatcatggccatgccagaatgccactttgctgccatagacagtgattcaacggctagaaaagctccacagatattggtccttggtgacacaattgtaatattttacatggaaaccgtactgagtacacagcttgaatgatatatcagaggatggattagcgagccttcttacttcagatggcaatactaatgatgatcttacactaccaactgatgaaactgtagcggcccaaatcaaggaaggggtagaaagcggaaaggatcttgttgtgactgtccagactgctatggcggaggagcaaatatgagcgctgaaggatgttggccccaagcaacttgcctgtcttgaaatactgtatctcagaaactaaatcgaaaaaagaagtgtatcaagcattgctacagagacatccatatgtcttgagctggcttttgctatggcaaacac

SEQ ID NO: 939 - DNA, 313 bp, Zea mays
  Clone ID: PAT_MRT4577_129683C.1
atcgagaccaactagcaacatagttagcacaatacagtaccaccaatggcgggggaaatattttgcctccttatgctcctagctctttctgcaagtgctgctacagcgaccattttcccacaatgctcacaagctcctatatctttcctccttcccccgtacctctcaccagcggtgtacttccgtttgtgaaaacccaaatctttaaccctatatgatccatcaagcaatctcatcttgcatctaacctttatcacccatttttctccaacaaacatcagtcctataacagtatttccctttggagcattta

SEQ ID NO: 940 - DNA, 281 bp, Zea mays
  Clone ID: PAT_MRT4577_129823C.1
tccacgcgtacgcaactagttttttttaaagcacaatagtgtaccaacaatggcggccaatatatttggcttccttatgctcctaggtctttttgtaagtgctgcttcctcaaccattttcccacattgctcacaagcttctattgctttctttctttccccatacctcttaccagcggtgttttcagtctgttaaaacccaattctacaaccttacaggatccaacaggtaatcgcagtatgcattctacctctatcacccttgtttcctccaacattcc

SEQ ID NO: 941 - DNA, 1920 bp, Zea mays
  Clone ID: PAT_MRT4577_129850C.1
gcatctcgcgtccggacgggggcttcctctctctctctctctctctgtcgccaggagggcgccgccgccaccaacgcaacgcgcgccgccgcagatctccgccaccgacgcgccggccatggagtacgagcgcattgagaagccgttccccgtccagggcggcgggttctcgcccaagcggctgcgcgcgatgctgctgggggtggacaagcgccgcaaggggcaggacggcgccgccgaggaggacgaggacggcggcggcggcggcgactacggcgccctgcccaaggcccacgccagatccggcgccggcgacggtggtggcgccacgtgcgaagaatacaaggacgtggacgtggtgagcaccacctcagagttctcgtcctcgctggagacagcgggtgggcaccggccccgggacgcccaccccgtcgccacgggttctaggaccagggtgccgcccgaggaggactcgtgcgactcggagagcgtggcatccaacttcgagttccacaaggagcggcgggcagcggcggcggcgtcggtcgtccctccattctcaaagcccgccccgtcaaagtgggacgacgcacagaagtggatcgccagcccgacggcgaactgccctggcaggggtggcgcggctcctgcgccgaagaagacagagaaacctggctccggcatcgggaggctgccgctgccggcgaccaaggtcgtggtagaggccactgaggagatagataccaagaggatggatccgagccaggagaagcgagagattgggtggcagaaagcggcgaggtgggcgccgcccgacccctgtccggaggcggagccctgcccaacaaagaccacactactcgctgtagaaactacagtggctgctgcttcagcagcagctgttaatttcaaccgccatgatgcatccaccacgcttcagagcgcagcaacatgcatacctcctccaacaacggtccggtcagtgtcgatgagggacatgggcacagagatgacgcccatcgcaagccaagagccgtcccggaccgggacgccggtgagggcgacgagcccaaactgctcccagccaacgactccacggaggacgctcggtggccccagcgcagtcggctccttcatcagccacggaggagaatgcagcagctcggagctgagcgagcaggagctgcagaccaaaaccaggagggagatcatgctccttggcacgcagctaggcaagaccagcatcgcggcatgggcgagcaagaaggaggaggagaaggacgcctcgctctcgctgaaaccggtgcccatggaccagtcgacgcagaacataaccgcgatccgtgcggctgcgtgggaggaggcggagaaggccaagtatttagcgagattcaagcgagaagagatcaagatccaggcttgggaggaccatcagaaagcccagatagaagctgagatgaggaaaatcgaggtcgaggtggagcggatgcgtgcccgcgcgcaagacaagctgatgaccaagctcgcgtcggcgaggcacagcgcagacgagaagcgtgccgcggcggagctgaaacggaaccgcgcagccgcgaggaccgctgagcaggcagagcacatcaggaggaccggccgggtgccgccgtcgtttggctgctggaactggtgctcatgaagtgcccatggaagatgagtcgcccgttgagaatgagtcgcttgtaagctgttgtaactatatatatatatatacacacacgtatgtaagatgtgagatccatgcgtcctgtgctgtggtggttactgtgtaagtgtcacagatgtaccgaattcaaggccgagcttggattcctagtccacatatgtgataaacttcacaccatgctagttgtgactggatttgatttgtgctctaaagcggcc

SEQ ID NO: 942 - DNA, 3874 bp, Zea mays
  unsure (1)..(3874): unsure at all n locations
  Clone ID: PAT_MRT4577_129994C.1
ccgggaccgtggtcttcgccaaaccgctttccttcccatctaaaaccgccccctcccttcctcttctcctagctctcttgcctgcgcaccactcgagtcgagactcgagaggcacctgatctttccttcccgtcttcctcccacacgtccccatcaccattgctgcgacgagagtgagcgggagagggtaggtggcgaggcggcggagatggggcgggggccggtgcagctgcgccggatcgagaacaagatcaaccgccaggtgaccttctccaagcgccggaacgggctgctgaagaaggcccacgagatctccgtgctctgcgacgcagaggtcgcgctcatcgtcttctccactaaggggaagctctacgagtactctagccattccagcatggaaggcattcttgagcgttaccagcgttactcatttgaagaaagggcagtacttaacccaagtattgaagaccaggcaaattggggagatgaatatgtccggttaaaatccaaacttgatgcacttcagaagagtcaaaggcagctgttaggagaacaattgagttcactgaccataaaagaactccagcaactggagcaacaactggacagttctttgaagcatattaggtcaagaaagaatcagctcatgttcgattcaatttccgcgcttcagaaaaaggagaaagcacttacagatcaaaacggtgtcctgcaaaagttcatggaggcagagaaggagaaaaacaaggctttgatgaacgcgcagctccgggagcagcaaaatggagcatcaacaagctccccatcactttcaccaccaatagttccagattccatgccaactctaaatatagggccatgtcaacatagaggggcagcagaatctgagtctgaaccgtctcctgctcctgcacaagcaaacaggggcaacctgccaccatggatgctccgcactgtcaagtaacaggtgaggtcttcccagtgtagttttgcagctgatctcgacagcaacacacctgtcaccgaaatgcttcggtgaccctagatatcaaccgatgcacgatccatctcgatcctgtgatcgaataccggcgtaggtactaccaataaagtcaggccccgtcaaatgctttacatggtgattgaagtctggagcttctcagcaccaccatatattgtgttcagttcctgtgtttattgccatagctaccctttttttctctgatctacgagctagacgtagctttgtgcttggagattccactactatgtttcctctgtcctgtgtatgctttaacggagatgcacgttgtacccgtggtaatatatataaatttgcgttgtaaaaaaaaaaaaaaaaaaaaaattccagaagatcaagtctgctcttttgtcgaaatgttggtgtctcaggttcatgcatgtgtcatatattaagagattgtccctgttccacattttagtattatataaacggtatacaaggtgatcataatatttaaacattagtttgattttttggcacatatttcattacagtttcaaatatggttccttaaacaacacggctatcttagaaaatagatgcttgattatagcaaaaattgaccttatgctgctataagttagattctaggaggttaaattggcatgagtacatattctgaccatgcaacatattcatatataaccgatcgattcagggaaaatgtcactgagttaacttaccctccccacactggattatctgtaactctctagtgctggagacaaaatatgtatgttaaaaaataataagcacgttttagcttttgcacacgagtgatatgtgttggtgatatgatccgaagttgatagagattgtggcttgagtcaccgcaaaatttgatgacattttctttagctgaacccatgccggtaatgaattttattttaaaaaataatatgatatggcttaatgtagatccatttttatatgttgtggattatagaaaaccatgctaattacaactacgagtttgaatttgaaatatcaatagattcctacaaaaatgtatatcactatacttttgctaatttactaaagatgttacaaactttactgttcaaacccgacaaaaaaggtagatgccaaatctgtctaaaagattatattagatcgatccacagattatagtatcaaagtgatggaaaacattgtttgcacaaacaactgagtagctcgctactttttagagctttttttacatcattatttactcttgacttgttttattgttctaaaataccctttctgagttcatgtatgaactatatatgaagcaccatctgttcattaagtaatgacccacttatgtgtgcatgtgatgacagacgttgttccataaccatgcttgcatctagctatgcatgtgattcaaggttagctgtccaatgtcttttgcaattctggaatcgggagaatatacttgtatatatatatcttacatttatcaaatagggagaaattaaatcttgatatcttgaacgttgttcatcgtgaattttgtcgttttgtatgcaatactaatatacttcatctagtaatacaaaaggtacaagaaaaagaaaattgcacctggctatttgtcttaatatattatgctggaacatgacattgccgtgtgctcctgcctttccagcatggaaggcattcttgagcgttaccagcgttactcatttgaagaaagggcagtacttaacccaagtattgaagaccaggcaaattggggagatgaatatgtccggttaaaatccaaacttgatgcacttcagaagagtcaaaggcagctgttaggagaacaattgagttcactgaccataaaagaactccagcaactggagcaacaactggacagttctttgaagcatattaggtcaagaaagaatcagctcatgttcgattcaatttccgcgcttcagaaaaaggagaaagcacttacagatcaaaacggtgtcctgcaaaagttcatggaggcagagaaggagaaaaacaaggctttgatgaacgcgcagctccgggagcagcaaaatggagcatcaacaagctccccatcactttcaccaccaatagttccagattccatgccaactctaaatatagggccatgtcaacctagagggggcgcagaatctgagtctgaaccgtctcctgctcctgcacaagcaaacaggggcaacctgccaccatggatgctccgcactgtcaagtaacaggtgaggtcttcccagtgtagttttgcagctgatctcgacagcaacacacctgtcaccgaaatgcttcggtgaccctagatatcaaccgatgcacgatccatctcgatcctgtgatcgaataccggcgtaggtactactaataaagtcaggccccgtcaaatgctttacatggtgattgaagtctggagcttctcagcaccaccatatattgtgttcagttcttgtgtttattgccatagctaccttttttttctctgatctacgagctagacgtagctttgtgcttggagattccactactatgtttcctctgtcctgtgtatgctttaacggagatgcacgttgtacccgtggtaatatatataaatttgcgttgtaaaaaaaaaaaattacctcgtccgccccagtctagtccgattcaaacccgcccgttccccgtgtccgagccacgcaagccgagctcaatccccagaggccagagccagctgctcggcgctccacgcgatggcgcagaaggagaccaatggcagcaacggcgaagaacatctccacccgcccgccgncgaccccgtcgcccctccgcttctccaagttcttcccagctaacctgcggatcctg

SEQ ID NO: 943 - DNA, 486 bp, Zea mays
  Clone ID: PAT_MRT4577_130243C.1
aaaaaaacaaatcatggggggccaattaatatatgggtacaggagaggcaatcgggatcaaccaacaggcggggggacacacgtccgtacatgagcacaaagactggcgccaaacatgcggagggagatagcaaactgaaaaactttggttttttttttttcacacacaccaaaaaatacctatgtttgggagccagctcggcctcgtttattattggtcaacccccaccccaagctagatagaaaaaaatcatatccatgggcggcgatcgatgggaacaacagttgcagggggcgcacttgcagttgccacccaaactgcaaccggggggggcctccccggactcccccgggggcttaaaaaactcgggcgcggcctttttttccggggccaccccaaggaccacgggggcctgcgcgggggggctcgtctcctccagggaaggggactttttgccgcacttgcagcttgagccccaaccccaa

SEQ ID NO: 944 - DNA, 1505 bp, Zea mays
  Clone ID: PAT_MRT4577_130373C.1
ccacgcgtccgggcacgagggtacgctggtgcgcctctcccctcctcagctcctctccacggctccaacccacctcggcatcgacgccgatttgttacatggcggactcgccggtggagctgccgaaccggctcgccatactgcctttccgcaacaaggtgctgctccctggagccatcgttcggatccgatgcaccaaccccagtagtgtgaagttggtggagcaagagctctggcagaaggaagataaaggactgatcggggtacttcctgtgcgggactcggaggcaacagctattggctctttgctgtctcctggtgtgggcagtgattcaggtggaggaggcagtaaggccgtcggttctgcaggagagtcatcaaagcagcacctaaaaaatgggaaggagcccattcagtggcacaccaagggagttgctgccagagctttacacctttccagaggggtggagaagccaagtggaagggttacatacattgttgttcttgaaggtctatgtaggttcagcgttcaggaactaaatgcaggaggaccataccattttgcccgtgtttcgcgccttgacatgacaaagactgaattggagcatgcagagcaagacgcagatcttattgctctttctaggcagtttaaagctactgccatggaactaatttctgtacttgaacagaagcagaagacagttggtaggacaaaggtgctccttgatacgtcgctttttagtaccagaaaagtgagagcagatcctgctgtttctggctagatgactttaaggggccttgtatttgccagttggtggtgttaaagacaaggtacttccggcccatcgttatggaatcaagagagtaatttttcctgaaaggaacttgaaggacttatcagaggttccattaccaattctctccgacatggagattctgcttgtgaagcgcatcgaggaagtactcgaccatgctttcgaaggcggatgcccacttagatcacgctccaagttgtagcacccaactcgcgtttggtatggatgtttgcttgagaggatcatcgtcacagtaccacgaatggtcaacagtgtgagattccctgctggtcttgccacgcccttttcggtttggcttcgcgtctggaatgtgtatacaggattactggtcagaattctgagaataacgagaagattctctgctgggatagtgggattccctgcatatttatgtgaaaccagctgtcggtctttatgcacagatgcaacagcaacacaaatctggtaggaacactggtgggtttctgtcgataatttgagtgtatatgtaatattatgtaatctattccagggaaacatagttaaaccgaggttgtgaaagccaaagagattgagaaaatatcatacgtactttagggttgggtgacttcgccgaaacggcttgtgttacaaaatgtgcatattcacacttcttcaataaacaaccgaaaatgcaaacatttgctcgtt

SEQ ID NO: 945 - DNA, 3343 bp, Zea mays
  Clone ID: PAT_MRT4577_130377C.1
cggacgcgtgggtgcgccgaattcggcacgaggttcggtattcgtctattttcttttttttaaaaaaaaatattgttctttggcgtacgctggtgcgcctctcctccccgcctcggcatcgacgcgatttgcgtgcccgacatgtcggactcgccggtggagctgccgagccggctcgccgtactgcccttccgcaacaaggtgctgctccccggtgccatcgtgcggattcgctgcaccaaccccagtagtgtgaagctggtggagcaagaactctggcagaaggaagagaaaggcctgatcggggtacttcctgtgcgggactcggaggcaacagctgttggctctttgctgtctcctggtgtgggcagtgattcaggtgaaggaggcagtaaggttggcggttctgcagtagagtcatcaaagcaggacacaaaaaatgggaaggagcccattcactggcacagcaagggagttgctgccagagctttacacctttccagaggggtggagaagccaagtggaagggttacatacattgttgttcttgaaggtctttgtaggttcagcgttcaggaactaagtgcaagaggaccataccatgtcgcccgtgtttcacgccttgacatgacaaagactgaattggagcaggcagagcaagacccagatcttatcgctctttctaggcagtttaaagctactgccatggaactaatttctgttctagaacagaagcagaagacggttggtagaacaaaggtgcttcttgatacagttcctgtttacaggctagctgatatttttgttgctagctttgagataagttttgaggagcagctttcgatgctggattcagttcacttgaaagttagactctcaaaggcaactgaacttgtagacagacacctgcagtccattcttgtagctgagaaaataacacaaaaggttgaggggcagctatcaaagtcgcaaaaagaatttctactgcgccagcagatgagggccataaaagaagaacttggtgataacgatgatgacgaagatgatgttgctgctctggaaagaaagatgcagaatgcaggaatgcctgctaatatttggaagcatgctcaaagggaaatgaggcgcctacgaaagatgcaacctcagcaacctggttatagtagctctcgagcctacttggaacttcttgctgaccttccttggcaaaaggtcagtgaagaaagggagcttgaccttagagttgcgaaagagagccttgaccaggatcattatggactaacaaaagttaagcaaaggattattgagtatttggctgttcgtaagcttaaacctgatgccaggggtccagtgctgtgttttgttggaccacctggtgttgggaagacatctttggcctcctccatagcaaaggccctgaacagaaaattcataagaatctctcttggtggtgtaaaggatgaagctgatattaggggccaccgaaggacatacattggaagcatgccagggagacttattgatggactaaagagggtatctgtgagcaatccagtgatgcttctagatgaaattgacaagactggttctgatgtacgtggtgatcctgcatcagcactactagaagttcttgaccctgagcagaacaaagcattcaacgatcactatttgaatgtgccgttcgacctgtcaaaagtcatatttgttgcaactgccaataggatgcaacctataccccctcctctgttagacaggatggaaatcattgagctgccaggctacacacccgaagagaagttaaaaatagccatgaaacatctcataccaagggtattggagcagcatggcttgagtacgacaaatcttcagattcctgaggctatggtcaaactggtcatcgagaggtacacgagagaagctggtgtgcgcaatcttgagcggaacctagctgcattggctcgtgcagctgctgttaaggtcgcagagcaagttaaaactcttagacttggcaaggaaatacaaccaattactacaacccttcttgattcaaggcttgctgatggtggtgaagttgaaatggaagttattcctatggagcatgatatatcaaacacttatgaaaatccatctcctatgattgttgatgaggctatgctagaaaaagtacttgggcctcctagatttgatgacagagaagctgcagatcgtgtagcaagcccaggagtctcagttggccttgtctggacttcggttggtggggaagttcagtttgtggaggctacagccatggtgggtaagggtgacttgcatttgactgggcagcttggtgatgttattaaggagtcagcgcagctagctttgacatgggtgagagcaagagctgctgacctcaatttgtcacctacttctgatatcaacttattggagagccgtgatatccacatacattttcctgctggtgctgtgccaaaggatggcccttctgcaggtgtgacattggtaacggcactggtgtcgctttttagtaacagaaaagtcagagcagatactgctatgactggcgagatgactctaaggggccttgtattgccagttggtggtgttaaggacaaggtacttgcggcacatcgttatggaatcaagagagtaattttacctgaaaggaacttgaaggacttatcagaggttccattaccaattctctccgacatggagattctgcttgtgaagcgcatcgaggaagtactcgaccatgctttcgaaggccgatgcccacttagatcacgctccaagttgtagcacccaagtcgcgtttggtatggatgtttgcttgagaggatcatcgtcacagtaccacgaatggtcaacagtgtgagagtaagagcctagctctcttgccagcacaggtcttggcacgcccttttcggtttggcttcgcgtctggaatgtgtatacaggattactggtcagaattctgagaataacgagaagattctctgctgggatagtgggattccctgcatatttatgtgaaaccagctgtcggtatttatgcacagatgcaacagcaacacaaatctggtaggaacactggtgggtttctgtcgataatttgagtgtatatgtaatattatgtaatctattccagggaaacatagttaaaccgaggttgtgaaagccaaagagattgagaaatatcatacgtactttagggttgggtgacttgttacaaaatgtgcatattcacatttcttcaataaacaaccgaaaatgcaaacatttgctcgttaattaaaaaaaaaaaaaaaaacaaaaaaaaaaaaaaaaaccccccccccccggc

SEQ ID NO: 946 - DNA, 141 bp, Zea mays
  Clone ID: PAT_MRT4577_130728C.1
tttgcctgcgccgccgccaacacaacccttgagccccaatccctcacagcaacggtggggggcgctcaagaatacctctctctcgtgggcaccatgcgcggccacaacggcgaggtgacggtgatcgcgaccccgatcgac

SEQ ID NO: 947 - DNA, 943 bp, Zea mays
  Clone ID: PAT_MRT4577_130815C.1
gggtacctcgaggccggccggggccgtcacatcgcgaagacacactgggtaggaagagcgcagaaaaaggaagcagcagctttgatcgggtggagtttcttgctcactgatcgtcgagtgaagcctttgtggtccgtgacgatgtcgaggagagccgcagcgttgttgctcgcgtgcctcgtcgccgtgacagcggcggcgctggcggacggcgcgctgctcccgtggttcggcgacggccggcgcgggctcgacgaggcagcggtgaccgacgtgggcctcctggcggccgacccgttccggatcctggagcacgtccccttcggcttcgaccgggacgacgtggccatggtctccatggcgcgcgtggactggcgcgagacccccgacgcgcacgagatcgtggtcgacgtgcccgggatgcgcagggaggacctcaggatcgaggtcgaggacaacagggtgctgcgcgtcagcggcgagcggcggcgcgctgaggagcgcaagggcgaccactggcaccgcgaggagcgctcctacggcaggttctggcgccggttccgcctccccgagaacgccgacctcgactccgtcgccgccagcctcgacagcggcgtcctcaccgtgcgattcaggaagctggcgcccgagcagatcaagggcccgcgcgtcgtcgggatcgccggaggagacggtggcgccgaggcgaaggagagcatcggaactggcgccggagatggtcatcagaccaagaaggtggagctctgaacagtgaggtgggaattgggatgactcaatgacggagatggctctgcgcgtgtgcgtagttttactagtttatgtgttcgcgtttttcttttttgtgacagcgtatatgcacttgtatggagtggaagtgtgccatgttttactgaggaataaaaacctacagtactagtgtact

SEQ ID NO: 948 - DNA, 1091 bp, Zea mays
  Clone ID: PAT_MRT4577_130817C.1
cttctggctcgccgccagcgcgctccattctccaactacctcaccaccctataaatgtagtcgcctactcgcctctgcgccgtcaccatcgcgaagacacactgggtaggaagatccgcagaaaaaggaagcagcagctttgatcgggtggagtttcttgctcactgatcgtcgagttcctgttcgatcgaagttccaggtgcgcacgtacgcactgaagcctttggggtccgtgacgatgtcgaggagagccgcagcgttgttgctcgcgtgcctcgtcgccgtgacagcggcggcgctggcggacggcgcgctgctcccgtggttcggcggcggccggcgcgggctcgacgaggcagcggtgtccgacgtgggcctcctggcggccgacccgttccggatcctggagcacgtcccgttcggcttcgaccgggacgacgtggccatggtctccatggcgcgcgtggactggcgcgagacccccgacgcgcacgagatcgtggtcgacgtgcccgggatgcgcagggaggacctcaggatcgaggtcgaggacaacagggtgctgcgcgtcagcggcgagcggcggcgcgcggaggagcgcaagggcgaccactggcaccgcgaggagcgctcctacggcaggttctggcgccggttccgcctccccgagaacgccgacctcgactccgtcgccgccagcctcgacagcggcgtcctcaccgtgcgattcaggaagctggcgcccgagcagatcaagggcccgcgcgtcgtcgggatcgccggaggagacggtggcgccgaggcgaaggagagcatcggaactggcgccggagatggtcatcagaccaagaaggtggagctctgaacagtgaggtgggaattgggatgactcaatgacggagatggctctgcgcgtgtgcgtagttttactagtttatgtgttcgcgtttttcttttttgtgacagcgtatatgcacttgtatggagtggaagtgtgccatgttttactgaggaataaaaacctacagtactagtgtactaaaaaaaaaaaaaaaaaaaaaaaaaaaaaggcttagtacgcggcaggacgt

SEQ ID NO: 949 - DNA, 319 bp, Zea mays
  Clone ID: PAT_MRT4577_130847C.1
ggcaacaccaaaaagcaccattttttccttaagattaacttaaaaaaaaccctgccgggggtaacaaaatccatcgatccccaatccatgctgtttgatgcatgggtcctcttaaaccggggataaacacaatccttacaattgacacaaatggaccttggaataaaaaacacagatgggcaaaaacaaacacgacccgaacgaaaataaaccctttggactagggtaaacatcacggtagcaaacaggataacttggccgggcgggccccaccgtttaattcctccaattcccgtgggagttgccctaacccccccca

SEQ ID NO: 950 - DNA, 348 bp, Zea mays
  unsure (1)..(348): unsure at all n locations
  Clone ID: PAT_MRT4577_131110C.1
cttccagaaggccaatgtcaaaggaacccggaaacttccggggcaactgcctggaatagcctaattgggggtgattgatcaagctacttgagctccgatcctcgctagctagttagtttaccgttttaccacaagtcttcttcacaagttaaggattgacagcaacaaaaaatctcaatggcctctgccaccgcgctcaagtcctccttccttcccaagaagtccgaatggggcgccaccaggcaggccgccgcgcccaggccgtccaccgtctccatggtcgtncgcgccttcggctacgccgatgagctcgtgaaaaccgcgaaaacgatcgcgttgccggggcgg

SEQ ID NO: 951 - DNA, 1261 bp, Zea mays
  Clone ID: PAT_MRT4577_13125C.1
cctcgaggccggccgggccgggactcgagccaaaccccctcaactcaactgctgaacgcagagttcgatctagcacgcgcagcggcggccgctgcccacaatggcgtcccttttcaaggacccgagcaagctctcagcgtacagggaccgccgattcaagggcacacaggaggagtatgaggcaacgctgcatgcgtcgacaacgctgtacattgggaatatgtccttctacaccacggaggagcaggcctacgagctcttctcccgcgctggcgagatcaagaagatcatcatggggctcgacaagaactctaagaccccatgcggtttctgcttcgtactgtactactccagggaggatgctgaagatgctgtcaaatacatcagtggaacgatgcttgacgatcgtccaatccgtgttgatttcgattggggctttgaagaaggcaggcaatggggccgtggacgaagtggtggacaagtgagagatgagtaccgtacagattatgatcctggtagaggtggttacggtaagatggttcagagggaactagaagcacaaagagaactagttgactatggtggatctttccaaccaaatgcaccacctccctatgagagaggtgagcggaagagaggatacggggactctcataggaatgccagaggagattaccagcggaaacgctaccggagcagcgatgaccggtcagcaccagaggagtccaagagagcgcctgactctgatccagcggataagaatcctagatttcgcgagaaaggtgactctgatgaagaagatgatgactacgacaagagacgtcgtcgctaaagctgtgtggaacagtcgttgctacatgcagctgttctggtgtccagtcgctgcagaagagtccacagcgagcagcagtatccggatttcgccctgctgtgcctgtactgttcctccttttcgggctagtttggagccacaaaagtagagcagattggagggcccaaaatacacttcttattcaaaatttgaataataagtggatttttgtttctccaatcccttccggttttatggctcccaaactagtccatctagtgcgtcggttttacatgtggttcaagtggggtactgtgtgctaacagatacaacaacgaggcttgtctgtatgtctgctgacactagagaccaatgcatataatgattctaatttaggccccgtttgatgattctaatttaggctccgtttggtaaggcttcggtttcttt

SEQ ID NO: 952 - DNA, 1214 bp, Zea mays
  Clone ID: PAT_MRT4577_13127C.1
ctcgaggccggccgggaacgggaggcatcctcgcaggtcgccaaaattcccacgcccggcggttctacggtcgagccaagccccctcaactgctgaacggagagttcgacctagcacgcgcggccgccgccgccgccgcagcccgcaatggcgtcccttttcaaggaccccagcaagctctcggcgtacagggaccgccggttcaaggggacgcaggaggagtatgaggcggcgctgcttgcgtcgacaacgctgtacatcggtaatatgtccttctacaccacggaggagcaggcctacgagctcttctcccgcgccggcgagatcaagaagatcatcatggggctcgacaagaactccaagaccccatgcggtttctgctttgtactgtactactctagggaggatgctgaagatgctgtcaaatacattagtggaacgatgcttgacgatcgtccaatccgtgttgatttcgattggggctttgaagaaggcagacagtggggccgtggacgaagtggtggacaagtcagagatgagtaccgtacagattatgatcctggaagaggtggttacggtaagatggttctgagggaactagaagcacagagagaattagttgactatggtggatcttttcaaccgaatgcaccacctccttatgagagaagtgagcggaagagaggacacggagattctcataggaatgacagaggagattaccagcggaaacgctaccggaacgatgaccggtcagcaccagaggagtccaagagagcaccggactctgatccagcggagaagaatcctagattccgtgagaaaggtgactctgacgaagaagaggatgactacgacggcaaacgtcgtcgctaaagctgtggaacagccgttgctactacatgcagctgttctggtgtccagtcgttgcagaagagtccacagctagcagcagtatgccagtatccgaatctcgccctgttgtacaacagatttaattcttcggtcggccattcctccttttctagtgctcctatcatctgttaatctgaatgtgcgtcggttttacatgtggtccaagtggggcactgttctcacagatacaatgagccttatctgtacgtttgctgctgctgaagcttgagaccagtgcatatattaattctaacagattgttaccgaaaaaaaaacccacgcgtccgcggacgcgtggg

SEQ ID NO: 953 - DNA, 358 bp, Zea mays
  Clone ID: PAT_MRT4577_131301C.1
aagcctttcttaaactaacgttgttgctgaccaaaaaaaaaaaaaaaaaaaaaaaaaaaaaaaaggggaaaaaaaaaaaaaaaaaaaaaaaaaaaaaaaaaaaaaaaaaaaaaaaaaaaaaaaaaaaaaaaaaaaaaaaaaaaaaaaaaaaaaaaaaaaaaaaaggccgccccttttaaagaacccaactttacttccccttccttccaacttaaaaccttttttatagtgccccctaatttaaattaattgcccttcttttaaaaacttcttaactggaaaaaccttggctttcccaaatttaatccctttgaaaaaaatccccttttccccaattgccttaataccaaaaagcccc

SEQ ID NO: 954 - DNA, 190 bp, Zea mays
  Clone ID: PAT_MRT4577_131328C.1
gctgcgaacaaaaaccttgctcattcttctctcgtctcgttttatagcgggagcaaacaatgggaacaacaggggtaccaacacctaatccaaaggttgaacggacactaacacggtgacagatgcgaacgggaacacgattctatagatagataatataacttggtcgaagccaggatgggtccacaca

SEQ ID NO: 955 - DNA, 245 bp, Zea mays
  Clone ID: PAT_MRT4577_131498C.1
cgcgaagatgggggcccgcggcatgcaggcgttcggcaagcactgcaagtccctggcgcggctgcggcgggtcatgcacccgatcgccctggcggacagggcgtgccagcacgacgacgcgcacaccatcgcgtggagcatgtccatgctgcagcacctggagatggggtacatgctggtggcgacggaggcggtggccgagatcctgaggcggtgccgcgagctcaggttcctgggcgtgcgcg

SEQ ID NO: 956 - DNA, 3529 bp, Zea mays
  Clone ID: PAT_MRT4577_131516C.1
gcatccgtccgggcctcctcgtctccccagccccgccgccgccgggtcctgacctagcctccagcgccgcccgctgccatctgctctagcatcacaccaccgctgtggagggaccgagggagcagagcaccggagtagccaccgccgctggtggagtaccagtcacctggagtagccacgcagacaagcaacgaaggcgagcagcagcgcgtggtagaggccctccgacctccgatttgacctccgtccggctctctgcactgccgtccaaatccaggttttgtctcccaaatatcttgcctttttgttgcattggactcttctgtggttagaatggcagcacccaagcccatttctcgtcttatttctcatgtcattcttgatttggatggcaccctcttaaacacagattttgttgtaggtaaggtagtaaaaccatttattctaaagaatggaaaaacgtgggatagcaagaaagctcacaagctagttgggaagacaccttatgaagctgcagctgttgttttagaagactatggactcccttactctacagaagagttcctctcgatgattactccgatgttcagtgagcagtgggcatccgtccgagtttcttgaatgctaatttgaaggaccagtcacatctctctcagtgagctggaatgcatgtgcctgacttgtgggggcatggttttgaaattctcaggccaactttccttcactcgagagcttgatagagagaattcacgaggatggaagagtagcagagaagacactggacctgccaatgtatgccaagtacaaagactcgccttatctgagaaacccttcgaagcacgggagtactatcggtgggacccaggctgagatggattccaagtgagaagccccctggagggccactagataatctgttacttatttgccctatggtaaatgcgtcggtgttgatgcagaaacaattggactcattgtgagcttactcgcttcttttcgaaagtagttagtattcctcgaagtggtgtttttaccttgtaataaaggcaaaacagtattgttacgcggcggtcggggcgctctcagcgtgcacgaggttaggtgcattggatttgggatgacaggcggttgaaatagtgcactaggatgaggtccttgacaacccagtcctgggcactgcactgatcaatatgtatgctaagtgttggagcacaagagaggcatggatggtgttccagcagatgttggagagggacatcattgtttggaatgcgatgatcatggggcttggcatgattggccacgagaagattgcatttgtgcttgttggccagatgaagaactcgggtgtgaagctgaatgataataccttcattggattgctctgcagctgcacacatactagccttgtgaatgatgggcggcggtattttcataacatgactcatgtatacagtataagccctaggattgagcattatggttgtatggttgacctgttgagtcgtgcgggattgctggaggaggctcatcagctgattggtgacatgccaatgctggcaaatgccgttgtatggggagcacgcctcggtggttgcaagatccatcggaatgctgaccttgctgaatatgtgctgaagcagctcatccgactggagccatggaattctgggaactatgtcatgctttctaacatttactcgaacagtggaagatgggaagatgctgcaaagcttaggttggaaatgaaggcaaaggggattgagaaggtcgctgcctctagctgggttgagcttgatgataaggtccacaagttctatgttggggacgattcacatcctctttcagataagatctatgcaaagcttgatgaattgggccacggcataccttgtagattgagcccatagcagcccatatatgaagaatgccaatgtatgccaaggacaaagactcacctagtatcagaaacccttcgaagcacgggggtagtaccaccggtgggaccccgtttgagatggattccaagtgacaaccccccttcagggcccctagataatctgtaacttattttccctatggtaaatgcgtcggtgttcatccataaacaattggtcgctctgtgagcttactcgcttcttttttcggaagtagatagtattcctcgaagtggggtttttactttgtaatatagaaaaaattaaagtgaggctggatttggatggcaccctcttaaacacagattctgttgtaagtaaggtagaaaaccatgcaacttaaaaccacttccaggagctaatcgactgataaaacatttaaagactaacggggtgcctactgctttggcttcaaactcaccaagatgtaacatagaagccaaaattttcttccaacaagggtggaaagagtctttctctgcaattgttggtggagatgaagtagagaaggggaagccatccccgaatatatttttggaagctgcaaagagaatgaactgtgctccttcaaattgcttagtaatagaggattccttgccaggtgttacaggtggaaaagctgcagaaatgcatgtcatagctgtaccttcaatacccaaaaagactgctgagttcagttctgctgatgaggtgatcaattccctccttgatgtgaggcctgaaaagtgggggttgccaccatttaatgattggattgaaggtaccttaccaatagaaccatggtttattggtgggcctgtgatcaaaggatttggccgtggttctaaagtactaggaataccaacagcaaatttacccgcggagaatttttccgacgtagtgtcagaacatacatcaggggtatactttggctgggcaggactttcaacgcgtggtatatataagatggttatgagcattggctggaacccatatttcgacaataccgagaagacagtagaaccttggctgcttcatgatttcggcgaggacttctatggcgaggaggtgcgccttgccatcgttggctacataagacctgaggccaactttccttcgctcgagagcttgatagagagaattcacgaggatggaagagtagcagagaaggcactagacctgccaatgtatgccaagtacaaagactcgccttatctgagaaacccttcgaagcacgggagtagtactaccggtgggacccagtctgagatggattccaagtgacaacccccctacagggccactagataatctgttacttattttccctatggtaaatgcgtcggtgttgatgcagaaacaattggactctctgtgagcttactcgcttctttttcggaagtagatagtattcctcgaagtggtgtttttactttgtaatatagaaaaaaataaagtggggttgttgaaacttgagagtcaaattccgagacgttatgcacgttttgatttctgaattaatcgattggtatcacttgtactgtttttataaaaaaaaaaaaaaaaaaaaaaaaaaaaaaaaaaaaaaaaaaaaaaaaaaaattatatttttt

SEQ ID NO: 957 - DNA, 3101 bp, Zea mays
  unsure (1)..(3101): unsure at all n locations
  Clone ID: PAT_MRT4577_131643C.1
nattcggcttcctgttctgttcgcaccgcctccgcccccctccctccctagtccctccctccctctccccttccggactctctgctctcctctgctgcggccatccattaatctcctctcctcgccatcgctgcactcactctacgcttccctcctcaagcccgagggcttctccgggaaggaatcgccgcgccgggttcctgcaacgccccgccctttgcgcacccggagcaactgagtcgtggctatcgaggatgatgccgcgtttcagataacagagactgtgagagtgcacgacacacttgacatgcagagatgaagatcagtgcgcttctcacctccgcgggcatcaacattggcctctgtgttctattcctgtcactctactccgttctcagaaagcagccggccaatgtcagggtctactttggccgcaggatcgctgaggaacacgatcggctccgaggggcatttatcttggagaggtttgtcccatccactggatggatagtcaaagccctgcagtgtactgaggaagagatcctggctgctgctgggttggatgctgttgttttcaatagaattctagtattcagcatacgcatcttctcccttgccgcagttctgtgtgttttcgggattcttccgctcaattattttggacaggatatacaccatgttcgaattccttcagaatcactagatatatttacaattggcaatgtagaagtgaaatcaagatggctctgggtccattgtgtaaccctgtacataatttctgcagtagcttgcattcttctatacattgagtacaagcacattgccaggttgaagctccttcatcttacaagcgcaacaccaaaaccaaaccattttacagttcttgttcgtggaataccaaaggcagataaagaatcatgcagtgatgttgttgataatttcttcacaaagtatcactcatctagttatctcttccatcaagtagtttacaaagtcgggaaagttcagaagataatgactggcgcaaagaaggcatataagaagttcaaacatttcacagatgaaactgtcgatcaaggttgcaggacagttacctaccgctgttgtctgtgtggagcttcttcaaattctttcaagttgttgaacactgagtgtgagcagaacaaggggaaagcggacaataaatccatcttggacttagacgatgaggaatgcacaactgcttttgtatttttcaaaactcggtatgcagcacttattgcgtcagaaatacttcaaacatctaaccctatgaattgggttgctaatcttgctccagaaccagaagacgtgtattggtccaatctttggctaccctataagcaactttgggctcgccgtattgctacactcctaggctctatctttttcatgttcatatttctgataccggtgacatttatacaaggactatctcagctagagcagttgcagcagaggcttcctttcctaagaggaatattgaagaagaaatactacatgactcagctagtaactgggtaccttcccagtgtcatactgcaaatcttcctgtacattgttgctccaattatgatgctgttttctacattggagggccctacatctcacagtgaaaggaagagaagtgcttgctgtaaagtgctgtactttacagtttggaacatattctttgctaatgtattatctggtactgtcattagtcaattgaatgtgttatcaagcccaaaggacatacctgtccagcttgctaaagctgtacctggacaggccactttcttcatcacctatgtcctgacctcaggatgggctagtttgtcatctgaagttatgcaactctttggtctgatatggaactttataatcaaatacgttctgagaatgagagaagatacagaattcgttccctcgtttccttaccacacagaagtaccaaaagttctgttgtttggactattgggcttcacattttctgtgctggctcctctgatcttaccttttctgctggtgtacttttgtcttggttatgttgtataccgcaatcagttgctcaatgtgtatcgaacaaggtatgacacaggtggtttgtattggccaattgcatacaacacagtcatattctcacttgtgctcacccagatcatctgccttggtgtatttggccttaaagaatcgccggtagctgcaggcttcactgtacctcttatcatccttactcttttgtttaaccagtactgcagaaaccggcttcttccattattcaagacttttccagcacaggatttaatcgacatggacagggaagatgaacgatcaggaagaatggatgaaattcaccacggacttcattctgcttattgccagttcgctgacactgtagatgtgcccttggataaaattgaaatcgttggtggggatgaggagcaaggctctagctcgggtcagtccagtgttaaagaaacgtgcgaggatcccaagaagcacctggctcaccctacactaaaaggactccctgttaaccgcctccggcatgccgtgaggtcggttactttcctgatcagattgcagaaaagaggtttatcagaacagaaaatcggataattagttagccgccaaccccctttgcttgttggctatataaatgtacagaggcatacatgcatatacgatcgttcccttagaagagagaagggctaatgtagaagtctatgggagaacatcatcatgagtgttgaggtgcaattttgttttgtcgcatggatgagtttgttggttctgcgggttatctggcagattcagctacccaaaccttagccttgcacgttgatgaaattaatgctcatggttttgttgtaagagattaatgtggccaaagtgatctagatgtataatgtcctcctctccattggtttgtgtttgagcctcgcaactttagcaggtctgttagtcttcatgcgccaatcatattgaggtattgagaattatactaattggtttgtctgacaagctgtaagcatgttagtccatgctgtcgagcagcaggtgtggaggttcttaacatgtagcattgagctggtatctgc

SEQ ID NO: 958 - DNA, 2431 bp, Zea mays
  Clone ID: PAT_MRT4577_131768C.1
cgagttccgccagagccacacgttttcactgctcccacgaaggcacaccgcacacagccgcggcctgcaggcgacggtgacggcggcggcggcgctccatcctccgccccttcccttactcgcgttcggcacgcaggcgacggtgacggcggcggcgctcaggatcgggctctcagcgacggcggcggcggttttccctcccggctctcgccagtcgcctcgcgctctcgcctccggtcctccgaacgccggccggtgaccctgctggatgacatgagcacactaaatacaatcctgatgaagatggcaggattagcttcctgctgagttttgtcctacaagattgcaaagggcagaatgtcagctagggattctaatcattcatataaatgttcggatgattctcaaatgccgtactacaataactcagcacctgtaggagaaaatggtaggatccatatggcagaaaacagtctaggacatcattactcatcctccgatattggatcacaaaggatcaacaattccaaccctcaagtatttgaagcacagtactgcactctggaatcatcctcagcaaatggtgtttatcctgcacaaagctccacatcttctcatagcatctcccctttaagtgggagccccctgtctcagcatgacagccactcagaccacacatatagttctcctccaagtgcttcctgtctaactgaggttgcagatctcctgatccaacaaaaagaattagagaattccattgttggacctggactggacattagttctgactgctctcggagcttgttgcaagcccatgttccagtgagaccagacaactggagacaacttctgggaattaatggaggagacttgatgcaagtagtcatagcatgtggtaaggctgttgcagagaatgatgtctttgcaacagaactgttaatatctgagcttggtcacctggtatctgtatctggagatccaatgcaacgacttggagcctatatgcttgaaggaattgttgctagactttcttcctccggcagtatgctatataaatctttgaaatgtaaagaacctacaagctctgagctcatgtcatatatgcatctcctttacgagatctgcccattctacaagtttggttacatgtcagcaaatggtgccattgccgaggctattaagggcgagaactttgttcacataattgatttccaaattgctcaggggagccagtgggttactctgctacaggcccttgctgcaagacctggggggccaccatacattagaatcactggtatagatgactcaaattctgcttatgccagaggaggcgggcttgatatagttgggaggacgttgtgtgatgttgctaattcatgtggtcttccttttgagttcaatgccgttccagctgctagccatgaggttgagcttcagcatcttgctataagacatggggagattattgctgtgaattttgcctatcagctacatcatgttcctgacgaaagtgtaagtacagaaaatcatcgggataggattataagaatgatcaagagcatcaatcctagggttgttactctcgttgaacaggagtcaaatacaaacacagctccattcttcccaaggtacatggaaactctcaactactatacagccatgtttgagtcgatagatgttgctctcccaagggatgataggaggcggatgagcgcagaacaacactgtgttgcaagggatattgttaatttaatcgcatgcgagggtgctgaaagggttgagaggcacgagctgtttggaaaatggaagtcaagatttgcaatggctggatttagaccgtacccactgagttcagttgtgaacaacactatcaacacattgttgcatacctacaacagctactacaggcttgaggagagagatggtgtcctttaccttggatggaaaaacagagtattggttgtatcttcggcatggtgttgacatttcctctgcaggttccatcgcactttggcctccatctgacgtttctaaggcaccattatgcttgtctggtatactcagtatatgcttgtatgtaatttgcaaccataccttacccaatggttatcttaccaactagatcttcatggcaaggtgaagtgtcacttaaaatctagaagttgtaactgtcgtgttgacgctagatatagatagttctgctttggtttgacatatgcagatgtgctgtaatgctcaggggttatgctaggcaggcccaagagggtgcctgtttgttatctatcaggctactgtgttgccgcctgctttgtgtgtgcatatatatttggaatgctactgtcctttctctgggatgaagtggattgctaaagtgtcatgtttttcgtaaatactatatccattctcaaatatttgtttgttgtcagct

SEQ ID NO: 959 - DNA, 2198 bp, Zea mays
  Clone ID: PAT_MRT4577_132012C.1
accctcgggcctgcctgggcattttcaggtggacattttactagtataattagacttttactttattgtagatggggtaacaatgtcaaaaaaaccttaagctatattattagcttgctcgcgttcttaattactagaccaacgcattcttatattttgtagccattgctatctccagtgtcaccacgcgttcttattaatgcgagtacgcaaagccagcaactggaccgcgtcgggcatcggttcctgttctgtgctatactgctatcccctcccccaagccgtcaccagcccaccaccagcagcggaaccccccgccctcgttcctcccccgccggcgagagatctacgagatggtgctgtcacacggcgtcggcggctccgatgagtccgtccactcgacgttcgcgtcccgctacgtccgcacctcccttcctaggtaccggatgccggagcagtcgatccccaaggaggcggcgtaccagatcatcaacgacgagctgatgctggacgggaacccgcggctgaacctggcgtccttcgtcaccacgtggatggagcccgagtgcgacaagctcatccaggcctccgtcaacaagaactacgtcgacatggacgagtaccccgtcaccaccgagctgcagaaccggtgcgtgaacatgatcgcgcatctcttcaatgctcctctcggggacgctgaaacggctgttggagtgggcaccgtcggctcgtccgaggccatcatgctggctgggctggcgttcaagaggcgttggcagaacaagatgaaggcggccggcaagccctgcgacaagccaaacattgtcaccggcgccaacgtccaagtttgctgggagaagttcgcgcgctacttcgaggtcgagctgaaggaagtgaagctgagcgacggctactacgtcatggacccgcagaaggcagtggacatggtggacgagaacaccatctgtgtcgcggccatcctcggttccacgctgaacggcgagttcgaggacgtgaagctgctcaacgacctgctcaccaagaagaacgcggagacaggctgggacacgccgatccacgtggacgcggcgagcggcgggttcatcgcgccgttcctgtacccggaactggagtgggacttccgactgccgctcgtgaagagcatcaacgtcagtggacacaagtatggtctggtctacgccggcatcgggtggtgcatctggaggaccaaggcggacctgccggaggagctcatcttccacatcaactacctcggcgccgaccagcccaccttcaccctcaacttctccaaaggttccagccaggttattgcacagtactaccagctgatccgccttggctttgaaggttacaagaacatcatggagaactgccaggagaacgcgacggttctgaagcaaggtctggagaagacggggaagttcaacatcgtgtccaaggacaacggcgtgccgctggtggccttctccctcaaggacagcagccggcacaacgagttcgagatctccgacttcctgcgccgcttcgggtggatcgtgccggcctacacgatgccccccgacgcgcagcacgtgaccgtgctccgcgtggtcatccgcgaggacttcagccgcaccctcgcggagcgcctggtgctcgacatcgagaaggttctgcacgagctggacgcgctgcccgcccgtgtccccagcggcgacctagccgcgctcgccgcggccgagtccagcgagagggagatggagaagcagcgccaggtgatctcgctctggaagagggccgtcctcgccaagaagaagaccaacggcgtctgctaagcagccgagccgacgcatttctggccgtattggcatggggtgaaatttgtctgagtacgcgtttgcagtttttacccgggtgaagattgttatgtgtcgaggttgagttttagaggacggaattgctccggctcggtgtatgtagcgagtgttttacgtgctcaacaactctcagacttccctcccctcttgcatgtaagctgtaagtcgatgcaaataatgttgcgtgtcgagcgacgattagtaatagtacctgatggggtacttgtattagtattgatatttgaattacactatacattatgtgacatactattaatattgctcgacaaagtaatattatcggctcctgtttgattttct

SEQ ID NO: 960 - DNA, 2584 bp, Zea mays
  Clone ID: PAT_MRT4577_132084C.1
attaacagtaacgcgtggaggggggggggggtgggggggaagcacagtcaagataattgtatcttgcccgctttcctctttctttaaccagagggtacaatatataggctgtgatagctaacaaactaatcaactctatctaggatttccaaactaatgcttatccatcctaaacaggcggatgggatacttatccatctaaacaaactaactggaactagctgattttattagggctgttggtcataacagtttcactctacatgtgaaaatgtagatatacatatgaatggacaacatgactaactgtcttgttgcttgcttgttgcagagacgcgagaccaagacaaaagcagccagcggaaaagaggggaagcctcgactcattcccaccagttccatccccaattccatttctccatccatgacagctcgccatttccccacctgttcctacgctaccgccacctaaaaaaattccaggcactatccatttcaatcttgctcaaaggtcatttcattccggccggtgcctattttaggccgattggagggaaggctggtctgtgttttgttttcctgctgcgagcgctttcttgggcgagttgaatttgggcgcctcttgctccaggcagtatttttatcgagctagaatctggtacccggtgattcttgcttggtccaggcgccaaggcgaggaattgggcctagccccagctcaaatctgtgccttgttgcagacagaaggatttctgcatgggcgaccataactaagatgtgagatttggtggcgtcagctcggctggtgggtgattcttggtgcgtacacagacacatccctggaggcctggaggtttggcgaggaggacagtgcaggagagagatgtctttcaggagcctgattcaggacatgaaggacgagttcgggagcatctcgcggcacagccttggcggtcccggtctcaccgctccgccgggaacgcggcgcgggcggtggccgcgggaccgtcggaggcgatggatcagagctgctggtcgcagctgccccccgagctcctgcgggaggtgctggtgagaatcgaggcatcggagagctggtggccagcgcgcaaggacgtggtgtcaggcgccggcgtctgccggacctggaggggcatcatgaaggaggccgtgcgcgtcccggaggtgtcagggaagctcacgttccccatctcgcttaagcagcctggcccaagggatggcactcttaaatgtttcatcaggaggaatcgaactactcagacatattatctgtatattggattgacagaagcattggctgatgatgggaagtttctacttgctgcacgcaagtgtcgtaagcccacctgcacagactacctaatttctcttgataaggttgatatgtcaaagggaagcagcacctatattggcaagctaagatcaaacttccttggaacaaagttcactgtctatgatgctcatccaccatatgatggagctgcggtctcaaagagtcgctctgcacgtgtggttggtttgaagcaggtctcccctagagttccggctggaaattatcccgtttcacatatttcttacgagctgaatgttctgggctccagaggtccaagaaggatgaactgtgttatggattccatccctgcatcagctgttaaggaaggagggaaaactcctacacagactgaatttccacttagcagccttgactctttcccatcatttccattcttcagatctaaatcagctcggatagacagttcaacgtcgcaatcatccagtcagagggaagataggttggtgctgaagaacaagtctcctaggtggcacgaacaactgcagtgttggtgcctgaatttccgtgggcgggtcactgttgcctcggttaaaaacttccagttggtggcttctgaggacaatggaccagagagccaagagagtgacaaggtgattctccaattcggaaagatcggaaaagatttgttcaccatggactacggttatccaatatcggcatttcaagcttttgcaatttgtctgagcagttttgatacaaaaattgcctgcgaatgaggcaaggtgattttcccccttctctattccccttgcttgtattatggacatgcagtaaaattttattgaacatgcaatttccaatgtcaaggatgattggatgaagctctcccaacgtgaaaaaaaaaaaaaaaaaaaaggaaggccgcccgctagtaaaggatcctagcgttactgctcgtgcatacaaaaacattttgccctctctccacctttaactcaacaatgcttttgtcctcgtctatctgcagaagctggatagcggtggcggatagcatgacagcaataggaggatagcatgacagcaataggaaaacggtcgcaaacgtatatttattcggtttgactttttttctttaattttgaataaataagatatataatgtgcaatacaaatttatatttttgtttttagcattgagtctgtaaaagttcataaaagataaatctcaaatttattataaattcacccaaaaaaaattaagggcggccg

SEQ ID NO: 961 - DNA, 1584 bp, Zea mays
  Clone ID: PAT_MRT4577_132172C.1
gggtacctcgaggccggccggggagatcggctgcctcgatttctcttcgagtgccaagcagtactgctagttctacttctgtacttcagcagtagtaggccgctgttgctacaattttgactgactgagatgggaatcctctgcctcggtgcttcctccacactgctctgcggggaggacaggaacaacgtactcggcctcggctgcggcaacgagctggtggaggtggggagcggccatgacggcttggactccgtcgtcggcgccgtgttccccgtggacacagatgaggccgtgcgggcgttgttggagaaggagacggaccacaagcctcaagacggctatgcggagaggctggagcgcggcggattggagtactcctggaggagagacgccatggattggatttgcaaggtccattcgtactacaggtttggaccactcagtctttaccttgctgtgaattacctggatagattcctctcctcatatgatctcccacacgataagccttggatgcgacagttgttgtcagttgcttgcctagctctcgctgtcaagatggaggagaccgtgctccctcttcctgtggaccttcaggtctgcgatgtgaaatttgagtttgaagcaaggactattgggaggatggagcttcttgtgctggccaccctgaaatggagaatgcaggctgtgacccccttcactttcatcagctacttcctcgacaagttcaatggtgggaagccgccgagtttggcactagcgtcacggtgcaccgatatcataattggcacactcaaaggctctacattcttgtcattcagaccatctgagattgccgcggcctcagctctagcagcagtttctgagaatcaggttgttggctcctcgagtgctctttcagcatctgaagtccctataaataaggagatgattgctagatgctatgagctgttgcaagagcaagcgctggtgaggaagacagggcacatcaatggaagcccttcagtgccgcaaagcccgattggcgtgctggatgcaacatgcttcagctttaggagtgaagatgtaagactaggatcatcgcaatcaaacaacatcagtagtagtagtaacgacaatcaagtttctaagaggagaaggctaagcatatcaccaatctgagtagatcaaatctctgttggcagtgtcgcattgtgcgcttggttatgcattgatcatcttaacctcagagcttgtcagagcaacaagtagtggtacaaaaggacccagtgaagcattgtaacaagcagaggatggtgacagtaataagttagaagcagcttcttgatctctgcgacgaaataggtgacgaggaacgtttcttcctctagtaactttgaatccccttcctccccggtccctttgttttattccttttcctttttatcggtatctcaaggcatttgtggggactggggagatatatgtggatatgagattggagacgtgaggattaaagagagagagagggagggagggagataaaaaaaaaacaggtttgttcctttgttctctgccaatatacaaaaaaactgtcgtgcg

SEQ ID NO: 962 - DNA, 436 bp, Zea mays
  Clone ID: PAT_MRT4577_132351C.1
taggggccttttttttttttttttttgaggaaatcagagttgcatacattttttcggacctcgtaccaggatcgtactccggcacttgcgtgcacacccgtatagatacgatagattacgtagccacgctgattcgtgcatcacgcgagcgcatacatacgaacgcgcgtacaacgcggagggggatcgatatcgctctctcacacgcacgcgtatgacgcggggagggacgacgatacgggaggatcagatcagccgaaaaagtggtgcttcttctcgccgccggcctcctcagggtgcttgcgggccttcttcttctcgtggtgctcgtggaaggcgaagccgcgggagccgaggggcggcgccgccgggacctcctcctcgatcttgtggaggtgcgcgtgctccggggccttctttgcctcgtgcttctcga

SEQ ID NO: 963 - DNA, 342 bp, Zea mays
  unsure (1)..(342): unsure at all n locations
  Clone ID: PAT_MRT4577_13259C.1
gacccacgcgtgncggggatcttacctttatcattcttgttttttcaacaatcatcanccctattgcatcagtgacctttgtttcatttattgtcacaaaacatcatgtcacaacaactacaacaacttgtgctagcaaaccttgctgcctactctcattaacttctcttttttacattcaaccaactaactgcattgaactctacttcttatttgctacaacaacaactaccattcagccagctacctgctgcctacctccatctttttctttcattcaaccatctgccaatattgaactctcctgtttattcacagcatcaacaactactaccattcatc

SEQ ID NO: 964 - DNA, 1437 bp, Zea mays
  unsure (1)..(1437): unsure at all n locations
  Clone ID: PAT_MRT4577_132612C.1
cattgggtacctcgaggccggccgggttcgctattcgcttcgctgcccatctctcctcgtccaaagactccaagctcctgtgcggcctgtgttctgctgccgccgccgccccgtcgtctgccgacacctttagcgctgggaaggatcacaggggatcggcgcgaggcgggggacctgcggtttttgtcgcccggatggcggcggagcgatgacactggcgtcgggagcggcgcggcgttgggatgcggacgatctgcgatgtgtgcgagagcgcaccggcggtgctcttctgtgcggccgacgaggcagcgctttgccggccctgcgacgagaaggtacacatgtgtaacaagcttgctagtcggcatgtgagagttggacttgcagaccctaataaacttgtccggtgtgatatatgtgaaaattcacccgctttcttctactgtgagatagacggcacctcactttgcctgagctgtgatatgactgttcatgttggtggcaagcgaacccatggaagatacctgctcctaaggcaaagggttgaatttccaggagataaaccgggccatatggatgacgtgcctatggaaatccaagatcctgaaaaccagagagaccagaaaaagccacccaaggagcaaacggcaaaccaccataacggcgatgatccggccactgatggcaactgtgatgaccagggtaacattgattcaaaaatgatcgatcttaatatgcgcccggttcgtactcatgggcaagaatcaaattcccagactcagggggtaggtcttagtgtgaacaaccatgactctccaggggtggtgccaacaagcaattccgaaagagacaccagcaagtaaacgttggaagatcggaatgtacatttcaactacatatactgttctatacgagttcattttgtcgtgtgtgtgtgtgtggggtggggggggggggggcagagatgggtttattcagtggtttctctatcactaatttttactcaattctaaattataagtcattctaacttttttgaagaggtaaagtatctcaagtttgactaaaattgtagaggtaatcacaaagatttatgacatcaactaggtatatttttaaaatataattaattaaaaaactaataatacttatttggtatcatgaatgtgattgttttattatataaatttgatcaaacttgagatgctttgtctctcttaagaaaattagaatgtactagtaagtatatttttggcagagttgtagctaacagccgcatctcaattggcttgtcatgacctagattggcaaaaccgccaaattactttcacatgaacttgttattgtcttacagacttttgaccattatacatatgattcaggaattccggtnaaaaaaaaaaaaaaaaaaggaaaaaaaaaaaaaaaaagggggcc

SEQ ID NO: 965 - DNA, 1517 bp, Zea mays
  Clone ID: PAT_MRT4577_132613C.1
ccggccgggagtcgcttcgctgccacatctctcctcgtccaaagactccaagctcctgtgcggcctgtgttctgctgccgcctctggtccacatctccccgccgccgccccgtcgtctgccgacacctttagcgctgggaaggatcacaggggatcggcgcgaggcgggggacctgcggtttttgtcgcccggatggcggcggagcgatgacactggcgtcgggagcggcgcggcgttgggatgcggacgatctgcgatgtgtgcgagagcgcaccggcggtgctcttctgtgcggccgacgaggcagcgctttgccggccctgcgacgagaaggtacacatgtgtaacaagcttgctagtcggcatgtgagagttggacttgcagaccctaataaacttgtccggtgtgatatatgtgaaaattcacccgctttcttctactgtgagatagacggcacctcactttgcctgagctgtgatatgactgttcatgttggtggcaagcgaacccatggaagatacctgctcctaaggcaaagggttgaatttccaggagataaaccgggccatatggatgacgtgcctatggaaatccaagatcctgaaaaccagagagaccagaaaaagccacccaaggagcaaacggcaaaccaccataacggcgatgatccggccactgatggcaactgtgatgaccagggtaacattgattcaaaaatgatcgatcttaatatgcgcccggttcgtactcatgggcaagaatcaaattcccagactcagggggtaggtcttagtgtgaacaaccatgactctccaggggtggtgccaacaagcaattccgaaagagacaccagcaagtaaacgttggaagatcggaatatacatttcaactacatatactgttctatacgagttcattttgtggtgtgtgtgtgtgtgtcactaatttttactcaattctaaattataagtcattctaacttttttgaagaggtaaagtatctcaggtttgactaaaattgtagaggtaatcacagatttatgacatcaactaggtatattttaaaaatataattaattaaaacactaataatacttatttggtatcatgaatgtgattgttttattatataaatttgatcaaacttgagatgctttggctctcttaagaaaattagaatgtactagtaagtatatttttggcagagttgtagctaacagccgcatctcaattggcttgtcatgacctagattggcaaaaccgccaagttactttcacatgtacttgttattgtcttacagacttttgaccattatacatatgattcaggaattccggtaatctgtcgggtgtcccggtgatactaaatgatcccctttatttgttcccaagctggatgcccgtacgttgcaacgggaatatataatatcagtatactacgataacttatatacaaaatctatgttatattgttatgagaaaatgtttcataatcaatttgtgatcctagccatc

SEQ ID NO: 966 - DNA, 1728 bp, Zea mays
  unsure (1)..(1728): unsure at all n locations
  Clone ID: PAT_MRT4577_132614C.1
attggagctaataactgcatctctgccagaaatcgcttactagtaataacagagagaccattgggacctcgaggccgggggacatccaaacatatacctcttccgccgtgtcgtcgcccttcgctagtcgcttcgctgccacatctctcctcgtccaaagactccaagctcctgtgcggcctgtgttctgctgccgcctctggtccacatctccccgccgccgccccgtcgtccgccgacacctttagcgctgggaaggatcacgggggatcggcgcgaggcgggggacctgcggtttttgtcgcccggatggcggcggagcgatgacactggcgtcgggagcggcgcggcgttgggatgcggacgatctgcgatgtgtgcgagagcgcaccggcggtgctcttctgtgcggccgacgaggctgcgctttgccggccttgcgacgagaaggtacacatgtgcaacaagcttgctagtcggcatgtgagagttgggcttgcagaccctaataaactggcacgttgtgatatatgcgagaattcacctgctttcttctactgtgagatagatggcacctcactttgcctgagctgtgatatgactgttcatgttggtggcaaaagaacccatggtagatacctgctcctaaggcaaagggttgaatttccaggagataaaccgggccatatggatgacgtgcctatggagatcaaagatcctgaaaaccagagagagcaaaacacgcccaaggagcaaatggcaaaccaccataacgtcaatgatccagtctctgatggcaattgcgatggccagggtaacattgattcgaaaatgatcgatcttaatatgcgcccggctcgtactcatgggcaaggatcaaattcccagactcagggggtggatcttagtgtgaacaaccatgactctccaggggtggtgccaacaagtaattccgaaagagacgccatcaagtaaacattggaagattggaatgtacatttcaactacatattctgttctataggagctcctgggggcagaaatggggttattcagtggtctctctgttatcactagtaagcgtatttctggcagagttggagctaataactgcatctcaattcggcttgtcgtgccctagacggtattgctgtccaattgcattctctttgcgattgttagaactctgtatagaagcgcagcggctgccgcctgtgctctggagccggagtattgtgtgccattagaaactgtacaaaagattaatagaccgctcatttttctctggtcgcacaagttcaattcagttcnnnnnnggcggcgaattcgaggggtgactacttccagagtgaagcggttatcctatccatcatccctggtgctgcgctgcgttgcgttgcgtgcgtgctcgccgctatcgaacctttgctgttgtatcgtcgatgtaatgtatgatgctacttttgagcattatacatatgattcaggaattccggtaatctctcgggtgtcccggggatactaaatgatcccctttatttgttcatttgctcagaatcattacagatagcattgcattattacaatagttgatcagcctgttcgcttagtattaatatgtatcggtttttattgcttctacaatgttgtctctatagattgtagctgcagcagtccgaacatgttttaatctgaagttacatcagagagtaaagtgagtgtgggggt

SEQ ID NO: 967 - DNA, 1143 bp, Zea mays
  Clone ID: PAT_MRT4577_132616C.1
ttcggtcctgccccagcagccacaactacgacagcgccgtggacaagctggacaatacacagtggtacgttgtgtggaacaaggatatgaacacgaggatccttcccgaatacgtggtcagcttcaagtgctccaagctgcagctgacgcaagaattatcagaagcgacctcaaagctgaagaagccgtcacgagtggctcgcgacatgttcccgacgcttcttgcagagatcgagaagatcgtgccagacaagtgcgatctgttgcaggagtcatacagcagattcaagatgggtcggattaagaaagaccagttcatccgattcctccgcaattacgtcggagacaaagtgctgaccaccgtggccaagaaactacgaggatgctaaatttctagtgcgcgtgtctccttggtttcgccgtcttggtggtggcctacgtggtggctctgactacagcgattcaagcttgtctacgtgctagatgtctgcagtagtaccaaatagagatgaggagctttacttttgtttctgtttattcaagtttctgccaagggcgtatgcgtataaaggttttgcagcgatgcagatactttaataaacagaaaggataggtgcagtttctgatcatgagacgtttcagttcttctgtgtcctgcagcctgtggatataatctgtgcagactgaaatgatttgatgaaaccattgttgaaccgcccaatcgcttcaaagttttgccgttcagagtgagcttgtttgggcttgtcagggagaagaatattctctccctttcttgttttttctaagtttaacttctctatatctctgaatattgacaattctaatattcagtcagcataagaaaatctagtgaatctcaccaggcatgtactctcaggcaaggttcacagtttcgttttgggtcaaccgattttttgttttgttgaccaaaatttaacttttgtattttatattttgaattgaaatctatttgaaactggaccgaaattcgtttttcgcttagtagcgaaaacgaaaacacacaccagttttcggtgaaaaaaaaaaaaaaaaaaaaaagggcggcggccgacgagagtacatcgtcgacccagaaattaattcacggagcggcgccgcagg

SEQ ID NO: 968 - DNA, 309 bp, Zea mays
  Clone ID: PAT_MRT4577_13264C.1
tctgacgagaccaccacgggcgtcaagaggctccaccagacgcaggagaccggcgccctcctcttccctgccatcaacgtcaacgactccgtcaccaagagcaagtttgacaacccgcatggctgccgccactcgctccccgacggcccgacgagggccaccgacgtcacgatcgccggacaggtcgccgtggtgtgcggacacggtgatgtcggcaagggtcgtgctgctgccctcaagcaggctggcgcccgtgtcaccgtgaccgacaccgaccccatctgcggcctccaggctctgacggagggt

SEQ ID NO: 969 - DNA, 155 bp, Zea mays
  Clone ID: PAT_MRT4577_132703C.1
tcaacaatgccacagcaatagtttctggcatacgtggaactaattaccctggaaaccgtctccaattatgtccacaaaatccagtcctattcaccagatctaaacgagctttagggcctccacagcatccgttcctggcaaatccagttaaccac

SEQ ID NO: 970 - DNA, 584 bp, Zea mays
  Clone ID: PAT_MRT4577_132831C.1
aaaatcaacctcatcatattttattgtgtaaaattgtagaccttgcatagtatccatgcaatccattcatacatcgatgaaaaacaaggaacttgtctggtaaatccaaagctttgttgccgataatgcgactagaaggcagagccggaaaatgcgtctgcgtctggggttgctctgtatctagcccgggcagtttgatattgttctggtaaacatacagttccaaggctccatcatcccgaaaaatttttgctcgacaccctcgagagtgtagtggtcctacagactcttcgtcaacaagaacagcaataaccttctctttcccgtgtctaccatcaggaatctcaaacattgcttctgtcaaaatgtcctccattatagaccgcagtcctcgggctcctgtttcttttgcgagtgccttctttgctatcatcctcaaagcattatcagcgaaatgaagcttgaccttatggaggaaacatgaacataaataactttcttggttataaattatcgtttaaagtaaaaaaaaatcggccaaatgttgcaattatttcgttggccaaaacgaatcacaaactaac

SEQ ID NO: 971 - DNA, 3827 bp, Zea mays
  Clone ID: PAT_MRT4577_132874C.1
cccttttgctctccgccgcctggtgcttcgcccccctcgctctcgcacgactggtgggccgccggcgccggtgccgccctcccgcagttgggccttcgttggcctcttcgccggccttttcgccggtgacgagcagccactaggaaagcttctgttgctctgcatgcaacgatgaactgacgattgtagttgataacggaaatgtgctgttaggttttgtacacatgtgaccatgtgcagtcaaagatttctgcaacctgcatagcactgattattcttagagaactactgcagtgattactaatatattgtgctagcccctaggtaatctaacatttctgcaacgataccagcttctcttcttgtttacatggagtgcaacaaagatgaggctgctagagggaaagttcttgcggaaagaaaaatgctggacaaggactttgttgatgcaaaaaagttaattatcagggtgcagcaactcctccgaggagtggaagatattgacattccaaaaatggtaactgtctgtgataatcattgtgctatttaagcaaaagtaaatactgtgcctgttaggtatgtaatactgtaaatacctgtaaatactaagggaccattgaaattgaatcagtatgataaccttgcccttttgctatgcgctgacaagagcgtatcttgaggagcggagcaccggatccgacttctttcggcctggaactatcctcgcaaagacccataacagggatatagctatgatctgatcaaagccaagctcagcatcggtacgtcgagaggcaatccgtaacgtacaaaatgctctgccactgacatttggagtgctaaaccagtagaaagatacaatatgcaccaggcaaagccacgataaatttcagttaaaactggcccggaaactaggacttagacttttcgtccaactagttgcgtgtcttagcagtattaactgtcgatagtgaataaatctgtgctctggcagagcaggtttattccagacattgaagatgaatggatgcaccaagctattccttccggtgcaattcatcgatctgataggttatggaagtggcaaggttcaacacaaaactgagcaggacctcaaataaatgtcagaggactgtctcgactgactgcatctgcaataaactatatcaaccacaaatctggtcccttcatggtaagaagaaactgtaactgagatggtatcgcaggtggactgaaaaacaaaatgaaatctgcccaggccaccaggaaaccttcaaaagcttcatcaactgctggattgaaaaggggcaggagggcggtgtttgaatctagtgaatctagcatatcagaaactgacagcgacggtgaggtagagattccaaaacatggtcctgctgaaaatagtgcagggccaggtcaacaaactcgcagatctagcaggcagaagcaagaagttaagtataatgaggatagtgatgatgataatgatgatgtggaagatgatgataacacggttgaggatgattttgttgattctcctgcgttgaaaaggctgagaaaaggtggcatgttccatggtgatcacagtactaaaacagcaaagctgaatgaagacaccgctggccataatagtgtgaatagctggggtaacataaaagataaaaagaacggtggtatgccatgtgaagagaaaacttccaatggggttgagcagatgaagagagaaacaatgcatgttggagaaaatagtgatggcaaagaagagctatttcattctgtcagcaacaatggccttggtctaaacgatgatgatgcttcagatgataacaaattcactttcccagatcctgaattttttgattttgacaaacttcgagatgcaagtcaatttagagccaaccaggtctgggctgtctatgatgatcaaggttgtatgcctagattttatgctcgaatcacaagggtaaaaatggttccaaagtttatgctacaatttgtttggttggagttcaatcctgcaaataaagcggaggaggcatggtcttacaggggtctgcctgttgcatgtggacactttacgcatggactgtcagagacaactagtgaaactggtatgttctcccggattatatcattagagagaagcaagacaaagaacttctatgaaatatatccaaggaaaggtgaagtttgggccctttttaagggatgggatattggttggagctcagatgctggcattcacaaaaaaatgaaccatcgctatgaagttgttcaagttctttctgatctcaccacgagcactagcattattgtcatgccacttgtgaagttaaaaggctatgttagcttatttgtgcagtctggagaggcagctccatatgtgatacctcaggttgacacactaaggttttctcattgtgtcccacattatttgacgagcggaactgaaaaagaaggcattccagaaggatctcttgaacttgatcctgcagcgcttccctccaacttggaagaggcttttccttctgctaacccagaatgcagttcagcaagaagccaggagtctgactccaaaaatgctggtttgtccagtggaaatcgcaaaggatccatgaatgtggggcaggggcaacataaaatagccgcgaatggaagggtttgtacaaagacaacaaaggtagagaatatcaagcataacattgatctgtctgaagtcggcgatgtcgatgacgatagcatttgccaaacagagtatgtatgcgctgaatcagaattctatgatttttcaagaataagatttctccaaaagttttcatctgggcaaatctgggctctctatagtgatatagataaattccccaattactatgcatttatacagaaagtagatctcaagaatgataaagtacaagttagatggcttgatgtctgtcctcaaggagaagtggagaaaagattgtcccaagatcggaccattggcattggaacctttagggttggctacatccacgacatgatgacttacactggtacagatgccttttctcatcttgttgaggccagacctactggcagaaaaggtgaatatgaaatacttcctcgtctcggtgagatatgggcagtttacaaaaattggagcgctggatggactgcgcaggattttgaaaaatgtgaatacgaactggtggagatatttggctatactgattcctccatacaagttcagcttgtgaggaaggtggatggttataagatggtatttatgtcatatagagcagggggtgtgaagacaatacggagggatgagtacccgaagttctctcaccagattccatgctttcacttgacacatgaaaaaggtggcaagcttcgaggctatttggagctcgatcccctatcactaccagaggaatttctctgctgattcgatctgagataaaccttatctacatcaaatctggagcctccggtaatgaagtttctggaacatccacaatttcgtagcactgacgttgttacggtggactcgatctgcacaactaaggcattggcttttggacttttttgctggatggctgtcctgcagctgcaattcacatgtctagtatttttttttttgcagtaactatttgttgttagcattagctgtatctacggtttgagttctagtgtaaaaattgctacttttaacatcttgcagtgtactctaaattgcagtactgtgtttgaactgtgaggtgctagcctgattaatttcctggaactgaaaaatgaaatcgagccagcaaggttaggctcatcgatcattatatgtatttttaatt

SEQ ID NO: 972 - DNA, 625 bp, Zea mays
  unsure (1)..(625): unsure at all n locations
  Clone ID: PAT_MRT4577_132927C.1
atttccggaagggggcaaggagcagaccaaggaagatgagcaagactgccctcctcaccccctacaagatgggaaggtttgatctttcccacagggtagttcttgcaccactgacaagggagcggtccttcggaaatgttcctcagcctcatgccatactgtattatcaacagagaacaaccaaaggaggccttttgattgctgaggccactggagtttcagacactgctcaagggtacaaagacactcctggcatttggacaaaggagcaagtagaagcatggaaaccgatcgtgaatggggttcacgcaaaaggaggaatatttttctgtcagatttggcatgtaggaagagtctccaatcacacttttcagcctaacgggcaggctccaatttcgagcactgataagccactcaaacctgtagttagagccgatggcatagatgtgcctacaatttcaactcctaggcggctacagactaatgagattcctttggtaatcaacgattttagggctgctgctagaaatgcaattgaagccggatttgatggtgttgaaatccatggagctcatggttatttgattgatcagntcttaaaggaccaagtcaatgatcgcactga

SEQ ID NO: 973 - DNA, 326 bp, Zea mays
  Clone ID: PAT_MRT4577_132953C.1
acagaacacaataattacttaatttaacattacccaaactggcattttgacaatgtttgccggtggtgaccacaatggaaacagggttttaggtacaagcgggcccctttgctggctggcaagggtgaccacacccaaacacaccagaccagaggcggaaccacccggcaggggcgccaacggggagcgctttccgtgtttgcaccgcaaaagtaaaaattaaacatcacgatggggagggaaactgaataattttggtacatggatataaggttcttttttgggaacgccacggggccttgtttagccgctccattgggggatga

SEQ ID NO: 974 - DNA, 1722 bp, Zea mays
  Clone ID: PAT_MRT4577_132954C.1
gagcacaacgcacacgtccggccatcttcttcttgcacaagtcgagggccaccgctccgcatccgcatcttcttccagagcaagtcgagcgcggcggccacaaaacccagtcccatacgcacccgtccgttccgcgcgatcagccgagcgatgtcgtcgtcggcgcccgcaccggccgccatggccgtggacgacgcggaggacgaccagctcgcctccatgtccacggaggagatcaccagggcctcccgtctcctcgacaacgagatccgcgtccacaaggacgagctgcagcggtcgaacctggagctggagtctatcaaggagaagaccaaggagaaccaggagaagattaagctcaacaagcagctgccgtacctcgtcggcaacatcgtcgagattttggaaatgaaccctgaggatgaggctgaagaagatggtgctaacatcgatctggactcacaaaggaaaggaaaatgtgttgttctgaagacatccaccagacaaaccatattccttcctgtaattgggttagttgaccccgataagctaaagcctggcgatttagttggagttaacaaagacagctacttgatactagatacattgccttcagagtatgactcacgggttaaggcaatggaagtagatgagaaacctactgaggattacaatgacattggcggacttgagaaacagattcaagagcttgtggaagcaatagtgttaccaatgacacacaaggaccgatttcaaaaattgggcattcgtccccccaaaggggttcttttgtatggaccccctgggactgggaaaacgctcatggctcgtgcatgcgctgcacagacaaatgcaacatttctgaaattggctggtccacaacttgtccagatgttcattggtgatggagctaagcttgttagagatgcttttcagcttgctaaggagaaagccccgtgcatcatctttattgatgaaattgatgccattggaacaaagcgttttgacagtgaagttagtggtgatagagaagtgcaaaggacaatgttggaattgctgaaccagcttgatggatttagcagcgatgagaggataaaggtgatagctgcaacaaatcgtgctgatattcttgatcctgctctgatgagatctggtcgtctggaccggaagattgagttccctcatccatcagaggaagcaagagctagaatcctgcagatccactcgaggaaaatgaatgtgaatccagatgtcaactttgaagagttggcgcgttcaaccgatgatttcaatggcgctcagctaaaggctgtttgcgtagaggctggcatgctcgctctacgccgagatgctacagaggttacccacgaggatttcaacgaggggatcatccaagtgcaggcaaagaagaagtccagcttgaattactacgcgtaagggcttgttcggttataccccaatccatagggattgagggggtttcaatccccaataagtcaaaatcccctccaatccgtatcaatccccttcaatccatatggattggaaataaccgaacaagccctaaggggggaacgccccgtacttggtgatcattcagttgtttgtgacactgccattgtctgggcaggctaacttactatttgtactataagcaagctgttgcttttgagtcttactccgtatgagagtatcatttatgaaatattaaccaagtctgcc

SEQ ID NO: 975 - DNA, 1750 bp, Zea mays
  Clone ID: PAT_MRT4577_132956C.1
gagcacaacgcacacgtccggccatcttcttcttgcacaagtcgagggccaccgctccgcatccgcatcttcttccagagcaagtcgagcgcggcggccactgaaccccgtcccacacgcacccgtccgttccgcgcgatcagccgagcgatgtcgtcgtcggcgcccgcaccggccgccatggccgtggacgacgcggaggacgaccagctcgcctccatgtccacggaggagatcatcagggcctcccgtctcctcgacaacgagatccgcgtccacaaggatgagctgcagcggtcgaacctggagctggagtctatcaaggagaagaccaaggagaaccaggagaagattaagctcaacaagcagctgccgtacctcgtcggcaacatcgtcgagattttggaaatgaaccctgaggatgaggctgaagaggatggtgctaacatcgatctggactcacaaaggaaaggaaaatgtgttgttctgaagacatccaccagacaaaccatattccttcctgtaattgggttagttgaccccgataagctgaagcctggcgatttagttggagttaacaaagacagctacttgatactagatacattgccttcagagtatgactcacgggttaaggcaatggaagtagatgagaaacctactgaggattacaatgacattggcggacttgagaaacagattcaagagcttgtggaagcaatagtgttaccaatgacacacaaggaccgatttcaaaaattgggcattcgtccccccaaaggggttcttttgtatggaccccctgggaccgggaaaacactcatggctcgtgcatgcgctgcacagactaatgcaccatttctgaaattggctggtccacaacttgtccagatgttcattggtgatggagctaagcttgttagagatgcttttcagcttgctaaggagaaagccccgtgcatcatctttattgatgaaattgatgccattggaacaaagcgttttgacagtgaagttagtggcgatagagaagtgcaaaggacaatgttggaattgctgaatcagcttgatggatttagcagcgatgagaggataaaggtgatagctgcaacaaatcgtgctgatattcttgatcctgctctgatgagatctggtcgtctggaccgtaagattgagttccctcatccatcagaggaagcaagagctagaatcctgcagatccactcgaggaaaatgaatgtgaatccagatgtcaactttgaagagttggcgcgttcaaccgatgatttcaatggcgctcagctaaaggctgtttgcgtagaggctggcatgctcgctctacgccgagatgctacagaggttacccacgaggatttcaacgaggggatcatccaagtgcaggcaaagaagaagtccagcttgaattactacgcgtaagggggggaacgcccggtacttggtgatcattcagttgtttgtgacactgccattgtctgggcaggctaacttactatttgtactataagcaagctgttgcttttgtgtcttactccgtatgagagtatcatttatgaaatattaaccaagtctgcctgccgtattgctttctttctcctcacggagaggagctcggccttccacgactgcacatttgctctgttttcagaagttcgtgtgtttaatgataaaaaatcaggtgggaaagctttcccatttgactaaaaaaaaaaaaaaaaaaaaaaaccaaccc

SEQ ID NO: 976 - DNA, 343 bp, Zea mays
  Clone ID: PAT_MRT4577_133024C.1
cggacgcgtgggcatctagcagcatagtagggacaatactgtgccaacaatggcagccaaaatatttagcctccttatgctccttggactttctgcaagtgctgctacggtgaccatttgcccacaatgctcacaagctcctatagcttccccttcttcccccatacctgtaaccatcggtgtgttaagaatgagaaatcccaatttttcagccctataggatccaacaggcattcgcagctggcatattacctttatcaccctctgctcctccaacactcattagcaccattacagtaggtacctttggtggatttattggcacagaacatcagggcacaac

SEQ ID NO: 977 - DNA, 794 bp, Zea mays
  Clone ID: PAT_MRT4577_133069C.1
ccgggttatggagaggcagaaaggatgctaaaggaggtcactgtatggtagcctgggaaaaggtttgtaggcctctacatatgggaggcctcgggatttctaacctgactaagctttgttgggctctcagaatgaggtggttgtggctgcaaaaaactgattcttcgaggccatgggtggacctacccattcaggtcccaagtattgccaggtccttcttctctgcagtattgatgtcagaggttggcaatggtgcgaatactcttttttgggtggataaatggattaatgggaaaaaggtagctgatatagcaccaagattgttctgcaccatatcaaaaagaattgccaataaaagaacagttcaagaggcaatggacaataggagatggagaggtgatattaggggcgctctctcagcaggggccttgattgattttctgcatctctgggaagctttaacggattttcagctgcatcctgatattgaagacagacacatttttaccatagcgccagatggtaactactcagcaaaagttgctcatgaagggctcttccagggatcgtgctcctttcttcaccacaaaagaatctggaaatcctggatgccacccaagtgccatttcttcctgtggctggtggcacatgataaatgctggactgctgataggctgcagaaaagaggcatgaaccatccggctaggtgccctctttgtgatcaagaacctgaaagcattaatcacctgctgggttcctgtgtgttctcaagagttttctggtataggcttttg

SEQ ID NO: 978 - DNA, 1471 bp, Zea mays
  Clone ID: PAT_MRT4577_133091C.1
ccccccgcccacgcgtccgctcgtacgccgtcgcttcctgcggtacgtactctctgtccgcagcgttcctccagctagtagcagtagcagctagctagctagctagcaactggccatcggggctgctagcagcgtacgtacgtggcgcgatggctcctccagctcatgataggctccgccgcctggtgctgctcctcgtcgttgccaccgccgcggcggctttgcttctggcgccgacgacggcggatgctgcgctgccgcgggtgcagcacacgcccaccaaggccgacgggtcgctcgccatcctcgtcgtcggcgactggggccgccgtggacagttcaaccagaccttggttgcccagcagatgggcgtggtggggcagaagctggacatcgacttcgtcatctccaccggcgacaacatctacgacgacggcatcgccaacactagcgaccccctcttcaaggaatcgttctccaatatctacactgccaacagccttcagaagccttggtacctggtccttggtaaccatgactacacgggaaacgcgctcgcgcagctcgaccctgccattcgcaaagtggatagccggtacaccgccattgccaagtccttcattgtcaactcaggggttgcggattttttcctcgtcgacacaacgccgttcattgtccactactggaacaacaccaagttcgattggagaggcgtcgctcctcgagacacctacatcgcgaatctcctcaaggacttgaagtgtgcactgacagcgtccaaggctccctggaagatcgtcgtgggtcaccaccccatcagcagcgcctgcgggcatgggaacaacactgagctggaggagttgcttctcccggtcctcaggacacacggggttgacatgtacttgaatggccatgaccactgcctgcagcgcgtcagcagcagagacagtcgtcttcagctactaaccagcggcggcgggtccaaggcatgggctggcaagttcaagcccaccctcgacaaggtggagttcctctacgacggccaggggttcatgtcgatgcgcctgagcaggacggaggcccgcctcgcgttcttcgacgtcgctggcagcgtcctgcactgctggaccatgcatgcccaaaaattaaagacgacgacgacgacgactgctgctgctgctgcagccgggcactaaagctttgctggatcggagttattaatgttcgttgctgcctcgcggcggtacgatgagttgatgatgcaattaattatttggttttgtcgtcttttcgtgcgtgagagggaagcaataataattatttgctgctgcttccgttgtgtgcacatgcatgtgagggtgtcaagtatgttcagcctcttgcaagataaaatctctcgtcttctatggaataaactgggaaaagagttttttttggttaaaaaaaaaaaaaagaaaagagagtgagagtg

SEQ ID NO: 979 - DNA, 1707 bp, Zea mays
  Clone ID: PAT_MRT4577_133158C.1
ccggccggggtggatcggaaaccagctgacgctgagtcgtctttctcggcagcaggacccgccgccgcctcctctccatctctttctctctctctcgccatatcgattccattggggacgcaagcaccgccccagacccagagcttctcttctcaaaagatgcaggagcaggacgtggacgatggcggcggcaggacgacccagcagcaggagaagtcgatcgacgactggctccctatcaactcctccaggaaggccaagtggtggtactccgccttccacaatgtcaccgccatggtcggcgccggcgtgctcggcctcccctacgccatgtccgagcttggctggggccctggcatcgcggtgatgatcctgtcgtggataatcaccctatacacgctatggcagatggtggagatgcacgagatggtgcctgggaagcggttcgaccggtaccacgagctcgggcagcacgtcttcggcgacaggctgggcctctggatcgtggtgccgcagcagctggcagtagaggtgagcctgaacatcatctacatggtcaccggcggccagtccctcaagaagttccacgacgtcatctgcgacggcggcaggtgcggcggcgacttgaagctctcctacttcatcatgatcttcgcctccgtccacctggtcctctcccagctccccaacttcaactccatctccgccgtgtcgctcgccgccgccgtcatgtcgctcagttactccaccattgcgtggggcgcgtcgctgcacagagggaggagagaggacgtggactaccacctgcgcgccacgaccaccccagggaaggtgttcggcttcctgggaggcctaggggacgtggcgttcgcctactcggggcacaacgtggtgctggagatccaggccaccatcccgtccacgccggacaagccgtccaagaaggccatgtggaagggcgcctttgtcgcctacgtcgtcgtcgccatctgctacttccccgtcacgttcgtcgggtactgggccttcggcagcggcgtcgacgagaacatcctcatcacgctctccaagcccaagtggctcattgccctcgccaacatgatggtcgtcgtccatgtcattggcagttaccaggtttatgccatgccggtgtttgacatgatagagacggtgctggtcaagaaaatgaggttcgctccgagcctcacgctccgtcttattgcccggagcgtctatgttgcgttcacaatgtttctaggcatcactttccccttcttcggtggattgctcagtttcttcggcggattagccttcgcaccgacaacttattttcttccctgcatcatgtggctcaaggtttacaagcccaaacggttcggcctttcatggttcatcaactggatctgcatcgttattggagtgctgctgttgattctgggtccgataggagggctccggcagatcattttgtcagccaccacatacaaattctaccagtaaaatcgatcaactggagtcgtatggcgtggctgttttgttagcattacatttcttagggtggattggcttttaatgtacacgagcgagtgagattgatgctagtagctcctaggagtatatatatttctatcatccacagagcttaatgtatcttgtagttgggacattaaaagagcaagtaggctttactcggtgatctttcgttag

SEQ ID NO: 980 - DNA, 780 bp, Zea mays
  Clone ID: PAT_MRT4577_133328C.1
atcaactctcatttcgcattcgtccaaactcgtgagcactttctcctcgtccccgacaagccactcgaagccgagatacggccatggactccaccggcaccggagcagcggggaagggaaagaagggagcggccgggcgcaaggtcggcgggccaaggaagaagtcggtgtcgaggtccgtgaaggctgggctccagttccccgtcggccgcatcgggcgctacttgaagaagggccgctacgcgcagcgtgtcggcaccggcgcccccgtctacctcgccgctgtcctcgaatacctcgccgctgaggttctggagctcgccggtaatgctgccagggacaacaagaagactcgcattattccgcgccacgtgcttctggcgatccggaacgacgaggagctcgggaagctgctgggcggcgtgaccatcgctcacggaggtgtgctccccaatatcaaccctgttctgctgcccaagaagacggcggagaaggcgtccagtggcgggagcaaggaggcaaagtcgcccaagaaggccgccaagtcccctaagaaggcatagactgactgtccggagtgatctgatgtttagcagtaccttgttaccagtatgcggtgatgcgtaggctgcagatgggacgaatgtgcttgtatgtgtatgtgtcctgctgcaagttgtcctttgctatttagaatggaagaagaaatgccttgtttctctgaggttgcaatgtcttttccctaatttcatttatgcactgctgtgatttctgatatct

SEQ ID NO: 981 - DNA, 902 bp, Zea mays
  Clone ID: PAT_MRT4577_133332C.1
ggccgggccgggcaaaaaaaaaaaaaaaaaaaaaaaaaaaaaaaaaaaaaaaaaaaaaaaaaaaaaaaaaaaacctcacaattccgcattcgatccaactcctgagcactttctcctcgtccccgacaagccaatcgaagccgagatacggccatggactccaccggcaccggagcagggggtaaggggaagaagggagcggccgggcgcaaggtcggcgggccaaggaagaagtcggtgtcgaggtccgtgaaggccgggctccagttccccgtcggccgcatcgggcgctacttgaagaagggccgctacgcgcagcgtgtcggcaccggcgcccccgtctacctcgccgctgtcctcgaatacctcgccgctgaggttctggagctcgctggtaatgctgccagggacaacaagaagactcgcattattccgcgccacgtgcttctggcgatccggaacgacgaggagcttgggaagctgttgggcggcgtgaccatcgctcacggcggtgtgctccccaatatcaaccctgttctgctgcccaagaagacggcggagaaggcgtccagtgtggggagcaaggaggcaaagtcgcccaagaaggccgccaagtcccccaagaaggcatagactgactgtctggagtgatctgatgtttagcagtaccttgttaccagtatgcggtgatgcgtaggctgtagatgggtcgaatgtgcttgtgtgtgtatgtgtcctgctgcaagttgccctttgctatttaaaatggaagaagaaatgccttgtttctctgaggttgcaatgtcttttccctgatttcatttctgcacagctgtgatttgtgatattcaacctgggcgacactgtttactgagattttcgattagaatttgctgtgcccg

SEQ ID NO: 982 - DNA, 1009 bp, Zea mays
  unsure (1)..(1009): unsure at all n locations
  Clone ID: PAT_MRT4577_133333C.1
cattgggtacctcgagccggcgggatgttttcgcttggttattattttctctttgtttccagactagtttggtcgactgttgtcacgttagtttgtatcctgctgcagaataacttgcttgtaattgtatactgattagttggtatatagtgatatattatatatactaaatgcattaatgcaggttatgattttgctaaaaaaaaaaaaaaattatcaactcgcaattccgcattcgttccaactcctgagcactttctcctcgtccccgacaagccaatcgaagccgagatacggccatggactccaccggcaccggagcagggggtaaggggaagaagggagcggccgggcgcaaggtcggcgggccaaggaagaagtcggtgtcgaggtccgtgaaggccgggctccagttccccgtcggccgcatcgggcgctacttgaagaagggccgctacgcgcagcgtgtcggcaccggcgcccccgtctacctcgccgctgtcctcgaatacctcgccgctgaggttctggagctcgctggtaatgctgccagggacaacaagaagactcgcattattccgcgccacgtgcttctggcgatccggaacgacgaggagcttgggaagctgctgggcggcgtgaccatcgctcacggcggtgtgctccccaatatcaaccctgttctgctgcccaagaagacggcggagaaggcgtccagtgtggggagcaaggaggcaaagtcgcccaagaaggccgccaagtcccccaagaaggcatagactgactgtctggagtgatctgatgtttagcaggaccttgataccagtatgcggtgatgcgtaggctgtagatgggtcgaatgtgcttgtgtgtgtatgtgccctgctgcaagttgccctttgctatttaaaatggaagaagaaatgccttgtttctctgaaaaaaaaaaaaaaaaaaaaaaaaaaaaaaaaaaaaaaaaagggcggccgccaccgcggtggagtnccag

SEQ ID NO: 983 - DNA, 978 bp, Zea mays
  Clone ID: PAT_MRT4577_133334C.1
cccacgcgtccggcgccccagggcccgtgccattggctcagcccgcccggccgacgcgccgcggcgggccgcctcgaagctcccttcccacgggcggcgtgctgaatcctttgcagacgacttaaaacgcgacggggcattgtaagtggcagagtggccttgctgccacgatccactgagatccagccccgcgtcgcacggattcgtaccgagacgattacccgttccaactcctgagcactttctcctcgtcccagacaagccaatcgaagccgagatacgaccatggactccaccggcaccggagcagggggtaaggggaagaagggagcggccgggcgcaaggtcggcgggccaaggaagaagtcggtgtcgaggtccgtgaaggccggtctccagttccccgtcggccgcatcgggcgctacttgaagaagggccgctacgcgcagcgtgtcggcaccggcgcccccgtctacctcgccgctgtcctcgaatacctcgccgctgaggttctggagctcgccggtaatgctgccagggacaacaagaagactcgcattattccgcgccacgtgcttctggcgatccggaacgacgaggagcttgggaagctgttgggcggcgtgaccatcgctcacggcggtgtgctccccaatatcaaccctgttctgctgcccaagaagacggcggagaaggcgtccagtggcgggagcaaggaggcaaagtcgcccaagaaggccgccaagtcccctaagaaggcatagactgactgtccggagtgatctgatgtttagcagtaccttgttaccagtatgcggtgatgcgtaggctgcagatgggacgaatgtgcttgtatgtgtatgtgtcctgctgcaagttgtcctttgctatttagaatggaagaagaaatgccttgtttctctgaggttgcaatgtcttttccctaatttcatttatgcactgctgtgatttctgat

SEQ ID NO: 984 - DNA, 346 bp, Zea mays
  Clone ID: PAT_MRT4577_133459C.1
cctccccctccggttcgggttcggggtggtgaggttctactgcgttcgggttcgtgggtgagcggatcgagatggcggggtctgatggggagtaccgatggttcagaggaggcctcgcctggggcacggacgaccactctgttcacaacgccttaaggaactaccgcgaggtcctcgagtccaagatcattctacattcgggagacgcacaggtcccgcggcttaggcttaggcaccttatgcacggaggaggcgatgcggaacgccatcgagggcatgaacggcaaggagctggacggtcgcaacatcaccgtcaacgagggccagtcccgcggaggacgtggag

SEQ ID NO: 985 - DNA, 290 bp, Zea mays
  unsure (1)..(290): unsure at all n locations
  Clone ID: PAT_MRT4577_133550C.1
ggcaagatngaaactgagctcaccaagatctgtgatggcatccctaagcttctcgaatgtgaagttgtgccgtcttccaccggtcccgagtccaaaggcctttattttaagaagaaaggtgactactacagataccttgctgagttcaagactggagctgagagaaaggacgctgctgagaacaccatggtggcatacaaggctgcccaggacattgctttggctgagcttgctccaactcaccctattaggcttggactggcactcaacttctcaggtgtctactatga

SEQ ID NO: 986 - DNA, 323 bp, Zea mays
  Clone ID: PAT_MRT4577_133579C.1
cagtagaacacgaccagaagttcaccacaaatgcttatatctagaatagcagcaccaagagggggtcttttataaaaacatgggtgcgatcaccacgattgtggggctgaacatgaataggttatagttgttgtagtataatgagcgagatggaatcagagtaacatagaggcactgtcatcatgttaggcattatcattgaagacaccatgctcggcatcatcatcggtggtatcatacttggcatcataatcggtgagataatactcggcgtcattagcgaaagcatcatactcggtaatatcattggtgaaaccatgttt

SEQ ID NO: 987 - DNA, 329 bp, Zea mays
  Clone ID: PAT_MRT4577_133649C.1
caaaggaagaacagagttttgaaccatggagcagttgggaagaccaacatgactggggaaaaaaaggacatgggatttgctcttttgtgaacactgctactaggaatgttcacctatcatggctttggaataatactggggatcaccacatccaccatcaaaaggcactccggttgccaatgaggaggcagcctgagacagcccctgagactgaggttgcctaccaatcggaaccctgaaaggggagcaagaaacgtaatccaacccatccttggggaagaaggccccaaaagaaggctcctctccgtgttattcacaaatgcccacct

SEQ ID NO: 988 - DNA, 1633 bp, Zea mays
  unsure (1)..(1633): unsure at all n locations
  Clone ID: PAT_MRT4577_133839C.1
cctcgaggccggccgggggtgataacttgggagatgctgagctcccctcttcctccctctttccgactttccctccctactcgcccccgcgccgcgccaatctttttccctcttgacggcgcacataaatccgcgccaaatcgtcaaaccaaaaccaggccgcgcccgcctcgtcagtcctcagtcctcactttcgggccgagctccggatatccagcggcggcaatggcagccgaagccagcgccgtccagcagctcgctggcctcctggaccaagtggacgcgccgctgaagaagacatttgagaatgtgcatcagggctacccaacagagacattattgcgtttccttaaagctagagagtggcatgtgaataaggctcacaggatgcttgaagattctttgaattggaggatgcaaaatgaaatcgatagtatattggagaaacctattatcccagtagatttgtatagatcaattcgtgatacacagcttattgggttatcaggatactccaaagagggcattcctgtatttgcagttggtgttgggctgagtacatatgacaaagcttcggttaactactatgtgcaatctcacattcagatcaatgagtaccgagatcgttttattttgcctacagtgacaaagaagtatgggagacctattaccacctgtataaaggttctcgatatgactggtctgaaattgtcagcactacaccaaatgaagattgtgactgcaatatctacagttgatgatttgaattaccctgaaaagactgagacctattatatagtaaacgctccatacatattttctgcatgttggaaggtcgtgaagcctctgttgcaagagagaacaaggaagaaagttcatgtgttgcgtggctgcgggagagacgagcttctacagatcatggactactcctccctcccccatttctgcagacaggagggctcgggctcatccaaacattcgtcaggcgacgccgataactgcttctctctcgaccacccgttccaccaggagctctacagcttcatccaggagcaggcgctgaaccaggagctcatcaagcagggctccttgcacgtgaaaatccccgagcaggaccctgaggacgcaaagatcgtggaggtcatcgaggccgagttccacaagcttggcgtgcagaacgggtccgccaatggcatcgaccaagcatagcacctttgtctaataaggccagcctgattcaaccgagacgttgcttgccacttctgatgcaactaatcctactgtttattttttttggtggggtgggcccacccccgttgctgtttcctggggggaggggggtgattggtattggtggtatacatagcaaagtcatttgcagatccatccatgatgcaggactgagatagacgatatcacctgtgtaaacttgcagatttgcaatgtgtcctcatctcatatgtatgctgagttgagatgaaatgaataaatcatcctacaaaaaaaaaaaaaaaaaaaagggcggccatacgactagtgagctccctcctcttnttcntgtatgataggtaaggtatatgactcgtcgatgtcgntgtngcggacatgtggctggcagcgcgtnagtcgtgat

SEQ ID NO: 989 - DNA, 1036 bp, Zea mays
  Clone ID: PAT_MRT4577_133893C.1
cattgggaccctcgaggccggccgggggatcgccgcaactgcccgtctgctcctgcttttcatccagtcgcaaaacaaagagaagagatctccgcgtccgcaaccgcatcgcttccctcccggcacaagaagaagattcggttgggttgtttgtctcttgcaaactgcaatggctgctgctgccactgctattgctactccgtccgtggcgccggaggccggcgaccggaaggcggtggcaccgccggtcgacgcggtggatctggagctggagctggagctggaggagaagcacgtgctggcggtggacgacagctccgtggaccgcgcggtgatcgccaagatcctgcgcagctccaagtacagagtgacgaccgtggattcggcgacgcgcgcgctggagctgctggcgctggggctggtccccgacgtgaacatgatcatcacggactactggatgcccgggatgaccgggtacgagctgctgaagcacgtgaaggagtcgtcggcgctgcgggccatcccggtggtgatcatgtcgtcggagaacgtgcccacccgcatcagccggtgcctggaggagggcgccgaggacttcctcctcaagcccgtccgccccgccgacgtctcccgcctctgcagccggatccggtgaccgcccgcgcaaggatggaggatctggttgcgcgctctgacttaattagaggagttgttaggatccaattttttgtgtgttcgttcgttcgttcgttcttttctttctttcttcttggacatagatctgctgccgccgctgctgccgtcgactgaaacaagaagctaacttagttttagggtccaggttgttgttgttgttgttaggaaggcgagtcgttgggggcattcacggatgttcttcctcgtttcccctccctccgtgcctgaggctgcaaaaatatgccccccagacatgaaaaaaaaacaagacctgttaacagttccaagatcagagccttcgcttcttttctttaaaaaaaaaaaaaaaaaaaaagcggcc

SEQ ID NO: 990 - DNA, 259 bp, Zea mays
  Clone ID: PAT_MRT4577_133896C.1
ggtgcaccgagcgctgcctcgactggggcgaggcgggcgagcccgacctcatcgtcgacgacggcagcgacgcacgctgctcatacacgacggtgtcaaggccgctgtggattacgagcagaccggcaagatccccgacccggcgtccaccgacaacgctgcgttcaagatcgtgctcaccatagtccgcgacgggctaaacgctgaccccaagaagtaccgcaagctgaacgagaggcttgtcggcgtctctgaggag

SEQ ID NO: 991 - DNA, 2058 bp, Zea mays
  Clone ID: PAT_MRT4577_133990C.1
ctcgaggccggccgggagcccagcttgcctgccacctggtcttgaccctctcctggataggaggagcagcagccagagggacatcaaactgtgctgcctgcgtgtgtgtcttctttcttgcctctcccttcttcaacctttgctagcttgccagggagggagtccatgaattccagcagaagcctcctctcttcgcccctctttgctagctcgtctccaaacttcaggagcagtgcttccgtctcctcctccccatccccatcccgcaccacagcagttccaatgatacatgacaccagcagcagcagagcatccacggcgtgccactactcgccgtcgcttgtggcagaggagcagcttcacggctccaaagacaccttgaccttgaagggcgagaaggctttgctcgagttgcttctaggcatggctctggaccagcacgttgacggcaggaagctcattacccaacaggaggctgaggatagtgatttcgagagctatttgagagaagcaacaagccgagtgctttaccagccaacattcatgtacggagcttctgaatttattagcagtgaagaggatgatgatgattctgtttcggagagctcttcagcatcattggccaaaccagctggaacattggatcttggcaagctgacagaggaaccacagttggatgtaccacagcctcaccgccgcagtgtggatccaaaccattcgtatgatcaagtgtttattagatccactcggttactggagaggagatccaagaaacgcaacggcggccacagggctttggataatggtgtggcgtgcagtggtgtgaactcaaagagaaaagacaagtttggcagagttcttgatccagacgagcctttttaggttgtttctacgggatcgagagacgacagagttcttgacagcgaaagaggagaaacagatgttcagtcaaatacagaatcttatgaagctggagggggctcagcgtaacctgcaagctcagtgtggtcgtgaaccaacagttgaagagtgggctcaagccgtaggaatgagctgcagggagctgcaatcctgtgtgcgcaccggaagacggtgccgagagaagatggcccgctccaacttccgccttgtgatacatgttgctaggaaatatgaaggatgtggccttgacattcaggacctggttcaggatggatgctgtgggttgatgaaaacctttgagaagttcaacccgagcaagggatgcagattcccgacctacgcgtactggtggatacgccagtcgatcaaaaagtccatcttcaagaattcaagactaatccggttgccgggagagtgtgtatgcacttttgaggaaggtgggcaaagcgaggatggaatgcataatggacggggagcagccgacgaacgaggtggtggcaaggcgtgctggcatcacgattgaaaagctggcgaaactgagagcgaaaaccaggaaagtacggtccatgcaggatcgagtctggtcagacgacggtgtgacataccaggagatcaccgaggaccccaacattgaaggtcctgaggtgagcgtggacaggctgatgatgcggcagcaggtgcgcagcttcctggcggggatcctgagcccccgggagaaggagatcatcgagcaccggttcggcatccacgacggccagcccaagaccctgcatgtcatcggcgacatgtacggcctgtccaaggagaggatccgccaggtgcagaacaaggccctggacaagctcagaaacagcatctcagcacagggcttccacgtctactttgatttgctaacttaagactcttcaacacgcaaacattacatgtacaatgacattccattctgccaatgggtatattatgtatagatagacgaagaattcatgtttttttcctttcccttttgccatttgacattcattcatccttgtactcaacaatggatactcatacatggttgtttgaggagcaaagcttactttaaatgtatggatgtacgtttaagtgcacatatgtttatgaaaccttctttgtttc

SEQ ID NO: 992 - DNA, 255 bp, Zea mays
  Clone ID: PAT_MRT4577_134019C.1
cccagcgttcgcctttccccttccctccctggctctccacacgggccgtcggaggcgatttcgccctcgattggaccccgattactccgaccgcgaccgggattccctgctccaagcgcggatctgaacgctgcgctccgtgtcgccgatcgaatgcgccatgaacgggggcaaatccaagggcgccgccaaggccgatgccaagctggcggggaagagcaagggggccgagaaccccaccaagggcacgaaaag

SEQ ID NO: 993 - DNA, 457 bp, Zea mays
  Clone ID: PAT_MRT4577_134122C.1
atatgtggtttttttatacatttttcggtgaaaagaaagctcagggcatcattcttctaggattagatttactagttcaagcaacaactgcaacgggagggcacaacgcctccaccactgcagtcctagagtagattacggggcacaagcagcaggaacaaaaacgacactcgggacagcttgacgtatttacattgacacagggggcaaagccaccagccactgagggcaggccggcctacaaacagcaggggggtaatacgcaaggacctgggcatgggggtcaacacaaggctaaaaaatctgccatcacccgataagcgccctcgggaaagggaggcgcgaacaaaatgtaccactacggcctggccatgagcatgaggttctggcccgtccaagaggctctggacccctgcacccatatgtacctcaacgagggcatgtggagcacggtcac

SEQ ID NO: 994 - DNA, 257 bp, Zea mays
  Clone ID: PAT_MRT4577_134246C.1
ctctcctcctctccttacacaaccgtccatcgacgctccctccggtctgcgctcccacagcctcacccctgcggtgccgatgattcgcgtcgccctttgttggaatgacgatggagcagaccttcatcatgatcaagcccgacggcgtccagcggggcctgatcggggacatcatcagtcgcttcgagaagaaagggttctacctcaaggggatgaagttcatgaacgtgcagaggtccttctcgcgaagaattagg

SEQ ID NO: 995 - DNA, 2056 bp, Zea mays
  Clone ID: PAT_MRT4577_134280C.1
tcaaccgggcgtgtaacttctcccaacgatagcaacatttggtggtccagtgctttagtagcaaagaatagcaacccaagatatgtgctagcctcaaagtgtgcacgcgagcctcctacaatgtgggtagagaatagattgagtacttcatggggttttaagtgctctaagctctctatcgttaggaatgcacttccttcgaaaacacctaaggcgtctgtctcttggaagtccaaggatgattcgaatgccataccaagacacctagagcaatctcactgtaaaaagacatctagagcaactcgaactcacttcaaggcgatgccgaatttgattcacaaggcaaagaatgttgatacctcaaatctaaacgatggtacctcgggttcaagttggaggggtcaggcggatgcatataagggagaggacataaatatcgggaaggaatgcactaaaacttcagagttgttgaaaagtagagaagcctcaagaaaatcaaacatcctagtggtagatcggaaggatcctaacaaagatgagccagacaaagtgaaaggaatccaagatgaagttatgaccaaagaagagggagtgaaaggccatacctgtgaaggtcgtgcgacgtgttggagttgtcttaagcaggcgaacaccacaaagacaaatgatgctccaaatttaggttcattgttggttggtaacgaacacatgcaaggcctcatgagtaatttgagagataattcatcccatttgtttgaaaagaatcattcaagacaccaaagggatgatccatgtgaatatagagaaacaaacttgaagtttcctaataggatccaatcagttggaggcaatgggaaaaccaatgatgtcacatctaggaggaaacgactcttgttagaagaaaaggctagcgcacacgtgcaaaatgatcttacttatggaccgatgaagaggcggaggtacatagaagccaacgaagatgaagaagagcaaaatgatcttacttatggaccgatgaagaggcggaggtacatagaagccaacgaagatgaagaagattatgtcggcgaccaccatccggtgcatattgaagatgctaccactgaattgacaccgcaggattctatttcaaagcattgcgttgagcgacaatgctattgttgctcaaagcctattgacatacctagatggagtggaacctttaagatagatggaaaggaacacatatcactggctggacatttgtcatccaaatcttgtgagaaagtgtggaaattgtcatcattgccgaaggtggttcaagtgacaaaggttcctagaatggcagtgtggcctaagatatttaaagcatcagaacccagtggtgacaatattggcctatatttcttccctcctgaaatgaggcacgatgaagaactagatcaactagttaatgaagtcatggataaagatttgatcttgcgagctattattggtgaagctgagatgctgatattcccgtctgttctactacctgaaagatatcagacattccaaaccaaacactacctatgggcggccttcaaagcaaaggaggataaaggtgatgcaattgtagaggaggaggttgagaagggaaattgcgtttcaaaccagccagacaaggtacagtctgataatgcttcatttccttcaaaccatggactggaccgtccaagcatggaagctccccctcaaagcagtagcagtgtctttggtattgttgtccgacaagctccaaatcttgaaccagaagtgaagcgatttatccaggagatggaacgcaaaggtgcgttggtaacggttatgaggggggaggcaattggtggagggccatagccaagcaacaccacgaccactatgcattagttgtagagagagtagagagtaaaccatgtcaaactatgctgtagttgtatagagagtctgacacataacgtcgtggacttgagctcttgttcagtttttttgtaaggtacctacaagtttggtcatatgataatttctccggaacggcataccttagcacctgttttct

SEQ ID NO: 996 - DNA, 484 bp, Zea mays
  Clone ID: PAT_MRT4577_134332C.1
ggttagctcgtttcatcgtccgatctgatctacagaaaaagcaggggcagggcagctagccatgattcagatgaacatgaagcagcctctcgtgctgcccgcgcaccggggcaatgtcatcggcttgcgcctggcgtcgtcgccctctgcagcggcggcggcggccagcaggcggaggggcgtcgtgtcctccccccgctcccggccccagcgccacatgcggctgccgaggatcagctgcagcgccaccgaggaggccagcggccgtgggtcgggccgtcaccgtgtagaagatgctgacggtgacggcctcggtgcaggcggcgccggccatcggtcagatgtacttccagcgcgccctcgacgacgccggcgacttcttcggcaagacgctgctgatggaactcgtcagttccgaggtcgacgcaaagacgggtctggagaagcgcgggtgaccggcgttcgctcacaagacgctggggga

SEQ ID NO: 997 - DNA, 2017 bp, Zea mays
  unsure (1)..(2017): unsure at all n locations
  Clone ID: PAT_MRT4577_134409C.1
gtgcggcgctcgaggcggccccggccgggggactctccccccgtcgagcacacaacacaccctcctcgtcctccaatccaatcaacctggtagactcgcttcgcttctcccccagccgtcggacggagctcctcgcagtcgcagcagccgccgatcagcctgcgctcgggctcagcgctggaaggtgttggaagagaataacctgaaggttcacagtaaccttcatctgtcggaagatgtatcgggctaagagggctgcattgtcaccgaaggtgaagcgccgcgtcggcaagtacgagctcggacgcaccattggggaagggaccttcgccaaggtccggtttgctaagaacactgaaaacggggaacctgttgctatcaaaatccttgacaaggagaaggttaagaggcacagattggttgagcagattaagcgtgaaatttgtatcatgaaattagtaaggcaccctaatgttgttcgactgtttgaggtgatgggaagtaaagcaagaattttcatcgttctggaatatgttaccggcggagagctttttgaaatcattgctactaatggaaggttgaaggaagacgaagcacgtaaatacttccagcaactgattaatgctgttgattactgccacagtaggggagtgtatcacagagacttgaagctcgagaatttgctgcttgatgctgcaggaaatctcaaagtttctgactttggtttaagtgctttaaccgagcaagtgaaggctgatggtctgcttcatacaacatgtggaacccccaattatgttgcccctgaggtgatcgaggatggaggctatgatggtgcaactgcagatatttggtcttgcggagtaatcctctttgttcttcttgctggatatttacctttcgaggatgacaacatcatcgccctatacaagaagatttcagaagctcagtttagctgcccctcttggttttcagctggggccaagaacatgattaccagaattcttgatcccaatcctacaactagaatcacgatttctcagatactggagcatccttggttcaaaaaggggtacaagcctcctgtttttgacgagaaatatcaaactagcttggatgacgtggatgctgcttttggagattcagaagaccggcatgtgaaagaggaaactgaagatcagccaacctcaatgaatgcattcgaactgatttctctaaaccaggcactgaatctggagaatttgtttgaagcaaaggaggagtataaaagagagacaagattcacctcacagtgccccccgaaagagataatcacaaagatcgaagaagctgcaaagccgcttggctttgatgttcagaagaaaaaatacaagatgcggatggagaacccgaaagcaggtagaaagggcaatctgaatgttgcaactgaggtcttccaaatagccccatccctgcatgtagtcgagctcaagaaggcgaagggggacactctggagttccaaaagttctacagaagcctgtcgacccagctgaaggatgttgtgtggaagtgcgacggcgaggtggacggcaacagcgcggcagcatgaaagcgccctttgaactttccactggacggcgccggttttcctttgtacatagcttctctttcggatgatcccgtgtccattgcagagtcggttttgcaagcaagttctttggtttatttgttgacggcgagtaagcccggtgaaacaaccgccctggaggctgttgtggatgagcttactggcgtgtttagttcgtttcatggtcgggaggttggatggaatgggaaccacaatcaaggctgtagtagtgtgtgtagtaacgaggtatcgaggtagatacatcagatggtgtaagggagtaccagctgttagttcatggcttcaagcttagccccccttcaatttgttcgatgatgtattacttcccaataaacattattacttagatgtaagagaaaaaaaaacttgtctttcacctctanaggatccct

SEQ ID NO: 998 - DNA, 2463 bp, Zea mays
  Clone ID: PAT_MRT4577_134410C.1
ggtaccctccgaggttcgcccggggtcgagcacacaacacaccctcctcgtcctccaatccaatcaacctggtagactcgcttcgcttctcccccagccgtcggacggagctcctcgcagtcgcagcagccgccgatcaacctgcgctcgggctcagcgctggaaggtgttggaagagaatagcctgaaggttcacagtaaccttcatctgtcggaagatgtatcgggctaagagggctgcattgtcaccgaaggtgaagcgccgcgtcggcaagtacgagctcgggcgcaccattggggaagggaccttcgccaaggtccggtttgctaagaacactgaaaacggggaacctgttgctatcaaaatccttgacaaggagaaggttaagaggcacagattggttgagcagattaagcgtgaaatttgtatcatgaaattagtaaggcaccctaatgttgttcgactgtttgaggtgatgggaagtaaagcaagaattttcatcgttctggaatatgttaccggcggagagcttttcgaaatcattgctactaatggaaggttgaaggaagacgaagcacgtaaatacttccagcaactgattaatgctgttgattactgccacagtaggggagtgtatcacagagacttgaagctcgagaatttgctgcttgatgctgcaggaaatctcaaagtttctgactttggtttaagtgctttaaccgagcaagtgaaggctgatggtctgcttcatacaacatgtggaacccccaattatgttgcccctgaggtgatcgaggatggaggctatgatggtgcaactgcagatatctggtcttgcggagtaatcctctttgttcttcttgctggatatttacctttcgaggatgacaacatcatcgccctatacaagaagatttcagaagctcagtttagctgcccctcttggttttcagctggggccaagaacatgattaccagaattcttgatcccaatcctacaactagaatcacgatttctcagatactggagcatccttggttcaaaaaggggtacaagcctcctgtttttgacgagaaatatcaaactagcttggatgacgtggatgctgcttttggagattcagaagaccggcatgtgaaagaggaaactgaagatcagccaacctcaatgaatgcattcgaactgatttcactaaaccaggcactgaatctggagaatttgtttgaagcaaaggaggagtataaaagagagacaagattcacctcacagtgccccccgaaagagataatcacaaagatcgaagaagctgcaaagccgcttggctttgatgttcagaagaaaaaatacaagatgcggatggagaacccgaaagcaggtagaaagggcaatctgaatgttgcaactgaggttttccaaatagccccatccctgcatgtagtcgagctcaagaaggcgaagggggacactctggagttccaaaagttctacagaagcctgtcgacccagctgaaggatgttgtgtggaagtgcgacggcgaggtggacggcaacagcgcggcagcatgaaagtgccctttgaactttccactggacggcgccggttttcctttgtacatagcttctctttcggatgatcccgtgtccattgcagagtcggttttgcaagcaagttctttggtttatttgtagtaagcccggtgaaacaaccgccctggaggctgttgtggatgagcttactggcgtgtttagttcgtttcatggtcgggaggttggatggaatggaaaccacaatcaaggctgtagtagtgtgtgtagtaacgaagtagatacatgcatcagatggtgtaagggagtaccagctgttagttcatggtttcaagcttagccccccttcaatttgttcgatgatgtattacttcacaataaacattattacttagatgtatgaggtgagcacacttggtcttttgtcctctttgtgctattttgcgtgataattgaattttagcaggggcggattcaggtagccaatcatgtcctcgttcctaacagtcgttagctggaccatgtgatttcctttcgtcaaaaatcgaaaattcgagaccgtcacttacatctttcgatcaaagacagcgtggagaatgaattctcttccttggaggcgcccgtgtcagcttgggagcataggaagatgtaacttcaattaagcaacgatactatgcctgcatatttgcatggcatcgagatatatccacatggtggtcttccagttcaagtcagactaccaactcagtatgttcgttctcctggtgccctgagctgtttccagctgcagtctcaactttgagcaaattgaacacttcagtgtggatgactgtttccgctggcttcagtttgcacactacagtatatgccatcatcagtgctctggtaggcggccgtttccgcagttccactgtag

SEQ ID NO: 999 - DNA, 684 bp, Zea mays
  unsure (1)..(684): unsure at all n locations
  Clone ID: PAT_MRT4577_134413C.1
cctcgaggccggccggggtctccgtcttctcaccaccgctgcctccgcggtttcgcttccccccgtcttcccaagcctttgcttcgctcttcgcttcggattccctctgctcatggccgggagagggaaggcgatcggctcaggggccgccaagaaggccatgtccaggagctccaaggccgggctccagttcccagtgggaaggatcgccaggttcctcaaggccggcaagtacgccgagagggtcggcgccggcgcccccgtctacctcgctgccgtgctcgagtatcttgctgctgaggttctcgagcttgccgggaacgcggctcgggacaacaagaagacccgcatcgtcccgcgccacatccagctcgccgtccgcaacgacgaggagctctcccgcttgctgggcacggtgaccatcgccagcggtggtgtcatgcccaacatccagtgccaaggctgcggctggtgatgaggactagaccgaccacgcctagcctttcatccggtggtggcacctcttgtggatgctgccgtatcaacttgtgcctgtgtagtacgctctagaaatgccttaagtgttgcgttgtagttcgngatgtgtctccctgtaccactgccaaggattagttctgtatattttgcctataagagngcatccttttggacgacctgtttatc

SEQ ID NO: 1000 - DNA, 1401 bp, Zea mays
  Clone ID: PAT_MRT4577_134423C.1
ttgggtactctcgaggccggccgggccgtcccgtccgctggctctgcatatcccgcgcccgactcccgttgctgcgtgcggcggcccgactagtcgcgccgcgctgcgctcggcttgattgaaccggccgggatgggggtgttggaggacctcgtggcgagagcgggcgggtgcgcggtcatcgacggcggcttcgccacgcagctagaggcgctcggcgccgacatcaacgacccgctctggagcgccgcttgcctcatcaccaggccgcacctcgtcaaggaggttcatatgcagtatcttgaagctggtgcggacgtcatcatttcatcatcttaccaggcaacaatcccgggtttcatagctagaggaatgtctgtcgctgaggcagaagatttactgcgaacaagtgtaaaactggccaatgaagctcgagatgaattttggaagtcaacactgaggaagtccaaacctatttacaaccgtgctctggttgctgcatccattggtagctacggagcctatcttgctgatggatcggagtacagtggatcatacggtgctgacatcacagccgagaagctgaaggacttccacaggcgccggctgcaggttcttgcaagtgccggtcctgacctgattgcgtttgaggccattcctaaccaaatggaggcacaggcattggttgagcttctggaggaagagaaagtccagatcccttcctggatctgcttcagctccgtggacggtaagaacctgtgctctggggagagttttgcggactgccttaagatcctcaacgcgagcgagaaggtggccgttgtaggcgtgaactgcacacctcctcagttcatcgagggcatcatatgtgaatttaggaagcaaaccaagaaggcgattgcagtttacccgaacagcggcgaagtttgggacgggagagcgaagaggtggctgccggttgagtgcttgggtcacaaaagcttcgacgctctcgcgaagagatggcaggaggcgggggccagcctcatcggagggtgctgccggacaacgccttcaactattagggctgtttccaagatcctcaaaggaaggacggggcattgatttgtttattataattgagctgttgttgcattatgtcactagccagaataacattcagaatatgtatcctgttgctcttccgttcccctttctaaaataaggtatcaatataattttgcagtgtaaaaaaaaaaaaaaaaaaaaaaaggtaaaaaaaaaaaaaaaaaaaaaaaaaaaaaaaaaaaaaaaaaaaaaaaacgtaatactagtttgtagcgctgacccccagtattgcttagtctccgattatgttgtttgggtatggttcccaagttaagtatggatttaaccaagcct

SEQ ID NO: 1001 - DNA, 2263 bp, Zea mays
  Clone ID: PAT_MRT4577_13464C.1
gaatctgatctccttttcctcccgcacccaacccaaccacggacgcacgccgaggagggagaaagcgggtgtggaggggcgggcggccggcctcgcatgtttgacgacgcgggggccgtggcggtgaagcggatgaggctgtgggaggaggacgaggtggaagtggaggaggaggggatggaggtggacgcggagccgggatggccgtggggaacgccggcggcggggctctccagggctgcggcgatcgtcgtggcggacgcggcggagcccgacttccccgtcatatacgtcaacgccgcattcgagtccgccacggggtaccgcgcccacgaggtgctcgggcgcaactgccgattcctgcaatttcgggatccacgagcccagaggcgacatccccttgttgatcccatggtcgtttcagagatccggcgatgcctcaacgaggggattgaattccaaggcgagctgctaaatttccggaaggatggcgctccactttacaacagattaagtctcattccaatgcacggggatgatggctacgtgacacatgtgattggaatccaactattctccgaggcaaacatcgatctcagcagcgtgtcgtatccggtgtacaagcaacagaccaacaacaggcccatcattcaagatctgaactcagcttcccatgagcatgctccgaaagtccagagtgcagaccactgcggtatgcttcagttgtcagacgaagttctcgcacacaacattctgtctcgcctgtcacctagagatgtcgcatccattggatccgtctgtaccaggatgcatgagcttaccaagaatgatcacctgaggaagatggtctgccagaacgcgtggggaagggatgccactgtcaagcttgagatgagcaccaagatggtaggatggggccgtcttgcgagagagctaactactcttgaggccgcctcgtggaggaagttcacggttggagggcgcgtcgagccttcccgatgcaacttcagtgcctgtgctgttggtaaccgcttggtccttttcggaggggagggtgtcaacatgcagcctatggacgacacctttgtgcttaacatggaggctgcaaggccggaatggcgccgcgtgaaggtttccgcctccccaccaggccggtgggggcacactctgtcgtggctgaacgggtcatggctggtggtatttgggggctgcggacagcaaggtttgctcaatgatgtcttcgtccttgaccttgacgctcagcagccaacgtggagggaggttgcaagcgagggtcctccactgccacggtcctggcacagctcatgcaccttggatggttcgaagctggtcgtctccggtggctgcaccgagtctggcgttctcctcagcgacaccttcctgcttgacctcaccaaggagaagcctgcgtggagggaaattcccacatcttggtcacccccatcccgcctcggccacaccatgtccgtctacggtacgactaaactgctcatgttcggtgggctggcgaagagcggctcgctccggctgcgctccagcgacgcctacacgatggacgtcggcgaagatagtccgcagtggaggcagctggcgacgaccggattcccaaacgtcggcccaccgccgaggctcgatcacgttgcggtgagcctgccctgtggacggatcatcatattcggtggctccatcgcgggactccactccccggcgcagctgttcctggtcgatccagcagaggagaagccgacgtggaggatcctgaatgttcccggcaaaccccccaagttcgcctgggggcacagcacctgcgtggttggcggcactagggtcctcgtcctcggaggccacaccggggaggagtggatactgaacgagctacatgagctctgcctggcaagcaggcccgacgacgacgacgatgaccgctactgactagtttcgttgcacatggtgttttatatgctattgttcgtaactacttccagtctgttgttgggtaatcggtatgacaaaaaatagcggaaaattaattaaaaaagttagcctagaagatttcagtgtattttatcggtctagatagattctatatggtctatatatttgtatattttttgtctaaaagatcaaaaaaaaaactgaaacaactgcattgtagattcgcatggcaaagtcgccagttccaatgtcttgtactcttatttttaatcatatgtaaaatatagcgctgcttcagtttgtaggt

SEQ ID NO: 1002 - DNA, 646 bp, Zea mays
  Clone ID: PAT_MRT4577_134651C.1
gcctgcagatgctccttcgtctgtcggcaagtgctgctacggcgaccattcatcccggaatgctctcaagctcctatagcttgccttctgccgccgtacctcgccgagccggtggcttcggtgtgtgcaagcgggagtcttcaaccctacaggatccaacatgcaagcgcagctgggatcttacctttatcacccctggtactgcaacaatcatcagccctattacaacggttaccctttggtgcatttattgggcacaaaacatcagggcacaacaggtacaacaacttgtgctaccaaaccttgctggcctactctcaagaacagcagtgtcttccattcaaccgactaggttcattgaactctgcttcttatttgcaacaacaacaactaccattcagccagctacctggtgcctacccccagcaatttcttgcattcaaccaaactagcagcattggaacttctcctgcttatttacagcagggaacaactactaccattcagcccgctagctggcgggagccctgctaccttcttgacacaccccaggtggtggccggtctaccagcacgttggcgccataacgctggcaccctcttacaactgcaacaattggtggcattcaaccaacttgctttgacaa

SEQ ID NO: 1003 - DNA, 477 bp, Zea mays
  unsure (1)..(477): unsure at all n locations
  Clone ID: PAT_MRT4577_13487C.1
aaacataagggcacatcaactacgacaactagtgctaccaaaccttgctgactactctcagcaacagcagttacttccattcaaccaactagctagattggaactctgtttcttattcgcaacaccaacaactaccattcagacggctacctgtagcctacccccagcaatgtcttccatgcaaccaactggcaggattgaactctcctgcttatttacagcagcaacacctactaccattcagccagatagctggtgtgagccctgctaccttcttgacacaaccacagatgatgccgttctaccagcacgctgagcctaacgctggaaccctcttacaactgcatcctntgctgccattcaaccaactcgcttcgacaaacctagcagcgttctaccaacaacccatgatcagggggggccctcttttagattgcttatgacttatagctcaataataaagttgttaagatgatg

SEQ ID NO: 1004 - DNA, 314 bp, Zea mays
  Clone ID: PAT_MRT4577_135032C.1
ctgatccgttggtgcttgaccgatccatggacaccgatatcggatccgtggacggggcggcgtcgaaccagacggttggctgcccggcgtcggcgccggggtgcccgatggcgtccacgccggcgcagcccgcggcgaccctgtcggcgggggaggcgtcgctgcggcgccactcttcgcgttgcctggtgcaagtcggcgtcaacgatgtattcgcggtttcgggggacttaaacctaacgctggtcgaccacctgatcgacgagcccggcctgctccttgatgggtgctgcaacgagctcaacgccgggtac

SEQ ID NO: 1005 - DNA, 195 bp, Zea mays
  Clone ID: PAT_MRT4577_135057C.1
cgctcatcttgtcgcggtgagagcctctagaatttcccccactcgccagtcgcagcagcacctgtagcagccattgacgcgagcggagccggtagcaaggtgtataagggggctgccgtgcgcaaggcagtcggccccaggaataagtcggtgacgcggtccgtcaaggccgggcttcagttccccgtcggccgg

SEQ ID NO: 1006 - DNA, 316 bp, Zea mays
  Clone ID: PAT_MRT4577_135079C.1
gggcataaaccaaagcagtttttaacgcttccaggttgcccaatcgaattacaacgcgcagttgctcataattcaacaaacccgggacacaacattcagaccgcccgggacttttgacttggaaccaaaattaacccggtcgtaccacgttttaaacaagcgtgaacactcagtggcaggcacgcgattcacctttaaaaggacacggaccttgaccaggcgatccaccttgaaacaaacttttggtaaaagcaaaacaataccggacccacaagccaacgctcggtacgttttgatcgcccaagggccggccacg

SEQ ID NO: 1007 - DNA, 402 bp, Zea mays
  Clone ID: PAT_MRT4577_135081C.1
aaccaaacaggccacgccttaaaaggcattatgttccaccaacccgaaccattcaattatacaaacagggagctgtttgccggattaaacacccaggattaaagttccagagatcccccttgattacaagccgccaaggggaaattaacaacaactttccgggggaactacaagccttgcttagacccttcattgaccggcccacccttggggaatcaggaacaaaaattccaaaaaaatgtccttggcccgcaacactgaaatatactcccacggcccgacgatgggatgggcccccaaaggggtccatgggagggggtagtttataaaccggggggaaaaatgtcgcggccatgaaagggccccccattaaaaagaaacgtttttttggggggggaagct

SEQ ID NO: 1008 - DNA, 2355 bp, Zea mays
  Clone ID: PAT_MRT4577_135170C.1
cattggcctcggaccccgaccgtcggctggtcggcacgcactctcgcaagcaaaactacaagctcgcttttttaaattctgtccctgcaattctctcctctgtttcccactcgtagatcccgccgcctcccgcgtctagccgtcgacgagcaccgcagcctgacacagccgcgggcgaaccatcgcgtgcggcctcgcccgggatggcgaccatggagagcctgatcgggctggtgaaccgtatccagcgcgcgtgcaccgtcctcggcgaccacggcggcggcggcggcgagggctccctctgggaggcactcccctccgtcgctgtcgttggcgggcagagttccgggaagtcgtcggtgctcgagagcatagtggggagggacttcctgccccgtggatctggcattgtcacgaggcggcctttagtgctgcagctccacaagacagatggtgggcacgagtatgctgagttcctccacgccccgcggaagcgtttcaccgactttgctgctgtgaggaaagagattgctgatgaaacagatcgcataactgggaaaactaaagctatttcaaacgttcccatccatttgagtatatattcaccacatgttgttaacttgacacttatcgatcttcctggactgacaaaggtcgctgtagaggggcaagcagaatctattgttcaagatattgaaaacatggttcgagcttatgttgacaagccaaattgcatcatcttggctatctccccagctaaccaagatattgcaacgtcagatgctatcaagcttgctagggatgttgatccttcaggtgacaggacatttggagtcttaacaaagcttgatttaatggacaagggtaccaatgctgttgatgtgcttgaagggaggcaatatcgcttacaacacccctgggttggaattgttaatcgctcacaagctgatatcaacaagaatgttgatatgctttcagcaagacgcaaagaaaaagagtactttgagagtagtcctgaatatggtcacttggcacataaaatgggtgcagagtatcttgccaagcttctgtcacagcatttagaggctgtgatcagggccaaaattccaagtattatagccttgattaacaaaacaattgatgaaatagaagcccagttggatcgacttggtaggccaattggaggtgatgctggggctcagttgtacacaatcttggatatgtgtcgggcatttgaccgtgtctttaaagagcacttggacggcgggcggccaggtggagatcggatttatggtgtctttgacaaccagttacctgcagcactgaaaaagcttccatttgaccggcatctttcaatgcaaaatgttcgtaaagttatttcagaggctgatggttaccagccccacttgattgcccctgagcaaggatacagaaggcttatagatagttctctaagctactttaagggtccagctgaagcatctgttgatgcggtccatttggtcttgaaggagcttgttcggagatctattgcagcaacagaggaattgaagcgattcccaacacttcaatcagatatagctgctgctgcaaatgatagcttggaaagattccgtgaggatggacgaaagactgttcttcgtctagttgagatggaagccagctacctaacagtagagtttttccgtaaacttcctactgaaccagagaaagcagctgataagaacactccagtgagtgataggtatcaggacaatcatctcagaagaatcggatcgaatgtgtcatcttatattaacatggtctgtgagactctgaggaacacggttccgaaagccatcgtgcattgccaagtgaaagaagcaaaaagaaatttgcttaaccgtttctatgctcatgtgggaagcaaggagaagaaacagctgagcgcgatgttggatgaggaccccgctttgatggagaagagggatgccttggtcaagaggctagagctgtacaaatctgcaaggaatgagatcgactcggtcgcatggaaatgattggcttgtgacagctacatctggaatgtatgtaaaatgtacaaccgcagcagcacacgtgtgattgcagtagaatgttcaattcttttttacatttgaatttaccctggaggccttgtacgcagttttcactcgagtcttttgccggacatgcttatttggccgtcttggccttaacacgattgtgttatgcgtggatgatctggtctccggttgatataagagtgtatatgtattcttttgttgattttattactgccttgatgatatcaatagttttttactgccttgatgatatcaatagtttttaccacag

SEQ ID NO: 1009 - DNA, 359 bp, Zea mays
  Clone ID: PAT_MRT4577_135239C.1
cctttcaccagcggtatctccggtatgtgaaaacccgaggcttctttcatacaggatccaaccgcgcaatctcagctggcatcttaccttaatcaccctagttcctccaacaatcatcagccctataacagcagttacctttggtgcatttattggcacaaaacatcagggcacaacaacttcaacaacttgtgctagcaaaccttgctgtctactctaagcaacaacagtttctttcattcaaccaactagctgcattgaactctgcttattatttgacacaacaaactccattcagccagttagctgctgtcttcacccagcaatttcttccattcaaccaactggaagtattcaac

SEQ ID NO: 1010 - DNA, 233 bp, Zea mays
  Clone ID: PAT_MRT4577_135272C.1
gcttctcctccccctcttaccaagtcctcctcgggttagggttccttagggttttgtggaggggcgatggcggcggctgatgtggagtaccgtcgcttagtctagcggacttgcctgggccaccagcaacgagtcgctggagaatgccttcacctcctacggagagatcctcgactgcaaagtcatcaccgaccgtgagacggtgaggtaccgcggcttcaagtgagttacct

SEQ ID NO: 1011 - DNA, 1033 bp, Zea mays
  Clone ID: PAT_MRT4577_135567C.1
ctcggccggccttcgcaagcgaagcaaagcgcttcgcaagcacaggcagtgatcggcaaccaaatccggacagtcttgagctctctcagtctcagcatttcagttcccagattcacatagccccagccccacaagtagcgaaatggcagctgctccgttcgcgattgccggccggctctcccccgttgcgcgcctcccggtccgcgcctggaggccggcgcacgggtttgcgtcgtccgggagagcccgctcgctcgccgtggcgtccgcggcgcaggagaacagggacaacagtgtcgacgtacaggttagccagaacggcggcaacaggcagcagggcaacgccgtgcagcgccgcccgcgccgcgcgacagcgctcgacatctccccatccccgttcgggttagttgatccgatgtcgccgatgcggacgatgcggcagatgctggacacgatggacaggctgttcgacgacgccgtggggttccccatggggacacggaggtccccggcgaccaccggcgacgtacgcctgccgtgggacatcgtggaggacgagaaggaggtgaagatgcggatcgacatgccgggcctcgcgcgcgacgaggtgaaggtgatggtggaggacgacacgctggtcatccgaggggagcacaagaaggaggagggcgcggagggcggcagcggtggcgacggcgacgggtggtggaagcagcgcagcgtgagctcctacgacatgcggctggcgctgccggatgagtgcgacaagagcaaggtgcgggccgagctcaagaacggcgtgctcctcgtcaccgtgcccaagaccgaggtggagcgcaaggtcatcgacgtgcaggtccagtagacaaactgagctgtcacgacgggtctttgtgtagcactagcgtgggttgggctcttcgcgccgaccgtatcagtactcgtgacccaacgtgtggaataatgtgaataaataaacgcttcaattctgctattccaagaatctagctcaataaaaaaaaaaaaaaaaaaa

SEQ ID NO: 1012 - DNA, 457 bp, Zea mays
  Clone ID: PAT_MRT4577_135894C.1
agaggaaacttgttttattggtaaaaaggggccacccccgagggcatggcaacccattattcgggccaacacaaatttttctatctagaaggccccccccacaaagggttgctggaaaaacatggggggaatcgccagggcccttggggggaacatgaaggggaaccgctggggcagcaaaatctgcgaaacggggtcgcagggacattggggcatcatcatttgcgacatcatgcccggcaagaccattggggacatcatgcccggcatcatcaagggggacatcgggttaggcgtcatcatcgggggcatcatcactggcatcggctgaagcgggaaggccaacagttgctgcagcatcagggacggaccccccatcaagctggcaagcccctggtgcatcatgcagaactgcatgcatgggttcatgggccccaatggcatgactgggggcaag

SEQ ID NO: 1013 - DNA, 2267 bp, Zea mays
  Clone ID: PAT_MRT4577_1358C.1
gccggccggtcacaacacaattcggcacgagggtcagtcagtcagcagccgcaacctcgtacaatcacgaaagcagcacacgagtccacaacagcaccccgcctctttttcttcacgtgcgttgcgtgccctgcccccatggagaccctcctggctggcaaccccgccaacggcgtggcgaagccgacgtgcaacggcgtcggcgccctgcccgtggccaactcccacgccatcatcgccacgccgccggctgcggcgacgctggccccggctggcgccacgctcggccggcacctggcgcgccgcctcgtgcagatcggcgcctccgacgtcttcgccgtcccgggggacttcaacctcaccctgctcgactacctcatcgccgagccgggcctgaccctcgtcggctgctgcaacgagctcaacgccgggtacgccgccgacgggtacgcgcggtcgcggggcgtcggcgcctgcgccgtcacgttcaccgtcggtgggctcagcgtgctcaacgccatcgccggcgcgtacagcgagaacctccccgtcgtctgcatcgtgggcgggcccaactccaacgactacggcaccaaccgcatcctgcaccacaccatcggcctccctgacttctcccaggagctccgctgcttccagacgatcacctgctaccaggccatcatcaacaacctggacgacgcgcatgagcagatcgacacggccatcgcgacggcgctgagggagagcaagcccgtgtacatcagcgtcagctgcaacctggccggcctctcccacccgaccttcagccgggatccggtgcccatgttcatctcgccgaggctgagcaacaaggccaacctggagtacgccgtggaggcggcggccgacttcctcaacaaggcggtgaagccggtgatggtgggcgggcccaagatccgggtggccaaggccagggaggcgttcgccgccgtcgcggacgccagcgggtaccctttcgccgtcatgccggccgccaagggcctggtgccggagcaccacccgcgcttcatcggcacctactggggcgccgtcagcaccaccttctgcgccgagatcgtggagtccgccgacgcctacctcttcgccgggcccatcttcaacgactacagctccgtcggctactccctcctgctcaagcgggagaaggccgtcatcgtgcagcccgaccgcatggtggtcggcgacggcccggcgttcggctgcatcctcatgcccgagttcctccgcgcgctcgccaagcgcctcaggcgcaacaccacggcgtacgacaactaccgccgcatcttcgtccccgaccgcgagccgcccaacggcaagcccaacgagccgcttagggtcaacgtcctcttcaagcacatcaagggcatgctgtccggcgactccgcggtcgtcgccgagaccggcgactcgtggttcaactgccagaagctcaggctccccgagggctgcggctacgagttccagatgcagtacggctccatcgggtggtcggtcggcgcgacgctcgggtacgcccaggcggccaaggacaagcgtgtcatcgcgtgcatcggcgacggaagcttccaggtgacggcgcaggacgtgtccacgatgctccggtgcgggcagaagagcatcatcttcctcatcaacaacggcggctacaccatcgaggtggagatccacgacggcccgtacaacgtgatcaagaactgggactacacgggcctggtcaacgccatccataactccgagggcaactgctggaccatgaaggttcggacggaggagcagctcaaggaggcgatcgccatggcgacgggcgacaagaaagactgcctctgcttcatcgaggtaatcgtgcacaaggacgacacgagcaaggagctcctcgagtgggggtccagggtctccgccgccaacagcaggccgcccaacccccagtgatgagcccgtcgatcggtctcgagcgttcctgcaatggcgcctgcgtctgcgtctgtctgccctgaaattttttcgggtcgtttactcgttttcagtcagttactcagtttgtccgtcttcgtcgagcagaactacatccctgctgagggaagctgccaatctttatcctacgatgataatgtctgcaatttcacttgcttccaattgagttctgttacaaatttttgcaacattttttcccgcatcaataaaattcgttcgcgacgccggtctcctaaaaaaaaaaaaaaaaagcggcc

SEQ ID NO: 1014 - DNA, 3175 bp, Zea mays
  Clone ID: PAT_MRT4577_135914C.1
aattcggcacgaggcctcaccgaagcacaagcacagcgcaatacacagactcgcagggctcctagaaaagagaaagtagacgaccaaaagaaactggagaaaaagagaggagctcaaaagcaaggcgaggcctcctccgcccctttttctcccctcccaattcacacaggattcttcactcgcccgcccagttgtttcttttagtgccgcccccattccgctctgatccgagcctttcgctcaaagcctccagcttttgcaattgtttggtcacttcgggaatcaaggaataagttcttgcgctgtgcgcgatagagagcctgatccatctttccccatcctcttcccgtggcatttcggtgtgcttgcgctctgtgcgtggccactgcagggggaggattttggcctggtttctgtcttcttggggttccaaaatttcgggcgagatcttcgcctcaaggaggttccttgcttttctggtattggcgcctcttgttgctccctacaagtccaaggaaagaatttggaggccgtggggggtcccttgcgaccggttctggtcgatttttcgggctgctgaattcaatatgccgctgtgacccaccgctgcctggtttcttggaggaagtttgcttcaattgggcgtcgttgagctagacccctcctccagctcttgatccggtccatggggctctgccatggcaagccgacgcaaatcccggaggccgaggcggaggaggatccccatgtagctcggagcgggtgacagcggggacggggcgacctcgccgtcggcggcggcgcccacggcgaagccgggcacgccgaaacagcccaagttcccgttctacctgccgagcccgctcccgccgtccagctacaagggctcgccggcaaactcgagcgtctcgtccaccccggcgcgcggcgggctcaagcgcccgttcccgccgccgtcgcctgccaagcacatccgcgctctcctcgcgcggcggcacggctcggtcaagcccaacgaggtgtccattcccgagggcggcgagccggagctcggcctggacaagagcttcggcttctccaagcacttcttcgctaagtacgacctcggcgaggagatcggccgcggccacttcggctacacgtgctccgccaaggccaagaagggcgagcacaagggccaggacgtcgccgtcaaagtcatccccaaggccaagatgacaacagctatcgccattgaagatgtgagaagagaagtgagaatactgagttctctgacaggccacagtaacctagtgcagttctacgatgcttttgaggatgaagataacgtgtatatagttatggaattatgtaaaggaggtgaactgctggacaggatattggctaggggtggaaagtactctgaagaggatgcaaaggttgttatggtacaaattttgagtgtcgtatcattttgccatcttcaaggtgttgttcatcgtgatctgaagccggagaatttccttttctcttcaaaggatgaaaactctcccttgaaggtcatagattttggcctgtctgactttgtgaagccagacgaaagactaaatgatattgttggaagtgcatactacgttgctccagaggtgctccaccgatcttacggcaccgaggcagatatgtggagcatcggagtaatcgcctacatcttgctatgcgggagtaggcctttctgggcgcgcacggagtcgggaatcttccgagctgtcttgaaggcggaaccgagttttgatgaggccccatggcccactctcacggctgaagctaaagattttgtaaaaaggcttcttaacaaggattaccgcaagagaatgacggctgcacaagctctcagtcatccatggatccgtaattctcaacaagtgaaggttcctttggatatgataatctataagctaatgagagcgtacatcagctcgtcttcgctgcggaagtctgctttgagggccctagccaagacgctgacgacggaccaactcttttatgtgagggagcagtttgaattgctgggcccgaacaagaatggttacatctcattgcaaaatctgaaatcggctctagcgaagaactccacggatgcaatgaaggactccagggttgtcgattttgttaacaccgtgtgcgctcttcagtacaggaaactggatttcgaagagttcgccgcttccgccatcagcgtctaccagatggaagccctggagacctgggagcagcacgcgaggcgcgcgtacgagctgttcgacaaggaaggaaaccggcccattgtgatcgaagaacttgcgtcggagctcggacttggcccgtcagtgcctctccacgttgtcctccaagactgggtcagacacgccgacgggaagctgagcttcctggggttcatcaagctcttgcacggggtctcgtcgcgctcgatcccaaaggcctagcattgtacaccatccatccatcgtcgttgttgttgtagttgtactgaagtaaagctgttgtgtagacgagtgtacagatgaggatagggaaaagaaatgaacatgatggaagactggaagggccgtaagatttgcggctgctgtttgtcaatgccaaattgccattgcctgccctgcccatccatatccatcaagaaccaaggagatgatgaccggtggctaagccagtctctggctggtgcgtgcgtgcgtgcgtcccgtgtgtattgtgttctgttcgagagtggctggagggtggtggacggcctgaaaccgttgcatgatgaggagagatgcttggtagtcctgtgaggtaaagaggcagttagaaggctggtgcctgtgccttgtaccacttgtaccccatcccttgccacgtggattgctggcggcggcggcgtcgtcgtcgttgtactgaagtaaggtgctgtgtagacgagtgtacagatgatggaggataggagaaaatgagtactacgatggaagggccgtaagatttgcggctgctgtgctgtttgtccgtaggttgctaggagactttggcaaactgttgcatatttgtatcactgacctggaattttatttatgttacactggcgctgagcatagactagcattggataccatgactattacttcctccacttccggtttggacaggcattagcgggatt

SEQ ID NO: 1015 - DNA, 1341 bp, Zea mays
  Clone ID: PAT_MRT4577_135917C.1
gaaaactctcccttgaaggtcatagattttggcttgtctgactttgtgaagccagatgaaagactaaacgacattgttggaagcgcatactatgttgctccagaggtcctccacagatcttatgcctacatcttgctctgtgggagtaggcctttctgggcgcgcacggagtcgggaatcttccgagctgtcttgaaggcggaaccgagttttgatgaggccccatggcccactctcacggctgaagctaaagattttgtaaaaaggcttcttaacaaggattaccgcaagagaatgacggctgcacaagctctcagtcatccatggatccgtaattctcaacaagtgaaggttcctttggatatgataatctataagctaatgagagcgtacatcagctcgtcttcgctgcggaagtctgctttgagggccctagccaagacgctgacgacggaccaactcttttatgtgagggagcagtttgaattgctgggcccgaacaagaatggttacatctcattgcaaaatctgaaatcggctctagcgaagaactccacggatgcaatgaaggactccagggttgtcgattttgttaacaccgtgtgcgctcttcagtacaggaaactggatttcgaagagttcgccgcttccgccatcagcgtctaccagatggaagccctggagacctgggagcagcacgcgaggcgcgcgtacgagctgttcgacaaggaaggaaaccggcccattgtgatcgaggaagtttggtcggagctcggacttggcccgtcagtgcctctccacgttgtcctccaagactgggtcagacacgccgacgggaagctgagcttcctggggttcatcaagctcttgcacggggtctcgtcgcgctcgatcccaaaggcctagcattgtacaccatccatccatccatatctatatccatcgaccgagggagacgagtgatggctgagccagtctctggctgcaggtgcgtgcgtgtgtgttcagcgttctgttccccggtggacggcctgaaaccaaacgcaaagaccaagagaaatgcctgacgatagtcctgtgtaagaagagtaagtaaggcagcacagggtctggtgcctgtgcaccacttgtaccacatcccttgccacgtggatagatgacgtcgtcgtcgtctttgttgtagttgtactgaagtaaagctggttgtgtagacgagtgtacagatgaggatagggaaaagaaatgaacatggtggaagactggaagggccgtaagatttgcggctgctgtttgtcaatgccaaattgccaatgcctgcagctgcagtagctgtgtctggcc

SEQ ID NO: 1016 - DNA, 402 bp, Zea mays
  Clone ID: PAT_MRT4577_135919C.1
cccacgcgtccgcccacgcgtccgcccacgcgtccgcccacgcgtccgatttggaggccgtggggggtcccttgcgaccggttctggtcgatttctcgggcagctccagctgaattcaagatgccgctgtgacccaccgctgcctggtttcttggaggaaggaaattttgcttcaattgggcgtcgttgagctagacccctcctccagctcttgatccggtccatggggctctgccatggcaagccgacgcaaatcccggaggctgaggcggaggaggatccccacgtagcctccggcgcgggcgacggcggggacggggcgacctcgccgtcggcggcggcgcccgcggcgaagccaggcacgccgaaacagcccaagttcccgttctacctgccgagccc

SEQ ID NO: 1017 - DNA, 256 bp, Zea mays
  Clone ID: PAT_MRT4577_135990C.1
aaagcatgaccaaggagcaccagcatttatttggggcgaacttagaacaaatactgacaggagtaacaccatacatcaatccacagtccatgctgtttgacacatgggtctgctgtagccggggatgaacacatcactaacaactgacacatagcgaccttgctatctgaaccacaggtgggcgccaacacactagactaactacagataaaccctatggactagggtaaacatcactgctgcgaacatgataact

SEQ ID NO: 1018 - DNA, 2638 bp, Zea mays
  Clone ID: PAT_MRT4577_136067C.1
gccggccggtccaggtcgttccattgcaaccacctcccgttctgatttctgcgggcggaattccataaggccctcccccctcccctatcctcctccccttgccactccaattcctctgcaaaattttctcatggcagccgacgtttccatccgcactcgatccgcctcaaccacccgctaattcctcctagttctagacttctagtctcctctctctctctctctctctctctctcctgcgccgactcatcttcatcctcgtctcacctccctgctgctgctgacgctgctgccggcaagatcaaatcgttcaaaaggtgcggccttttctcctcgccggcgcgttcgttctaacgcaatctgcaaagatttgttgtttttttactgctatgtgttgatgtgggagacgccgtcctcacccgattcgatgtgggattgctccgcggaattttgggcgggactgaccctctctctctctctctcctgcgccgactcatcttcaccctcgtatcacctccctgctgctgctgacgctgctgccggcaagatcaaatcgttcaaaagaccctggatttcggcgaattctagatggatcatgtgttttaggtgattggtgctttcgacctcattagtgccttttgttcaattgctggacccaaggagcagagttctgtcgacatggcatctccaagaggaaggatgtcatttccccttcgttcctttctgatgatctgcctcatggctcagctgggagcttccaatgttgtactcatggcgaacaacactaccctgtcgttcgacgacgtcgaggcaatttttactccagcagtgaaaggttcaggtgtaaatggtgtcctttatgctgtggaacctatggatgcatgcagtccattgagaacaaaagcgataggaggctctgtctcaacatttgcgttggttataagaggcggttgccatttcgatgacaaagttagaaatgctcagaatgctggattcaaggctgctgtagtatatgatactgaagacaacggtatccttgtttcaatggctggaagctcgtctggagtccacatatatgcagtgtttgtctctaaagcgtcaggggaggagctgaagaaatattcaggccaaactgacgcagagttgtggataataccaacatacgcgaactcggcttggtcaatcatggcaatttcatttatatcactgcttgttatgtctgctatcctagccgcgtgtttctttgcgaggagacaccagataagacgggacagggctcgacttccccaaactcgggagttccatggaatgaacagccggttagttaaagcaatgccaagtcttattttcacgaaagtgcaagaagacgactgcacatcagcaacatgcgccatttgcttggaagactacagtgctggagaaaagataagggttctaccttgtcgacacaagttccacgcagcctgtgtggacctatggctcacctcctggagaacattctgccctgtatgcaagcgggacgcgaatgctggaacaccagagccccctgtatcagagtcgacgcctttgctctcatcatccgccattcgcttaccagaaccaaccgcttcggtttccttctggtctacagtggcagcagcagcagcagcgtctccccccaggccaatcagccggcatccgtcgccatcacggtccatatcccgcaagcactccgtttcaggttccagcatccctggcacccctatccccaggtttcacgcaagctcatcatctcctacctgcacaagtggaagcagtttggacctcgcaaacatgccgtcgtctccatggcctcgcgcttcgcaccttgcatctgctcactcttcgtgcggtggccgcctgtccccgccgatccacatcaggaatacctctgcagcgcacgtctcgcgctctgcctatggatctcccagccgttacgtaggctcgtcgcacatgtcccgtggatctccgagttgctactaccttggatcttcttcagggcagcagcatccttacctgaggcactgcaccttgtcaggcacgagcctgttcaccatggtgccccaatcaccgcaacagaaccagctgcagcacggtggagactcggaaaaagatctgtcagctgctgcaccattccgtcagctctactacctgcagcattgtccagattctggcacgtcgtctcagtcgcttccagggtgctgattcttcattcttgctgcaaaattcaccattttaaaaaacattgatggtggctccagtaaagcttccggccgtgaggaatcttacatggcaccgaattgacatgtggatttgagctcctcagttcaccatgatgatgagagaaaaaaggtgcgacagaattgcttgtaagaagagagaattgcaccccccagaatgtgtggcttcatcttgaagaagcaaatgcccatgtcgggcttcaccagcgtttagcgtgtactgatacagctctgtagtaattctagttgctgtttgtctatcgaggtttgagccggtagcattccttcctctcttttttgttttcctaattttgaattagttatatgacagacaaggttttcaagaaaagaaataacaagttttacccctgcatttttat

SEQ ID NO: 1019 - DNA, 2580 bp, Zea mays
  Clone ID: PAT_MRT4577_136069C.1
atattagtgtagccatcagtgtatttatatggtaccgtgagatcaaaccatagattctttcattcagctctgatggcttcgttccattgcaaaccacctcccgttctgatttctgcgggcggaattccataaggccctcccccctcccctatcctcctccccttgccactccaattcctctgcaaaattttctcatggcagccgacgtttccatccgcactcgatccgcctcaaccacccgctaattcctcctagttctagacttctagtctcctctctctctctctctctctctctcctgcgccgactcatcttcaccctcgtctcacctccctgctgctgctgacgctgctgccggcaagatcaaatcgttcaaaagggtttttctttttctttttgggcgatttcgtgctcaaattgacatcttctaaccagtccaatgcacttttcgtacccgtgtacaagaccctggatttcggcgaattctagatggatcatgtgttttaggtgattggtgctttcgacctcattagtgccttttgttcaattgctggacccaaggagcagagttctgtcgacatggcatctccaagaggaaggatgtcatttccccttcgttcctttctgatgatctgcctcatggctcagctgggagcttccaatgttgtactcatggcgaacaacactaccctgtcgttcgacgacgtcgaggcaatttttactccagcagtgaaaggttcaggtgtaaatggtgtcctttatgctgtggaacctatggatgcatgcagtccattgaaaacaaaagcgataggaggctctgtctcaccatttgcgttggttataagaggcggttgccatttcgatgacaaagttagaaatgctcagaatgctggattcaaggctgctgtagtatatgatactgaagacaacggtgtccttgtttcaatggctggaagctcgtctggagtccacatatatgccgtgtttgtctctaaagcgtcaggggaggagctgaagaaatattcaggccaaactgacgcagagttgtggataataccaacatacgagaactcggcttggtcaatcatggcaatttcatttgtatcactgcttgttatgtctgctatcctagctgcgtgtttctttgcgaggagacaccagatcagacgggacagggctagacttccccgagctcgggagtcccatggaatgaacagtcaattagttaaggcaataccaagtcttattttcacgaaagtgcaagaagacgactgcacatcagcaacatgcgccatttgcttggaagactacagtgctggagaaaagataagagtgctaccttgtcgacacaagttccacgcagcctgtgtggacctatggctcacctcatggagaacattctgccctgtatgcaagcgggacgcgaatgctggaacaccagagccccctgtatcagagtcgacgcctttgctctcatcatccgccattcgcttaccagaaccaaccgcttctgtttccttccggtctacagtggcagaagcagcagcagcgtctccccccaggccaatcagccggcatccgtcgccatcacggtccatatcccgcaagcactccgtttcaggttccagcatccctggcacccctatccccaggttccatgcaagctcatcatctcctacctgcacaagtggaagcagtttggacctcgcaaacatgtcgtcgtctccatggcctcgcgcttcgcaccttgcatctgctcactattcgtgcagtggccgcctgtccccgccgatccacatcaggaatacctctgcagcacacgtctcgcgctctgcctatggatctcccagtcgttacgtaggctcgtcacacatgtcccgtggatctccgagttgctactaccttggatcttcttcagggcagcagcatccttacctgaggcactgcaccttgtcaggcacgagcctgttcaccatggtgccccaatcaccgcaacagaaccagctgcagcacggtggagactcggaaaaagatctgtcagctgctgcaccattccgtcagctctactacctgcagcattgtccagattctggcacgtcgtctcagtcgcttccagggtgctgattcttcattcttgctgcaaaattcaccattttaacattgatggtggctccagtaaagctcccggccgtgaggaatcttacatggcaccgaattgacatgtggatttgagctcctcagttcaccatgatgatgagagaaaaaaggtgcgacagaattgcttgtaagaagagagaattgcaccccccagaatgtgtggcttcatcttgaagaagcaaatgcccatgtcgggtttcaccagcgtttagcgtgtactgatacagctctgtagtaattctagttgctgtttgtctatcgaggtttgagccggtagcattccttcctctcttttttgttttcctaattttgaattagttatatgacagacaaggttttcaagaaaagaaataacaagttttacccctgcatttttacagagaggtatgttgaactcaaaaaaaaaaaaaaaaaaggccccta

SEQ ID NO: 1020 - DNA, 200 bp, Zea mays
  Clone ID: PAT_MRT4577_136187C.1
ggttaggggcattattgtctgggctcgtttcatagcgggagcaaacaaagggaacaacaggggtaccaacacctaattcaaaggtagaacggacactaacacggggacagaagccaacggtaacacgttactatagacagatacgataactcggccgaaaccaggatgggcccatatattagtccctccaatcgatgacg

SEQ ID NO: 1021 - DNA, 843 bp, Zea mays
  Clone ID: PAT_MRT4577_136269C.1
gcgtacctcgctcccggccgggagcgacacaagtaacagcagcccgatcttgcatcagctagctaactaagcaagtaagctaagctagccctaggcaacgagccgagccgtcaagctcatcgcagaccacgagccatggcctccaccaacagctggactgttgagatcgcctcgcctgtcgccgcgccgcgcctcttccgcgccgccgtgatggactggcacaccctggcccccaaggtcgcctcccacgtcgtcgccagcgcccaccccgtggagggcgagggcggcgtcggcagcgtcaggcagttcaacttcacctcagccatgccgttcggcttcgtgaaggagaggctcgagttcctggacgtggacaagtgcgagtgcaagtccacgctcgtcgagggcggcggcatcggcgtggccatcgagaccgcggcgtcgcacgtcaaggtggagtccgcggcgggcggcggctgcgtggtgaaggtggactcgacgtacaagctgttgcccggcgtggaggtgcaggacgagatcactaaagccaaggagtcggtcaccaacatcttcaaggctgccgaggcctacctcgtcgccaacccggaagcctacaactagaccatgcatgcgatcggtcgatcgggaacggatttcttccttgccttttgtgttttctacggctaaaataaaacttgtctaaggtgtgtacgaacgtcggagagcgccgagcagagtatgcatgcaattgacaagtcccaaatgtgtgtgggtgtgttttgtaagctggatttattgtgagttgatactaccatgcttatgcttaaataagtacccgttgtggtc

SEQ ID NO: 1022 - DNA, 479 bp, Zea mays
  Clone ID: PAT_MRT4577_136321C.1
ctgtgggggggggggtgggttatttctgggaagccacagacctcaaacaaaaaactttattattgaactgtaactcataagaaactaaaatgggcaccgccaatgatggggtgttggtataacactgctgggtttgtcaaagcaagttggttgagtgggggggattgttgcagttgtaagagggtgccagcgttaggcgcagcgtgctggtagaacggcaacaactgtggttgtgtcaagaaggcagcagggctcacaccagctagctggctaaatggtattagttgttgctgctgtgaataagcacgagagttcaatgctgccaggtggtggaatggaagaaactgctgggggttggcagcaactatctggctcaatggcaactgctgctattgcaaataataaacaaagctcaatgcaactaattcagtgaatggaacaaacaatgtatcttagagtaggcagtaaggtttgctagc

SEQ ID NO: 1023 - DNA, 331 bp, Zea mays
  Clone ID: PAT_MRT4577_136356C.1
gcgcccacgcgtccgcccacgcgtccgcccactcgtccggggttggcttctcctccccctccggttaccgttgggattcctgagggtctccggggttccgcttcgtgcgtgagcggatcgagatggcggcctcggatgttgactaccgctgatttttcagaccgtctcgcctgggccacagacgaccactctctccacaacgccttgagcacctacggtgaggtcctccagtccaagatcatactcgatcggcgagacgcagaggctccgctgcttcagctacgtcaccttctacacggacgacgctatgctgaacgctcatcgacggcat

SEQ ID NO: 1024 - DNA, 2067 bp, Zea mays
  Clone ID: PAT_MRT4577_136542C.1
gggaccctcgaggccggccgggccgaggctccgatatttgttttttccccaacaaaacaccgccaccttttatagatccaatctccccacttccacaattctccccgcctccccctccgaccctcccaaatcagcaccacccataggggccacggccgcgcaatgccgccctctgccgacgcaatgccggcccccggagacgccgcgtgcgccggcgacgtgcgcttgatctcctccaaggagctccgcgagcacgcgtccgccgccgacctctggatctccatctcgggcgacgtgtacgacgtgacgccctggcttccccaccacccgggcggcgacctcccgctcatcaccttggcggggcaggacgccaccgacgccttcgccgcctaccacccgccctcggcgcgcccgctcctccgccgcttcttcgtcggccgcctctccgactacaccgtctcccccgcgtccgccgactaccgccgcctcctggcgcagctctcctccgcgggcctcttcgagcgcgtcggccccacccccagggtccagctcgccctgatggccgtcctcttctacgcggcgctctacctcgtcctcgcctgcgccagcgcctcggcgcacatgctcgctggggggctcatcggcttcgtctggatccagtccggctggatgggccacgactcgggccaccaccgcatcacgggccatccgctcctggaccgcgtcgtgcaggtgctctccggaaactgcctcactggcctcagcatcgcctggtggaaatgcaaccacaacacgcaccacatcgcctgcaacagcctggaccatgacccggacctccagcacatgccgctcttcgctgtctcccccaagctgttcggcaacatatggtcctacttctaccagcggaccctggccttcgacgccgcctcgaaattcctcatcagctaccagcactggaccttctacccggtaatgtgcatcgccaggataaatcttctggcgcagtccgctgtcttcgtcctgaccgagaagagggtgccgcagcggctgcttgagatcgccggtgtcgccgcgttctgggcttggtacccgttgctggtggcgtgcctgccgaattggtgggagagggtggcgttcgtgcttctcagctttaccatctgcgggatccagcacgtccaattctgcctgaaccacttctcgtccgatgtgtacgtcgggccacccaagggcaacgactggttcgagaagcagacggcaggcacgctcgacatcctgtgccctccttggatggattggttccatggcggcctgcagttccagattgagcaccatctgttcccccgcctgcctcggtgccaccttcggaaggttgcgccggcggtgcgtgacctttgcaagaagcatgggctgacctattccgcagcctccttctgggacgcaaatgtgcttacatggaagacactcagggctgccgcattgcaggccaggagcgccacaggcggcggcggcggcgctccgaagaatttggtctgggaggcattgaacacccatggatgataaacgggacgaggatatggctgaggggaaggcaacttctggtgtttcagctttgtgccgacgcgattgtctggttgcttctaatctcagttgtttagattgtattggtcattgaacccgtccgagtcgggctggaatttttgtgttgacaagtgaccgtctatccagttgaagagttcatgcttcaatagtctggttgttcacgggatgttctgttctccctatcacggtaactatatgatgatgatccttgctttaattcatgaacacttgtttcaagattatgtccattacattttgcttgcattgtcaagattgtggattcttggtgttcatgacgttgtaatgttaatgaacggctggtaacgccatgtggtactggtacccctgtattttcagttgctgtggcaccttggctctctctttgaaaaaccagtatgtatatgacaatgatcaatttattcatattcctacttcattcccattttctgatttgttcttaagacgggg

SEQ ID NO: 1025 - DNA, 270 bp, Zea mays
  Clone ID: PAT_MRT4577_136598C.1
tctgatttacgtgtataatccattacagtctcgtgatgtgccaagcaattcccgagttacattcgcggaggaccatgactaccgatcacatatggagtatctctggggaggagaaggtttaacgaattacttagttaagtgggctccttgagtcgtagaaagaatgaggagaactgaaaagtaagtgctctttgaagatatcgtacactctacaacatattgactggcatgtagagtggctaatgcaaatcatatgcctcctttgaagga

SEQ ID NO: 1026 - DNA, 1550 bp, Zea mays
  Clone ID: PAT_MRT4577_136624C.1
aatccctttaaaacgcacaactccagaaaccctggcggacaaagccacttgctcacaccagaaccctctccgcaatctccccgcctcgctcccgcctccacccaatggcgtctctccctaacggtggcggcgccgccgcctctggctcatgcggcgcgcgccctgtggacaaggaggtggacttcgccaactacttctgcacgtacgcctacctttaccaccagaaggagatgctctgcgaccgcgtccgcatggacgcgtaccactccgccgtcttccgcaacgcgccccacttccagggcaaggtggtccttgacgtgggcaccgggagcggcatccttgctatctggagcgcgcaggccggggccaggaaggtgtacgccgtcgaggcgactaacatggcggagcacgcgcgcgagcttgctcgcgccaacggcgtcacggatatcgttgaggtgatacagggcaccgtggaagacgttgaccttccggagaaagttgatgtcattatatcagagtggatgggctactttcttttgagagagtccatgtttgattccgtcatttgcgcacgtgaccgctggttgaagccagatggtgtgatgtatcctagccatgctcggatgtggctagcacccataagaactggtttgggtgacaagaagagggaagattttgatattgctatggatgactggagcctgtttgttcaggacactcaaacttattatggtgtcaacatgaatgctttgatcgtgcagaacatgaaaaatactatttgaagtcttcaatatggaacaatcttcatccaaaccaagttatcggtcaacctgcagctatcaaggaaattgattgcttgacagccactgtcgatgagatccgagaagtcagagcacaagtcacattgccaatcagaatggaagctagattatcagcactggctggatggtttgatgttcattttcgaggtagtgctcaaaaccctggggtggaggaagttgaattaactacagcgccagatgagcatggtggaactcattggggtcagcaggtattcttgctgactccacctctgagtgtgactaaaggagacaacgttaacgtttccttctcgatggttcgctcgaaggaaaatcatcggcttatggatatggagttcacatatgaattgcacgagttatctggcaggaagcacccagcagtcaaaaccaagatgtacttagagtagaacaagatggaaagacggaacctcacgacgccgttgctgaaacctttgctcagaagctgagcatgtagtgtgcttgttacacccatgatgggtacattgagaccatttatgttgtattagtaatatattgtttgattgcccaattaacggggtgagccattgtttcatcacaacatcgatgtgttagcagataaccacatcgccgttttaagcaaacattgagtgcggaattttgttgtctttgtgaagtccgaataaagcatcttcttctgatcaaaaggatagagtgcgttggattaatatagaagtcttcacaataatc

SEQ ID NO: 1027 - DNA, 1807 bp, Zea mays
  Clone ID: PAT_MRT4577_136625C.1
cctaactaaaatttatgtagggctaagctaacaaatagattacaaaacattttctcgtacaatataatacatatttatacataagttgcaatacaagagcacttacctagtatcttattaaagggacgaaactaagaaatgggaccctgtcacgtactcacgtccaaacatatatccatccgcagccaatgacgacacgccgggtggttcactcgctgcccggaccggaggtagctttggtgacgctggtgaagacgacactgctgccgagcaggtccttgccgatgtcggcggtgaaggtgtcgtaacggaggaagagctcgacgaggaagagcctgccaacgagcaccacaaagttcttgccggggcactgcttgttgtcgacggtggggttctcggtctcgcggccgttggaccagtagacgtactgcagcagcttgctgccctcctcgccgaggaaccggccgggcacgaactccttggccgtggcgccgaacacgcgggggtccttggtggcgcacggctggtagccgaacagcatctcgcccttcttcacctggaacacggcgtcgtggctctggacctgcaggtctttcttggcgtggccgtactggaacttgacgggcgggtccaggcgcagcgactcccacacgaccgacttggccagctccatcttctccaccgccgcgagggtgaccttgccgccggcctcggccacggcgcctcgaatctcagccaccagccgctcgtggagcttctcgccggcgctggcgacgttggccaggatgcccgggaacagcaccttgaggccgccgtagctgttgaaggtggtggcgaagaggaggttgtggcaggcctcctcgcgcgacaggcccaggccctcggcggtgtccagcgcctgcttcgccaccgtggagaagtacttgtacagcgtcccgtagtcgccgctgacgaggatgggcgggaggtgcacggtgtggaggagcggctcctcgaggaccatggggaggccgagcgtcacgagcgggtggagctggaatatgagccacttggcggccttggtcgggccggtggtgcctaggtcagacgcggaggggagcacgccgaagtaggcgtcgccgatgaactcgaaggaggtggcgtcgttgagcgtgttgaagttggacttcttgctgagaacgggctgcgactcgacggtggcgaggagcgaggagaagtgggagcggaaggccgggatgaaggcgtccttgcgggaggcgaggagggagaagagcagctgcttgaccttggtgtgggtgggctcggaggggtcgaggtaggagcagacgcggaagccgccggtgagggaggtggagggcatgtaggtgccggtgaagaggttcttcttctcgaccttgtcgacgtcgaagagcacggggaagctcttggcgtcgagcacggcgaccacgcgcgggtcgcgcgccatgaacgggcccggcgggacgttgatgcggacgacggtggagccgtacttgtcgacgcgggactcgaagtacttgtcctggccctggaagtagtagaagtcgaggcggtcgcggatggccgagacgaacggcatgccgtagctgcccggcacctcccgcggcaccagggagccctcgtcgccgcctgccatgccgctccggttcgtctagctctgctgctggctggtttggtttggaactctggatctcgcgctctcgatgcagacaagattggagcgaggaggctttgtctgtgtgttgcgattttttttttttttttttttattttttcccggggcccggcc

SEQ ID NO: 1028 - DNA, 2492 bp, Zea mays
  Clone ID: PAT_MRT4577_136626C.1
atgaaaggcaaggctgctaagggattatagatttcttgggaaagataagatttttttttggggagcaatttatgcaacatgccatcctgcattataattattacaaaagcgacaaacacctccaatcacacgtgaaggtggggccgagggtgagagagaagtcttattagaaggaaggaggaaaatgacgaaattaagaaataatgggacactctgtcacgtccactcatcatatatccaacgacgcgcgccggccgggcggtttactcgctgcccggaccggaggtagctttcgtgacaccggtgaagatgacgctggtgccgagcagctccttgccgacctcggcggtgaatgtgtcgtagcggaggaagagctcgacgaggaggagcctgccgacgagcaccacgaagttcttcccggggcactgcttgttgtcgacgctggggttctcggtctcgcggccgttggaccagtacacgtactgcagcagcttgctgccctcctcgccgaggaagcggtcgggcacgaagtccccggcggtgtcgccgaacacgcgggggtccttggtggcgcacggctggtagccgaacagcatctcgcccttcctcacctggaacaccgcgtcgtggctctccaccagcaggtccttcttggcgtgcccgtactggaacttgacgggcgggtccaggcgcagcgactcccacaccaccgacttggccagctccatcctctccaccgccgcgagggtgaccttgccgccggcgtcggccacggcgccgcggatctcggccaccagccgctcgtggagcttctcgccgccgctggccacgttggccagcaggcccgggaacagcaccttgaggccgccgtagctgttgaaggtggtggcgaagaggaggttgtggcaggcctcctcgcgcgacaggcccaggccctcggcggtgtccagcgcctgcttcgccaccgtggagaagtacttgtacagcgccctgtagtcgcccttgacgaggaaaggcgggaggtggaacgtgtggagcagcggctcctccaggaccatggggaggccgagcgtgaccagcgggtggagctgccagatgagccacttggccgccttgctcggcccgcccttgccgagctcggtcgccgaggggcgcacgccgaagtaggcctcgccgatgaagtcgaaggaggtcacgtcgttgagcttgttgaactcggccttgccgcccttggccagctccgactcgacggtggcgaggagcgaggagaagttggagcggaaggtggggatcacgtcgtccttgcgggagagcaggagggagaagagcagctgcttcaccttggtgtgggtgggctcggaggggtcgaggtaggcgcagacgcggtagccgccggtgagggaggtggacggcatgtaggtgcccgtgaacaggtccttcttctccaccttgtccatgtcgaagaggacggggaagctcttggcgtccaggaccgccaccacccgcgggtcgcgcgccatgaaggggcccggcgggacgttcatgcgcaccacggtggagccgtagcgctccacgcgggactcgaagtacttgtcctgcccctggaagtagtagaagtcgaggcggtcgcgcacggcgcccaccagcggcaggccgtagctgcccggcacgtccctgcagggggcgctactgaaaccacgaacggaggtcgccatagaggaggctcgcaacaagttgcttcttccccggcaatggatcgcgctctgggtgcagttgctcaaattcgtcggtttgaaggcttacgaagaaggactggaggaggcgttgttacaggctccagtcatccatagcaatatcaaaatcttccctcttcttgtcacccaaaccagttcttatgggtgctagccacatccgagcatggctaggatacatcacaccatctggcttcaaccagcggtcacgtgcgcaaatgacggaatcaaacatggactctctcaaaagaaagtagcccatccactctgatataatgacatcaactttctccggaaggtcaacgtcttccacggtgccctgtatcacctcaacgatatccgtgacgccgttggcgcgagcaagctcgcgcgcgtgctccgccatgttagtcgcctcgacggcgtacaccttcctggccccggcctgcgcgctccagatagcaaggatgccgctcccggtgcccacgtcaaggaccaccttgccctggaagtggggcgcgttgcggaagacggcggagtggtacgcgtccatgcggacgcggtcgcagagcatctccttctggtggtaaaggtaggcgtacgtgcagaagtagttggcgaagtccacctccttgtccacagggcgcgcgccgcatgagccagaggcgtcggcgccgccaccgttagggagagacgccattgggtggaggcgggagggaggcggggagattgcggagagggttctgggtgagcaagtgcttt

SEQ ID NO: 1029 - DNA, 2402 bp, Zea mays
  Clone ID: PAT_MRT4577_136628C.1
gcggtacgggccatcccggacggccatagactcagagccacggcgtgcaggcgggcgggcgggcgagcgagcgagaggaaaagccaaggcggcagcagtaggcagccaccatcaataaagaaggccctacgcctcgctggagcgcaaggtgggggccccccgggccgggggggaaattcaccaaaccgaaatggccatggccaaccggcttagattgccgcttccccagtgcctcttcttgctgcattgctacgtcgttgttgcgattgtagcacacccgtccagcccagagcaagcatcccccaaggcgaaccaacatcctctatcatacaacaacctacgaccagaagattttccaaacgatcggctctaccgcgcttaccacgccattcaaagcttcaagagcacgatcacttcggatcccaagaacatcaccggcacgtgggccggcaacgacatctgcggcgagaagagctacgtcggcttctactgtgcaacaccgaccagccgagctaaggagctcacagtgacggcagtagttctcaatggcttcggtctgcgtgcaccgaagctgcaaggcttcgtcgaccagctccccgacgtcgcactcttccatgccgcctccaacaacttcggcaacggcggcatcccccgactcacaggccttgaatactcgtacgatcttagcgtcgacgacaatactgacctccaagttcaggactattctgaagttactgggagagctagagccaacattcactgtgttgctggaatgatcgagttaagatttcgtttgggaactggccctgataagggaggaggcatcattcctggagtcgcggatggcaaggctctactgttgaactacaacgacctgtccgggcaacttcctgcagatcttggcttctccaaactgagcttcctcgccctggccaacaacaggctaacaggcccaatcccgccatcagtagcgcaactgaaagactcccttctcgaggttctcctcctgaacaaccagctctccggctgtctcgcccccgagctcggcatgctcgccaaggcggcggtcattgacgccggcatgaaccagctcaccggcccgatcccgtcgtccttctcctgcctcatcagcgtcgagcagctgaacctggccggaaaccgcctctacggccacgtacccgacgcgctctgcaggctcgccgggcctgccggccgactcgccaacctcacgctgtccggcaactacttcacctccgtcgggccggcgtgcgcggcgctgataaaagatggcgtgctgaacgtaaagagcaactgcattcctgggctcgccaaccagaggcgcccggaggagtgcgctgcattcatccagagtcggccaaagacttgcccggccgcggcaaccactgagacgacgtgccccgccccagctgccaatgatgcggtggcgcagggggtgaggaaggtcagggactacttcagctatgtgacgtacgctacactgcatgagtgagctgtgtcggcatgagtaggagacaagtgcctcgatagtattttggctaattgttccagtactgtattcatgatgtgcacactgctctgtactactggtgtgcatgtgattgttgtacattatttgctcttcacgtgtgttgctgtcacatctagatgccaaggcggcagcagtaggcagccaccatcaataaagaaggtccgaaccaagcatgtcgggggtgtgggtgttccggaacggcgtggtgaggctggtggagaacccgacgtcggggaacgcggcggcggcgccgggcaagcgcaaggcgctgctgcacacgccgtccggggaggtggtcacgtcctacgcctcgctggagcgcaagctggcggcgctcggctgggagcgctactacgccggcggcggagacggcggcggcgccggcctgctgcagtaccacaagcgcacctccgtcgacctcatctcgctgcccaaggacttcgcccacttcggctccgtccacatgtacgacatcgtcatcaagaaccgcgacgccttccgcgtcatcgacgcctaattataagctagcggatgcagcagatgacagatactcacctctcctcgctcgctcctcgctccggccagtgcatcatctacctcgctgtagctacctacctaccctaatataatagcagctatagccttcgtcacccattgctcgatcgatttagttgccgtgtcgatctcagtgccgcgttggtctaaattaatatatatagatcatgtactgatgatttggtttgttcatgcatgttttctctattttacatctagtttgtgttgctgggtcctctgctttgtattcttcttcctcgcatcagtttcatcatctcctgccctgtgacccagctgc

SEQ ID NO: 1030 - DNA, 347 bp, Zea mays
  Clone ID: PAT_MRT4577_136636C.1
tgggtacctcgaggccggccgggattgtatccttaaccatttcttttttttttgacaacagcatctcaagccaccatcgatctgcaagtctcgctacgtagcagtgcaataaaaaaagcagccgcaatggcgagcagcaccatgggcctctcctccacggacttctccggcaagggcgtgaacgtgacgtcgtcgtcagacttcggcgaggtccgagcgacgatgcgcaagacttcgttgaaggccaagccagcgggggcgtccggtagcccgcggtacggccccgaccgcgcgctgtatctgtggccactgtcgggtgagcctacgacgtagctgtcgggaaaatt

SEQ ID NO: 1031 - DNA, 1946 bp, Zea mays
  Clone ID: PAT_MRT4577_136696C.1
ggggtgccccttttattgggatgtctcgatacttaggtagactataactttgggtagaaatttacaaatcacagatggggttcaatgttaatagttacgttccagaattaagatcactctgttataattttatcgattatttccatcattggcttggttaagccagcaccaaacagcaggacaggcgcttatttctcaacagggcaagactcgtgcttaagcgatctagaagattcacaatttatggatggttttcatgtctgctgccccctgcagagtcccttgctcgacatgatcccaccagcccatgagaaagttgtccaccaccagcctgaaccaaggggagagcttaacgccatcttccccggcatcagctttcctgagcagctccttcagctgatgccggttcatgtacttgacgtctgccaccttttcaggattcgggtcgagcttcacgtcacgaaccatgaacaagagggaatccaacttcgtgttcgccccattttccatctgaaggagccttgtaaagcatcctcccaagcggaatgaactggtcgacaggtaattcgtcagccactattcccagctcatcaaatagtttgcgctgggctgcatttctcacccctgaacagaataagagatggcgactgcacaattttcctcaatcaactctgactcgcggtagagaggatggctacagcaggtgtttgtccagacaagtggaaatgtcacttttgttgcagacctttgctgtagtagcaactcatatttggagttgaaaaggaaaacactgaaagctctgtgcagggcatttccagcttctatcttctccatgagatggcagttatacttggactcgtggccgatgacattgtcttgacaaacacctgctgtagccatcctctctaccgcgagtcagagttgattgaggaaaattgtgcaggggtgagaaatgcagcccagcgcaaactatttgatgagctgggaatagtggctgacgaattacctgtcgaccagttcattccgcttgggaggatgctttacaaggctccttcagatggaaaatggggcgaacacgagttggattacctcttgttcatggttcgtgacgtgaagctcgacccgaatcctgaagaggtggccgatgtcaagtacatgaaccggcatcagctgaaggagctgctcaggaaagccgatgccggggaagatggcgttaagctctccccttggttcaggctggtggtggacaactttctcatgggctggtgggatcatgtcgagcaagggactctgcagggggcagcagacatgaaaaccatccataaattgtaaatcttctagatcgcttaagcacgagtcttgccctgttgaggaataagcgcttgtcctgctgtttggtgctggaggaataatcgataaaattataacagagtgatcttaattctggaacgtaactattaacattgaaccccatctgtgatgtgtaaatttctacctaaagaccaaagaaaaagggggcacgccattaggttaggcaaattgatacatactaaaaggcaaaggccaaattggaagtgtcttgttcatccactaaaatgcactcgtcctcaaacatgagccgccgctggacggcgtccatcccggcgtcggcgtcaacgaccccggggcctggcttccccatcacggcgccccctgcggaggcggcgaacgagcggagcccgcggagcttggggagggccgacccagccgaagaggaagagacagccaagcgagcccacgaccgctgcccgacgccgagcgatgccgaggcagacgcgacgagcgcgagggatcgcgccgccgatgacgccatgaggggagggatggtcgcacggccacgcctggatttggtgagccgggcaactggtctggtcgtgctgttcggtgcgaccgaccatcccggccgg

SEQ ID NO: 1032 - DNA, 495 bp, Zea mays
  unsure (1)..(495): unsure at all n locations
  Clone ID: PAT_MRT4577_136782C.1
tccggccgaagnngatnttccccacccattcctcgcctgcgctccctcgccgccccagttccccaccccctgctcacccacccgtcccctcctgctcgcccatggctcccatcgctgtcggcgacgccctccccgacggccagctcgggtgggtcgacgagaacgaccagctgcagcaggtgtccgtccacgcgctcgccgccggcaagaagggcatggtgggtgggggttcccggggcctttaccccgacctggaggaaccagcatgtgccagggttcatcacacaggctgagcaactcaaagccaagggggtagacaagataccgcttatcagaggtaacgacccccttgtcatgaaggcgggggcgaagacctaccccgagaacaagcacgtgaagtttcttgccggcggatctggaggggacaccaaagcggcttgacttaagcttgatttcaccgacaaagggctgggcgtgggctcgaaaaaggttggt

SEQ ID NO: 1033 - DNA, 3236 bp, Zea mays
  unsure (1)..(3236): unsure at all n locations
  Clone ID: PAT_MRT4577_136850C.1
aagtagggttaggaaggcggcggccagcggcgagaggaggaggggtgggtcagccatgacggggaaggcgaagccgaagaagcacacggcgaaggagatcgccgcgaagatcgacgcggcgacgacgaaccggggcggcggcaaggccgggctggcggaccggctggggcaggacaagggcgggcatgcgaagctggcgtgcccgctctgccgcaccccggcgcccgacatcaagtccatgcagatccaccacgaggcgcgccaccccaagctccccttcgagccggagaagctcctcaacctgcactcctccgcccccgctgctgctgttgccgtcgccgtcgacgtcgtcgccgctgccgaggccaccacctccaagcccaagcccggcgaattcggcacccgggagcgacgaagccaaaggaacacaccagcgcgcacgcacgcgcagcgtccggcgggcatcaccacctcctgtcctcctccctcctgccccgatccgccctccccgccgctcgccgcacccgatgtcggccgccgacccttccgcggctccggccgcggccgccgacccggacggccctgactccgtgcggctcacctggaatacctggccacggtcaaaggtcgaggccagccgctgcgtcgtgccgctcgccgccaccatctcgcccactcgcgtcccggatccctccgcggcatccccgccgccgctcccttaccctccgctccgctgcaagcctccctgttccgcgctcctcaaccccttcgcgcgcgtagacttcgctgccaagatctggatctgcccgctctgcttctcccggaaccactttcccccgcactatgctgccatatctgagtccaacgtccccgccgagctcttcccgcagtgctccaccgtcgactacatcgtcggcggagccggcatccctggggtaggcggcgcgccgccgcccccgccgcccgtatttctcttcgtcatcgacacctgcgtcatcgaggaggagctggagtacgttaagatggccatgcggaaggccgtcgcgctcctgccggagcacgcactcgtgggcctcgtcaccttcggcacgcaggtgcacctgcacgagctcggattctccgatctcagcaagatctacgtcttccgggggaccaaggagatctctaaggaccagattttggatcagcttggcctggcgggtgctgggcggccgggcttccccaagatgccacagcaaccgggcgggccacaggtgaatgggatgcatccgccgtccacggccggggtcaacaggttcctgctcccggtgtcagattgtgagattgctctcagcacgttgctggacgagttgcagcctgaccaatggccagtcgaggctgggaaccgtgcgatccgttgcactggtgttgcgctcagtgtagctgctgggttacttggtgcttgcatgcctggaacaggtgcaaggatcatcgcattgctaggtggtccgtgtactgagggacctggaatgattgtttcaaaagatttgtcagaaccagttagatcacataaggatcttgacaaggatgcagctcctcacttccagaaagcagttaaattttatgatggtcttgctaagcagttggtcagtcaaggtcacgtgttagatgtttttgcttctgctctcgatcaggttgggctagctgagatgaaggttgctattgagagaacaggtggccttgttgtcttgtctgaaagttttgggcattccgtattcaaggattctttcaaacgcatttttgagggaggtgaacagtctctaggactttctttcaatggcataattgaaataaactgttcaaaagatattaaagtccaaggtattattggaccatgcacatctttggagaagaaaggagccatgtgctctgacacagttgtcggtcaaggaaatacatcagcatggaaaatgtgtggtctcgatagaaatacttctcttacagtattttttgatgtctcaccgagtgaacgatcgagccagccaggaaaccaaaatccccatttgtatatacaatttgtgacaagttaccaacacccagaaggtcaaatgaggataagagttactacgatatgcaggaaatgggtagatggttccactaataccgaggaattagttgaaggttttgaccaggaaactgcagctgttgtgttggcaagatacatctctttgaaaatggagatggaggaagagttcgatgcaacccggtggcttgatagatctctcatacgtctttgttcaagatttggggattaccggaaggatgatccctcttcatttagcctgcattcaaatttctcattgttccctcagtttatgtttaatcttcggcgttcacaatttgttcaggttttcaataacagtccagatgagacagcttatttcaggatgttactcaatcgtgagagtatcactaactcggttgccatgatccagccttccttgatatcattttcttttgattcacctccatctccggtatttctagatgtggcatcaatagcagcagatcgtatactgctacttgatgcgtactttagtgttgtcatttttcatggaatgacaattgctcagtggagaaacatgggttatcagaaccaacctgagcatgagcaatttgcacaactattacaagcaccacatgaggaggcacaaatgataataaagggtcgatttccagttccaagactagttgtctgcgaccaacatggctcgcaggcaaggtttttgttggctaagctgaatccatcggccacatataactcagctcatgatgttgctcctggttctgacatcattttcaccgatgatgttagcttccaggtcttctgtgagcacctacaaaggctggctgttcagtcttgaggacctacctgtatgcaaaggttgtacaccctatttgatagttgctcataatgcactgggttcttaggttggagttgtgagaatttcccttttctgtttctctttggccatagttttctgagatcagacaattttttcgggaaactgccctaaaggaatgtgtaagttgcctacagaggtctattatctacatatatagtatatatacttatttatgttgacatcacccagctttcttctgcaaggtggttgcatgaattgagttgtgtgtcaagttcactttccagaaatcagaaatgtaagatcgcaaggcattatntaaaaaaaaaaaaa

SEQ ID NO: 1034 - DNA, 567 bp, Zea mays
  Clone ID: PAT_MRT4577_136888C.1
aattcggcacgagggaattatctcccctagccgccgtcgccgctcgtctccctgagaggtgccggcaccgatgaactggccgagtgctaggtccagaatccgttttgcttggctcaccacggcgtctgttgcgtctggtggtggggaaggggcgaaattcctgagagctgttccgggtcaggcgagcgagctcggcaatcacgagttgcacacatagcctctgtcgatccgaatttgatgtactactggaggctagagggggcaaaaaggctatcagtcttcggtccatgatgtatgaagctccccttgggtacagcattgaggacgttccacctgacgtaggcgtgaaaaagttccaggctgctgctgactccaactgtgcgaagaatctatcctgatattccttttgacttccttattctagctgtactatgatctcgtttatgacactttgattctgaccatatctctctggcctgctgcttcctgttaatcgaccagtttctcagatttgctccttgcactcctccctgatgcatctccagcattgtgttctgatgacctgct

SEQ ID NO: 1035 - DNA, 167 bp, Zea mays
  Clone ID: PAT_MRT4577_137243C.1
ggcagccatagaaaaggctggctacactggacaggtggtcattggaatggatgttgctgcttctgaattctgcggtgaggtagacaagacttatgatcttaatgtctaggtggctaacaacgacggctcaaacaagatttcaggcgacagctgcatagacctggaca

SEQ ID NO: 1036 - DNA, 721 bp, Zea mays
  Clone ID: PAT_MRT4577_137379C.1
aaccccgcacctcctccaaacgcgtattgcctcctacgcccccggatccgctgctccaccccccaactccgttgccacacgcccttgcacaagcgagcgagcaaccatgtcgccggcagagccgacgcgagacgagagcgtctacatggccaagcttgcggagcaggccgagcgctacgaggagatggtggagttcatggagcgcgtcgcgaaggccaccggcggggcagggcccggggaggagctatccgtcgaggagcgcaacctgctctctgtggcttacaagaatgtcatcggggcccggcgcgcgtcctggaggatcatctcctccatcgagcagaaggaggaaggtcggggcaacgacgcgcacgccgccaccatccgctcctaccgcagcaagatcgaggccgagctcgcaaagatctgcgacggcatcctcgccctgcttgattcccacctcgtgccatccgccggagctgccgagtccaaagtcttctatctcaagatgaagggcgactaccacaggtaccttgcagagtttaagtccggtgggggagaggaaggaagccgccgagagcaccatgaacgcgtacaaagctgctcaggatatcgccctagcagatttggctccaacccaccccatcaggcttgggcttgccttcaacttttctgtgttctactatgagatcttgaactcccctgaccgcgcctgcaaccttgc

SEQ ID NO: 1037 - DNA, 3470 bp, Zea mays
  Clone ID: PAT_MRT4577_137423C.1
aatggtagtaatatttgctgctgccaataaccagcgaggttcagtgcggccaattggttaaatggaaaaagttgttgttcatcagagtaggcagtagctagctggctgaatggtaatagttgttgctgcaaataagcagcagggttcagtgtagatagttggttgaatggaagaaattgttgttgctgatagtagggagaaaggtttgccagagctagtcggttggtcacaggcagcgatagagcacagacagtctgtcttctccccgtagcgctgtcacgatagcagccgtcagctcccggccaccaaatcctcagtagaagtcccgcaggctccaagcctcggagtgccagtagtgatagtaagctgtagcacggtgggggctcaactgaataacgtgaacgcattgccctttctgttacgtgttttattttattgtgtttctgtggtcgtatatctgttttgtgacgtgtcccttgcttctgcccatgtgaattccagaagaactatgagaaattcaggtgtggtgatcaaaaaaaaaaaaaaagggcggaactcacccccttcccttcctccgatccccccgcctcccccaaaatccgacgcgtaatcgccgccatggccgccgccggcaagctcctcctcctggtcgccgccgtcctggcggcttccctcgtcgccgacgcgcgcccgtgcggccacgcgcagacgctcctcgtctccttctcctccgtcctcaggccgaacccggaccccaccaacccgacgccgctcaccaccacagtcgtcaccgtcctccgcgtccgccgcctcggcccgcaccagatccgccgccccgtggcgctccccgccgtcgagtcggaggtcgccgcctcgtccgcccaggaccgcgccaaggacatcctccggcctcctcttatgattgggtacctcgaggccggccgggaccgacgccgaaccaaaccaacacacgtcaaagcagaaaacctcagaaaaccccaatatatcctcgtccaccactgcccccgctctgctgcaactccactcggcccggccgccctttccacccaccttgatcctctgatccgttggtgcttgaccgatccatggacacccacatcggatccgtgaacggggcggcgtcgaaccagacggttggctgcccggcgtcggcgccggggtgcccgatggcgtccacgccggcgcagcccgcggcgaccctgtcggcgggggaggcgtcgctggggcgccacctcgcgcgtcgcctcgtgcaggtcggcgtcaacgatgtattcgcggttccgggggacttcaacctcacgctgctcgaccacctgatcgccgagcccggcctgcgcctcgtcggctgctgcaacgagctcaacgccgggtacgccgccgacgggtacgcgcgcgcgcgcggcgtcggggcctgcgccgtcacgttcacagtcggggggctcagcgtgctcaacgccatcgcgggcgcctacagcgagaacctgcccgtcatctgcatcgccggcgggcccaactccaacgactacgggaccaaccgcatcctccaccacaccatcggcctccccgacttctcgcaggagctccgctgcttccagaccgtcacctgccatcaggcggtggtgaacaatctggatgacgcgcacgagcagatcgacacggccattgccacggcactgagggagagcaagcccgtgtacctcagcatcagctgcaacctccctgggctgcctcatcctaccttcagccgcgacccagtgcccttcttcctcacccccaggacgagcaacaagatggggctagaggctgcagtggaggcaactgtcgaattcctgaacaaggcggtgaagccagtccttgtcgccggccccaaactgcgtgtggcaaaggcaggaaaggcatttgtcgatatggtagatgccagtggctatgcctatgccgtgatgccatcggccaagggtcttgtgccagagactcacccccacttcatcggcacctactggggcgccgtcagcaccgccttctgtgcggagattgttgagtccgcagatgcctacctctttgcaggccccattttcaatgactacagctctgttggctactcattcctcctcaagaaggaaaaggccatcatcgtccagcctgagcgtgtgatagtggggaatgggccggcattcggatgtgtgatgatgaaagagttcttgtctgaattggctaagagggttaataagaacaccactgcctatgagaattacaagaggatctttgtacctgagggccagccgctggaaagcgagccaaatgagccactgcgagtgaatgtgctcttcaagcacgtccagaagatgttgactggtgatagcgcggtgattgctgagactggtgactcctggttcaactgccagaagcttaagctgccagaaggctgtgggtatgaattccaaatgcagtatggttcgattggatggtcagtgggtgcattgctcggatatgctcagggtgcgaaccacaagcgtgtgattgccttcattggtgatgggagcttccaggttacagcacaggatgtgtcaactatgctgcgatgtgagcagaacagcataatcttcctgatcaacaacggtgggtacacgattgaggtggaaatccatgacgggccatacaacgtcatcaagaactggaactacactggctttgtggacgccatccacaatggcttgggcaagtgctggacctccaaggtgaagagcgaggaggagctgacggctgccattgagacagcgctaggggagaagaaggactgcctgtgcttcatcgaggtgatcgcgcacaaggacgacaccagcaaagagctgctggaatggggctctagggtttctgccgccaactcccggccaccaaatcctcagtagaagtcccgcaggctccaagcctcggagtgccagtagtgatagtaagctgtagcacggtgggggctcaaccgaataacgtgaacgcattgccctttctgttacgtgttttattttattgtgtttctgtggtcgtatatctgttttgtgacgtgttccctgcttctcccatgtgaattccagaagaactatgagaaatttcaggttggttgtcactaaaaaaaaaaaaaaaaaaaaaaaaaaaaaaaaaaaaaaaactgtgttgtcactatttgtgctgcgttaccggtgtgattttactgatcaggtaaacatcgccggccagggagtgaatcaagcgttttagatgagcccgtcgatcggttttgagggttcctgcaaaggggcctgggtttgggtctgtctcccctgaaattttttcgggtggtttactcgttttcagtcagttactcagtttgtccgtttttgtcgagcaaaactacatccctgctgagggaagctgcccatttttttcctccgatgaaaaagtttgcaatttcccttgct

SEQ ID NO: 1038 - DNA, 610 bp, Zea mays
  unsure (1)..(610): unsure at all n locations
  Clone ID: PAT_MRT4577_137441C.1
ccggtgccgggaattcccggggtcgacgccagcgggcgcatcttttctcgtgtanaacctctaaaatttcccccactcgccagtcgcatcagcacctgtagcagccatggacgccatcggagccgggagcaaggggaataaggggcgggcgggcgcaagggaggcgggcccatgaagaagtgggggacgcgggccgtcaaggccgggctgcagttccccgtggggcgggatcgggcgctacctcaagagagggcgggacgcgcatcgcgtgggcactggggcccccgtgtacctcgccgccgtgctggagtacctcgccgccgaggggctggaggtggcagggaacgcggggaaagacaacaagaagacgcgcatcatcccgcgccacgggctcctggggatccgcaacgacgaggagctcgggaagcggctgggcggggtgaccatcgggcacggcggggtgctccccaacatccactccgtgctcctgcgcaagaaggcggcgggagaagcgggcagcggggggagcgaggagcccaaggcccccaagaaggggccaaggcccccaagaagggtanaaagtggggtcttcatttgcgctgtgtgctgt

SEQ ID NO: 1039 - DNA, 305 bp, Zea mays
  Clone ID: PAT_MRT4577_137459C.1
aacctcaactcacacgtctgatacggtctgggacagctccctcacgcctttgcccgcctgagcgctgttgtacgtggcacgtacatgctgtcacaagccatagtgcaaagtcgagtttggtggtattggtaaatcgtatggggtcacttctgagcgggagaccgccagatgcatgaagatcatctgcgatccttcgtatttgccatgcaaggtgaagaaagttggaagggtggcccacgccatatgcatcactaagcatccgatcccggacaccattgactcgcactccgtgcagatcatcctcc

SEQ ID NO: 1040 - DNA, 319 bp, Zea mays
  Clone ID: PAT_MRT4577_137464C.1
ccagcagcaccaccactgcgcggcattgcagcgagcgagcgggagggatctggggcatggtggcggtcgctgccgctgccgctcggatctagaggggcggacggtatccgccggcctcgtcggtgtcggtgtcggtgtcggtggagtgtgaatcggtgtctgtaggaggagcgcgaagatggcggccaacaaggggatggtggcaggctctcacaaccgcaacgagttcgtcatgatccgccacgacggcgacgcgcctgtcccggctaagcccacgaagagtgcgaatgggcaggtctgccagatttgtggcgacact

SEQ ID NO: 1041 - DNA, 4124 bp, Zea mays
  Clone ID: PAT_MRT4577_137469C.1
aagaggaatcgaagcagcagcagcaccaccactgcgcggcattgcagcgagcaagcgggagggatctggggcatggtggcggtcgctgccgctgccgctcggatctagagggccgcacgggctgattgccctccgccggcctcgtcggtgtcggtggagtgtgaatcggtgtgtgtaggaggagcgcggagatggcggccaacaaggggatggtggcaggctctcacaaccgcaacgagttcgtcatgatccgccacgacggcgacgcgcctgtcccggctaagcccacgaagagtgcgaatgggcaggtctgccagatttgtggcgacactgttggcgtttcagccactggtgatgtctttgttgcctgcaatgagtgtgccttccctgtctgccgcccttgctatgagtacgagcgcaaggaagggaaccaatgctgccctcagtgcaagactagatacaagagacagaaaggtagccctcgagttcatggtgatgatgaggaggaagatgttgatgacctggacaatgaattcaactataagcaaggcaatgggaagggcccagagtggcagcttcaaggagatgacgctgatctgtcttcatctgctcgccatgacccacaccatcggattccacgccttacaagtggacaacagatatctggagagatccctgatgcatcccctgaccgtcattctatccgcagtccaacatcgagctatgttgatccaagcgttccagttcctgtgaggattgtggacccctcgaaggacttgaattcctatgggcttaatagtgttgactggaaggaaagagttgagagctggagggttaaacaggacaaaaatatgttgcaagtgactaataaatatccagaggctagaggagacatggaggggactggctcaaatggagaagatatgcaaatggttgatgatgcacgcctacctttgagccgcattgtgccaatttcctcaaaccagctcaacctttaccggatagtaatcattctccgtcttatcatcctgtgcttcttcttccaatatcgtatcagtcatccagtgcgtaatgcttatggattgtggctagtatctgttatctgtgaggtctggtttgccttgtcctggcttctagatcagttcccaaaatggtatccaatcaaccgtgagacatatctcgacaggcttgcattgaggtatgatagagagggagagccatcacagctggctcccattgatgtctttgtcagtacagtggatccattgaaggaacctccactgatcacagccaacactgttttgtccattcttgctgtggattaccctgttgacaaagtgtcatgctatgtttctgatgatggctcagctatgctgacttttgagtctctctctgaaactgccgaatttgctagaaagtgggttcccttttgtaagaagcacaatattgaaccaagagctccagaattttactttgctcaaaaaatagattacctgaaggacaaaattcaaccttcatttgttaaggaaagacgagcaatgaagagagagtatgaagaattcaaaataagaatcaatgcccttgttgccaaagcacagaaagtgcctgaagaggggtggaccatggctgatggaactgcttggcctgggaataaccctagggaccatcctggcatgattcaggtgttcttggggcacagtggtgggcttgacactgatggaaatgaattaccacgtcttgtctatgtctctcgtgaaaagagaccaggctttcagcatcacaagaaggctggtgcaatgaatgcactgattcgtgtatctgctgtgctgacaaatggtgcctatcttctcaatgtggattgtgaccattacttcaatagcagcaaagctcttagagaagcaatgtgcttcatgatggatccagctctaggaaggaaaacttgttatgtacaatttccacaaagatttgatggcattgacttgcacgatcgatatgctaataggaacatagtcttctttgatatcaacatgaaaggtctagatggcattcagggtccagtctatgtgggaacaggatgctgtttcaataggcaggctttgtatggatatgatcctgttttgactgaagctgatctggaacctaacattgttgttaagagctgctgtggtagaaggaagagaaagaacaagagttatatggatagtcaaagccgtattatgaagagaacagaatcttcagctcccatctttaacatggaagacatcgaggagggtattgaaggttatgaggatgaaaggtcagtgcttatgtcccagaggaaattggagaaacgctttggtcagtctccaatcttcattgcatccacctttatgactcaaggtggcataccaccttcaacaaacccagcttctctactgaaggaagctatccatgttatcagctgtgggtacgaggacaaaactgaatggggaaaagagattggctggatctatggttcagttacagaggatattctgactgggtttaaaatgcatgcaagaggctggcaatcaatctactgcatgccaccacgaccttgtttcaagggttctgcaccaatcaatctttctgatcgtcttaatcaggtgctccgttgggctcttgggtcagtggaaattctgcttagcagacattgtcctatatggtatggctacaatgggcgattgaagcttttggagaggctggcttacattaacaccattgtttatccaatcacatctgttccgcttatcgcctattgtgtgcttcctgctatctgtcttcttaccaataaatttatcattcctgagattagtaattatgctggaatgttcttcattcttctttttgcctccattttcgcaactggtatattggagctcagatggagtggtgttggcattgaagattggtggagaaatgagcagttttgggttattggtggcacctctgcccatctcttcgcggtgttccagggtctgctgaaagtgttggctgggattgataccaacttcacagttacctcaaaggcatctgatgaggatggcgactttgctgagctatatgtgttcaagtggaccagtttgctcatccctccgaccactgttcttgtcattaacctggtcggaatggtggcaggaatttcgtatgccattaacagcggctaccaatcctggggtccgctctttggaaagctgttcttctcgatctgggtgatcctccatctctaccccttcctcaagggtctcatgggcaggcagaaccgcacgccaacaatcgtcatcgtttggtccatcctccttgcgtctatcttctccttgctgtgggtgaagatcgatcctttcatctccccgacacagaaagctgccgccttggggcaatgtggtgtgaactgctgatccagattgtgactcttatctgaagaggctcagccaaagatctgcccccctcgtgtaaatacctgagggggctagatgggaattttttgttgtagatgaggatggatctgcatccaagttatgcctctgtttattagcttcttcggtgccggtgctgctgcagacaaaatcatggagcctttctaccttgcttgtagtgctggccagcagcgtaaattgtgaattctgcattttttttatacgtggtgtttattgttttagagtaaattatcatttgtttgaggtaactattcacacgaactatatggcaatgctgttatttatacgcaaagactgatacattcttcggattgtgagcaaacagtcagaacactgtaatctcttaggacaactatataaggcagctgttgtatcatctctattgtttctaatggccgagggatatgtagatgtaaatcacttgcaacatcgtattgttggcagtctgtaatgtttgaaaagcatggagggactgatgcggcgtggtctttcatgaattggggaatcagatggcagtccggtagaacttctgctaccgtattttctgatggcattacctttccagctccaccaactgttcgtgtcgtttttgttggatatttaacctagtttaggtatgtctgatttaagaaatctaaattatgtctatacatttgaggatttctagat

SEQ ID NO: 1042 - DNA, 3958 bp, Zea mays
  Clone ID: PAT_MRT4577_137470C.1
gccggccgggccggggtgaagcggaagcagcagcagaagcactgcgcggcattgcagcgatcgagcgggaggaatttggggcatggtggtcgccaacgccgctcggatctagaggcccgcacgggccgattggtctccgcccgcctcgtcggtgttggtgtcgttggcgtgtggagccgtctcggtgggagcagcggggagggagcggagatggcggccaacaaggggatggtggcgggctcgcacaaccgcaacgagttcgtcatgatccgccacgacggcgatgcgccgggctcggctaagcccacaaagagtgcgaatgggcaggtctgccagatttgtggtgactctgtgggtgtttcagccactggtgatgtctttgttgcctgcaatgagtgtgccttccctgtctgccgcccatgctatgagtatgagcgcaaggaggggaaccaatgctgcccccagtgcaagactagatacaagagacagaaaggtagccctcgagttcatggtgatgaggatgaggaagatgttgatgacctagacaatgaattcaactacaagcaaggcaatgggaaaggcccagagtggcaactgcaaggagatgatgctgatctgtcttcatctgctcgccatgagccacatcatcggattccacgcctgacaagcggtcaacagatatctggagagattcctgatgcttcccctgaccgtcattctatccgcagtccaacatcgagctatgttgatccaagcgtcccagttcctgtgaggattgtggacccctcgaaggacttgaattcctatgggcttaatagtgttgactggaaggaaagagttgagagctggagggttaaacaggacaaaaatatgatgcaagtgactaataaatatccagaggctagaggaggagacatggaggggactggctcaaatggagaagatatgcaaatggttgatgatgcacggctacctttgagccgtatcgtgccaatttcctcaaaccagctcaacctttaccgggtagtgatcattctccgtcttatcatcctgtgcttcttcttccagtatcgtgtcagtcatccagtgcgtaatgcttatggattatggctagtatctgttatctgcgaggtctggtttgccttgtcttggcttctagatcagttcccaaaatggtatccaatcaaccgtgagacatatcttgacaggcttgcattgaggtatgatagagagggagagccatcacagctggctcccattgatgtcttcgtcagtacagtggatccattgaaggaacctccactgatcacagccaacactgttttgtccattctttctgtggattaccctgttgacaaagtgtcatgctatgtttctgatgatggttcagctatgctgacttttgagtctctctcagaaaccgcagaatttgctagaaagtgggttcccttttgtaagaagcacaatattgaaccaagagctccagaattttactttgctcaaaaaatagattacctgaaggacaaaattcaaccttcatttgttaaggaaagacgcgcaatgaagagggagtatgaagaattcaaagtaagaatcaatgcccttgttgccaaagcacagaaagtgcctgaagaggggtggaccatggctgatggaactgcatggcctgggaataatcctagggaccatcctggcatgattcaggttttcttggggcacagtggtgggctcgacactgatggaaatgagttaccacgtcttgtctatgtctctcgtgaaaagagaccaggctttcagcatcacaagaaggctggtgcaatgaatgcgctgattcgtgtatctgctgtgctgacaaatggtgcctatcttctcaatgtggattgcgaccattacttcaatagcagcaaagctcttagagaagcaatgtgcttcatgatggatccggctctaggaaggaaaacttgttatgtacaatttccacagagatttgatggcattgacttgcacgatcgatatgctaatcggaacatagttttctttgatatcaacatgaaaggtctggatggcattcagggtccagtttacgtgggaacaggatgctgtttcaatagacaggctttgtatggatacgatcctgttttgactgaagctgatctggagccaaacattgttattaagagctgctgtggtagaaggaagaaaaagaacaagagttatatggatagtcaaagccgtattatgaagagaacagaatcttcagctcccatcttcaatatggaagacatcgaagagggtattgaaggttatgaggatgaaaggtcagtgcttatgtcccagaggaaattggagaaacgctttggtcagtctcctattttcattgcatccacctttatgacacaaggtggcataccaccttcaacaaacccagcttctctactaaaggaagctatccatgtcatcagttgtggatatgaggacaaaactgaatggggaaaagagattggctggatctatggttcagtaacggaggatattctgactgggtttaaaatgcatgcaaggggctggcaatcaatctactgcatgccaccacgaccttgtttcaagggttctgcaccaatcaatctttccgatcgtcttaatcaggtgctccgttgggctcttgggtcagtggaaattctgcttagtagacattgtcctatctggtatggttacaatggacgattgaagcttttggagaggctggcttacatcaacactattgtatatccaatcacatccattccgcttattgcctattgtgtgcttcccgctatctgcctccttaccaataaatttatcattcctgagattagcaattatgctgggatgttcttcattcttcttttcgcctccatttttgccactggtatattggagcttagatggagtggtgttggcattgaagattggtggagaaatgagcagttttgggttattggtggcacctctgcccatctcttcgcagtgttccagggtctgctgaaagtgttggctgggattgataccaacttcacagttacctcaaaggcatctgatgaggatggcgactttgctgagctatatgtgttcaagtggaccagtttgctcattcctccgaccactgttcttgtcattaacctggtcggaatggtggcaggaatttcttatgccattaacagtggctaccaatcctggggtccgctctttggaaagctgttcttctcgatctgggtgatcctccatctctaccccttcctcaagggtctcatgggaaggcagaaccgcacaccaacaatcgtcattgtctggtccatccttcttgcatctatcttctccttgctgtgggtgaagatcgatcctttcatctccccgacacagaaagctgctgccttggggcaatgtggcgtcaactgctgatcgagacagtgactcttatttgaagaggctcaatcaagatctgccccctcgtgtaaatacctgtcacctgaggaggctagatgggaattccttttgttgtaggtgaggatggatttgcatctaagttatgcctctgttcattagcttcttccgtgccggtgctgcagcggactaagaatcacggagcctttctaccttgcatgtagcgctagccagcagcgtaagatgtgaattttgaagttttgttatgcgtgcagtttattgttttagagtaaattatcatttgtttgtgggaactgttcacacgagcttatattggcaatgctgttatttatacacaaagactacattctttggaatgtgtgcagacagtcagaacactgtaatctattagcacaactatataaggcagctgttgtatcatctctattgtttctgatgggccctggggatatgtaattgcgaatgactagcaacattatattgttggctgattatcagctgttacatgtaaatataa

SEQ ID NO: 1043 - DNA, 884 bp, Zea mays
  Clone ID: PAT_MRT4577_137504C.1
cacccatcccgcaacggacctccccccactcctccctattcctatccccccagcctccccccacgaacccacagcgcgcacccgagatccgcagccgaagcccgtgagaacagcgaagcgcgagaggaaaggcactgaactagtttgcaacaaagaagagggaaaatgtctaccgctgaggcaacccgtgaggagaatgtgtacatggccaagctcgccgagcaggctgagcgttacgaggaaatggttgagttcatggagaaggtggcaaagaccgctgatgttggtgagctcactgttgaggagcgcaacctgctctctgtggcttacaagaatgtgattggtgcccggagggcttcctggaggatcatctcctccattgagcagaaggaggagagccgtgggaacgaggcctatgttgcttcaatcaaggagtaccgtaccaggattgaaaccgagctcagcaagatctgtgatggcatcctcaagcttctggactcccaccttgtcccctctgccactgcagcagagtccaaggtgttctatctgaaaatgaagggtgactaccacaggtaccttgcggagttcaaggcgggtgctgagaggaaagaagcagctgagaacactcttgtagcatacaagtcagcccaggacatcgcgcttgctgacttgcctaccacccacccgataaggcttggacttgcactcaacttctcagtgttctactatgagatcctgaactctccagaccgtgcttgcaaccttgccaagcaggcatttgatgaagctattgctgagctggactccctcggcgaggaatcctacaagacagcaccttgatcatgcaacttcttcgtgacaacttgactctctggactctgata

SEQ ID NO: 1044 - DNA, 1808 bp, Zea mays
  unsure (1)..(1808): unsure at all n locations
  Clone ID: PAT_MRT4577_137832C.1
actgcactgcctaccgaacacaactcgctagctctgcatcatccgtcgttctggtgagcgagcgagcgagtgagagacctagctagactgaccggtcgccggcagcgcaggccgagaacgaagcgcgtgtttgtgcatgagccatggcggagccagcagcagccacagcagcagccgcaggagatggacgttgatcgtaccggtggcctcgaactgcctccagggttccgcttccacccgagcgactttgagattgtcaacgactacctcacgaagaaggtgcacgacagggactacagctgcatcgccatcgcggacgccgacctaaacaagaccgagccatgggacctcccgaaagttgcaaagatgggcgagaaggagtggtacttcttctaccagaaggaccgcaagtacccgacggggctgagggcgaaccgggccactgaggcgggttattggaaggcgaccggcaaggacaaggaggtctacgatccccttgcagcggaagggctgctgctggtcggcatgaagaagacgctcgtgttctacaagggcagggctcccaggggtgacaaaaccaactgggtgatgcacgagtacaggctcgaaggcagtggtaggctccctgctagtcctgcatccgcatccggctcagccaccaacatcgctgcggccatgatgaaagcttcagcttcggcttgcaaggatgagtgggtggtctgtcgtgtgttcaacaagaccaccgggatcaagaagacggctgcgccggcataccaggtggccatggccggtgctgagatggatcagaatcagaacaacattccggccatccccatccccatgccgctgcagctgccactgcccgtgcccatgcagatgcaatttcccatcctgccagattttgccatggacccggtggccccctactaccccaacccaaatgccggcgcggggatgatgccgcctatggcattggcaggtatgggtggcgccggcgggctccagatcaacggcgctctgttcggcaatccggtgcccgcgccgctgccgatgaacttctaccaccaccagatgggcatgggggcagcagctggccaggtggacatgggggcagcggctggccagatggacatgggagcagctggcgctggcgctggcggcttcgacgttgcagcgccggagagtaggccgtcctcgatggtgtcacagaaggacgagcaggctaatgccgccgagatctcgtcgatgatgtctgtgaccggcccagggtccgcgaccaccaccatagagatggatggcatatggaagtacaagtactgaaaaagtggatatggagtttggagacaaatgcatgaatatgcatgttatatctactatatctgcattgcattttgtgaaaatttgcatggttcctatatttctgcaataactagtcggtaagatatgtgtgcatgcatgtgctagtatatacatgcattgtatcattgcatgtgtggtatatgtgtgtgtcgtttggtcttagtaatccggggcatgatggtacccatacctggatttacatctgcttggtcgtgctgatgttgtgttgtaatttgtaaaaagcagattgaagttcggtacagtatattatcgtgaacctatatatattatacttgtgtgaaaaaaaaaaaaaaaaaaaaaaaaaaaaaaaaaaaaaaaaaaaaaaaaaaaaaaaaaaaaaaaaaaaaaaaaaaaaaanaannnnnggaaaaaaaaaaaaaaaannggggccgatttttttttttttttttcctccaaaggttttttta

SEQ ID NO: 1045 - DNA, 3393 bp, Zea mays
  Clone ID: PAT_MRT4577_137888C.1
gtattgtcccaaacaacctcattccgttgtagccagcaaacagctagccaaaacagcagccgaacgtcggcctagttttggaatcaagtactgctgtattatatttatgttttaccagggtagatccacactgtaccttttctgttatcacccgctatgtaatatcaaaattttttattacaatgtaactagaaatttataactttgcaacaacaatgagaaacaaagaaaaactgtagtaacggcctggtgccgttgcaggcatgcagctgctggagcagtgcatttacgtgtggtcacccggcttttgcctcggaaagttggcaggcaacgaaccaagggcgtgagtcaaagcccccaaccgttcgggtgtatccgcccgcccgcccgcctagcctaggcaagcgacagacaggcagacaccactcccgcgtcccgtcctggactggactgccggaatggaatcgagtgaccagtgactgacggagggagagcaaacggcggcgaggtgaaactgaaacgaaacggaacggaacgcgttgccgctgataaaaaaggcgtcggggcaaagcgaggagcaaaagaggggggagaaaaaaaaagagggaaggagagacgtcgttttctcctgcgcgcctcgccgctgccacctcctctgttccccgcggatccttcttgacactccgtcgttgggggagccaagcgccaaaaaaaaaaaaaaaaaaaacccatctctgctgccgtgagctctttcctgcctcacactcttcttttcctactagtatttgtatttcctgccgggcggccgggcgggcgattccagcggctcaatcccagtcaatcatagagcagagcagcccgtgaccccgtgggcgtgtgctgcgactgcgaggagggaggagggaggaggaggaggaaaaagagtgccgccgtttcctgggggcagccagattccattccttgcgcaggagtactacggctactccttgtactatttcctagtagcaggctgccgtggaatcagctgcctcctgcctagagcaatgcgagattatcaacaccagcacagcctccctccctccctcggctgccttttcccactccttccagcgatcgatattcctccttccttccttccttcctcgtgaaggcgtcgagtgagtcctgcgttcttgctctcctctgctaagcacttgtcacaggaagaccccctcgtattcgcgtgctcttgccttcacacccgggacgggagttccttgctaggggagagagcttcccttgctcgtgtcctcactcactcactcattcaccgacggtcccagtggactgaggtgagacttcggtcggagccggccggacggaacatacaggatggccgccgcgccgccgcccaaggccgacgagctccagccgttcccgcccaaggagcagctgcccggcgtcgccttctgcatcaccagccccccgccatggccggaggccatcttgctagggttccagcatttcgtcgtcatgctgggcaccaccgtcatcatacccagcgcgctcgttcctcagatgggaggcggaaatgaagagaaggctcgggtggttcagaccatactgttcgttgctggcataaacaccctgttccagacgttattcgggacgcgccttccggtcgtgatgggcggctcgtacgtcttcgtcgggccgaccatctcgatcgtcttggctggacggtacagcaatgaagcagaccctcacgagaaattcctgcggacgatgagggggacgcaaggcgctctcctcgttgcgtcgacgattcagatcatacttgggttcagtggcctctggcgcaacgttgtcaaattactgagtccgctggcagctgttcctctggtatcactggtcgggttcgggctctacgagcttggctttccaggggtagcgaaatgcgtcgaagttggcctcccagaactgctcctgctggttgtgttttctcagtatctgcctcaggttctggacttcggcaagtccgtcttcagccggttcagcgttctcttcaccgtcgccatcgtgtggctgtacgcctacatcctcaccatcggcggcgcttacaagaactctccgcccaagacgcaggtgcattgccgcgttgatcggtcgggccttatttcaggagcaccttggataagtgttccctatccctttcagtggggtgctccgacgtttgacgccggagaagctttcgctatgatgatgacttcgttcattgctcttgtagagtcaactggcgccttcatcggtgcttcgagatatgcgagtgcaactatgattcctccatcgattatcagtcggggcgtgggatggcagggcattggtctgttgctcgattcatttttcgggacagcgaacgggacatcggtttcagtagagaatattggactgcttgcgttgacacgcattggcagccggagagtggtgcagatatctgcaggcttcatgattttcttctctgtccttggaaaatttggagctttgtttgcgtcgattccgctgcccgtatttgccggcatgtactgtctcttcttcggatatgttggtggcgttggcctgagcctccttcagttctgcaacctaaacagctttaggaccaagttcatcatggggttcgctttcttcatgggcctatcggttcctcagtacttcaacgagtacacagccgttgcaagctatggtccggtgcacactggcgccagatggttcaatgacatgatcaacgtgccattcacgtcgaagccgttcgtcgctgggttggtagcctatatcctggacaacaccctccaggtaaaggagagcgcggtgaggaaggacaggggcaaccactggtgggagaagttcaggagcttcaagaaagacgcgaggagccaagagttctactcgctgccgttcaatctgaacaagttcttcccgtcggtctgatctcaaatggcgccgccgctgaatcaattctggaagcaacccttgttcatatgggccttaatgaggaacataattctgctggtctggccagtggaagcttctgtgtctccattgttggtcaattttgtgtgttttcggacgagatgggagtaattgaactgtagaaattattaggattgaagtatatcgcgttctttttgtaatctacatgaatcagcaacgcagattaaatatttgtaggcgtagatactttgatcagtcaaatgttataggagcaaaccaatcttgggcctgagggactagatgctaaaatagcccattagctgagcaatgtaagccaacaaggaccattaggtgagaaataaaatcaaactttttacgacccgcaaaaaaaaaaaaaaaaaaaaactcgcaaagggggccggtacc

SEQ ID NO: 1046 - DNA, 2298 bp, Zea mays
  Clone ID: PAT_MRT4577_138175C.1
gccggcctgggttgcgattcacccaagtccaagcaccttcccaaaaaaatcccccattttcttcgaggcgaggagagcgtgaaagacagggcaccggcagcgacgatgtcggggcgcggcaagggcggcaaaggtctgggcaagggcggagcaaagcgccaccgtaaggtgctccgtgacaacatccagggcatcaccaagcccgcgatccgtaggctggctcggaggggcggcgtgaagcgcatttcggggcttatctacgaggagacccgcggcgtcctcaagatcttcctcgagaacgtcatccgcgacgccgtcacctacaccgagcacgcacgccgcaagactgttaccgccatggacgtcgtctacgcgctcaagcgccagggccgaaccctctacggcttcggaggctaggctggatgcctcttctccttgctgtcgtggatgcctgtttgttgttagggttacttcgtttagttccttgtctgtgacgtgttggactattgttagtagtattcttgaagttgtgtttcgaatgtaatccaatcttatcgttcgagaattgaaatgattcctgggcaacattttgcaggcaaaaaaaaaaaaaaaaaacgtctgagagcaaaccagacgaaacaaaccctcctgggctgcttccccttttcgatccccatggcgcaggacgacatcccggagtcctccgcctccggatcccccacctcctccgccccggcggctcgcctcaacgccgccgcgcccgagtttaccccccgatccgccgcccagcaccacggcaacaacgcccatcgccgcggcccgcaccaccaccatcagccgcaccaccacccccactaccaccctcaccagcactaccagccgcggcaccagcaccatcaggcccaggccgaggatgaggggagcgccgccgcgacggcggaggatagggagggccccgctggtgcggtgcaggcgcagcaccggctgcccgaacccgaggcccgcaagctcgtcaagcaggttgaattttacttcagcgatatcaatttggccacaactgaacatctgatgaagttcatcgctaaggatccagatggatttgtgccaatttctgtagttgcatcttttaggaagatccgagagatagtttatgatagatccttgttggttgctgcattacgcacgtcatctgagctggttgtttcagaggatgggaaacatgttaaacgcttacagccctttaatgccgaagaagttcagtctcgtattgttgttgctgaaaatttacctgaggatcaaaagcatcagactctgatgaagattttctcagctgttgggaatgtgaaatctatacgtacctgttatccacaagatatttctccagcagcagccaacagaacatcaaggattgagatgatttttgctaataagcttcattcttttgtggagtattcagctgttgaagatgctgaaaaagcagttgctgaattcggtggtgggggaaactggagagaggggattagagttcgttcactgcttggatgtctgaaacatgggttaggtcaaggaagaaaaggtggggatgaggagtatgctgcagatgaagatggccctgacacaactgatcatccacgagactttggaacagatgttactgcccaaatctcagaagcacatttcgatcaccaggccgaagatggcacccatgacaagggtggaatgaggcagcaggggagagggagaggccgtggaggtagaggcagaggccgtggtcagcattatggccacaacagccgagatggccaccatccaattggcactcccccgtcagagcatccagctgtgccgaagccgcccccgggcccccgcatgccggatggcacaaaagggttcaccatgggccgagggaagccgctcagcattaccattgatgctgcggctaaccctaccaccacggatgctgcttagccgcagcgtctatgctggtaccggcctattgccctgatcatcagtcttttgcaaaccgattgcagtggtcatttactcatgttctaaaccgtttactgtggcgtgttggttcattttgtctgggatttaaaaggaaaggagatggctggtactatgatacatgagtgtatactaacacccgaagtttagacatgtggacatgtactgtgatatgtagctcttaaattagaaaaatgcacacttttgatgaaaaaaaggggtggttttatgttccaaaaaaaaaaaaaaaaaaaaaaaaaaaaaaaaaaaaaaaaaaaaaaaaaacaaaaa

SEQ ID NO: 1047 - DNA, 1488 bp, Zea mays
  unsure (1)..(1488): unsure at all n locations
  Clone ID: PAT_MRT4577_138176C.1
cattgggtacctcgaggccggccgggggatgcgatcataccagcactaaagcaccggatcccatcagaactccgaagttaagcgtgcttgggcgagagtagtactaggatgggtgacctcctgggaagtcctcgtgttgcattccccaagtccaagcaccttcccaaaaaaatcccccattttcttcgaggcgaggagagcgtgaaagacagggcaccggcagcgacgatgtcggggcgcggcaagggcggcaaaggtctgggcaagggcggagcaaagcgccaccgtaaggtgctccgtgacaacatccagggcatcaccaagcccgcgatccgtaggctggctcggaggggcggcgtgaagcgcatttcggggcttatctacgaggagacccgcggcgtcctcaagatcttcctcgagaacgtcatccgcgacgccgtcacctacaccgagcacgcacgccgcaagaccgtcaccgccatggacgtcgtctacgcgctcaagcgccagggccgaaccctctacggcttcggaggctaggctggatgcctcttctccttgctatcgtggatgcctgtttgttgttagggttacttcgtttagtttcttgtctgtgacgtgttggactattgttagtagtattcttgaagttgtgtttcgaatgtaatccaatcttatcgttcgagaattgaaatgattcctgggcaacatttttttcctataacaggttgacttatataatctanattataatctagattatataatctggattatttgctctggattatataagctaggtgctgctatttgttagctcagattatttggactttacttattattatatgcatacaaatacaacatctttagttaanaaaaaaaaaaaaaagcggccgcttttttttttttttttttcggtccagagcaagccagcaatgacaacatttcttcagacaaacacaccatgtgcagcataccgcactgcagttctacagtatctagcaaatttcccccacacaaacaacttgcgaactgcagcaacaccagaaccgcagcgacggcgaggcgcggggcggcaggcctagccgccgaagccgtagagggtacggccctggcgcttaagcgcgtagacgacgtccatggcggtgacggtcttacggcgagcgtgctcagtgtaggtgacggcgtcgcggatgacgttctccaggaagatcttgagcacgccgcgggtctcctcgtagatgagccccgagatgcgcttcacgccgccccgccgcgccagcctccggatcgccggcttcgtgatcccctggatgttgtcgcgcagcaccttccggtgacgcttcgcgccgcccttgcccaggcccttgccgcccttgccgcgccccgacatcttcgccgcggagacgagaggattggggaatttttgcttgctggttggtgtggtgagcctgtgaatggatcccggccggcctcgaggtaccc

SEQ ID NO: 1048 - DNA, 882 bp, Zea mays
  Clone ID: PAT_MRT4577_138178C.1
cggcccgggttcccgaaaaaagaaaaaaaaaaaaaaaaaaaaaaaaaaaaaaaaaaaaaaaaaaaaaaaaaaaaaaaacccaaagtccaagcaccttcccaaaaaaatcccccattttcttcgaggcgaggagagcgtgaaagacagggcaccggcagcgacgatgtcggggcgcggcaagggcggcaaaggtctgggcaagggcggagcaaagcgccaccgtaaggtgctccgtgacaacatccagggcatcaccaagcccgcgatccgtaggctggctcggaggggcggcgtgaagcgcatttcggggcttatctacgaggagacccgcggcgtcctcaagatcttcctcgagaacgtcatccgcgacgccgtcacctacaccgagcacgcacgccgcaagactgttaccgccatggacgtcgtctacgcgctcaagcgccagggccgaaccctctacggcttcggaggctaggctggatgcctcttctccttgctgtcgtggatgcctgtttgttgttagggttacttcgtttagttccttgtctgtgacgtgttggactattgttagtagtattcttgaagttgtgtttcgaatgtaatccaatcttatcgttcgagaattgaaatgattcctgggcaacattttgcaggcaatctcgttcgagagttaggtccattatatctgttaagattttttttccatacagcattgactaagtatgaagcccattccatcctgaagatcgtgtatttcagagttgcaattcagttgtcaaagttctagcgtgtatgctaaaattttaagagggatacatagtctcctttctgaatgcatttgtctcatgatttgaagcgaaaaaaaaaaaaaaaaaagcggcc

SEQ ID NO: 1049 - DNA, 315 bp, Zea mays
  unsure (1)..(315): unsure at all n locations
  Clone ID: PAT_MRT4577_138415C.1
ctcgcctgctttccctcgccgctccagttccacaccctctgctcatccacccgtccctcctgctcgcacatggcttccatcgctgtctgcgactgccctctccgatggttctagctcgggtggttcgacgagaacgaccagctgcagcaggtctctgtccacgcgctcgtctgcggcaagaaggtcatcctcttctgcgtcctcggcgccttcacnccgacctgcagcaatcagcatgtgccaggcttcatcacacaggctgagcagctcatagccaagggtgtagacgagatcctgcttatcagcgttaacgac

SEQ ID NO: 1050 - DNA, 291 bp, Zea mays
  Clone ID: PAT_MRT4577_138453C.1
ggcagccccaaaaaaccccattttttccttaggattaacttaaaacaaatcccggcaggggtaacaacatccattgatccaaaatccatgctggttgaagcatgggtttgctggaccccaggataaacacagccctaacaactgacacaaagcgaccttggaattaaaaacacaaatgggcaacaacaaacgaaacgaacgaaaataaaccctttggactagggtaaacatcacgggggcgaacaggataacttggccgggcgggccccaccggtgaattcctccagttcc

SEQ ID NO: 1051 - DNA, 342 bp, Zea mays
  Clone ID: PAT_MRT4577_13848C.1
gctctggcttgtgtttcgggggccccctgcctggtgccgggtttcttttagcaccttacgactactaccactggttatcttgctcattacgtccttaaccccggcttgactttgctctcctccctttggctggcccccatttcttgtcccccttgcacgtgggcagcccgggcaacacccaataaaggggccagggtttgggccactccttgtctcctccactcgggactttttccaagcagctggcgaagcagagcgcgtttcagctgcagcagtcggctgaagaccttttcgggcccccagcttccagcgtcaccgacgaggccggcacgtgggggcttt

SEQ ID NO: 1052 - DNA, 673 bp, Zea mays
  Clone ID: PAT_MRT4577_138492C.1
tgtgcaggcgctcgatggcggccgtcttccccgactctacattatcttctctctctgctcctccgcctgcgtctgatacatccaagagagggatctaccatgctaggactacgtaggagcaccacttcgaatcgaaggccgacgctggggcgtgcaagacctacccgcagcaggctggaaccgtccgaaacaacggcttcatcgacatcaagaaccgtccctgcaaggctgtggaggtttctacctccaacactgacacaaatggccacatcaaatgccactttgtcgccatacacatattcaatgtgaaaaagcttgaagatattgttccttcgtcacacaactgtgacattccgcatgtgaaccgcactgagtatcaactgattgatatatctgaggatgcatttgcgagccttcttacttcaaatggcaacactagagatgatcttagactcccaactgatgagactcttgtggaccatattaaggaagggttcgaaagcgggaaggatcttgtatgcgactgtccagactgcgatgagtgacgaatagatctgcgcgttagacgatgatggccccaagtgacttccttggctgtggagacagaaccctactgtatctcaacttatatcgcataagaaggtatcacccaaggattgctaccgagacattc

SEQ ID NO: 1053 - DNA, 235 bp, Zea mays
  Clone ID: PAT_MRT4577_13850C.1
agacgtgagccatccactacgatcccctcccgcgaattgaacagctttcataagagaaccccatgcttcgcttgcgccggtgcacgcttggtatatcgcaccctgaatcgacagacatgcaagcccgaaccatttttgaacctgctataacaatgaccaaccaaggtgttcaagtgtatccatagataatggctactcttgttggaacaccacaggaactggggcatcaagtgac

SEQ ID NO: 1054 - DNA, 108 bp, Zea mays
  Clone ID: PAT_MRT4577_138513C.1
gaccccccctgtatcggggcattaagcgctgcgggtggggtggtaacacccagagtgaccgcttcacttgtcagcgccctaacgccccgtcctttcactttcttccct

SEQ ID NO: 1055 - DNA, 376 bp, Zea mays
  Clone ID: PAT_MRT4577_138599C.1
ttaggacactcgggggcgcccctatctctctggcctgctgattcctgataatcgaccagtagcccagtctgtgctccttgcactcctccctccatctacagcattgtcgtctgatacacctgctcgaatggctcgctctttctgctgctgatgcttcctttttctcagctggtgggctcgagggctatgagaagcgcctggagatcacattctctgaggcacctcgctctggggaccctcatgggcgtggggagcgcgccctctacagggcccagattgactctgatctggatcttgcacggtgcacaattgcgtccgagctctcgcacaaggatttcgactgatatggtcctttctgagtcaagctatgtatatc

SEQ ID NO: 1056 - DNA, 123 bp, Zea mays
  Clone ID: PAT_MRT4577_138634C.1
actctgtgggctgaagacagtgctgtcccctgaactcatccagatgctgcaggagtgtggctgccgcataagatgggtcaacaagcctccagtctacaaggactagaccacctgttcctcatc

SEQ ID NO: 1057 - DNA, 2010 bp, Zea mays
  Clone ID: PAT_MRT4577_138695C.1
tccaaaagtgaactgtgaaccggacgatccaggcatccagctaaccgcttccccctcgtcgcgctcgcgccgcgccgcgcctcgcctccaccagctacgccgtcacgcgagctcacggcccgggggcctcggaagcacaaccaccacgcgtccacgccgaagccacgaggagagcctgtctctcctccggggattctatcgccggctggtctcagcggcgccacttggagcaggcggcacccgctccgtactgttgctgatttggtgagcgcgggcagccgcgggatgggagatctggtggcgtgatggtgagcgccgggcagtaaccggggcggccagtcgcgcgtatcgacgcggggcggcgtcgccgggccggggagcccgcgcgcctctcctgccgcgaccgctttcgcggcgctacggcgcaggtggcggtgggcgcccccgggctcgccgacgctggagcgcgcggcccgcgcgttcctcctggcctccgcggcgctcgtgctcgcctgcgcgctctacctctacgtgctccgctacgtcggccggggaggtcgcgccttcgccgccgcgggcttcgtcgggggctccgtcctgggcctcggcggcgagccgtgcgacgtgttcgacggcgcctgggtacccgacgacaccggccgccacccgctatacaacagctccgagtgcccgttcgcggagcgcgggttcgactgcctcgccaacgggcggaacgacactgggtacctcaagtggcggtggaagccgcggcggtgcggagtgccgcggtttgcggcccgcaccgcgctggagcggctgcgcgggaagcgggtggtgttcgtgggggattccatgagccgctcgcagtgggagtccttcatatgcatgctcatggccggcgtggatgaccccaggacggtcttcgaggtgaacgggaacgagatcaccaagacgatacgccacctggcggtcaggttcgcgtctcacggcctcaccgtggaattcttccggtccgtgttcctcgtgcaggagcatcctgccccgcggcatgcccccaagagggtcaaatccactttgaggcttgacaggatggataatttcagccggaaatgggtcaattcggacgtactgattttcaacactgggcattggtggacaccgaccaaattgtttgatacgggttgctattttcaggctggacgttctcttaaattaggtacatccattgatgctggtttcaggatggcactggagacctgggcctcatgggtacaaaaaagagttgatttaaaccgaacacatgtattctttcgcacatatgagccatcgcattggggggatacaagccaaaaggtgtgtgaggtaacagagcagccttcatcagaggccaaaggaaatgataagagtgaatttggggctatactttctgatgttgtaaccaacatgaaagttcctatcacagtactaaatgtaactttaatgggagcgtttagaagtgacgcacatgttggcacttggagttatcctcccactatacttgattgcagtcactggtgtcttcctggagtccctgatgcttggaatgaacttgtgttttcgtatcttttgacaaatggttggcgaaacatgccgggctgaaatttatggcagcattgctcaatctacccccactttttgtattttgatatttgacattaccaggtatactagagaattaacatacttccgggacaagagacagctgcatctgctgtaggtggttcactagacttctgcattcttttcttctttttgatttttgactcgtatacacggtgaagcatgctacatgcaactagagttgtatgtagttggtaagggattagaaggccttggcattcgttctatttgctcaatttactaacggttcattttattatgttgttaaaaatcgagtttgtattgtaacctgtatgtacaaacatttacttgatacattgtgagaaagtgccctctctcaattggattgat

SEQ ID NO: 1058 - DNA, 340 bp, Zea mays
  Clone ID: PAT_MRT4577_138729C.1
cacttcatacaagagcaaatacgctgtcacaaaaaagaaaaacgcgaacacatgaactagcaaaactacgcacacgcgcagagccatctgcctcattcgagtcatcccaatggccacctaactgtgcagagctccacctacttggtcagacgaccatgtccggcgccagaagcgaagctctacttcggctctgagccgaccgatgctccggcgatcccgacgaacacccgcgccctcgagctgctccggcgccatcttcctgaaacgtacggtgaggacgccgctgccaaagatagcggaaaccgagtcccccacgagtccgcccacgcattcccccacg

SEQ ID NO: 1059 - DNA, 2202 bp, Zea mays
  Clone ID: PAT_MRT4577_138761C.1
cccagcgtccggcagataattgttatgggtgctccatctaccacgcgtccgtgatagagactgatcctgctgaatattgtatcgttgcgccagatactgaaatattttgtgatgagaagaagaagaagaagaggatgaggagcgtcttgatgaagttggttatgatgatgttggtggagttagaaagcaaatggcccaaatcagagagcttgttgagcttccactacgccatcctcaacttttcaaatctattggtgtgaagccaccaaagggcatattgctgtacgggccacctggttcgggaaagactcttattgctcgtgctgttgcaaatgagactggagcctttttcttcctgatcaatggtccagagattatgtcaaagctggcaggggagagtgaaagcaatctcagaaaggcatttgaagaagcagagaagaatgctccatctatcattttcattgatgaaattgattccattgcacccaagagagagaagaccaatggagaagtagagcgtcgtattgtttcacagctactgactcttatggatggactgaaatctcgttcccatgttattgttatgggtgctacaaaccggccaaacagcattgatcctgctcttcgaagatttggaaggtttgatcgggaaattgacattggagttcctgatgaagttggccggcttgaggttctccgtattcacactaagaacatgaagctagctgaagatgttaatttggaactcatttcaaaggatacccatggatacgttggtgctgatcttgctgctctttgtactgaggctgctcttcagtgcattcgtgagaagatggacatcatagatcttgaggatgagacaatcgatgcagagatattgaactcgatggctgttacaaatgaccatttcaagactgcgcttggaacaagcaacccatctgctcttcgtgaaactgttgtcgaagtcccaaatgtctcttgggaggatattggtgggctggagaatgtcaagagggagctccaggagactgttcaatatcctgtggagcatccggagaagttcgagaagtttggcatgtctccatccaaaggagttttgttctatggtcctcctggttgtggtaaaaccttgttggcaaaggcaattgccaacgagtgccaggctaacttcatcagtgtcaagggtcctgagttgcttaccatgtggtttggtgagagtgaagccaacgtccgcgaaatttttgataaggctcgtcaatctgctccttgtgtcctcttctttgatgagcttgactcaattgcgactcagagaggaagtagtgtgggtgatgctggaggtgcggctgatagagtgcttaatcagctactgacagaaatggatggcatgaacgccaagaaaactgtgtttattattggtgctacaaacaggcctgacatcattgatcctgctcttctgaggccagggcgtcttgaccagctgatctacattccactgcctgatgagcagtctaggctccagatcttcaaggcctgcctaaggaagtcccctgtggcaaaggatgtggacctgaatgctcttgctaagtacacacaagggttcagtggagcagatatcacagaaatttgccagcgtgcgtgcaaatatgcaatcagagagaacattgagaaggacattgagagggaaaggcggatgaaggacaaccctgaggcgatggaggaagatgaagtggacgagattgccgagatcaaagcagctcacttcgaggagtctatgaagtatgctcggcgcagtgtcagtgatgctgatatccgcaagtaccaggcgttcgcccagacgttgcagcagtcccgtgggttcggcagcgagttccgcttctcagagcagtcggcgacagctggtgctgctgcagccgatccgtttgcttcggctggtgctgcggctgacgatgacgatctatacagctaggtgtcctgttgggttggttctgggttgtgcaatatcagtctcatcagtcatctgtttaaaactctgattatacttagacacgggatgtcatgcaatgatatttgttttccgtacatttggacgttgagataatgcctgtttattttatgccaaaaaaaaaaaattattttattttaaaaaaattaaaaaaaaactcgtgctccccatgcccttttatgaatgattgtttgtcattg

SEQ ID NO: 1060 - DNA, 548 bp, Zea mays
  Clone ID: PAT_MRT4577_138762C.1
cgaggtaatcgccgtcaactcggtcttcgagatgcaccggctgctcgcgcagcccggcgccctggagaaggtcctgggcaccgtgcgcgccgtgcggccgaggatcgtcaccgtggtggagcaggaggccaaccacaactccggcacattcctggaccgcttcaccgagtctctgcactactactccaccatgttcgattccctcgagggcggcagctccggcggcccatccgaagtctcatcgggggctgccgctgctcctgccgccgccggcacggaccaggtcatgtccgaggtgtacctcggccggcagatctgcaacgtggtggcctgcgagggggcggagcgcacagagcgccacgagacgctggggcagtggcggaaccggctgggcaacgccgggttcgagaccgtgcacctgggctccaatgcctacaagcaggcgagcacgctgctggccctattcgccggcggcgacgggtacaaggtggaggagaaggagggctgcctgactctcgggtggcacacgcgcccgctgatcgccacct

SEQ ID NO: 1061 - DNA, 1464 bp, Zea mays
  Clone ID: PAT_MRT4577_138763C.1
cggacgcgtgggtgttggtgctgatcttgctgccctttgcatgaggctgctcttcagtgcattcgtgagaagatggacatcatagatcttgaggatgagacaatcgatgcagagatattgaactcaatggctgttacaaatgaccatttcaagactgcgcttggaacaagcaacccatctgctcttcgtgaaactgttgtcgaagtcccaaatgtctcttgggaggatattggtgggctggagaatgtcaagagggagctccaggagactgttcaatatcctgtggagcatccggagaagttcgagaagtttggcatgtctccatccaaaggagttttgttctatggtcctcctggttgtggtaagaccttgttggcaaaggcaattgccaacgagtgccaggctaacttcatcagtgtcaagggtcctgagttgcttaccatgtggtttggtgagagtgaagccaacgtccgtgaaatttttgacaaggctcgtcaatctgctccttgtgtcctcttctttgatgagcttgactcaattgctactcagagaggaagcagtgtgggtgatgctggaggtgcggctgatagagtgcttaatcagctactgacagaaatggatggcatgaatgccaagaaaactgtgtttattattggagctacaaacaggcctgacatcattgaccctgctctgctgaggccagggcgtcttgaccagctgatctacattccactgcctgatgagcagtctaggctccagatcttcaaggcctgccttaggaagtcccctgtggcgaaggatgtggacttgaatgctcttgctaagtacactcaagggttcagtggagcagatatcacagaaatttgccagcgtgcgtgcaaatatgcaatcagagagaacattgagaaggatattgagagggaaaggcggagaaaggacaaccctgaggcgatggaggaagacgaagtggatgagatcgctgagatcagggcccctcacttcgaggagtcgatgaagtatgctcggcgtagtgtcagtgatgctgatatccgcaagtatcaggcgtttgcccagacattgcagcagtcccgggggttcggcagtgagttccgcttctcggatcagccggcgacagctggtgctgctgctgcagctgatccgtttgcttctgcgggtgctgcggctgatgatgacgatctatacagctagttgggttgttcaatatcagtcccgtcactcatctgtttaaaactgatcatactaaacacgcttgtcatgcaatgatatttatttgccgtacatttggacgtcgctgagataaagcacaataggccttcggttaactttaataactagattttcccatgtgcattgtctggcccagtgacattttattaattattgtgaaatctatcatctctcaaaaaaaaaaattataaataatattattatatataatttatt

SEQ ID NO: 1062 - DNA, 1625 bp, Zea mays
  Clone ID: PAT_MRT4577_138802C.1
gcacggcgactggactatactgctcccaagaggctggccggactatattgctcccatgaacctcgccgtcgcagccgcactgccgtccgtgacgccacgtaccggcgtcgtgctcccacggagcagtcgccgacactgcccccgcggggtcgtcccactcgcggcctcgagctccgtttcctcctttacctccccctcagcagcggcggcgcccatctacgcgcccacgccgcaggaccggtctctccggacgccgcatagcgggtaccactttgatggcacggctcgacctttctttgaaggatggtacttcaaggtgtcgattccagagtgcaggcagagtttctgctttatgtactctgttgagaaccctctcttccgtgatggtatgagtgatttggacaagttgttatatggcccacgctttactggtgtgggagcacaaatccttggtgcggacgataagtacatatgccagttctctgagaaatcaaacaatttttggggaagtaggcatgaactaatgctgggaaacactttcatttccaataaagagtcaaccccaccgcaaggggaggtgccccctcaggatttctctaggcgtattttggaagggttccaagtcaccccaatatggcatcaaggtttcatacgtgatgatggaaggtcaaactacgtgccaaatgtccaaacagctcgctgggagtacagcactcgtccagtttatgggtggggtgatgtcaaatctaagcagttgtccacagctggttggcttgcagcttttcctttctttgaacctcattggcaaatttgcatggctagtggcttgtccacaggatggatagaatgggatggagaacggtttgaatttgaaaatgctccatcttactcagaaaagaactggggcggaggttttccaagaaagtggtattggatccagtgcaatgtcttcccaggagcttctggtgaagtttctttaactgctgctggtggattgaggaaaattggacttggtgatacctatgaaagtccttcactgattggaatacattatgagggacagttttttgaatttgtaccttggactggaacagtaagctgggacattggactgtggggtctttggaaaatgtctggcgagaacaaaactcatctggtagaaatagaagcaaccactgcagaatcaggaactgctctgcgcgctcctactatcgaggctggactggtaccagcgtgcaaagacacctgctatggagatctaaggctacagttgtgggaaaagaaatacgatggtagcaagggagagatgatactcgacgccacaagcaacatggcagcactagaagttggcggaggcccctggttcaatgggtggaaagggacaactgttgtgaacgaggttgtaaataacattgtgggcacgccagtcgatgtagagagcctcctcccaatcccatttcttaagcccccaggcctataggatcaccaacgaatgtcacaatgaagaagtatcacggatatcaatgttgatcatacagtaaaactgtgcccagttcaataataattcatgatttttacttgttttttactacaaaaaaaaaaacaaaaaaaaaaaaaaaaaaaaa

SEQ ID NO: 1063 - DNA, 2267 bp, Zea mays
  unsure (1)..(2267): unsure at all n locations
  Clone ID: PAT_MRT4577_138883C.1
gggacctcgagccggccgggccgggnaactataaagancngtnctcgtctcgggggtgcaggaagctcgtcgagctcggtcgggggagaggccaagaacccagccgcgaagccaagccaagcccatctgatccggcccctgctgccctgccccaggccccagctcgtctctcaggtcgccttgccgttgccggtggcccgccgcgctgcgacagacgcaatctcgtccagctcacccgatccagttcgtgtcgcccctagcgtgtcgcagccagtacctgcggtcagctcggctcagttggcactagctggtcgccgagatttatcttcgtttggttgcactctcttctgtcttcttgccgcgtcggcggggtggttttgtgcgcggcgggggggagggtttaggtggggacggggggatcgctcagcctctcggcggtgtcctccgtctccatcgtcatctgcaacaaggctctcatgagctcccttggcttcaacttcgccactactttgacaagctggcatctcctggttaccttctgttctctccatgtggcattatgtatgaagctgtttgagcacaaacctttcgatgcaaggaccgtcatgggattcggagtgctcaatggcatatctattggacttcttaacttgagtctgggtttcaattctgttggtttctatcagatgacaaagctggccataattccctgtactgttatactggagacccttttcttccggaagaaatttagccggaatatcaagctttcccttagtgtgctccttcttggtgttggtgttgcaactgtaactgatctgcaactcaacgttatgggatctgtactgtccctactggcaatcatcacaacctgcatcgctcagatcatgacaaatacaatacagaagaagttcaaggtatcttcaacacagctcctgtaccagtcgtgcccataccaggcattgacgttgttccttgtcggtccattcctcgatggatttttgactaaccaaaatgtctttgctttcgactacacaactcaagttctgtttttcatcgtgctgtcgtgcctgatttcagtctcggtgaacttcagcacttttctcgtgatcgggaagacgtctcctgtaacctaccaagtccttggccatctgaaaacatgcttggtcctcacctttggctatgtcctgcttcacgacccgtttagctggagaaacatacttgggatcctaatcgcggtaatcgggatggttctgtactcgtacttctgcactagagagactcagcaaaaaccagcagaagcctccccgcaagccgttcaggcaaaggagggtgaatcgaacccgctgatctcggactccctgagcgctgccgaaaacggaggcagtgccaccgacgacgaacctctgaaggtaccaatgtggagctcgaagtactcgaaggcgtgaagtggctgttctggtattagtgcacacggtgctatacagaattcagcttggtaggcagatactagggttggaaggcaaccctgttcctgttccatttttggccttctattttttcttcttcctggcacaaatactataaatatgtgctgtcagtaaatggatctcactcttgagaggaatacctcagctcgagaccgagtgttctgttctgcctgaaagctagtatttgtttgtgctccactccacgtgtaaagtggtagatggacatgatctcaacagtagtagtttgcattcttttgtactagtgatatacaatatttatgtattcctcgtgttccctaaacgggtagagatggacatgatatcaacagtagtggtttgcattcttttgcactagtatgtatcccattcttctggtatgtattccccgcgatcccccaccagtatggggtcctctggttcatatgtaggccattggtacgcgttgggcgcatacaaagcgatgttaaaaaacatgccatttggtttcacgtttgaaaaaaaaaaaaaaaaaaaaaaagaagaaaaaaaaaaaaaaaaaaaaaaaaaaaaaaaaaaaaaaaaaggtctgaatggtgcttttagcaaggttgccaattttgtgtagtattttgtcaaaactgaaggcctttggattagtttgtgctggtcagctagaaacctggaaacaacaaacttgttgagtagcgatgtttacaagaaatgtagcctttatgggctcttgtaaccctttctctcttatcatattttgttaaagaagcaaaatatccaccaaaactc

SEQ ID NO: 1064 - DNA, 1806 bp, Zea mays
  Clone ID: PAT_MRT4577_138888C.1
gggtgcctcgaggccggccgggttgtaaaaatataaaagacccgtctccgtctcgggggagcaggagaggggggagaggccaagaacccagccgcgaagccaagccaagcccatctgatccggcccctgctgccctgccccagctcgtctctcaggtcgccttgccgttgccggttccgcgcccggctcagagtcgcgagctcgtctcgcagatccggcttcgcttgcttgaattctgttctttgggagcaaagaggtgctggccggtggcgtggcttggtgctctggggccggcgagttttttttttggctccgctcgctctgcctgtagtcttcttgctgcggcggcggggtggagatgggggtggcgggggagaagttccagctggggacggtgggggcgctcagcctctcggtggtgtcctccgtctccatcgtcatctgcaacaaggctctcatgagctcccttggcttcaacttcgccactactttgacaagctggcatctcctggttacattctgttctctccatgtggcattatgtatgaagctgtttgagcacaaacctttcgatgcaaggactgtcatgggattcggagtgctcaatggcatatctattggacttcttaacttgagtctgggtttcaattctgttggtttctatcagatgacaaagctggccataattccctgtactgttatactggagacccttttcttccggaagaaatttagccggaatatcaagctttcccttagtgtgctccttcttggtgttggtgttgcaactgtaactgatctgcaactcaacgttatgggatctgtactgtccctactggcaatcatcacaacctgcatcgctcagatcatgacaaatacaatacagaagaagttcaaggtatcttcgacacagctcctgtaccaatcatgcccataccaagcattgactttgttcctcgtcggcccattccttgatgggtttttgactaaccaaaacgtctttgctttcgactacacaactcaagtcctgttcttcatcgtgctgtcgtgcctgatctcggtctcggtaaacttcagcactttccttgtgatcgggaagacgtcgcctgtaacctaccaagttctcggccacctgaaaacgtgcttggtcctcgccttcggctacgtcctgctccacgacccgtttagctggagaaacatacttggaatcctgatcgcggtgatcgggatggttctgtactcgtacttctgcactagagagactcagcagaagccggcagaggcctccccgcaagccatccaggcaaaggagggtgaatcgagccctctgatcttggattccctgagcgccgctgaaaacgggggcagtgccaccgacgacgagcctctgaaggtgccaatgtggagctcgaagtactccaaggcgtgaaaggctgttctgttactggtgtactacggcgctatacagaattcagcttggtaggcagataccatactactactagggttggaaggcaatcctgttcctgttcatgttccatttttggccttctatttttttcttttcttgttttcttcctttctggcatatactacaaatatatgtgctgctggtgctgttagtaaatggatctcactcttgggaggatgatacctcagctcgagacgagtgatctgtctgaaagctatttccttgtgttccattccacagtataaactggtagatggacatgatatcaacagtagtggtttgcattcttttgtactagtaaaaaaaaaaaaaaaaatgtatccgagtcttctgct

SEQ ID NO: 1065 - DNA, 1154 bp, Zea mays
  Clone ID: PAT_MRT4577_13898C.1
actccatagggcgattgggttcctcaaggccggccggacacgccgtccctcctgctcctgctctccacacgccgccggagaaacgcggcggaacgcccagcacgggctgcacggcaggtcggcactcggtagcacatccctcccggtggtccggccctccgccgtcccagcacgacagcacttccggcgaccaggtcctaggctcccagcgtccggcggtcccagcagtccagcacgacagtgacagcacttcgggaccacggctccgcgcgttctgctgtgcagggagggaaaatcctttttggaggatctgccattgaatcagaaggaaactttgtgcaaccaacaattgtggaaattacacgttctgcaccagttgtgaaagaagaactctttggtcctgtcctttatgttatgaaatttcagaccttgaaggaagcaattgaaatcaataactctgttcctcaaggattgagcagttttatatttacaaagtggccagatattatttttaagtggctcgggccccatggtagtgattgtggtatagtgaatgtgaacatacctactaatggtgctgaaattggtggagcatttggtggagaaaaagcagctggtggtggacgagaagcagggagtgattcctggaagcagtacatgaggagggcgacttgtacaatcaactatgggagcgagctacctctagcccagggaatcaattttggttaatcctgcagaaatgttgcgcgtggatctcagtgttttctgcagacgtggatgccgtatggaaagaactgatgcaaccgcatttgagatctcagcagacttgagcagcatttattggcgtcagttgtgaaacttaaactgcaggagcatcttgtacataaataaaataagatgtttgttgctcgtgggccgtggcacgttttggtaccggtgtccagtctactaataaaatctaatgcaaaacggtcataactacattctcatgcagtatgattttccggccttttgatctggaattgaaatgagcgttgttcgttttgaacaaaaaaaaaaaaaaataataaaaaagttgtaatatcttatcttgcttgtgaaatcgaataggcctatatatgttatgctgttaaaaaaaaaaaaaaaaagcggcc

SEQ ID NO: 1066 - DNA, 1236 bp, Zea mays
  unsure (1)..(1236): unsure at all n locations
  Clone ID: PAT_MRT4577_13900C.1
gcgctgggnagcctctaccctctcncgctgtccctcctgctcctgctctcccacgccgccggagaacacggcggaacgcccagcacgggctgcacggcaggtcggcactcggcagcacatccctcccggtggtccggccctccgccgtcctagcacgacagcacttccggcgaccaggtcccaggctcccagcgtccggcggtcccagcagtccagcacgacagtcgacagcacttcgggaccacggctccgcgcgttctgctgtgcaggttctagcgttctgctgtccacggctccgcgcgtccaggaggtgaccaccagaccaagcctccgctgtccagaccagggggcaggggctggatttacatggctcaagacttaggttctagcttgttgaggtatacaaacaagtccaaattggggatccgttggagaaaggcaccttactgggaccactgcacactcctgcttcaaaagagaactttttgaaaggcattcagactatcaaatctcagggagggaaaatcctttttggaggatctgccattgaatcagaaggaaactttgtgcaaccaacaattgtggaaattacacgttctgcaccagttgtgaaagaagaacactttggtcctctcctttggccgggccgggttcagaccttgaaggaagaattgaaatcaataactctgttcctcaaggattgagcagttctatatttacaaagaggccagatattatttttaagtggctcgggccccatggtagtgattgtggcatagtgaatgtgaacatacctactaatggtgctgaaattggtggagcatttggtggagaaaaagcaactggtggtggacgagaagcagggagtgattcctggaagcagtacatgaggagggcgacttgtacaatcaactatgggagcgagctacctctagcccagggaatcaattttggttaatcctgcagaaatgttgcgcgtggatctcggtgttttctgcagacgtggatgccgtacggaaagaactgatgcaaccgcatttgagatctcagcagacttgagcagcatttattggcgtcagttgtgaaacttaaactgcaggggcatcttgtacataaataaaataagatgtttgttgctcgtgggccgtggcacattttggtaccggtgtccagtctactaataaaatctaatgcaaaacggtcgcaaaaaaaaaaaaaaaaaaggcccctagggcc

SEQ ID NO: 1067 - DNA, 222 bp, Zea mays
  unsure (1)..(222): unsure at all n locations
  Clone ID: PAT_MRT4577_13901C.1
gcgggcccnacccttaccccaagcgcgcctcctccgacgctgaccccggccgctcctccccgctcggcgggtcctccgacgctgcaccggcacccaaggctcgtgtggtgggctggccgggggggagggcggaccggaagaacacgctcggcgacgccgcggggtccaggaagggcggcaagtccggcaagggggccgcccacggcgcgccctacccccgga

SEQ ID NO: 1068 - DNA, 966 bp, Zea mays
  unsure (1)..(966): unsure at all n locations
  Clone ID: PAT_MRT4577_139031C.1
cattggctcgctcgaggccgggacgtcacccccttccgtcctcccccgagacaatccccacgcaaccgcgcaccggagcggcggagcctgacgagtctacacaagcggtggggggagcaaaatctgcgccagttcgcctcgcctacttatacactccgatcgcccccgtaagcaaagatggcaccaccatccatgtgtcttgcggcaaagggggtgcttcccttctcggcacttatttcaagtggtgttacacaaaggccagtgtcagtgaccgcttccttggagcacaaaaccagcgatgctagaaggaagttcctaaaacttgcgcttgggaatatcggagttggactgcccaccttgttgggtgttaagaaagctctcgctgatgagcaaggaatctcgtcctcgaggatgtcttattcaaggttccttgagtatcttgacaagggtagagtgaagaaggttgatttatttgagaatgggacaattgctatcgtggaggccatttctcctgagcttggcaaccgcgtgcagagagtccgtgtgcagcttcctggtctaagccaggagcttcttcagaagttgagggaaaagaacatcgattttgctgctcacagcaaccaggaggactctggttctcttctgttcaaccttattggaaatttggcattcccacttattcttatcggtggtctatttttactgtcaagaagggcacaaggtggccttggtggacccaatggccctggttttccccttggttttggtcaatctagggccaagtttcagatggaacccaacactggtgttacatttgatgatgttgctggtgtggatgaagcgaagcaagacttcatggaagtggttgagttcttgaagaaacctgaaagttcactgctgttggtgctcgcattccctaagtgttctgctttgtcgtcctcctgggactgntaaactttgcttgca

SEQ ID NO: 1069 - DNA, 882 bp, Zea mays
  unsure (1)..(882): unsure at all n locations
  Clone ID: PAT_MRT4577_139032C.1
tcgaggccggccggcagttcgcctcgcctacttatacattggatcgctcgcggtaggtaggggacttcgctccctttccctcctcccagctccggccccggctccggttctcacgcagtaagcaaagatggcaccaccatccatgtgtcttgcggcaaagggggtgcttcccttctcggcacttatttcaagtggtgttacacaaaggccagtgtcagtgaccgcttccttggagcacaaaaccagcgatgctagaaggaagttcctaaaacttgcgcttgggaatatcggagttggactgcccaccttgttgggtgttaagaaagctctcgctgatgagcaaggaatctcgtcctcgaggatgtcttattcaaggttccttgagtatcttgacaagggtagagtgaagaaggttgatttatttgagaatgggacaattgctatcgtggaggccatttctcctgagcttggcaaccgcgtgcagagagtccgtgtgcagcttcctggtctaagccaggagcttcttcagaagttgagggaaaagaacatcgattttgctgctcacagcaaccaggaggactctggttctcttctgttcaaccttattggaaatttggcattcccacttattcttatcggtggtctatttttactgtcaagaagggcacaaggtggccttggtggacccaatggccctggttttccccttggttttggtcaatctagggccaagtttcagatggaacccaacactggtgttacatttgatgatgttgctggtgtggatgaagcgaagcaagacttcatgggagtggttgagttcttgaagaaacctgaaaggtcactgctgntggtgctcgctttcctaaaggttttctgctt

SEQ ID NO: 1070 - DNA, 2744 bp, Zea mays
  unsure (1)..(2744): unsure at all n locations
  Clone ID: PAT_MRT4577_139033C.1
cattgggtacctcgaggccggccgggaaatcccaccacaccccaaaaccccgagatgtgggctcatctcttcctttcgggccggcacagacccccccgcgccgcacccgtccctccgcaccggagacatccccacccgaccgcgcacccgagcgctggtgcctgccgggccgggatcgacgctgtggtcaccgaaccgcccacgtcacccccttccgtcctcccccgggacaatccccacgcaaccgcgcaccggagcggcggagcctgacgagtctacactagcggtggggcgagcaaaatctgcgccagttcgcctcgcctacttctacgctccgctcgttccccccggtagttcctcggcttcgctcccttcccctccctgctccggctccggttcgcacacagtaagaaaagatggcgctgccatccatgtgtcttgcggcaaagggggtgcttcccttctcggcacgtatctcgagtggtgttacacaaaggccggtgtcagtgaccgcttccttggagcacaaaaccagcgatgctagaaggaagttcctaaaacttgcgcttgggaaccttggagttggactgcccaccttgttgggtgctaagaaagctctcgctgatgagcaaggcgtctcgtcctcgaggatgtcttattcgaggttccttgagtatcttgacaagggtagagtgaagaaggttgatttatttgagaatgggacaattgctattgtggaggccatttctcctgagcttggcaaccgcgtgcaaagagtccgtgtgcagcttcctggtctaagccaggagcttcttcagaagttgagggaaaagaacatcgattttgctgctcacagcaaccaggaggactctggttctcttctgttcaaccttattggaaatttggcattcccacttattcttatcggtggtctatttttactgtcaagaagggcacagggtggccttggtggacccaatggtcctggctttccccttggttttggtcaatctagggccaagtttcagatggaacccaacactggtgttacatttgatgatgttgctggtgtggatgaagcgaagcagagacttcatggaggtggttgagttcttgaagaaacctgaaaggttcactgctgttggtgctcgcattcctaaaggtgttctgcttgtcggtcctcctgggactggtaaaactttgcttgccaaggcaattgcaggagaggctggcgtaccatttttctcaatttcaggttctgagtttgtggagatgtttgttggtgttggtgcttccagagtacgtgaccttttcaagaaggccaaggagaatgctccttgcatagtgtttgtcgatgaaattgatgctgttggaaggcaaagaggtacaggtattggtggtggaaatgatgaaagggagcagactctaaatcaactactaactgagatggatggttttgagggcaacactggaattattgttattgctgccactaaccgagctgacatcttggattccgctttacttagacctgggcgctttgacagacaggtgtctgttgatgttcctgatgtacgtggaaggacagagattctaaaagtgcatggtagcaacaagaaatttgattctgatgtttctcttgatgtcatagcaatgagaacacctgggttcagcggagcagacttggcaaaccttctgaatgaagcagccattctggctggaagacggggaaggacagcaatttcttcaaaagagattgatgattctattgacagaattgtagctggtatggaagggaccgtgatgacagacgggaagagcaaaagtcttgttgcttaccatgaagttgggcatgcaatttgcggaactttgacgcctggccatgatcctgtccaaaaggttaccttagttccaaggggtcaagctcgtggtcttacatggtttatcccgatggatgacccaacactcatctccaggcagcaactttttgccagaattgttggcggccttggtggtagagctgctgaggaggtcatatttggagagcctgaggtgaccactggagctgctggtgacttgcagcaaattactggcttagccaagcagatggttgtgacattcggtatgtctgaaattggtccatggtctctgatggagggtggagcgcagagtggggacgtcatcatgagaatgatggcaaggaactccatgtcagagaagctcgcggaggacattgattcggccgtgaagcagttgtcggatgaggcctacgagatcgctttgaggcacattagaaacaacagggaggccattgacaaaatcgttgaggtgctcattgagaaggagacagtgaccggagacgagttccgggcgatcctttctgagtttgccgagatccctgttgagaaccgggttcccccagccacaccggcggccgcgctcccagcctaaacccaagccttgtaggggaggattttcttgttgtatggtgttcatattttggattcttggtgtacactaactctactaaatctgccggattttcggtacacgacatgtaagatgtaacttactcatggtgaattatagtaaaatgtaattagctttaaaaaaaaaaaaaaaaaacaacattttcagtttgtagcttcgcttctggcgagcgaaactcttgctatatgttccacggttcctactttcataaactatatgttctaattagaacttgnncattttgtttttgcaaa

SEQ ID NO: 1071 - DNA, 321 bp, Zea mays
  Clone ID: PAT_MRT4577_139155C.1
gtagggtgtctttttttggttgtttttttttttttttccaaccccaaaaaaacaaattttattcataaacaaaatgggttcacagatttttttccataccttcatgctcattgggggagaccccactgaccccctaaagctggttacttacttattcaaactgatcccgcttgtggcacccttggaagttcacattcttacaaaccacaaatttttataacaatagcccggcttggctgtttcacaaaataaccaaaccacacccccgaaattgcggcgttttaaaataaacaactcaaaagcaaattgcccccaaaagcc

SEQ ID NO: 1072 - DNA, 624 bp, Zea mays
  Clone ID: PAT_MRT4577_139235C.1
cccccgccagctgcctactgtatttttgccctgacccactattcccgttgctactgcactggggtcatgttggactcccgcgtgctcatatacccgtgggttaaataaggaacatgagggccctgcagaggccactggtgaggactgctctgatgacccacctgatgagagaaggcctttccgagctctctgggatgatggccttattaggactacaactgggaaccgagcctttggtgccctcacgggagctatggatggtggactggatattgctcacagcgagaagaggatcgctgggctcaataaggatgacaagcagctggatgctgatatccatcgcaagtacatctatggtggccatgttgctgactacatgacgaacctcgctgatcatgagccagataagaaccagtctcacttcagtgagtacattaataagggaattgaggctgatgacatggaagctatgaacaagaaggtccatgctggcatccgtgctgatccttctgtggtcaaggcaaccaaacacccaccaaaggagcacaagaggtaccaccccaagaaactgagctaccagcagaggaaggcccaccctaattgaaaggcttaagccaacttaac

SEQ ID NO: 1073 - DNA, 743 bp, Zea mays
  Clone ID: PAT_MRT4577_139270C.1
caactttggtcaagatgcagagaaaatggactaaaaaatattcaccaattttcctggcctgaacattgcaagaatcacctgtcaaggatattgactcttggcatgagatctcctgctgtcggtagtgaagaggaaaggagtaaggcacctatatcaggaaggaagcatatcattgttatttctgtagactctgttaacaaggagaatctagtgcggatcatcagaaatgcgattgaggccgcacatacagaaaacacaccggcttcaactggtttcgtgctgtcaacttcgctaacaatatcagagatatgttcactgctagtatctgtaggcatgcatcctgctggttttgatgctttcatctgcaacagtgggagtagcatttactatccttcatattctggtaatacgccaagcaattccagggttacacatgtaatagatcgaaatcatcaatcacatattgagtatcgttggggaggagaaggtctaagaaagtatcttgtgaaatgggctacttcagtggttgaaagaaagggaagaattgaaaggcaaatgatttttgaagattcagaacactcttctacatattgtcttgcatttaaagtggtcaatccaaatcatctgcctcccctaaaggagttgaggaagttgatgagaatccagtctctccgttgtaatgcgctgtataatcacagcgctaccagactgtctgtaactcctattcatgcgtcacgttctca

SEQ ID NO: 1074 - DNA, 384 bp, Zea mays
  Clone ID: PAT_MRT4577_139347C.1
ctgcactcatctcttctcgtttagaacctctataatgtcccccactcgccagtctcaggatcggctgtagccatggacgccagcggagccggtagcatggggaagaagggtgcggccgggcgcatggcaggcattcccaggaagatgtcggtgacgctgtccgtcaaggccgagctgatgttccacgtcggccggatcgagcgctacctgaagaaggtccggttcgctcaacgcgtgatcactgtcacccgcgtttaccttgaccgcgtcctggagtacctagccgtcgaggttatagagttggcctgtatcgcggcgaatgacttcaagatgacgcgcatcatactgagcgacgtgctactggcgatccgcaacgacgaggag

SEQ ID NO: 1075 - DNA, 299 bp, Zea mays
  Clone ID: PAT_MRT4577_139459C.1
cggacgcgtgggctcacgggcgctgcccgggttgcagctgtggaaggaggagtctgagagtaatctggggttcccaccattgtcggtattctcttcggctgatttccagaatgcagggtctgatagactctgctcttcgctagatggaaacatcgtcaggttgacctgggacagcaggacatcggctggcgagggcaggagcaggcgaaactcatctgagtcaataaggagcagaacatcggctggcgagcgcaggagcaggagaaattcatcggaatcactaaggagcagctggaaca

SEQ ID NO: 1076 - DNA, 307 bp, Zea mays
  unsure (1)..(307): unsure at all n locations
  Clone ID: PAT_MRT4577_139545C.1
ngatgagtgntgcagcgtagtagctcgcaatcggctcgacgcgctcctggcagcaggaacaagatgtccaatagggcacacaatcgtgttatgcctgtccgcaggcaattcgactccgtgngcaggatatcgtatcgcacaactgcaatgatggtagtatccaggagattagtgagatgagtcgcatattgaacacttatgagctacttgaactagactatgacggacgtcgagctacgatgattcgagaatgatggatgccatgtcttcacttatgcggcaacggatggaagacatgngaagagat

SEQ ID NO: 1077 - DNA, 1316 bp, Zea mays
  Clone ID: PAT_MRT4577_139718C.1
ccgggtttattatggccatcctgatgtcttcgatcgtcttttcacgttacgaggggcggtgtcagtaaagcatccaaaattatcaatcttagtgaggacatctttgcaggattcaattccacattgcgtgaaggcaatgttactcaccacgagtacatgcaagttggcaagggaagggatgtgggtctcaatcaaatatctctgtttgaggcaaagatagcaaatggcaatggcgaacagacgctgagccgtgacatctaccggctgggtcatcgctttgatttcttcagaatgctatcttgctactatacaacaattggtttctacttcagtacaatgattacagtgtggactgtatatgttttcctctatgggcggttatatcttgtacttagtggacttgatgaagcgctggctactggaaggaggtttgtgcacaatgcacctctccaggttgcgcttgcatcggagtcttttgtgcagcttgggtttttgatggcgctacccatgatgatggaaatcggtttggagagaggattcagaacagcattgagtgacttcatactgatgcagcttcagttggcctcagttttcttcacgttctcattgggaacaaaaactcattactacggaaggacattactccatggaggagctgaatacagagccactggacgtgggtttgtggtgttccatgcgaaatttgctgacaactatcgactctattcccgtagccattttgtcaagggcattgagctgatgattctactagttgtgtatgaaatatttagccagccatatagaggggctgtaacttacatcttcatcaccgtgtccatgtggttcatggtgggcacttggctctttgcaccattcctgttcaatccttctggatttgagtggcagaagattgtggacgactggaccgattggcacaagtggatcagcaatcgtggaggtatcggtgtagcaccagagaaaagctgggagtcatggtgggaaaaggagcaagagccccttcgatactccgggaagcgcggtactgttgttgaaatactgcttgcgctgcgtttctttatctaccagtacggacttgtgtatcatctgaatataacgaagaagataactaaggacaaccagagtgtgctggtttattgcttctcatgggttgtaatttttgtgattttgctccttatgaagaccgtatcagtgggcaggagaaggttcagtgcagagttccagctagtgttccggttgatcacggccctgatttttataacatttacagccatcctggtaatcctaatagcgatccc

SEQ ID NO: 1078 - DNA, 1998 bp, Zea mays
  Clone ID: PAT_MRT4577_139769C.1
gtataacatcacatttttccactttgatggtccatgctcaaatttatttatagggatttaaagccacaaaacctgctggtggacaaggagaaaggtatactgaagattgctgatctgggactcggtagggctttcactgtgcccatgaaaagctacacccatgagattgtgaccctttggtcgacgcacgcgaccgcccacgcgtcctccctcattaccgacgttgcccgggaggggtggggaggggagcggcccatttggatttggaagcatcctcggcggcgagcggcggcgtcgcattcactctcatctctctctcacacagattccggctccttttccctctcccccaattcaaaatcaacccccctcgtcgcaaggccacaacaactccactcctccccatccctagctagccactagggtttgccagcctttgcagcgtcgcgctcgcgtctcatgcccttgcccatcgacggtagacgagagcgagcggtctgtgttcgtggagcaggggccggcgccatggagatcaacatcgtggacaagtacgagaagctggagaaggtcggggagggcacctacggcaaggtgtacaaggcgcaggacaaggcgacggggcagctggtggcgctgaagaagacccgcctcgagatggacgaggagggcatcccgcccacggcgctccgcgagatctccctcctcaacctcctctcccactccatctacatcgtccgcctcctcgccgtcgagcaggccgctaagaatggcaagcccgtcctctacctcgtcttcgagttcctcgacaccgatctcaagaagtacctcgacgtctaccgcagggggcccagcgccaggccgctccccgcgacactcatcaagaatttcctgtatcagttatgcaaaggagttgcacactgccatagccatggtgtccttcaccgggatttaaagccacaaaacctgctggtggacaaggagaagggtatactgaagattgctgatctgggactcggtagggctttcactgtgcccatgaaaagctacacccatgagattgtgaccctttggtacagagctcctgaagttttgcttggagcaacacattactcaactggcgttgatatgtggtctgttggatgcatctttgctgaaatggcccgacggcaggctctctttcctggtgactcggagttgcaacagttgcttcacatcttcaggttgctgggaacacctactgaggaacagtggcctggagtgagtgatttaagggactggcatgagtttccacagtggaagccccagggtttggcacgtgtcgtcccaacactggaacctgaaggagttgaccttctatcgaaaatgcttcagcttgatccttcaaacaggatatcagctttagctgcgatggagcatccctactttaacagccttgacaagtcccagttctagccgttgtactatgtggttcagaaggcgctaccctcgtacagagagatttccaatggtgttatgaatctcaattgccatctaggcaactggttcatgattttaccaatctgttagtgagtgaaaatcgtgcgagggtcatatgtgttccccttgtcttaaaaatctggtgtggtgtagaacaagagttacctgtgggaggcctgtgataatgccctttatgtctcaacatccattttcgtgcattccatgttcttcaatacggacttgaaacaggaattctgattttcttattactaccttcaaaaaaaaaaaaaaagacgacaaaacaaactaacatacatatactaaaaaataaactaatcttccttcgatctagacaaccctaccttacgaccacgtccttatgcacaacaatatatctttttcatacccactattatatttgcattcaccacttgcacaaactttgttgcttactaatacctttttttgcctacttactaaatttttactctaaattgttatctttcaaattttcaatttgtt

SEQ ID NO: 1079 - DNA, 279 bp, Zea mays
  Clone ID: PAT_MRT4577_139867C.1
ccggccggcgagtctcgtgctctcatctccacctctcctccggctaggttgcacacgcctgccgcggcgaagcttctgtcccccctccccccggcgtcgcgctctgcgcgtcgtccgccgggaagatggctggcgctttcagggtactgcatctggtcagggcctttctgcgtttcttgccataggcgcccaatgcgaataggaacatactattccaaaaaacggctatctacactgttatttctctcatcatttacctgccgtgaagacagcttccac

SEQ ID NO: 1080 - DNA, 329 bp, Zea mays
  Clone ID: PAT_MRT4577_140013C.1
cgtgggttctcctccttcttccgtgtagctctcggtttcagcgatgtcggagactgatgcaattgtcaacaaggcggctgcgcaagcggcggcgccaagcgccaccgcaaggtgctgcgcgacaacatccagggcatcacgaagccggcgatccgtaggctggccaggatgggcggcgtcaagcgcatttctgggctcatctacgaagagacccgcggcgtgctcaagatcttcctccagaacgtcatccgcgacgccgtcacctacacccaacacgcccgccccaagaaccgtacccgcatggatgtcgtctacccccttaaacccca

SEQ ID NO: 1081 - DNA, 332 bp, Zea mays
  Clone ID: PAT_MRT4577_140093C.1
gggcagcaccaaaaaccaccattttttccttagggttaacttaaaacaaatcctgacagggggaacagcatccatcgatccacattccatgctggttgaagcatggggctgcccgagccgagggtgaacacaggtctaacaactgacacagagcggccttggaatcaaaaacacatatgggccacaacaaacgggacgaacgaggataaaccctctggactggggggaacatcacgggaggaaacaggatatcttgggcgcgcgggccccaccagtaagttcttccagtctcccggcggagttgccggatcccccttcacggggggcacctt

SEQ ID NO: 1082 - DNA, 2605 bp, Zea mays
  Clone ID: PAT_MRT4577_1400C.1
cgccgtcccccgcaccaacccacccccaccacacgtccgcaggagacccccggccggaattcggcacgcttgttgcttggcgtccgtctgccgaaacaaaagtcgccgtcctcccccctcgtcgcttcatcacctcacctccgccgtcgcctcccctcatccctccaccggcccgtttgaccctctccctggctcgctcgttctcctcctcctccgtacccgtcctagtaggtttagcgctcaacagaaccccaatcaccaccccggcgccccccgagagcagttgccttgccgcttgctgcggttccatatggtgccccccgcgtcggcgtgagggctgcgcgcgctcgtgctgtttatcgggaggagatagatggggcccgccgtccgcagtagcgtcgtgatcagggccactgtggtagggctcgtgctggttggcatcgccctggccctgccgctggccgcggcgctgcggccgctccgggagcacgtcgcgtccatcggagccgcagcctccgctggttcgtggggcgatgagcatgccttctacaaaagggatgagaacgatataggcccatattcatggaatattactggaacatataaagggagctggacttttgctggtgccacaaatggttcgtctagatttcttgagtttgtggaatctaaaggtgattcagttttggaattgttgagcactccaacaaagataagcggggtgcattatgttcagggttcagttacattccatgatgtcattgacaatgcccacaatggtggagtggctcaaataaggttagaaggagtttacatatggccttttagacaacttcgcatggtagcaaacagtggtgcagatggtgaaccactccaggaagaggattatttcttgtcaaatccataccatttattgcggattttctcctctcaagtgtttcaagaatcttctgaagagaagaaccgaaggaagaattctctcacatatgacatggagaaacattgcaacacagaaatagctgctaaggtggttcgtgtgtcatctaacccaaatgatggagaacacgagaagtaccgtttggagggtttgatggagagtccagccgtcgatgatgatggggaatgcttctctcctatcttattgaatgcaacttctttgaatgttgaagtttattacaacaaagcagtcaactacacactgatggtcacttttatctctttccttcaagttttgctgctgattagacaaatggagcatagcaacacacaatctggagctgctaaggtttctattttaatgattggccaacaagctatcatggatgcatatctctgtctacttcacctgactgctgggatattggttgagtcactcttcaatgccttcgcaacggctgcattcttcaaatttgttgtattttctatttttgaaatgaggtaccttctcgccatatggaaagcaagtaggcctttaaacagtggagaaggttgggagataatgaggcgagagctgtctgttctttacagccgcttttatggcattctgttgggaggaatccttctaatgtatgagctgcacaatttcttacgcccacttctcctcctgatgtactccttttgggtacctcaaattgtcacaaatgtcatcagggatacaagaaaacctctgcacccacaatatattttaggcatgacagttacacggcttgctattccattgtatatatttggttgccctagtaatttcatgcgtatcgagcccgacaagaaatggtccatagctgttacagtattcatgggtatccaagcagcagtgcttctgcttcagcactatcttggttctcgctgctttattcctcgccagatactgcctgagaaatactgctaccataggaaggtagaggacagcacaaatcagcccatcgattgtgttatttgcatgactacaatcgaccttacccaaagaacaagtgaatacatggtggcaccttgcgagcatatatttcactcaggctgtttacagcgttggatggacattaagatggagtgccctacttgccggcgctccctaccaccagcttagatgaggctttgtatcatatataatagtgaacaagaagtaggtagctcagcttatacaaggtgggggaactgatgtacaataaggtgaggctgcaatcgtgtgaaagctatgaacagaactgtagaaaagttttatactattgatttcaagaggtcttgtgttgtgcaaactagcgtatcaagcatcccacgaagaaatcgtccttccccgctcatgcggttatcactgttgcatgcctttgcctgctaccagtatttcggcccagcgttttggtctgagctttgtgcaaagtttgttaacgccgtgaaagagttcgagatgtgcattcttgatttggtggacacattagtagcgtgtttggtttgaggaatgagatctctctcactcacttttttgtttggtttgtggaatgaaatgaattaatctatcaccatttcatttctcgtagactcataattagtaataatatgaggaatgggtttattccaaaaaaaaaaaaaaaaaaaaactcgagaaaagggc

SEQ ID NO: 1083 - DNA, 395 bp, Zea mays
  Clone ID: PAT_MRT4577_140129C.1
gtgccgcgccacattcagcttggtgtgcgcaacgactaggagctgaccaaactgacggggggtgcgactatcgaaagcgacagcgactatgcctaacatccatcagcatgtgctcgccaataaggctgccttctctaaggccagtgcagacgacgacaactactgagactgcttgctgtagaaatgatgcgaccaccgtctcgctttgttggaataggatgatgttgtcttcgatctgggaggagtcgcttatacagggcaagagaattagattacaatctgattttttgaatggaatgcgaacgtggctatgaatctcagaattgtatgctcgttcagaaagaaatggaaagacttcgtgatacacgacgctgatgccgcatcatattcatcgt

SEQ ID NO: 1084 - DNA, 1722 bp, Zea mays
  Clone ID: PAT_MRT4577_140198C.1
atttcggcacgaggatggacgccggcgacgcctccaccgcgcttgccctcacggcggcggaaccatcaccgccgagccccaacaggaggggcaagaggccgaccaacccgcccaagcgcttcgtgcacaccccgatcccgccttcaatcctctcggacccgaccctggccgccgccgccacctccctcctcccggccaactacaactttgagctccacaagacggcgcaccgcatacggtccgcggccgctcgccgcgtggcgctgcagctccccgagggcctgctcctcttcgcgctcccactgtcgcacctcctcgcgccctacctcgagcccggcgccgacaacgacgtcctcgtcctcgccgacgccacctacggggcctgctgcctcgctgaccgccccgccagggcgctcgccgccgacctcctcgtccactacggccactcctgcctcgtccccgtcacggcctcactcctcccggtgctctacgtcttcgtcgagatccgcgtggacgccgcccgcctcgccgccgccgtcagagccgccttcccggacccagcggccgcgccccgcctcgccatcgccgggaccgtgcagttcatcgccgcggtccacgccgcgcgcgagatgctcacggtagagggctaccacgacatcgtcgtgccgcaggcgaagccgctgtccgccggcgagatcctgggttgcaccgccccgacgctcaagaagtcggaggaggtgggcgccgtggtgttcgtcgccgacgggaggttccacctcgaggcgtttatgatcgccaatcccggggtgaaggcctaccgtttcgacccattcctcggggttctcgtgctggaggagtatgaccatgttggcatgaagcaggcgaggaaagcggcggtgctggcggccaggaaggccaagagctggggagtcgtacttggcaccctggggaggcaggggagcaccaaggttcttgacagggtggtggagcatttggaggagaaagagttggaacacacagtggtgctcatgtcggagctttccccggcgaggatggagctatttggagattccattgatgcctgggtgcaaattgcttgtccacgcttgtcgatcgactggggggagggtttcaagaagccagtgctgacaacgttcgagtttgatgtcgcactgggctatgtccctgggtggtgggagaaggggagcaggggttgcggtagtgaatgtggtgttgggtgttgttcaggatcaggaactcgtggaaactgcaactgcagtgatggggattatggtggtgactacccgatggattattattcgcaagatggaggtgattggaatagctgctacatgaagaagaagccatctactggcgagaggaaactgcgggttcggattgggcaacgaaattcaagccgaggagaagcgtgggaatcaggattctcgtgagctagtcaggtgaatagggataccgagaacagcttcatggctcaaaaaggatttttgacaccaggttttagtgtgattgtaacgatgtttagttaccagagggaaaatcttgtgactgtacctgtatcgatgtatccaccaccccatatactgtaaatttgttacgtacaatgtctcattgtaaacatcttgagaaggtatgaggtgttgtcatacccattggtgcaaccatccaaaaaaaaaaaaaaaaaaaagggcggcggacgcgtgg

SEQ ID NO: 1085 - DNA, 2163 bp, Zea mays
  Clone ID: PAT_MRT4577_140212C.1
cgggccgacccacgcgtgcgctacggtccctcatcacttgttccactacgaccggccacctagctcgccgcgcgcgcaagcctgcgccaccacccactctactagcttagtctcccctcgtgcagcgcgacgacagccagcaatggccgccgcccagtgaggcagggtcgcagtgacggcacgagacgcacacccacgggcgctggcggcatgccgggcgacgcctacgacctcctgtgcgccgaggacgacgccgccggcagcgccctgctgtgcaccaccgacgacgacgacgggtgctgctccgctgtcgaggaggactcggcggcggcggcggcctccatcgccgagctcatcggcggcgaggcccagtactcgcccaggccggactaccccgacaggctccgctccaggtccatcgacccggccgcccgcgccgagtcggtcgcatggattctcaaggtgcaagaatactatgggtttcttccattgacagcctacctcgccgtcaactacatggaccggttcctctctctccaccgtttgccgcaggaggacgggtgggcgatgcagctgctggccgtgacctgcctctccctcgctgccaagatggatcgattggttgttgttgattgcactgcattgcaggttgagggcaccagcagatacgactgcttcgagcctgggacggtcggccggatggagctcctcgtcctgatggcgctcaactggcggctccgctcggttactcccttcaccttcgtcgacttcttcgcgtgcaaggtcgacccaggagggaggcacaccaggtgcctcattgcccgggccacgcaagtcattctggctgcgatgcatgacgtcgagttcttggaccactgcccgtcatcaatggcggcagcggccgtgctctgcgccatcggtgagacgccgtcactggagtcggtcagccctggggctgccgtcagctggtgcatcggccttgcagaggaagggatcagcagctgctacagactgatgcagcggctggtgataggcaacgtccggacaagggtcgccagcacgacgaccattaccatggcagcagtgaacctgtgctgctcggatgaggcgctgtcctcgcattcctctgccacctcctcgccacccccggccaagaggaggaagaggtcgccaacggccacgtgaaaactgaagaacgcaagtagataggattatttatacgctttttgggggggcagattaacagggtttgatcgatttctttgcagtttgtttgtcgttttttcttctttgtgattctttctcctttttttcccccctttgccatttatttgttctgttcttttgggttggatctctactcctcggtggggggattctgcctgcctgctcgaccggcccagtcatcatggtggcctctggcctctgcaacgcgcgccagccagtatgtgaaggcgacgagactcgagagagagagaaagaaagacagctactacgtataacagacacatctgtgtttctctgtgcaacactctgtggggcttcttcaaccccgacgcagagctgcagagagggaccattgattggtgagcgagggcagccatggcggcagatggagatggagagggtgggggaaagaggcaatgagttgcggtggatggatgatgattggtagggttaaatgaggtggtcaaagggccgggcggtcagtgctcctgccaagatgcagccctgcctgcaaagtttctgttcatattcatgagggcaaaaattgtttgtttccgagtggtttgtttgtattttgttgatgccgctgaggcgagggcgtcagagagagagaaagagagagagagaaagaggggcatgctttgctttgctgtgatgggagtcacatggatatgccctactgtggtggtgctctggagggaaatatttgtccatctccagagctaacagtgtccaagcatggggcttttgggggcccttgctgattgtttgtatctcttttttcttgcttgtgtatcaatgaagattttgccatttgaattggcctgagaagagagtacaagctgaagagagagtttctgtgttttgcctgctgctggattatatgtttgtatcacttccttcttgtttaagtatcaataaagattttgccatttg

SEQ ID NO: 1086 - DNA, 222 bp, Zea mays
  Clone ID: PAT_MRT4577_14036C.1
ctaggaggcgctgcacctgagggggggcatgtcaggcctggggagggagcacgtcaaggtgtgttcttatcataacatcctggtgatcaagggcgagggctagaaggatgatagcgaggactaggccgtcctgtctcctagatacagcgttctcatctagctcgcgccagaggtttacaggatggacaagatcaaggcgtatattaagaacggtgttcttca

SEQ ID NO: 1087 - DNA, 921 bp, Zea mays
  Clone ID: PAT_MRT4577_140424C.1
tctcttagcctagtctccctctccccggctctccgccttcctcttccagtccccgcgcgcgagatcgccgccccgtgtgggtcctagatcccgatggcctcgcgccgacgcaccctgatcaaggtcatcatcctcggcgatagtgtaatacgatgggcgagcgagcatccgattgggtgcctcgaggccggccgggacttacctggacggggtcgactggctatcaagaaggcccgtggcctagatcaatggcccacattgcacttggtggatgcgttggcttaccatctccccaagtgggagagtggacgtcataatttgtggtagatggggtacgcgacgcagttcaggtctcggtttgctgcttcttgatcagttcagatctcggtttgctgcttcttgatccagatcagggtttctgatccatatagtctgtactttgttacaaaaatcatgtaattttaaaactttttcccatatctgggttcctgatttatgaagtctacagttccggcgcctggcccctgccaattctgatttgggttcttttgggccagatctgggttctgaaccatgtagactttgtttcatgagccgttcatgagccgtttatgcgctgcagtctcatccacgtcaaaaagaaatgatgaacagaccgtcggaaaaaaataaaaaaaaagaaaggagacctggaatttcatctattagatacaataagcgactcgactttgggcaccggatatttgggttctcgcatcgatgaagaacgtaacaaaatgcgatacctggggtgaattgcaaaatcccgcgaaccatcaagtttttgaacgcaggttgcgcccgaagccttctggcggagggcacgtttgcctgggcgtcacgccacttacctgaacggggagaactgcttatcaagaaggc

SEQ ID NO: 1088 - DNA, 697 bp, Zea mays
  unsure (1)..(697): unsure at all n locations
  Clone ID: PAT_MRT4577_140503C.1
ctcgaggccggccgggagcatctctagcaccatcgaccttcaagtctcgctacgtatgcagtgcaataaaaatggtagccgcaatggagagcatggtcatggacctctcctcccgtgcttcgccggcaaggccgtgaacgtgccgtcgtcgtccgccttcggtgaggcccgtgtgacgatgcgcaatacgtgggcgtgtgccaagccagcggtggcgtcctggagcccgtggtacggccccgaccgcgtgttgtacctgggcccactgtccggcgagccacctagctacctgacgtgcgatttcccgggctactacggatgggacgccgcgggtttgtcggctgacccggagacgttcgccaataaacgggagctggaggtgatccactcccgctgggccatgttggtagctctcggctgcgttttcccctagctgctcgcccgcaacggtgtcaagttctgtgatgccgtgtggctcacggccggctcccatatcttcagcgagggcgggttggactacctcgtgaactcgaggctcatgcacgcgtagagtatccttgctatctgggtctgccaggtcgtgctcaggggcgccgttgagggctaccgtatctccgtcggtcctgtcggagaggtcctcgacccgctctaccccggagcaagcttcgacccgctcggnctctccgactacccctag

SEQ ID NO: 1089 - DNA, 229 bp, Zea mays
  Clone ID: PAT_MRT4577_140557C.1
caatgagtggagcgcgcgtcgcgctctgggcatgggatatcgtcgtcggcggctgcgctgtctgccgcagccacatcgtggatctatgcgtctagtgccatgctagccgagccagcgcgaccagcgatgagtgcactgttgcttggggagtctgtaatcatgctttgcacttccgctgcatcggcatgtggcttgagactcgtcgagtgtgcccattagatagcagtga

SEQ ID NO: 1090 - DNA, 1809 bp, Zea mays
  Clone ID: PAT_MRT4577_140694C.1
cggccgcgaccccaatctcgcagacacgcaccgtcgcggtatccgtatcgccagagtcctcacggatggcctcgccagcgatggtcccgctgcggcagctcttcgtcgacggcgagtggcgcccgcccgcgcagggccgccgcctccccgtcgtcaaccccaccaccgaggctcacatcggcgagatccctgcgggcacagcggaggacgtggacgccgcggtggcggcggcgcgggcggcgctcaagaggaaccgtggccgcgactgggcgcgcgccccgggggccgtccgggccaagtacctccgcgctatcgccgccaaggtgattgagaggaaacctgagctggctaagctagaggcacttgattgtgggaagccttatgatgaagcagcatgggacatggatgatgttgctgggtgctttgagtactttgcggatcaggcagaagcctaagattgtgacaaaatttcccccttttctcttccaatggaaacttttaaatgccatctccgaagaggcctattggggtagttgggctgataactccttggaactatcctctcctgatggctacatggaaggtagctcctgcattggctgctggttgtacagctgtgctaaagccatctgaattggcttctgtgacttgcttagagcttgctgatatctgtaaagaagtcggtctcccttctggtgtcttgaacattgtgacaggattaggtcctgatgctggcgctcctttgtcagcacacccagatgttgacaaggtcgcttttactgggagttttgaaactggcaagaagattatggcagcggcagctcctatggtcaagcctgttacactggaacttggtggaaaaagtcctatagtagtatttgatgatgttgacattgacaaagctgtcgagtggactctgtttgggtgcttttggaccaatggtcagatttgcagcgcaacatctcgtcttcttatccatacaaaaattgctaaaaaatttaatgagaggatggttgcatgggccaaaaatattaaggtttcggatccacttgaagagggttgcaggcttgggccagttgttagtgaaggacagtatgagaagattaagaagttcatatcgaatgccaaaagccaaggtgctactattctgactggaggtgttagacctgcgcatcttgagaaggggttctttattgaaccaactattattactgatatcaccacatcaatggaaatctggagggaggaagtctttggtccagtcctgtgcgttaaagaatttagcactgaagatgaagccatcgaacttgccaacgatacacagtatggtttggctggtgctgtaatttctggtgatcgggagcgctgccagaggttatctgaggagattgacgctggatgcatctgggtaaactgctcgcaaccctgcttctgccaagctccctggggcgggaacaagcgcagtggatttggacgtgagcttggagaagggggcattgataactacctgagcgtcaagcaagtcacggagtacatctctgatgagccgtggggatggtaccaatccccctccaagctgtaaactggcaagacgaaaatttgtctgtttcggtagaataaatatatctcgatgctatacagaacgaacccgtgtatcacattgaatgacatggtgaaaaaggcacatctgcaggataaaggcgagagttgagttgaaaccaaaaattttggaactgtgccattataagaggtggattttgtcaaaaaaaaaaaaaaaaaaaaaaaaaaaaaaaaaaaaaaaaaaaaaaa

SEQ ID NO: 1091 - DNA, 1620 bp, Zea mays
  Clone ID: PAT_MRT4577_140696C.1
ggccgcgattgggcgcgcgcgccgggggccgttcgggccaagtacctccgcgccatcgccgccaaggtaattgagaggaaacaagagctagctaagctagaggcacttgattgcgggaagccttatgatgaagctgcatgggacatggatgatgttgctgggtgctttgagtacttcgcagatcaggcagaagctttggacaaaagacaaaattccccagtttctcttccgatggaaacttttaaatgccatctccgaagagagcctattggggtagttgggctgataactccttggaactatcctctcctgatggctacatggaaggtagctcctgctctggctgctggttgtgcagctgtgctaaagccatctgaattggcttctgtgacttgcttagagcttgctgatatctgtaaagaagtcggtcttcctcccggtgtcttaaacattgtgacaggattaggtcctgatgctggtgctcctttgtcagcacacccagatgttgacaaggtcgcttttactgggagttttgaaactggtaagaagattatggcggctgcagctcctatggttaagcctgttacactggaacttggtggaaaaagtcctatagtagtatttgatgatgttgacattgacaaagctgttgagtggactctgtttgggtgcttttggaccaatggtcagatttgcagcgcaacatctcgtcttcttgtccatacaaaaattgctaaagaatttaatgagaggatggttgcatgggccaaaaatattaaggtttcggatccacttgaagagggttgcaggcttgggccagttgttagtgaaggacagtatgagaagattaagaagttcatatcgaatgccaaaagccaaggtgctactattctgactggaggtgttagacctgcgcatcttgagaaggggttctttattgaaccaactattattactgatatcaccacatcaatggaaatctggagggaggaagtctttggtccagtcctgtgcgttaaagaatttagcactgaagatgaagccatcgaacttgccaacgatacacagtgagctgattctttttagcgcagtttcgatgtcttttttgcaggcttcacaggtcatgtgtagtccatagcttatgaatttatgccagtatccttcttttgaatttttgataggtatggtttggctggtgctgtaatttctggtgatcgggagcgctgccagaggttatctgaggagattgacgctggatgcatctgggtaaactgctcgcaaccctgcttctgccaagctccctggggcgggaacaagcgcagtggatttggacgtgagcttggagaagggggcattgataactacctgagcgtcaagcaagtcacggagtacatctctgatgagccgtggggatggtaccaatccccctccaagctgtaaactggcaagacgaaaatttgtctgtttcggtagaataaatatatctcgatgctatacagaacgaacccgtgtatcacattgaatgacatggtgaaaaaggcacatctgcaggataaaggcgagagttgagttgaaaccaaaaattttggaactgtgccattataagaggtggattttgtc

SEQ ID NO: 1092 - DNA, 359 bp, Zea mays
  Clone ID: PAT_MRT4577_140714C.1
ccaaacttgaaaaatggcacggatcctcttttgatgccatttaattcctacatggcagattggagcagcgataagataacttacaccactctgaacactccaaaaataagcacagaacttccagtcaagttacaccatgacaaaagtagtagctttgaagcaccaaacctgaaggagcatgaatcagtctttgcaacacatgaaatgacggtagaagcaacaagaaaagaagacgaacacacatcaaaatctagttttactttctacaatggagtaccagatacagctgcacaagcatcaaagccaaagaaaacaagaaccacaactgctaaaaacacagagaaatttgactgggaaaa

SEQ ID NO: 1093 - DNA, 259 bp, Zea mays
  Clone ID: PAT_MRT4577_140869C.1
gttccgatcctccacaccagacccccgccgccgccgcctcttcccttgcgcacctgctgctgtgcggatcggtgaagcggaggaataggatcgcgaacgcggccggagggaaacgagcgaagaaagggaattggtttaaggtatccaagctcaggccattgatggaagcgctggaccccacggccaaggaagtgaacaacttaaagctgcgtcgattcctgcgcacgcgcgaccacgacgtggtcaaggcctccgccat

SEQ ID NO: 1094 - DNA, 672 bp, Zea mays
  Clone ID: PAT_MRT4577_140882C.1
tcgcctgctgcccagcgacccggagagagacgccgaaacctagcgacgccgccgacgacccccggatccgcccgccatggcgacccccaacccgccgccgccccagcaggacgagccctcctcctccgccgatcccaaggcgaagaaggactactcgacggcgatcctcgagaggaagaagtcccccaaccgcctcgtggtcgacgaggccaccaatgacgacaactccgtcgtcgccctccaccccgacaccatggagaggctccagctcttccgcggcgacaccgtcctcctcaagggtaaaaagaggaaggacaccatctgcattgttcttgctgatgacacatgtgaggagccgaaggtcagaatgaacaaaactgtcaggaagaacttgagagtgagacttggtgatgtggtgtctgttcatcaatgccccgatgtgaaatacgggaagcgggtgcacatacttcctattgatgacacagttgaagggattacaggaaacttgtttgacgccttcttgaaaccatacttccttgaagcctaccgccctttgagaaagggagaccttttccttgttaggggtggaatgagaagcgtggagctcaaagttatagagactgacccggcagagtattgcattgttgcaccagacactgagatcttctgtga

SEQ ID NO: 1095 - DNA, 153 bp, Zea mays
  unsure (1)..(153): unsure at all n locations
  Clone ID: PAT_MRT4577_140895C.1
cacaaggtaaaaccaaacaagcaaatttaataaacttcatnntaacaaannnctaagcttannatagtgtgggcgaccatttaaagtaccaagcanaccgatgtaacttcacattaaaaaaaaactatgtttccgcaattgcaattgttttcg

SEQ ID NO: 1096 - DNA, 2256 bp, Zea mays
  unsure (1)..(2256): unsure at all n locations
  Clone ID: PAT_MRT4577_141052C.1
attgggatccctcgaggccggccgggagcaccagccgtccagccccggtttttctcctcccgcccccgttccccgtcccgactcccgacccaacccatatcagagattccttccgttggtggcgctggcgtccgcgctggcgttcccgtgagtcggcccgcgcgcgaaggcggccgtgaccgaccgtccggagcttcatgcgccaggggcggcggctccaccccgtcgtttgatgggcaacgcatgcggcggcgcccttagatccaagcaccagcacagcttcaagcacgccgcgtcgtcgcagcgccaccacgcctcctccgagtacagcgccagcgccgcggccgacgactcgcccaggaagccgccaccgccgcccgccaccacggacgcccacgcgccgccgccgccgcccgccaccgccatgaggcgcggcggggccggcgcgccgccggacctggggtccgtgctcggccaccccacccccaacctccgcgacctctacgcgctcggcaggaagctcgggcaggggcagttcggcaccaccttcctctgcaccgagctcgccacggggatcgactacgcctgcaagtccatctccaagcgcaagctcatcaccagggaggacgtcgacgacgtgcgccgcgagatccagatcatgcaccacctctccggccacaccaacgtcgtcgccatcaagggcgcctacgaggaccagctctacgtccacatcgnnnnnnnnnnnnnnnnnnnnnnnnnnnnnnnnnnnnnnnnnnnacagcgcggccactacagcgagcgcaaggccgccgcgctcaccaggatcatcgtcggcgtcgtcgaggcctgccactccctcggggtcatgcaccgggacctcaagcccgagaacttcctgctcgccaacagggacgatgacctctcgctcaaggccatcgatttcggactctctgtcttcttcaagcctggtcaagttttcaccgatgttgttggtagcccatattatgtagctccagaagttttgttgaaaagttatggaccagcagctgatgtatggacagctggtgtcattctttacattctactgagtggtgtgcctccattttgggcagaaacacaacaaggaatatttgatgctgtattgaagggtgccattgattttgattctgatccgtggcctgtcatatctgatagtgcaaaagatcttatcagacgaatgctgaatcctcgctctgccgagcgcttaacagcacatgaagttctatgccatccatggattcgtgatcatggagtagctcctgaccgtccactggatccagctgtcttatctcgcattaagcaattctctgcaatgaataagttgaagaaaatggctttacgagtaatagctgagagcctatcagaagaggaaattgcggggttgaaggaaatgttccagaccatggacactgacaacagtggcgcaattacttatgatgagcnnnnnnnnnnnnnnnnnnnnnnnggctccacactaaaggacactgagattcgtgatcttatggatgcagctgatattgacaacagtggaacaattgactacatagaattcattgctgcaactttgcatctcaataagctggagcgtgaggaacatctcgtggcagccttttcatatttcgacaaagatggtagtggctatatcacagtggacgaactacagcaagcttgcaaagagcataacatgccggannnnnnnnnnnnnnnnnnnnnnnnnnnnnnngatcaggataacgatggccgcattgactatggagagtttgttgccatgatgaccaagggcaatatgggagtcggtcgaagaacaatgagaaacagcttgaatatcagcatgagggacgacctggtgcgttctgagacttaacacgatgtacagcttgttgcttggctacttcctgccttgctgccctacgaaaccttctgcannnnnncaagatgttgtcaagtgtctgtgtggatgtgnnnnnctggggattctgattcaactctggtgattgattccatgaaatgcataacaagatgcccatgtcacgcaagaagccagattgtaaatgctgctgcccctttgactctcagaaacactaatgctcagtgaaaagaaatcgctccctatgcatgtctccagtctcccttgattgatggcatccattcttggatgcacgctgtatctcaatgcaatgtgttgctccgtttggatgaacatgtactcaatatact

SEQ ID NO: 1097 - DNA, 2754 bp, Zea mays
  unsure (1)..(2754): unsure at all n locations
  Clone ID: PAT_MRT4577_141053C.1
aattcggcacgaggcaccgccggcctgagcctaatcctaatcctaatcctaatcccataccgggacaatccagacgaacgagcgaaccaacgcacggacggccaccagccgctgcgtgcgttcgctttcccccgaaacgtgacccgagccgagctgcagagagagaaaggagaagccgccatgaagcagcagcagctgcagctgcctcctagtcgtcaacgttaaatccctgctcgccaagccactactacgactacgagcaccagccccagtttttctcctctcgcccccgttccccgtcccgactcccgacccaacccatatcagaggttccgtccgttggtggcgctggcgttcccgtgagtcggcccgcgcgcgaaggcggccgtgaccgaccgtccggagcttcatgcgccaggggcggcggctccaccccgtcgtttgatgggcaacgcatgcggcggcgcccttagatccaagtaccagcacagcttcaagcacgccgcgtcgtcgcagcgccgcgcctcctccgagtacagcgccagcgccgtggccgacgactcgcccaggaagcccacgcagccgcccgccaccacggacgcccacgcgccgccaccgccgcccgccaccgccgcagccgccatgaggcgcggcggggccggcgcgccgccggacctggggtccgtgctcggccaccccacccccaacctccgcgacctctacgcgctcggcaggaagctcgggcaggggcagttcggcaccaccttcctctgcaccgagctcgccacgggggtcgactacgcctgcaagtccatctccaagcgcaagctcatcaccagggaggacgtcgacgacgtgcgccgcgagatccagatcatgcaccacctctccggccacaccaacgtcgtcgccatcaagggcgcctacgaggaccagctctacgtccacatcgtcatggagctctgcgccgggggcgagctcttcgaccggatcatacagcgcggccactacagcgagcgcaaggccgccgagctcaccaggatcatcgtcggcgtcgtcgaggcctgccactccctcggtgtcatgcaccgggacctcaagcccgagaacttcctgctcgtcaacaaggacgatgacctctcgctcaaggccatcgatttcggactctctgtcttcttcaagcctggtcaagttttcaccgatgttgttggtagcccatattatgtagctccagaagttttgttgaaaaattatggaccagcagctgatgtatggacagctggcgtcattctttacattctactaagtggcgtgcctccgttttgggcagaaacacaacaaggaatatttgatgctgtattgaaaggtgtcattgattttgattctgatccgtggcctgtcatatctgatagtgcaaaagatcttataagacggatgctgaatcctcgctctgccaagcgcttaacagcacatgaagttctatgccatccatggattcgtgatcatggagtagctcctgaccgtccactggatccagctgtcttatctcgcattaagcaattctctgcaatgaataagttgaagaaaatggctttgcgagtaatagctgagagcctatcagaagaggaaattgcggggttgaaggaaatgttccagaccatggacactgacaacagtggcgcaattacctacgatgaactaaaagaaggattgagaaaatatggttccacactgaaggacactgagattcgtgatcttatggatgcagctgatatcgacaacaatggaacaattgactacattgaattcatcgctgcaactttgcatctcaataagctggagcgcgaagaacatctcgtggcggccttttcatatttcgacaaagatggtagtggctatatcacagtggatgaactacagcaagcttgcaaagagcataacatgccggatgcttttcttgatgatgtcatcaacgaagctgatcaggataacgatggccgcattgactatggagagtttgttgccatgatgaccaagggcaatatgggagtcggtcgacggacaatgagaaacagcttgaatatcagcatgagggacgcacctggtgcattctgaaacttaacacgatgtacagcttgtggcctagtcacttcggccctgtttgtttcggcttctggcagcttctggccaccaaaagctgctgcggactgccaaacgctcagcttttcagccagcttctataaaattcgttgcggcaaaaaccatccaaaatcaacataaacacataatcggttgagtcgttgtaatagtaggaatccgtcactttctagatcctgagccctataaacaactttatcttcctccacacgtaatcgtaatgatactcagattcttcccacagccagattttcagaaaagctggtcagaaaaaagccgaaacaaacagggccaactgtcttgtcttgctgccctaccaaaccttctgcaaaattttttttcaagatgtttgtcaggtgtatgtgtggatgtgttttttctgattcaactcttgtgattgattccatgaaatgcataacaagatgtccatgccatgcgtgaaagtgaagccgattgtaaatgacggcgctgcccctgcttgactctcagaaacacaaacacccatgttctgaactagctcgccatgtatgcctncagtctcccttgattcatggcatccattcttcatgatgtggatcaagatactctattatgctc

SEQ ID NO: 1098 - DNA, 2243 bp, Zea mays
  Clone ID: PAT_MRT4577_141054C.1
cggacggccaccagccgctgcgtgcgttcgctttcccccgaaacgtgacccgagacgagctgcagagagaaaggagaagccgccatgaagtagcagcagctgcctcctagtcgtccccgttaaatccctgctcgccaagccacgactacgagcaccagccgtccagccccggtttttctcctcccgcccccgttccccgtcccgactcccgaccgacccaacccatatcagagattccttccttggtggcgctggcgtccgcgctggcgttcccgtgaggcggcccgcgcgcgaaggcggccgtgaccgaccgtccggagcttcatgcgccaggggcggcggctccaccccgtcgtttgatgggcaacgcatgcggcggcgcccttagatccaagtaccagcacagcttcaagcacgccgcgtcgtcgcagcgccacgcctcctccgagtacagcgccagcgccgtggccgacgactcgcccaggaagccgccaccgccgcccgccaccacggacgcccacgcgccgccgccgccgcccgccaccgccatgaggcgcggcggggccggcgcgccgccggacctggggtccgtgctcggccaccccacccccaacctccgcgacctctacgcgctcggcaggaagctcgggcaggggcagttcggcaccaccttcctctgcaccgagctcgccacgggggtcgactacgcctgcaagtccatctccaagcgcaagctcatcaccagggaggacgtggacgacgtgcgccgcgagatccagatcatgcaccacctctccggccacaccaacgtcgtcgccatcaagggcgcctacgaggaccagctctacgtccacatcgtcatggagctctgcgccgggggcgagctcttcgaccggatcatacagcgcggccactacagcgagcgcaaggccgccgagctcaccaggatcatcgtcggcgtcgtcgaggcctgccactccctcggtgtcatgcaccgggacctcaagcccgagaacttcctgctcgtcaacaaggacgatgacctctcgctcaaggccatcgatttcggactctctgtcttcttcaagcctggtcaagttttcaccgatgttgttggtagcccatattatgtagctccagaagttttgttgaaaaattatggaccagcagctgatgtatggacagctggcgtcattctttacattctactaagtggcgtgcctccgttttgggcagaaacacaacaaggaatatttgatgctgtattgaaaggtgtcattgattttgattctgatccgtggcctgtcatatctgatagtgcaaaagatcttataagacggatgctgaatcctcgctctgccgagcgcttaacagcacatgaagttctatgccatccatggattcgtgaccatggagtagcttctgaccgtccactggatccagctgtcttatctcgcattaagcaattctctgcaatgaataagttgaagaaaatggctttgagagtaatagctgagagcctatcagaagaggaaattgcggggttgaaggaaatgttccagaccatggacactgacaacagtggcgcaattacctacgatgaactaaaagaaggattgagaaaatatggttccacactgaaggacactgagattcgtgatcttatggatgcagctgatatcgacaacaatggaacaattgactacattgaattcattgctgcaactttgcatctcaataagctggagcgcgaagaacatctcgtggcagccttttcatatttcgacaaagatggtagtgggtatatcacagtggacgaactacagcaagcttgcaaagagcataacatgccggatgcttttcttgatgatgtcatcaacgaagctgatcaggataacgatggccgcattgactatggagagtttgttgccatgatgaccaagggcaatatgggagttggtcgacggacaatgagaaacagcttgaatatcagcatgagggacgcacctggtgcattctgagacttaacacgatgtacagcttgtggcctagtcacttcctcttctgtcttgtcttgctgccctacgaaaccttctgcatttttttttcaagatgttatcaggtgtatgtgtggatgtgttttttctggggattctgattcaactcttgtgattgattccatgaaatgcataacaagatgtccaaaaaaaaaaaaaaaaaaaaaaaaaaaaaaaaaaaaaaaa

SEQ ID NO: 1099 - DNA, 2334 bp, Zea mays
  Clone ID: PAT_MRT4577_141056C.1
ccggccgggaaagttaccaagctacagagagagaaaggacaagggaggagaagccgccatgaagcagcggcagcagcagcagcctcctagtcgtccccgttaaatccctgctcgcccccggtccgcgaccccgacccaacccgtttgtgtcgtaggcggtttgcactagcgtttccgtgaggtgggcgaaggcgtccgtgaccgaccgaccgaccgaccggagcttcatgcgccaggggcggcggcttcaccccgtcgtttgatgggcaacgcatgcagcggcgcccttagatccaagtacctgcacagcttcaagcacgccgcgtcgcagcgccacgactccgagtacagcgccagcgccagcgccgacgactcgcccaggaagcccacaccgcccgccaccacggacgcccacgcgccggcgccgcccgccgccgccatgaggcgcggcgcggctggcgcgacgccggacctcgggtccgtgctcggccacccaacccccaacctccgcgacctctacgcgctcggcaggaagctcgggcaggggcagttcggcaccacctacctctgcaccgagctcgccacggggatcgactacgcctgcaagtccatctccaagcgcaagctcatcaccaaggaggacgtcgacgacgtgcgccgcgagatccagatcatgcaccacctctccggccacaagaacgtcgtcgctatcaagggcgcgtacgaggaccaggtctacgtccacatcgtcatggagctctgtgccgggggcgagctcttcgaccggatcatacagcgcggacactacagcgagcgcaaggccgccgcgctcacaaggatcatcgtcggggtcgtcgaggcctgccactcgctcggggtcatgcaccgggacctcaagcccgagaacttcctgctcgccaacagggacgatgacctctcgctcaaggccatcgatttcggactctctgtctttttcaagcctggtcaagttttcaccgatgtagttggtagcccatattatgtagctccagaagttctgttgaaaagttatggaccagcagctgatgtatggacagccggtgtcattctttacattctactgagtggtgtgcctccattttgggcagaaacacaacaaggaatatttgatgctgtattgaagggtgccattgattttgattctgatccgtggcctgtcatatctgatagtgcaaaagatcttatcagacgaatgctgaatcctcgccctgccgagcgcttaacagcacatgaagttctatgccatccatggattcgtgatcatggagtagctcctgaccgtccactggatccagctgtcttatctcgcattaagcaattctctgcaatgaataagttgaagaaaatggctttacgagtaatagctgagagcctatcagaagaggaaattgcggggttgaaggaaatgttccagaccatggacactgacaacagtggcgcaattacttatgatgagctaaaagaaggattgagaaaatatggctccacactaaaggacactgagattcgtgatcttatggatgcagctgatattgacaacagtggaacaattgactacatagaattcattgctgcaactttgcatctcaataagctggagcgtgaggaacatctcgtggcagccttttcatatttcgacaaagatggtagtggctatatcacagtggacgaactacagctagcttgcaaagagcataacatgccggatgcttttcttgatgatgtcatcaacgaagctgatcaggacaatgatggccgcattgactatggagaatttgttgccatgatgaccaagggcaatatgggagtcggtcgaagaacaatgagaaacagcttgaatatcagcatgagggacgcacctggtgtgttctgagacttaacacgatgtacagcttgttgcttggctacttcctgccttgctgccctacgaaaccttctgcattttttcaagatgttgtcaagtgtctgtgtggatgtgtttttctggggattctgattcaactctggtgattgattccatgaaatgcataacaagatgcccatgtcacgcaagaagccagattgtaaatgctgctgcccctttgactctcagaaacactaatgctcagtgaaaagaaatcgctccctatgcatgtctccagtctcccttgattgatggcatccattcttggatgcacgctgtatctcaatgcaatgtgttgctccgtttggatgaacatgtactcaatatactgtttcctgataccaaaaaaaaaaaaaaaaaaaaaaaaagtcgacgcggccgcgaattcggat

SEQ ID NO: 1100 - DNA, 1682 bp, Zea mays
  Clone ID: PAT_MRT4577_141133C.1
aggaaatcaggtgggggaaaacttaaaattagaagtccagcgcaataattgggcaggcagggcccctcctaatcactgcccctaaacatgtgtgccgggccgaggccatgatcgatgcagggaggaggatgctgccgctgctctggagtgaatcactagtataaagcaggcggagacagccggcccctctggcctcgctgctcccccttcctccccgtccccacccacatgccctgcctccgccccgccccgccctgcccaagctgagttcccccacccccaacaaacaattactagagtagctgcattggcggggaaattaaagcgctagaagctcagcagcaatggcggagcaggcgggcgccggaaggtactggtgccacatgtgcgccgcggccgttagccccgcggagggcgaggtggagatgaagtgcccgttctgccacagcggcttcctcgaggagatggagaccgcccgcggggccgcgaccgacgacggtgacggcgacggcgacggcgcggtggctcaggtgcaccccggcgccgaccgcccgagctccatctgggcgcacgctatcctcagcacggtcgacagctccgcccgtcgccgccgcaaccggcggcagcaggaggccgccagcgacgtctacgactggaacgaccccgagttctcgctgcgccggcggcgcgtcaccgcgttcctgcggctcctgcacgagctccgggaccgccagctgcagcggctggagtccgctgccggcgtcgccctcgaaggcgaccagctgaccccgttcggccggagcctcttcatcggcgcagctggcggcgagcatggcgtggcgctgggcgactacttcctcggccccagcctcgacgccttgccacgcctccgcgccgagaacgatgcggcgcggcacggaacgccgccggccaagaaggaggccgtggaggcaatgccgaccgtggaaatcgccggcggcaacgatggcgacgacgcggccagctgcccggtctgcctggaggactacgcggccggcgagcgcgcccgcgagatgccctgcaggcacaggttccacggcaattgcatcgtgccgtggctcgagatgcacagctcctgccctgtctgccggttccagctgccggccaccgacgacaagagctcatgcagcggcggcgacggtggtttcgtcagtgtcgatgcggatcgtgaaggcagtgacaacggcgggggtgatggtagggcaagctctccgggcaacgccgagctagctgaagctgaagagagtggcaggcggttgccgccatccttgcagtggctcaacagcctgttctcgccgtcggcgcagtcctccggtagcggcggcagcagttcgcatcattgggagaactaagcaatattgccatggttgctgccgcttgaaagcttggcccgttggttggtcccaatgtacataggaaggagcaggagcgcatgccgggttggtgccatggaaaaatctggagccttttttcagtttggctcatgttaatggtctctgatatgtatcatggctgtaaaaaagaacagaaatgggcaaatgtatgaacttgccgcgctcttgcgtgaactgggtgctaatcatcgtcttactactcaattttggtttttattaacaaaactatagtatttatgaaaaatacca

SEQ ID NO: 1101 - DNA, 712 bp, Zea mays
  Clone ID: PAT_MRT4577_141167C.1
ccggccgggccttttgtgcaaaagagactctctccctcctaccacacacagcctccggactgctccggacgcgcgcctcagatctactccaacacctgtaaggattcctctggccgtgtggcctttccggcaactatagctagcggcggcgcccgcgggtggaggagcaggagcaggagcggcggcgccatggtcgggaccgggaagagggagcggatagcgatacggaggatcgacaacctggcggccaggcaggtgaccttctccaagaggcggcggggcctgttcaagaaggccgaggagctctccatcctctgcgacgccgaggtcggccttgtcgtcttctccgccaccggcaaactcttccacttcgccagctccagcatgaagcaggtaatcgatcggtacgactctcattccaagactctccagaggtccgaaccgcagtcgtctcaactgcagtcacatatggatgacggcacttgtgcaaggctaaaggaggaacttgctgaaacaagccttaagctcaggcagatgagaggagaggagctccagaggctgagcgtcgaacagctgcaggagctcgagaagaccctcgaatccggcctcggctctgtactcaaaaccaagagccaaaaaaatccttgacgagatcagcggtctggaaagaagagaacgcagctgatcgaggagaactcaaggctgaaggagc

SEQ ID NO: 1102 - DNA, 853 bp, Zea mays
  Clone ID: PAT_MRT4577_141169C.1
cctcgaggccggccgggcctttgcgcaaaagagtactctctccctcctaccacacacagcctccggactgctccggacgcgcgcctcagatctactccaacacctccgcagcggcggcgcccgcgggtggaggagcaggagcaggagcggcggcgccatggtcgggaccgggaagagggagcggatagcgatacggaggatcgacaacctggcggcaaggcaggtgaccttctccaagaggcggcggggcctgttcaagaaggccgaggagctctccatcctctgcgacgccgaggtcggccttgtcgtcttctccgccaccggcaaactcttccacttcgccagctccagcatgaagcaggtaatcgatcggtacgactctcattccaagactctccagaagtccgaaccgcagtcgtctcaactgcagtcacatatggatgacggcacttgtgcaaggctaaaggaggaacttgctgaaacaagccttaagctcaggcagatgagaggagaggagctccagaggctgagcgtccaacagctacaggagctcgagaagaccctcgaatccggcctcggctctgtactcaaaaccaagagccaaaaaatccttgacgagatcagcggtctggaaagaaagagaacgcagctgatcgaggagaactcaaggctgaaggagcaagtgacacggatgtcgaggatggagacgcagcttggcgccgacccagagttcgtgtacgaggaagggcagtcgtctgaatccgtgacgaacacgtcctatccgcgcccgtcaccgacaccgacgactgctccgacacatcgctcaggctcgggctaccattcttcagctcaa

SEQ ID NO: 1103 - DNA, 1523 bp, Zea mays
  unsure (1)..(1523): unsure at all n locations
  Clone ID: PAT_MRT4577_141171C.1
acctcctaccacacacagccttcggactgcttcggacgcgcgcctcagatctactcgaacacctggaaaatatagctagggttctccttctcccctccctccgcccgcttgctcttggacggtgcttcctcttctttaccagctagtcaaagtaaccacgcgtgctgcttcatctctcccttccttcctgccgtgtggttgttggcagccgcagcggcggcgcccgcgggtggaggagcaggagaggcggcgccatggtcgggaccgggaagagggagcggatagcgatacggaggatcgacaacctggcggccaggcaggtgaccttctccaagaggcggcggggcctgttcaagaaggccgaggagctctccatcctctgcgacgccgaggtcggccttgtcgtcttctccgccaccggcaaactcttccacttcgccagctccagcatgaagcaggtaatcgatcggtacgactctcattccaagactctccagaggtccgaaccgcagtcgtctcaactgcagtcacatatggatgacggcacttgtgcaaggctaaaggaggaacttgctgaaacaagccttaagctcaggcagatgagaggagaggagctccagaggctgagcgtcgaacagctgcaggagctcgagaagaccctcgaatccggcctcggctctgtactcaaaaccaagagccaaaaaatccttgacgagatcagcggtctggaaagaaagagaacgcagctgatcgaggagaactcaaggctgaaggagcaagtgacacggatgtcgaggatggagacgcagcttggcgccgatccagagttcgtgtacgaggaagggcagtcgtctgaatccgtgacgaacacgtcctatccgcgcccgtccaccgacaccgacgactgctccgacacatcgctcaggctcgggctaccactcttcagctccaagtgacggagatttgacatgtccggtagcggagcggtgccgattgcttgcccttctccactctagataggtctggattgggggagagcaagcactgctggatcgggaagacccaagtgaccaacgcgtcgcatcagaataaggcattttgagtgctgtatgatgtgtgtattctggctctgaaagtgagacctgcttttgttataatacatacatacaggcagcatggcaatacgtgacggggtatccgctgcctgcagtccgtgacctgtctgtcgtctctgtttctagtacccgtataatcaccctgcaattacctgcagctggtcatcgttaggagaaactccagtccatgcaaatgaactcccagcacttgtgctcttcgcggtatcagatatgctacgtngttctttgcagtnggaacttcgatgnnaatttngcaatagcatacggagcaggtgcagagccttcagcaatngagggtaaaantgaagaagcccaaagaaaaaaaaggggttctttggcgtcacaggggntanactttaatgatgaagtaggtcaagcaaaaggtgg

SEQ ID NO: 1104 - DNA, 211 bp, Zea mays
  unsure (1)..(211): unsure at all n locations
  Clone ID: PAT_MRT4577_141465C.1
ccccacncgccaggcgcagcagcaccggggagccangggacgccagcggagccggnagcaggggaagagggggcggccgggcgcaaggcaggcggccccaggaaggaancggngacgcggnccggcaaggccgggccgcagggccccggcggccggaccgggcgccaccngaagagggccggaacgcgcagcgcgngggcacgggcgcccc

SEQ ID NO: 1105 - DNA, 1134 bp, Zea mays
  Clone ID: PAT_MRT4577_141627C.1
cccgggcaggcgatagccatcttcttctctgcttatcagctatagccatcttcttctcttctctgaattccagtccaagggccggaataccgtcagagcagagggagtgggaggaagaagaaaaaaagatggtgaagctcgcatttggaagctttcgcgactctttgagcgccgcgtcgctcaaggcctatgtggccgagttcatcgccacgctgctcttcgtgttcgccggcgtcgggtccgccattgcctactcgcaattgacgaagggcggcgctctggaccccgccggcctggtggccatcgccatcgcccatgcgttcgcgctcttcgtcggcgtctccatggccgccaacatctccggcggccacctgaaccccgccgtcaccttcggcctcgccgtcggcggccacatcaccatcctcaccggcatcctctactgggttgcccagcttctcggcgcttccgtggcgtgctttctcctgcagtacgtcacacacggacaggctatcccgacgcacggcgtctccgggatcagcgagatcgagggcgtggtgatggagatcgtgatcaccttcgcgctggtgtacaccgtgtacgccaccgcggccgacccgaagaaggggtccctgggcaccatcgcgcccatggccatcggcttcatcgtcggcgccaacatcctggccgccggccccttcagcggcggctccatgaacccggcccgctccttcggccccgccgtggcggccggcaacttcgccggcaactgggtgtactgggtcggccccctcgtcggcggtggcctggcggggctcgtctacggcgacgtcttcatcgcctcctaccagccggtcggccagcaggagtacccatgaaagtccggagctagcccgatcgatccgtctgtgttgatttcaccatcgtcgtcgtcgtgtcatctggcgcttcgtgctgtaatcatgtttggtcctgtttgcatttcccaacgtctggttttcatttccattcaccaacggtgccaagatgccgtactgtaagcgagagaagtgttcggtctgtatctgtataaatgcaatgcacagttcggcgtttccatgaaaaaaaaaaaaaaaaaaaacccctagggcctagaac

SEQ ID NO: 1106 - DNA, 471 bp, Zea mays
  unsure (1)..(471): unsure at all n locations
  Clone ID: PAT_MRT4577_141669C.1
ggggggggggggggggaacaaaaccttgctcattcttctctcgtgtcgtgtcatagcgggggcgaccaaagcgagacaacagggggccaacacctaatccaagggggaacgggcactaacacggggacagagagcgaacggggacacgaggggtgtggagggagaanataactcgggccaagccagggatggggccacacatnagtccctccagcgcgggccgccaccgccgccgtagccggcaccggcaccctcgcgccgaccgccgtagccgccaccggctccgtaggcggcgccggcaccttcgcgccgaccggcgtggggggcaccgccgccataaccgccgtcacggcgcccggcaccataaccgccgtcgccgccgcgaccgccgccgtagccaccggcggcaccggcaccgccacgggactgggcctgggtaacggggatgttacggggcgggagctccttgcc

SEQ ID NO: 1107 - DNA, 1561 bp, Zea mays
  Clone ID: PAT_MRT4577_141711C.1
cctcgaggccggccgggggaggagtcccctctctctctctctatatacctttcttgcccaagcagtcaatcaagctgggaaacttaaacagaaagcgaagcaattaaaggccaccaccgccttcacttgttccttttggttattttcctcttgctgtggcttaacttgacaagaagaagaggaagaagatgctacgtcggcaaggccgaggtggaaaatttctggaggaggtgctcatcgtcggcgggctcctgctggtgcagtgcgtgctctccggctacgtggtcttcaccgaccacctgctcgccctcggcgccgacccgctggccgtcgtcgtcgtcgccggagccgcctacgccgccttctgctttcccttcgccgtcgccctcgagaggaagcgatggccttccacggtttcggggactctggtggcgcaatacctgctcattgctcttggagggacaaccgcgttccaagcgctgatgctgctggggatcaagaagaccacgccggccatcgcatccgccatgcccaacctcagccccggcctcatcttcatcgtcgcagcctgtttcaggctggagaggttcgacagggcgtgcaagtacacgcaggcgaagatggcggggacggtggtgtgcctggcgggagcgctggccatgggcttcctgcacagcccaacttctacgtcctcctctctgcaggcagcagtagctgcggaagcagcagcaggaggtggcgactactactacgactggatcctcggctgctgctgcctcgtcgccgccgtcaccgtcttcgcgctcgtcaccgtcctgcaggccgccacgctcgccgccttccccgcgccgctcaccatgtgctgcgccacctccgcgacgggcgccgctctcaccgccgtcctgcggctcgtcctggaagggaggttcctcggcatggggtcgcccaggatcgacgccacgctcgtcgcgggggatcgtcgtcctcggcggggccgcggtgggcgcgtgcatggcgttccaggcgtggtgcctgggcaggaagggcccgcttttcgtctccgtcttcgggcccgtccagaccgtctgcaccgccatcctctccgcggctctcctccgccaagtcctcagcctgggaagcctcgcagggatcgtgctcatgttcactgggctctacattgtcctatgggccaagagcaacgagatctcggctgacgacgaggaacagtcgttgcagggtggcgacgacgccgagaaggcactcctagcctagcctagcaaaatccagagcgaatatcactgcacgctctgtatttgtaaaaatggaatggtgtctacgtacctgtatacatactcgagaggatttagagaaaaaggacatggctacgtttgttcataatatgtatatactggaaatactccctcccctctgtatttgtaaaaatggaatggtgttggtgtctacgtacatactcgagaggaggatttagagaaaaaaaaggacatggctacgtttgttcataaaaaaaggaaacaagaaaagaaaaaaaaaaaaagcggcc

SEQ ID NO: 1108 - DNA, 1121 bp, Zea mays
  Clone ID: PAT_MRT4577_141718C.1
aacatatcaagctcagagcctcagagcgccagccaagtcttgcggtcgcgaagagcaacgcaacaagatggtgaagctcgcattcggaagcgtcggcgactccttcagcgtcacctccatcaaggcctacgtggcggagttcatcgccaccctcctcttcgtcttcgccggcgtgggttccgccatcgccttcgggcaactgacgaatggcggcgcgctggaccctgcgggactggtggcgatcgcggtggcgcacgcgctggccctcttcgtgggcgtctccgtggccgcgaacacctccggcggccacctgaaccccgccgtgacgttcggcctggccgtgggcggccacatcaccgtcctcaccggcctcttctactgggtggcccagctgctgggcgcgtccgtggcgtgcctgctcctcaggttcgtgacccacggcaaggccatcccgacccacggcgtctccggcggcaccaccgagctggagggcgtcgtgttcgagatcgtcatcaccttcgcgctcgtctacaccgtgtacgccaccgccgccgaccccaagaagggctccctcggcaccatcgcgcccatcgccatcggcttcatcgtcggcgccaacatcctcgccgcggggcccttcagcggcggctccatgaaccccgcccgctccttcggccccgccgtcgccgcggccgacttcgccggcaactgggtctactgggtcggcccgctcatcggcggcggactcgctggcctcgtctacggcgacgtcttcatcggcggctcctaccagcaggtcgccgaccaggactacgcctaagtagtgtgctccgttcgtctggattcagctcatccaacgcaggcgcgcgtttcgatcggcgtcgtcatttgctttgctcttcatttcatcacgttatgtaacgtgccaatgatgtgtgtcgtcctggtctgttccattccgtccttgtattcatttcccttcttttttcggggtaaaatcgatgtaaagatctcatccgatctgccgttttcgatcgccttggagtggaaaaaaaacaggtgattttcgtttcgacttcgtttatgcatggaattcttggctccttttacggtttgtatcc

SEQ ID NO: 1109 - DNA, 209 bp, Zea mays
  Clone ID: PAT_MRT4577_141731C.1
acaaaaaaaaaactttttttcccagtttattccacagaagacgagagattttattttgcaagggggtgaacatacttgacaccctcacatgcgtgggcccccaacaacagaagcggcagcaattaattattattggttccctttcacgcccgaaaaggcgacaaacccaaataattaattggatcatcaactcatcgtacccagcaaag

SEQ ID NO: 1110 - DNA, 1232 bp, Zea mays
  Clone ID: PAT_MRT4577_141787C.1
ctcgcgttacgttgctgtcgttattgctggctgggtcgacctgacccggggatggttctgcttctgctttaccactcaatctggttgagagtcgccggcgccggcgattcctcctccaccgattcgcccggcgggagtctccgcagggctcaccgggaccgcgggtccacgatggccgccaacttctggacgtcgtcgcactgcaagcagctgctggaccccgaggacgtggacctggtgccggcggcggaccgggagcgaggcatcacgccggaagagttccgcctcatcaagatccatatgtcgttccatatctggaggctagcacagcaggttaaagttaggcaaagagttgtagctacagcaatagcttacttcaggcgtgtgtatacaaggaagagcatgtcagactatgatcctcgtttggttgcacctacttgtttgtatttggcatctaaggtggaggagagtacagtgcaagcccgacttcttgtattttatataaaaaagatgtgtggttccgatgataagtatcggtttgaaattaaggatattcttgaaatggaaatgaagctcctggaagctctcgactattatttggttgttttccatccatatcgtcctctcttacagttgttgcaggatgctggcataacagacctgacacaatttgcctggggccttgttaatgatacatacaagatggaccttatcctcatataccctccctacatgattgcactggcctgcatatacatagcgagtgttttgaaagataaggacaccacagcatggtttgaagagctccgtgttgacatgaacatagttaagaatatctctatggaaatattagacttctatgacacctacaagattgatcctcaaaggggcatccctgaggataagataagccccgtgatgaacaagttgccggcaaaggcttaactcagatttggcgagcttaggagttgtaaactagtagtaaactacatcatacttccaccatgtgtgtactcagcctgcactgtcgcttgtgacgtgttgatgaactacttgatagattcaatgcaagaaccccatggaattgtttgtgtaaaaaaaaaaaaaaaaaaaaaaatgctgctggagtttattcaagttagtagcatctgcatctattaactatttattacgattgttattccagggttcttgatatatattaatatgaaaggtgctatttgttttacccg

SEQ ID NO: 1111 - DNA, 2191 bp, Zea mays
  Clone ID: PAT_MRT4577_141944C.1
ccgggcatgtagtttttacggtgcggccccgcgaccattcgaaagatccctccaggaaagatttttcttccctcctccgacgccccagcccaccaacacactctataaagcagcccccagtcacacacagaacgcacaagcgcaagccgggcaagaaaactccgcaggccagtctgcgagttggatggccttcttcttggccctcgtgtgcatcctcgtcttcctagccatcgcctcctacgtccagtacactcgctggcagaaggggaaaggccgcttcggcggccatgggaggtctgctcccttgaagctgcctcctggctccatgggctggccttaccttggcgagaccctccagctttactcccaggaccccagcgtcttcttcgcttccaaacagaagaggtacggcgagatcttcaagacgcaccttctgggctgcccgtgcgtgatgctggcgagcccggaggcggcgcggttcgtgctggtgacgcaggcgcacctgttcaagccgacctacccgcggagcaaggagcgcatgatcgggccgtcggctctcttcttccaccagggcgactaccacctccgcctccgcaagctcgtccagggcgcgctcggccccgacgcgctgcgcgcgctcgttcctgaggtggaggccgccgtgcggtccactctcgcttcctgggacgccggccacgtcagaagcacgttccacgccatgaagacgctgtcgtttgatgtgggcatcgtgacgatcttcggcggccggctggacgagcggcgcaaggcggagctgaggaagaattactccgtcgtggagaaggggtacaactccttccccaacagcctgccggggacgctccattacaaggcgatgcaggcgcggcggcggctgcacggcgtgctgtgcgacatcatgcgggagcgtcgtggccaggcccaggcgggcaccaccggcctgctgggctgcctgatgcggtcccggggcgacgacggcgcgccgctgctgagcgacgagcagatcgccgacaacgtcatcggcgtgctgttcgcggcgcaggacacgacggccagcgcgctcacctggatcgtcaagtacctccacgaccaccccaagctcctcgaggccgtccgggcggagcaggcggcggtccgcgaggccaccggcggcgggaggcagccgctggcgtgggcgcacacgaagagcatggcgctaacgcatagggtgattttggagagcttaaggatggcgagcatcatctcgttcacgttcagggaggccgtggccgacgtggagtacaaagggttccttatccccaaggggtggaaggtgatgcctctcttcaggaacatccaccacagccctgactacttccaggatccacacaagttcgacccttctagattccaggtggcgccgcgtccgagcacgttcctgccgtttgggcacggcgtgcacgcgtgccccgggaacgagctggccaagctcgagatgctcgtcctcatccaccacctggtcaccggctacaggtgcgtccatctcctctcagatcctctccatatattccccgcttgttgtatagcttctggaccaagaatgacacatggctggctcgtcttcactagccccgctgtgctctccctcctatataaactgtgagcatggcatcgactgctataacgacagtttactgatcttacactgaggcactgattggcgtctctgcatgctttatttttaaatttgcaggtggcaaatcgttggatccagtgacgaggtcgagtacagcccgttccctgtgcccaagcacggcttgcctgtcagattatggagacaaaacaatccggtcgacagaaaggggcgtgagaccgacgacgatcatgtggagaggatattttagtttgactcttgagttaggcatgaatttaaccccaagctagctagagaagtttttttttcccctttgaaattcttctttgctcgcctcttcctcctggatcaaattacgttggaggagaagaaacggcagctttctctctttcgttttctttgcctgcttcaccgcgacgataatggtgaaaatatgtaagctacgtggacatcaatgatccacagcatcgttgatatatataatatatagagaaaattctctgcacaaaaaaaaaaaaaatatccggtatcttatttccc

SEQ ID NO: 1112 - DNA, 1960 bp, Zea mays
  Clone ID: PAT_MRT4577_141949C.1
ccgggcatgtagtttttagggtgcgaagtctccaccattcgaaagatccctccaggaaagatttttcttccctcctccgacgccccagcccaccaacacactctataaagcagccctcagtcacacacagaacgcacaagcgcaagccgggcaagaaaactccgcaggccagtctgcgagttggatggccttcttcttggccctcgtgtgcatcctcatcttgctagccatcgcctcctacgtccagtacactcgctggcaaaaggggaaaggccgcttcggcggccatgggaggtctgctcccttgaagctgcctcctggctccatgggctggccttaccttggcgagaccctccagctttactcccaggaccccagcttcttcttcgcttccaaacagaagaggtacggcgagatcttcaagacgcaccttctgggttgcccgtgcgtgatgctggcgagcccggaggcggcgcggttcgtgctggtgacgcaggcgcacctgttcaagccgacctacccgcggagcaaggagcgcatgatcgggccgtcggctctcttcttccaccagggcgactaccacctccgcctccgcaagctcgtccagggcgcgctcggccccgacgcgctgcgcgcgctcgttcctgaggtggaggccgccgtgcggtccactctcgcttcctgggacgccggccacgtcagaagcacgttccacgccatgaagacgctgtcgtttgatgtgggcatcgtgacgatcttcggcggccggctggacgagcggcgcaaggcggagctgaggaagaattactccgtcgtggagaaggggtacaactccttccccaacagcctgccggggacgctccattacaaggcgatgcaggcgcggcggcggctgcacggcgtgctgtgcgacatcatgcgggagcgtcgtggccaggcccaggcggcgggcaccggcctgctgggctgcctgatgcggtcccggggcgacgacggcgcgccgctcctgagcgacgagcagatcgccgacaacgtcatcggcgtgctgttcgcggcgcaggacacgacggccagcgcgctcacctggatcgtcaagtacctccacgaccaccccaagctgctcgaggccgtccgggcggagcaggcggcggtccgcgaggccaccggcggcgggaggcagccgctggcgtgggcgcacacgaagagcatggcgctaacgcatagggtgattttggagagcttaaggatggcgagcatcatctcgttcacgttcagggaggccgtggccgacgtggagtacaaagggttccttatccccaagggtggaaggtgatgccgctcttcaggaacatccaccacagcccggactacttccaggatccacacaagttcgacccttctagattccaggtggcgccgcgtccgagcacgttcctgccgtttgggcacggcgtgcacgcgtgccccgggaacgagctggccaagctcgagatgctcgtcctcatccaccacctggtcaccggctacaggtggcaaatcgttggatccagtgacgaggtcgagtacagcccgttccctgtgcccaagcacggcttgcctgtcagattatggagacaaaacaatccggtcgacagaaaggggcgtgagaccgacgacgatcatgtggagaggatatttttagtttgactcttgagttaggcatgaatttaaccccaagctagctagagaagttttttttcccctttgaaattcttctttgctcgcctcttcctcctggatcaaattgcgttggaggagaagaaacggcagctttctctctttcgttttctttgcctgcttcaccgctacgataatggtgaaaatatgtaagctacgtggacatcaatgatccacagcatcgttgatatatataatatatagagaaaattctctgcaaaaaaaaaaaaaaaataggccccta

SEQ ID NO: 1113 - DNA, 945 bp, Zea mays
  Clone ID: PAT_MRT4577_142197C.1
cctcgagggcctggccggaaaaaaaaaaaaaaaaaaaaaaaaaaaaaaaaaaaaaaaaaaaaaaaaaaaaaaaaaaaaagggatctcccacctcgatccctgcactgcaagcaacaaagttctactctttccacccgtccatctagctcccaagaaccaatccgtaccagcgctatatccggcggtccggcctgccatggcggcggcgggccggctctccctgcccctcgtcctgctggtcgtcctggccgtcgccggccgcgcggcggcgcaggactacgacttcttctacctcgtgctgcagtggccgggggcctactgcgacaccaagcagagctgctgctaccccaagtccggcaagccggcggcggacttcgggatccacggcctctggcccaaccgcgacgatggcacgtacccgcagaactgcagccccgacaacgccttcaacccgtcgaaggtgagcgacctaatgagcagcctccgcgccaagtggccgacgctggcgtgcccgtctaacgacgggctgcgcttctggggccacgagtgggagaagcacggcacctgcgcagccgacgtcttcgacgagcacggctacttccaggccgcgctgcgcctccgcgaccagctgggagtcctcggcgcgctcacctccgccggcgtcaagcccgacggcggctactacacgctgagccagatcaagggcgccatccgccagggcaccggcttcgagccctacgtggagtgcaaccgcgacgaggccggcaacagccagctctaccagctctacttctgcgtcgacgccgccggcgacagcttcgtcgactgccccgtcctccccagcggcaggcccttgcattctatgcaagaggataatggaatgttcattccccattcttcatttttttttgcaaataaaaggagggcgatcggtgttccatattt

SEQ ID NO: 1114 - DNA, 1178 bp, Zea mays
  Clone ID: PAT_MRT4577_142201C.1
gcacgaggtggatccacatccaccctagctgcctcccgatcccacgcccaaagcttcctataaatgcgcacccccagcccggccgggccgggatctcccacctcgatccctgcactgcaagcaacaaagttctactctgtccacccgtccatctagctcccaagaaccaacccgtaccagcgctatatccggcggtccggcctgccatggcggcggcgggccggctctccctgcccctcgtcctgctggtcgtcctggccgtcgccggccgcgcggcggcgcaggactacgacttcttctacctcgtgctgcagtggccgggggcctactgcgacaccaagcagagctgctgctaccccaagtccggcaagccggcggcggacttcgggatccacggcctctggcccaaccgcgacgatggcacgtacccgcagaactgcagccccgacaacgccttcaacccgtcgaaggtgagcgacctgctgagcagcctccgcgccaagtggccgacgctggcgtgcccgtccaacgacgggctgcgcttctggggccacgagtgggagaagcacggcacctgcgcagccgacgtcttcgacgagcacggctacttccaggccgcgctgcgcctccgcgaccagctgggagtcctcggcgcgctcacctccgccggcgtcaagcccgacggcggctactacacgctgagccagatcaagggcgccatccgccagggcaccggcttcgagccctacgtggagtgcaaccgcgacgaggccggcaacagccagctctaccagctctacttctgcgtcgacgccgccggcgacagcttcgtcgactgccccgtcctccccagcggcaggccctgtggcaaccggatcgagttcccggctttctaagctaactcactcttcacgtcagttgctgcaatatactgctagtccttttgcttgcattctatgcaagaggataatggaatgttcattccccattcttcatttttttttgcaaataaaaggagggcgatcggtgttccatatttattatgttgatcataacatgacattcagagaacaattcataagttcaaaaaaaaaataaaaaaaaaggcccctagggccaaaaaaaaaaaaaaaaaaaaaaaaaaaaaacccaataaaaaaaaaaaaaaaaaagcggcc

SEQ ID NO: 1115 - DNA, 217 bp, Zea mays
  unsure (1)..(217): unsure at all n locations
  Clone ID: PAT_MRT4577_142367C.1
cccacgcgtncgccgacgcccagaattcacgtgaacgcacacgcacccacacgacacatacaggagaggcttanggtttccccgtgcccggccgccacagtgccaacccagctctccggtgcgcccgcgacccctgctcccgtcgacagggtggcagcgccgtgcggagtcgactcgccgtccgctggcgccgtgtgcagggccgcgggcaagggga

SEQ ID NO: 1116 - DNA, 962 bp, Zea mays
  Clone ID: PAT_MRT4577_142410C.1
ataacccaaaatagtaaatgccatgtttttcttacatgaaagtcaagcgattttgtttaaaaaaaaaaaaaaaaaaaaaagccaagcaagaccagctgtcgatccaattgtcacttgctctccctccaacaagctaattaaggccggtccatccctcttctagctcgtttcattatccatggctgaggagaagcaccacccaccaccacctgttccaccacaagaaggacgaggagcaggccgcggccggcgggtacggcgagtccgccgagtacacggaggccacggtgacggaggtggtgtccacgggcgagaacgagttcgacgagtacaagaaggaggagaaggagcacaagcacaagcagcacctcggcgaggccggcgccatcgccgccggcgccttcgcactctacgagaagcacgaggcgaagaaggacccggagcacgcgcaccgccacaagatcgaggaggaggtcgcggcggcggcggccgtcggctccggcggcttcgccttccacgagcaccacgagaagaagaaggaccacaaggaggccgaggaggccggcggcgagaagaagcaccacttcttcggctagctgattgatcctcccatatcgatcgtcgtccctccccgtttgctacgcgtgcgtgtgagagtgatatcgagcgccggccggcctgcacgcccgccgtgttgtgcgtacgtacgtacgtatacatgtatgtatgtatatgcgcgcgtgtgatgcacgaataagcgtggctacgtaatctatcgtatgtatacgtgtgtgtatatatgcatgtgcccgtgtatgatcttgctacgacgaccgaaaaaaatgtatgcaactctgatttgcttatatgtttacgtctgtccaaaagtattagtcccaattatattatattgattattaaaccaaaaaaaaaaaaaaaaaaaaaaaaagtcgacgcggccg

SEQ ID NO: 1117 - DNA, 805 bp, Zea mays
  Clone ID: PAT_MRT4577_142413C.1
gacaagcaagaacagctgtcgatccaattgtcacttgctctccctccaacaagctaattaaggccggtcgtcatccctcttctagctcgttttattatccatggcggaggagaagcaccaccaccaccacctgttccaccataagaaggacgaggagcaggaggagcagctcgccggcggcgggtacggcgagtccgccgagtacacggaggccacggtgacggaggtggtgtccacgggcgagaacgagtacgacgagtacaagaaggaggagaagcagcataagcacaagcagcacctcggcgaggccggcgccatcgccgccggcgccttcgcactctacgagaagcacgaggcaaagaaggacccggagcacgcgcaccgccacaagatcgaggaggaggtcgcggcggcggcggccgtcggctccggcggcttcgccttccacgagcaccacgagaagaagaaggaccacaaggacgccgaggaggccggcggcgagaagaagcaccacttcttcggctgattgatccctcccgtatcgtcgtccctccccgtgtgctacgcgtgcgtgtgtgagagtgatatcgagcgcccgccgtgttgtgcgcgcgtacgtatgtatgcgctcgtgtgatgcacgaataagcgtggctacgtaatctatcgtatgtatacgtgtgtgtatgcatgtgcttgtgtatgatcgtggtacgaggaccgaaaaaatgtatgcaactctgatttacttacatgtttagttgtttacgtttctccagaaaaaaaaaaaaaaaaaaggccccta

SEQ ID NO: 1118 - DNA, 2113 bp, Zea mays
  Clone ID: PAT_MRT4577_142415C.1
gaattactaaataaaaaaagttggcccctctgctgtatcccttcccctatctgcagcagagcagttcctttcttgctctcctccgctagtccggtaccctcgacctcggcgtcccaccgaagacgacctcacgcggagctgggaatattccttcgcctccgtgctccctttagcaccaactgtcacggccgcttccagcacgcatcattctcgtctcccgtctcgagagattgcagggggcggcgctcgaagctggaggaagcggacgggttcgcgatggggtccgagggatcctcgggtccggtcgtcgttcccagaaactttaggctgctagaagaactagaacgtggtgagaagggcattggtgatggaactgtgagctatgggatggatgatgctgatgacatatatatgcggtcctggacaggaactataattggtcctcccaatactgttcacgagggacgaatctaccaattaaagctgttttgtgatacggattatccagataaaccaccgacagtccgattccagactcggatcaatatgacatgcgtgaaccaagaaactggattggttgaaccaagtctatttcctatgcttggcaagtgggaaagggaacatacaatggaggacatcctggccagcttaaaaagggagatgtcaactcctcagaaccgcaggctgtaccaacctcatgaaggtaacgaagatcaaagagtagagcagaaagggctgtcccttagatgtgtcgtcatgtaataatgtacatttgaattgagcagcgagatgccgagcttgagcgaaccctcttagggcatgtttaggaacaatcccctccaattcccttgctttcaaagaagccctgtaggaaccctcctgtagctcaccttaatcatgccgccatcgcaataaagtgtcgatgactgttaaattgcctgcacggctgcacaccatgtaacagcaaccgattcgattttctgtgaaggacaacgtgttcagtgtcggctgttccacaaaaaaaaaaaaaaaagctgtcgatccaattgtcacttgctctccctccaacaagctaattaaggccggtcatccctcttctagctcgtttcattatccatggcggaggagaagcaccaccaccaccacctgttccaccacaagaaggacgaggagcaggaggagcagctcgccggcggcgggtacggcgagtccgccgagtacacggaggccacggtgacggaggtcgtgtccacgggcgagaacgagtacgacgagtacaagaaggaggagaagcagcacaagcacaagcagcacctcggcgaggccggcgccatcgccgccggcgccttcgcactctacgagaagcacgaggcaaagaaggacccggagcacgcgcaccgccacaagatcgaggaggaggtcgcggcggcggcggccgtcggctccggcggcttcgccttccacgagcaccacgagaagaagaaggaccacaaggacgccgaggaggccggcggcgagaagaagcaccacttcttcggctgattgatccctcccgtatcgtcgtccctccccgtgtgctacgcgtgcgtgtgtgagagtgatatcgagcgcccgccgtgttgtgcgcgcgtacgtatgtatgcgctcgtgtgatgcacgaataagcgtggctacgtaatctatcgtatgtatacgtgtgtgtatgcatgtgcttgtgtatgatcgtggtacgaggaccgaaaaaatgtatgcaactctgatttacttacatgtttagttgtttacgtttctccaaaagtattagtacccattatgttatattttactatattatattttattgattattaaaaaaaaaaaaaaaagggcggcagctcgcgatctagaactaggacgcccgtcacctccagcccgctcatcgcgtggtacctctccaacctgccggcctaccgcaccgccgtgagcccgctgctgcggggcgtcgaggtcggcctcgcccacggctacctcctcgtcgggcccttcgcgctcaccggcccgctccgcaacacgcccgtgcacggccaggcgggcgcgctcggcgccgccggcctcgtcgccatcctcagcgtct

SEQ ID NO: 1119 - DNA, 1709 bp, Zea mays
  Clone ID: PAT_MRT4577_142418C.1
gaaaaaaaaagaccagctgtcgatccaattgtcacttgctctgcctccaacatgctaattaaggccggtcatccctcttctagctcgtttcattattcatggcgtgatgagaagcaccaccaccaccacctgttccaccacaagaaggacgaggagcagctcgccgccggcgggtacggcgagtccgccgagtacacggaggccaccgcgacggaggtggtgtccacgggcgagaacgagtacgacgagtacaagaaggaggagaaggagcacaagcacaagcagcacctcggcgaggccggcgccatcgccgccggcgccttcgcactctacgagaagcacgaggcgaagaaggacccggagcacgcgcaccgccacaagatcgaggaggaggtcgcggcggcggcggccgtcggctccggcggcttcgccttccacgagcaccacgagaagaagaaggaccacaaggaggccgaggaggccggcggcgagaagaagcaccacttcttcggctgattgatcctcccgtatcgtcgtccctccccgtgtgctacgcgtgcgtgtgagagtgatatcgagcgcccgccgtgttgtgcgcgcgtacgtatgtatgcgctcgtgtgatgcacgaataagcgtggctacgtaatctatcgtatgtatacgtgtgtgtatgcatgtgcttgtgtatgatcgtggtacgaggaccgaaaaaatgtatgcaactctgatttacttacatgtttagttgttaaaaaaaaaaaaaaaaagcaagaacagctgtcgatccaattgtcacttgctctccctccaacaagctaattaaggccggtcatccctcttctagctcgtttcattatccatggcggaggagaagcaccaccaccaccacctgttccaccacaagaaggacgaggagcagctcgccgccggcgggtacggcgagtccgccgagtacacggaggccacggtgacggaggtggtgtccacgggcgagaacgagtacgacgagtacaagaaggaggagaaggagcacaagcacaagcagcacctcggcgaggccggcgccatcgccgccggcgccttcgcactctacgagaagcacgaggcgaagaaggacccggagcacgcgcaccgccacaagatcgaggaggaggtcgcggcggcggcggccgtcggctccggcggcttcgccttccacgagcaccacgagaagaagaaggaccacaaggaggccgaggaggccggcggcgagaagaagcaccacttcttcggctgattgatcctcccgtatcgtcgtccctccccgtgtgctacgcgtgcgtgtgagagtgatatcgagcgcccgccgtgttgtgcgcgcgtacgtatgtatgcgctcgtgtgatgcacgaataagcgtggctacgtaatctatcgtatgtatacgtgtgtgtatgcatgtgcttgtgtatgatcgtggtacgaggaccgaaaaaatgtatgcaactctgatttacttacatgtttagttgtttacgtttctccaaaagtattagtacccattatgttatattttactatattatattttattgattattaactatgtatggatgaaatactatttcaagctggtagctagaccgagataaaactcgtccgtgttttttaacgggtgtattattttttccaagttaaatattgtttgcgaaaaaaaaaaaaaaaaa

SEQ ID NO: 1120 - DNA, 2589 bp, Zea mays
  Clone ID: PAT_MRT4577_142494C.1
cctcacgtccgcccactcgtacgagcacagggggtgtaacttagagagtgtgggatttacatgtagttgatcctatgtaaatacgcctaaggatggaggaggtgaacaagttaccaattggatcttttgtccacgcaccttaatttgcatgcacaagtctaaatggacttatataagtctatggaagagtatctactgtcaaattccgttataggcgaaaccgcaaaacaaactacagtactgcacaattgtggttatcttatcaacatggacctcgagccggcgatcgacctcacttcccgttaacttaccctattacctttctgctcgtggtgagtgctgacaccacctcacgcacgcaagccgccggcggcgaccagaccgaccacctcgcgcactagccttgctcgcttctcgtcgccggctcgttgccggctcgtcggcacgatgtcgtcggagcctccacccgccccttctgccgccgccgcagagggactggctgctgacctttccgccgccaccctcagcaagaagcagcagaagaaggacgccaggaaggcggagaaggctgagaaggcggcgcagcgccagcaacagcagcagccggccgacgccgaggacccatttgcggccaactacggtgatgtccccgtcgaggagatccagtcaaaagccatttccggccgcttgtggtcccagatcggcgacctcgacgactcctctgcggggcgctctgtgcttatccgtggatccctgcaggctatccgcccggtcagcaagaagatggctttcgtcgtgctgcgccagagcatgagcaccgtgcagtgcgtgctcgttgccagcgccgacgccggcgtcagcacgcaaatggtgcgcttcgccaccgccttaagcaaggagtccatcgtcgacgttgagggcgtcgtgtccctccccaaggagcccctcaaggccaccacgcagcaagttgagattcaagtcaggaagatctattgcatcaatagggctatcccaacccttccaattaaccttgaagatgcagctcggagtgaggcagattttgagaaggctgaactggctggagaaaagcttgttcgtgttggtcaagatacccgcttgaactacagagctattgatctacgaacaccctcgaatcaagccatattccggatccagtgtcaagttgaaaacaaattcagagattttttgttgtcaaaggactttgttgggatccacacgccaaaattgatttctggatctagtgaagggggtgcagctgtattcaagcttctgtacaatggtcaacctgcttgtttggcacaatcccctcagttgtacaagcaaatggctatctctggtggttttgagcgagtatttgaggtcggccctgtgtttagagcagaaaattcaaacacacacaggcatctatgtgagttcgttggtcttgatgctgaaatggagattaaggagcattattttgaggtctgtgacattatagatggcttattcgtatcaatatttaaacacttgtctgaaaactgcaagaaagaactcgaatcaataaacaggcagtatccatttgaacctctgaagtatctagacaaaaccttgaagctcacttatgaagaaggaattcaaatgttgaaggaagccggaacagaaatcgagcctatgggtgacctcaataccgaagctgagaaaaaacttggtcggcttgtcagggaaaagtatgacacagattttttcatcctgtatcggtatcctttggctgtacgtccgttctacaccatgccttgttatgacaacccagcgtacaccaattcttttgatgtcttcattcgaggcgaggagataatatctggagcacaaaggatacacactcctgagctgctggccaagcgtgcaacagagtgtggaatcgatgtcagcactatctcggcctacattgaagtcttcagctatggcgcgcctccgcatggtggtttcggggtgggtttggagagggtggtgatgctgttctgcgccctaaacaacatcaggaagacctccatgttccctcgcgacccgcagaggcttgtgccgtaatttactgagtccaatgccctgagtttgcagcagagcgtactggttgttttgatgttctttgagcatcgaacatcgctaacttgcaatctcagctactgaagccccggttaccgtggttcagagttcctgttaaattcacaaagctacttgtatctattagattgctgaaaccagcaagtacgatcctttttgggatttgatctggtctaattgttgttaagtggaggtattgctctcagtttttttgtgctctgtttgtcggcatatgccaagagctagggcttcttaagttctaagtttttagacgagtggattccttttttttaagagccggcaaaagttctgccctgcacctgttaaaaatagatattaccctgttccaattctaaataatatgacgtgtcgccttctagatatttaaaatataaaaaaaaagtacaatatgtctagatacagatagtaaagtaatgtatgtctttataaagagagaagaattgtgctgcg

SEQ ID NO: 1121 - DNA, 2237 bp, Zea mays
  Clone ID: PAT_MRT4577_142527C.1
ggacctcagcggcgggtggatatgttctacttgtaaaaaaaaaaaaaaagccaaaaaaaaatttcgggactgttcctcattcacgtgtctcctcccctcccctcccctcccctccccttcccccatgacctgtccgtctcaatctccctcttccccgcaccaaatcgaagctacccctgttcctctgcgatttgggctcgtcctgtgtccttcctgttgctcaaaagctcgctcattcgatgtccctgtctgaaaggcgacaaatcccactggaattcggagcacagagctttgaatccaggggccaaaactttttgctcatctcccttgcggaaaagcgcctcctctgcgtctgaaagtcggatcttttttcacagattcgatttgaagttcccgagcaggtcgaggaccgcggtgtcggtaagacttgctttgaagatcttgatcaccacaagagatttgctgaatttccggtcactgtactttttccactggacatgtcctttcgcagcatagtccgtgatgttagggaaagctttggtagcttatcaagacggagccttgaggtcaggatttctggtttgcctggtctgtctggtggtcatcatagagggaaatctgttggatctgtgagtgacctgcgcgacagacctgtagtagttgatcaaagcaggtgggttgggtcttcctcctgaattgcttcgagatgtaatgagaaggcttgaggaaggtgagagcaatttggccatcccggaaaaatggtgttgcctgtgcagccgtctgtggaacatggagagagatatgcaaggatatagtgctgagcccggagttctgcgggaagctcacttttccagtatcacttaaacagccgggaccaagaaatggaataatccagtgtttcataaaaagggacaaatcgacatcaacttattatctttacctatgtcttagccctgttgtcctcagcgaggatgggaagtttctgctagcagctaagaggaatcgccgtacaacatatactgagtacatcatttctgtggatcctaaaagtatatcacgatcaagtgatggctgtgttggaaaaatgaggtcaaattttcttggcactaaattcatcgtgcatgacactcgagcaccacacaatgctgggagccttgtctcctgtgagcgcggcagccgcagaatctcctctaggagggtttcccccaaggtacccactgccagctaccccattgcccgggtgaactatgagctaaacctgcttggcacaagggggcccaggcgtatgaattgcacgatgcattccatcccagcctcaacgctggaccctcaaggcatggtgcctgagcctggccaacccaagcagatcttcgtccctggctcgtcgtccttcgaagattcctttcgcagtgcaaacaacaccccttccagctcaaggttctcggtcgcagaccgctccttggattggagctcctctcgattctcagagacgagcggattggctcagcaggacgacgatgacagtgaccaggctaaggagaggcctttggttctctgcaacaaggagccaaggtggcacgagcagctgcagtgttggtgcctcaacttccatggtcgggtgaccgtggcttctgtgaagaacttccagttgatagctgcaccacaactagattctgaaccgtcacagcaagctcagcagcaaacccagccttcgaattcgtcttcagcatcggatcatgacaaagtgatcctgcagtttggtaaggtcgccaatgacatgttcactatggactaccgatacccactctcggcattccaggccttcgccatctgtttgaccagcttcgacagcaagctggcttgtgaataaattgtacataaagaacaggaatacatgtagattgtatctctgcagtaagtatttacagtgtgtgtgctggtgtagtttattgccgcgttgattcagtcctttgttggctttagtctaaggtcactagaccggttataccactgttttgcaatgtagactaccaaaatggagtttaaaatgaaagttaaagatagaaaagctgatgaccctagcccgcttagtgtgacttgtcaaaagctcaaagctaagaatcggcactaattatgacttatgagctgcagttgtgtatcacttttatgtctgtaacttggtaacacgaattaacggcactaaaaatcacttttcagccaaaaaaaaaaaaaaaaaa

SEQ ID NO: 1122 - DNA, 1814 bp, Zea mays
  unsure (1)..(1814): unsure at all n locations
  Clone ID: PAT_MRT4577_142569C.1
ttggggaccctcgggctcgccgggcgaatctcggggatccggcactcgcctcccttttccctttccgcgcccatcaccattgccacaaatagcaaccaaggcagtaagcctagccaagccaaccgacggcggcgagagtatatatacacacacacctgacgcctctgctgctgctgggatcaacgcggcagcttagtgacgacgacgactcttctgtctctgcgttgattaatggacagtaacagatccatggcgacgagcggcgtggctccgttcgtggccaagacgtaccgcatggtggatgacccggcgaccgacggcgtggtcgcgtggggcagggacaacaacagcttcgtcgtggccgaccccttcgccttctcgcagacgctcctgcccgcgcacttcaagcactccaacttctccagcttcgtgcgccagctcaacacctacggcttccggaaggtcgatccggaccggtgggagttcgcgcacgtgtccttccttcgcggccagacgcatctcctgggccagatcgtccgccggagcagcggcggcaagcgcaaggacgacggcaacggcgccggcgccggctccgccgacgacgaggacgcggtggccatggaggtggtccggctgaggcgggagcagcgggccatcgaggagcaggtggccgcgatgtggcgccgcgtgcaggagacggagcgccggcccaagcagatgctcgcgttcctcgtcaaggtcgcgggcgacccgcaggtgctgcgccgcctcgtctccggcgccgggggcgacgccgtgttcgccgccgcggagccggaggacggcgcgagcatcaagagggcgcggctgcttctcgatgccggaagcggcggcgacggcgccgtcgacttcagcgggctctatagcacaaccgccggaagcgaagacgacggcgtcgggttcggcagcgattacctgcagccgccaccgccgtacgtgttccccgtcaacagcggcggctactgactgatggcggtctggtagtccagcatctatccgagcgatgtggcgtgcttcgtcgtcgttagttgcccctcccgagtgacgtgttggactgaagtggcaacggcgccgacggacggtgagcaaccaacccaagataattagctaggaggtggtacaaagtgtaaagcctttggtttaggcaggtctgcggtgatctttaatttgcttgttgcaatgttttccttccctaccttgtcaagtgaatgctacggatcagcggcggcaaaagccgttagctgcagctagtttgccgctgctcttcatacagctgcacgccgttaaaacacatctcctttgcactggctgtcttattttttagttgttgagctggtgtaagcaaccagaaaagcttgacagatagctgacaacgtgtgtgatacctggggggggggcccggatcccttttcggctttttgagagtcttatatctgctctgggggggggggttgttccccgtttctctgttttgattctttataaaaaaaaataaaaancccacaaattatcactcacccgcctnatnatataggtcttgtaaccaccccacaccctttttttttcttttcgctgccctttttttctcctggtcgcaattttttgtaggctccttcgattcgtgngccataccctttgcgtttggccttttttctgcccgatgttttttgttatattcccccccccgcgtccctatccgcgaatttnctctcttctcgcgatgagaaccctgtatcccccgtaatttcttaaaattccataactaaaatgattaa

SEQ ID NO: 1123 - DNA, 317 bp, Zea mays
  Clone ID: PAT_MRT4577_142585C.1
tcgcgactatttttttttttttttttttttttttttttttttttttttttttttttttttttttttttttttttttgggcggcccaaaccatttttggttggttttcccctttctccattcgtttttccatcatcaacatgtttggttgtgctgggctcacttcaaaattttgggattttacaaacaaaggggggggcgttttttacagcacaagaattggcgcccaccgggcgcgggggcacacacacgaacacaaccggttcagccttcaatgcaaaattgggattcccattgagcatggaaacgggcgcacttt

SEQ ID NO: 1124 - DNA, 353 bp, Zea mays
  Clone ID: PAT_MRT4577_142684C.1
gtcacacacacacacactgacatgtggtttccaaagccaagtgtgtgtactagctaccagctagctcgttcggcatctaggagccatcatgtcggaagagaagcaccaccacttcttcaacctccacaagatagtcgtggagcagcccgccgacgagtacggatacttcgagaccgatgtggtcaccgtcaccgactatggcgagtgcgagaggcacatgaaggaggtgtaggagcacattctcaagcagcacctcattgtggccggcgccatctgcagtcgtcgcctttggactctacaagtagcacgaggcgaaaaaagacccggagcacgcgcacaggctcatgatcacg

SEQ ID NO: 1125 - DNA, 1458 bp, Zea mays
  Clone ID: PAT_MRT4577_142686C.1
cccacgcgtccgacaccctgccaccaacgacaggttaccttcttcgggcccttctcaccatttcctcatttagaagccccctgtgccttgctcctcggtgtttcctccagatagtagtgtttcctcagtggactagtgtgaagctgtgcttagcgtagcggaagggaggaaggacaaggcaaggcaactgatggcggcgggcggcggaggcggctcggcggcgccgttcgtgtggaagacgtacacgatggtggaggaccccgggacggcaggggtgatcggctggggcagcggcaacaacagcttcgtcgtcgccgaccccttcgtcttctcgcagacgctgctccccgcgcacttcaagcacaacaacttctccagcttcgtccgccagctcaacacctatggcttccgcaaggttgatccggaccggtgggagttcgcccacgcgtcgttcctgcgcggccagacgcacctcctgcgcaacatcgtccgccgcggcagcagcgccgccggtgccggaggcggaaagaggaaggacgccagccccacggagctggcctccggggacgacatgaccatggtggccacggaggtggtgcgcctcaagcaagagcagcgcgccatcgacgaccgcgtcgcctccatgtggcgccgcgtgcaggagacggagcgcaggcccaagcagatgctcgcgttcctcctcaaggtcgtcggcgaccgcgacaggctgcaccgcctcgtcggcgacgcccccgtgccagataacgggttcgcctccggcggtgccgccgagccgcccgccgcggaggtcggcgagaagcgggccaggctgctgctcgacggtgacagcatggtggcgctcggtcccgaggccgtcgacttcgccgggttctacagcggcggcggtgcgttcggcgatgttgccgtggatgctgccgctgggtcccgcggaggcgggttctcgtttgcgttcggcgtggacgcggggtactgaatgacgagcaggcgccgccattgtcagcagcttggcccgcttatgctgctgtcgagcttcctgccaatgccattgcgctgagcggcggcagccgtcacatggaagcatggcaggggatggatgataatgatgttaagttctatccctggctccctgctacatggataggatgtgtgtctgatgctgcttttcgtggatctatatgggcggggagcgactactgcgtcgagatctaaaaataaggggatatactgtcatggagtgtgaccttcgaagttcccaatatgagtaggtttgatgttgtacatgaccagtgcagcagcactaatatttcaatctcctgcggatacgcagctggaaaattggcatcgctattatttagcccttttctacacacttagctttagaaaaaaaaaaaaaaaaaaaaaaaaaaaaaaaaaaactcgaggggggggcccgggtac

SEQ ID NO: 1126 - DNA, 566 bp, Zea mays
  Clone ID: PAT_MRT4577_142744C.1
aggcaaaagttttccgaccacagacagcgcgcgcttcaaggacttttttttgtgagatagcgaggattagaggaggagatggcggtcacgatcgcgtgggtgagaggcgaggcaaaccttcgacagccgggggaaccccaccgccgagggggacgtgggccttagggacagcggctacgcgaggggggccggacccaggggggcatcgactgcaatatatgaggccttgaagctgaggaatgcaggatctgattatctggccaagggggctcttaagggtgccagcatgggaaataacattatgggaccaatatttgttgccaacccccccactgagcaggtggagattgacgacttcatgggccaccaggttgatggaacctccaatgagcggcggctggtgggaacaaaactttggaccaaatgacatccttgcggtttcgcttgctgggtggagagctgggagctatggtgaagaaaattcctcttgaccagaacatcgaaggtcttggtggcgaacgaaactctgggggtccctgtacctgcctttaaagtgatcaaggaag

SEQ ID NO: 1127 - DNA, 493 bp, Zea mays
  Clone ID: PAT_MRT4577_143055C.1
ttgggaccctcgaggccggccgggtttggaatgaccctgcaaagtacaagatctcagacaacagacggcatgttgctattgtcaccacagcaagccttccatggatgacaggaacagcaatcaatccattgtttcgtgctgcatatctggcaagaagtgcaaagcaaaaggtgacattggtggtcccatggctctctaagtcagatcaagaattggtttacccaaataacatcaccttcagttcgccagaagagcaagaaacttatataaggaactggctgcaggaaagaataggctttgaagcaaactttaagatatccttttatcctggcaagttctcaaaagagcgccgcagcattattcctgctggggatacttcacagttcatctcctcaaaagaagctgatatagcgattttagaagaaccggagcatctcaactggtatcatcatgggaagcgttggactgataagttcaatcatgtcatcggtgt

SEQ ID NO: 1128 - DNA, 1540 bp, Zea mays
  Clone ID: PAT_MRT4577_143184C.1
gcacgagatctgcttctccagtctccacacaacacaacagagcagaaggcagcacgggcgctgatggcgatgggggaggcgctgcgggcggctgccgctgacgcggtggtgacattcctgtgggtgctgtgcgtctccacgctgggggcctcgacgacggcggtgacgtcctacctgaggctgcagggcgtccacttcgcgctcctggtcaccgtctccctcctctccgtcctcctcttcgtcttcaatatcctttgcgacgcactcggcggcgctagcttcaaccccggccgggtcgtcccgtactccactgctccgtctcccggcctctcgcctctcggcctctccatcgttcgacctcgcgacgcgtcaagtaggggggcggcggccttcgcggagatgaccaccttcctgatcaccggaggcgatttcccgcgacactcctcccccctccccgtgctctgctagacagatagatccgggctcttccttgatttgttcggtgaggacatcatgtggagttttgcatcaaatgccatagctggaagcttaaagaaaaaagcacaaccctcaaaatgcagcatatccaatgcagattattctgatgatgaagtttcttcatgtacaagcagagaggaaggccttgattgtccaatatgctgggaatccttcaacctcgtggagaatgttccctatgtcttgtggtgtggccacacaatgtgcaaaaactgcatccttggtcttcactgggcagttgtcaagttcccgtcccttcctatccagctgcctttgttcatctcatgcccctggtgcaacctgctgtctttccgcctggtttacaagggcaacctcaggttcccacgcaagaactactttctgctctggatggtcgagagcatgaacggtgggagagcaaaattccattccactaaccatgacgagcatcattccacgtggcattcaagtgccggcacaagctccagccatcaacagcgaagaaatgctgctgtaggatcagagagctcttctggcagagagacaggcgtaggccgcaacattttccacaccgacaacattagtgcttctctgcaaaagcttatggtgtgcttcatgcagctgacggccaagttcccactcgtgataatctttctgctgatagtcctttatgctgtccctgcaagtgctgctgttctggttctctacgcccttgtcacgtttttgtttgcactgccctcatttttgatcctctactttgcctaccccagcttggattggcttgtcagagagatcttcgcttaattcgtgctgtctgaaatgtccgcgcagtttgtatccctgcgacaaatgatatatattggtatatgtattccatgggccacctgccctcgtaggccctgtatagtttcttcttattctctgtccttgtagcactctatttctgttgtaactaacagcttattaaaaatgctctgcaatgcttttatttgtggttcaaaaaaaaaaaaaaaaaaactcgagggggggcccggtacccaattcg

SEQ ID NO: 1129 - DNA, 662 bp, Zea mays
  Clone ID: PAT_MRT4577_143214C.1
gttcgttcttctccctcactcacgttccatttcccactctcccagatccaattcgtgagttctccctcctctgccgacatgctgctctctgtggacaatacctcggctggacgacagcacgaggtcaaggatctctcgcaagagcacttcggccgcctcgagattgagatgcgcgaggtcgaaatggccgtgctcatggcgtgccgcgccgagtgcggcccgtacaagcccttcgccgacgctaggatctcgggatctctccacatgaccatccattaccggcgacctcatctagaccctcaccgcgcctcggcgtcgaggtcctgatggtgctcctgctgcatctctctccacgcgaggaaccagcgccgtcagccgccatctctgcgagactcagccgccgagctcggctgaaaaggatagaccctcgaggagtactggtggtgcacagagcgctgcctcgactagtgcgagctgtgcctcccgacctcatcgaagacgacggacaactacgccacgctgctcatccacgatcgtgtccagggcgaggaggactacaacaagatcggcaagatccccgatccggagtccaccgacgacgctgagatcaagatcgagatcaccatcatccgcgactgtgtcaaggttgaccccaagaacta

SEQ ID NO: 1130 - DNA, 2816 bp, Zea mays
  Clone ID: PAT_MRT4577_143224C.1
cattgggtacctcgaggccggccgggatccctcgaaggaacaaccccaggacgccttggcatcccccctgcttcgacacttcgacaaacattgtgttagccgatgtcactctgcttttagccttttgccaagtgccaacaaccaggtcgaaaggacatctgaccggcagcaggcagacatccgtcgtccgccatggagtcctcatggctcctcctgctctcgtgccttccggccgtatgggtgcttgccgcggcggcggggcggagtcccggctgcgcgacgaggtgcggcgagatcgacgtcccgtacccgttcggcctggacccgcagtgcgcgatccacgccggcttttggctcaactgcaccaccgtggatggcgccaccaagctgctcgacaagaactcggaggtgaccaagatctccgtggaggatggcaaggcctggttcaagaacttcatctcccggcagtgctacaaccaatcctcgggtgacatgttcgaaaacaacgcgtgggtcgactataccggcgagccctacgttctgtcggcagaggataataagatcatcgtcctcgggtgcaatagtatggcctacatgcagagcgactcttacataatcggctgcatgtcgacatgcgacgacccactgaagaacggctcatgctccggcaccgctggctgctgccaggcggagctcccgccgggcgtccagttttaccaaggcttcttcaactcgctgcacaacaccaccaagatatggaagcaaacaccctgcaactacatcaccgtgatggagagtgcggccttcagcttcagctccacctacctcaactcgacggtgttgtacgactccgacgacgggaggacgccggtcgtgatggagtggggaatcacacggcagacgtgcgaagaagccaaagccaacaagactgcgtacgcgtgtgtcagcaaccatagcgactgcgtctacagcgatgccgccggctaccgctgcaggtgctccggcggattcaaaggcaacccgtacgtcgtagatggatgcgcaggttcgttcctcttgcgcgcccagacatccaaatccatgcatgcacaagttacaaaccgatgcgattttttcgtgcggttttcagatattgacgagtgcttggacagtgctacctacccctgcgctgggatatgcaaaaacacactcgggaatttcacatgttcgtgcccacgaggaagaagcatgatcaatggcgtttgcgtgaaaagtcagaggtcaacttggatggtgccggttgttggtaggtcgctgcacaagttgcgtacttgcgttaggaaaattccctgccgggagcatctgttttttttccctacactttttcaatgctttccgggtgtttacagaaggagtaataagtaaccttcgttaggaaaatcgtgatgcattgcaggcgcaagtgttgggctggtgactctcgtgatcggcgttacctgcgcatacctggtccgagaacggcgaaagctgcaccgcgtcaagcagagctacttccggcggcacggcggcctgctcctgttcgaggaactgaagtcgcagcaccaccagcagggcgccgccgcgttcacgatcttctccgaggaagagctgcagcaggccacggacaggttcgacgcgcagcgggtccttggccacgggggccacgggaccgtgtacaagggagtgctgaagagcggcaccgccaccgagatagccgtgaagagatgcatgaccatcgacgagcagcagaagaaagagttcggcaaggagatgctcatcctgtcccaggtcaaccacaggaacatcgtgaagctcctcggctgctgcctcgaggtggaagtccccattctcgtctacgagttcgtcccgaacggcacgctgttcgacctcatccacggcgaccacggccagcgcgtctcgctggacacccgcctcaggatcgcctacgagtccgccgaggcgctggcctacctccactcctgcgcgtccccgccgatcctccacggcgacgtcaagtccaccaacatcctcctagacggcgactacgcggccaaggtctccgacttcggcgcgtccattctggcgccgaacgacaagtcgcagttcgtcaccgttgtgcaaggcacgtgcgggtaccttgacccggagtacatgcagacgtacgagttgacggacaagagcgatgtgtacagctttggggtcgttctcctggagctgctcacgggcaagaaggcgttcgacctccaagggtctgagcaggacaggagtctctccatgaggttcttgtacgcgatgaaggagaacaggcttgaggacatcctagacgatcagatcaagaacagtgagagcatcgagtaccttgaggagatcgcagagctggcgagacagtgcttagagatgagtggtgtgaataggccgacgatgaaggaggttgcagataagcttggtaggttgaggaagatcatgaagcatccatgggcacatgaggatcctgaagaattggacaggttgcttggagagccgtctactacaactaactcgaccgctactactgggaatttcatcattgcaattggagagccgtctacagccaactccaccgctaacactgggaatttcagcattacaaagagagctgccatgggcttggaatcaggacgttagctactgtaaatgaaattatatttacctcattccatatgtatataacagatagagactgtacattttcttggcggtacaattccagttttacattaccaacatgaataaaacaaagacgcaaagctttctctgag

SEQ ID NO: 1131 - DNA, 311 bp, Zea mays
  Clone ID: PAT_MRT4577_143334C.1
tgtggtgctataagccacacgacaagttactaggatggtgcgaggagcagaaagcctacagtgtcatggctttaggcgattagaatcatttttacatgaggaacatttgttgatctttttgccccaccacaagccagtcaaagtatacgttttgcgctggtcttggggaggtcagggtcatatgcattttcccccaatgttagaacagaatgtccttaccatcttttggtactctgactatctggcctcactctatcaagttcccaagaaccaggcatcttaaagaaagaaatgctgcgttttaatgacaa

SEQ ID NO: 1132 - DNA, 2230 bp, Zea mays
  unsure (1)..(2230): unsure at all n locations
  Clone ID: PAT_MRT4577_143406C.1
cgggntcagaaggtcggcacgatggagcactcttctagtttagaaattagaatagaggcgctgaggcctcacccacccttttccctggcgttgcaagttgcaacacacagcgtccggcgagatcggcgatcagaaaccacgagcccacccaccatccggaacgcgcgcgcgatgtgtcccgtcagaggcggtggttgttcttggccagcgtccgtcgtcggctctgtcacggcggcgctgctcctcgccgccgtcatcgtgcggctcttcgtccccagtgcctgttcttcaggaattatcaaggggcggcggcaggtaggtgctggtgctgccggaggagcacggctccctgccggctcgctcgggtggccgctcctcggcgagacgctggcgttcatccgggccgcgtactcgcctcgcccggagtccttcgtcgagaaacgccgcgtcttgtacgggaaggtgttcaagtcgcacctgtgggggtcgccggcggtggtgagctcggacccggaggtgagccgcgcggtgctgcaggccgacgcgtcggcgttcgttccatggtacccgcgatcgctcatggagctgatggggcaatcgtccatcctagtgctcggcggcggcctccagcgccgggtgcacggcctcgcgggcgccttcttcaagtcgccgcagctcaaggcgcaggtcaccctggacatgcagcgccgcgtcggccgcgccatggacatgtggggcaggcggcgccatcggagcatgggcgacgacgacagcggtggtatgcccgtgcgtgtgcagaacgaggccaagtcgattgtgttcgaaatcctagtgagggcgctgatagggttagaggaaggggacaagatgcagtacctcaggcaacagtttcaagaattcattgccggtttgatatcacttccggttaagcttccggggactcaactctatagatccctcaaggctaagaagaggatgacaaagttgataaaaacgatcatccaagaggagaggaagaagatgatgtcggaaggcgacgatctgcgtggtgggactcatccacgtgatatgatcgacgtcctgctaggcaacggcaacgacgagctcaccgacgagctgatatctgacaacatgatcgacttcatgatccctgcagaggactccgtgcccgtgctcatcacgctggccgtcaagtacctcagcgaatgcccacaggctctgcagcaactcgaggaggagaacatggagctcaagaggcagaaatcaggcgcgggagaaaccctagaatggacagactacatgtcgctcgccttcacacagcacgtgatcacggagacgctgcggatgggcaacatcatcaacgggatcatgcggaaggcggtgcgagacgtggaggtgagaggccacctggtcccgaagggctggcgcgtcctcgtctacttccgcgccgtccacctcgacgccgccgtccacgacgacccgcacgccttcaacccctggaggtggaaggagaggcccgacgtcgtggccatgagcggcttcaccccgttcggcggcggccagaggctgtgccctgggctcgacctggcaaggctcgaggcctccatctttctgcaccatctcgtcaccaatttcaggtgggtggcggaggaggacaccgtcgtcaacttccccacggtgcggctcaagcgagggatgccaatcgcagtgacgcccagaacctgctgaacgcaacgcaacttgccaggcaaaaccatactatacatttatactccgtaatcaactaaagaggtgtgagaaataatacagtacatgcatgcatgtaatggagggcgaaattaaaagttggcacggcaaaggcgccgatggtatgccaaaagttcagtttgcaaattatatagtttaattgctattacactaggggcacccatgtctgatgcctcgtttttgaatcaaaaaaaaaaaaaaaaaaaaaaaaaaaaaaaaaaaaaaaaaaaaaaaaaaaaaaaaaaaaaaaaaaaaaaaaaaaaaaaaaaaaaaaaaaaaaccttttttttaaatcggaagggcccttttaaaagaaccaaattttactaccccttgtttgaaaggaaaaattttttttttggggccccaaaattaaattccctggcccgttttttaaaaacttgggaatggaaaaacccttgggttacccaaattaaatgcttttgaaaaaaatccctttttc

SEQ ID NO: 1133 - DNA, 626 bp, Zea mays
  Clone ID: PAT_MRT4577_14340C.1
aattttcaaaagagccgcccttgtcctcctcctcctcttcttctctcatctttcccttcaccttcctctccacggaccggaacgcgccatgacgagctcctccacgccgtcccgcaaggcgctgagcaagatcgcctgcaaccggctgcagaaggagctcgccgagtggcaggtcggcccgcccgccggcttcaagtacaaggtctccgacaacctccagagatgggtgatcgaggtgggcggggcggagggcacgctctacgccggcgagacgtaccagctgcaggtcgacttccccgagcattaccccatggaggcacctcaggtcattttcctcaacccggcgccgatgcacccgcacatttacagcaacgggcacatctgcttagatatactgtatgactcgtggtcgcctgcgatgactgtaagttcagtctgtatcagcatcttgtcgatgctgtctagctcgccagcaaagcaacgcccggcggacaatgaccgctacgttaggaactgccgcaacgggaggtcgccgaaggagacccgatggtggtttcacgacgacaaagtatgagggggcatcgaatcgattggctcttctggccaccccatactcgccagccagc

SEQ ID NO: 1134 - DNA, 532 bp, Zea mays
  Clone ID: PAT_MRT4577_143488C.1
gatcctttaaagggcccccccttttttttttttttttttttttaacaaaaacaactttggttcgcttggacaaacttaaccaaaaaggcttgtggcacgactaccggtggcgataaaggccttagcacaaatcctgttcgccgcttaagatagcactacttggaagggactaaactttactcgtcatcctcatcagcagcttctgtgccgcccgaggagttgagtcggttgagcctttcaatgaaactggccttcctctgctcgaatgtaactttcttggggtagcacctctagtgctcctttggtggctgcttggtccacttgaccacagaaggatcagcacggatggcactttggaccttcttgtacaaagctcccatgccgaaagcctcaatcccctacttaatgcactcactgaagcgaaactggcccttctctggctcctattcatcgaggttcctcatgtattcacccacttggccaccatagatgtccttccgatggatttgagcttccagctgattttaatcct

SEQ ID NO: 1135 - DNA, 530 bp, Zea mays
  Clone ID: PAT_MRT4577_143683C.1
atattatggggaaccaactagccaccatgagaaggcacattagggtcccaacaagggcagccaaaatatttggcctccttatgctccttggtctttctgcaggggctgttacggcgaccattttcccgcaaggctcgcaggctcctatagcttccttttttcccccgtacctctaaccagcggggtcttcggtatgtgaaaacccaatttttcaaccttacaggatccaacaggcaatcgaagttggcatcttaccttaataacccttgttcctccaacaataataagccttattacaacagttacctttggggcattaatgggaacaaaacataagggcacaacaactacaacaactggtgctagcaaaccttgttgcctactttaagaaacagcagttttttccattcaaccaactaggttcattgaactttgtttttaatttgaaacaacaacaactacaattcagccagttacctgttgcctaccccaagcattttcttccattcaaccaactagcagcattgaac

SEQ ID NO: 1136 - DNA, 2191 bp, Zea mays
  Clone ID: PAT_MRT4577_143832C.1
caagcccacattgtttccgcagctgcccggaggggcaaatgaggagtagctagcggagaggttggtgcgtttcggaggaggcgccatggacgtcgacatgcaagcccgtgccggccgggattccctctaagtctcgagacccaccaccgcaccccgcgctcggcggactcttttgctgctgcacctgccatcgtcacgcaccggtgtgtggagcgaagccagcgagcgagaagtagccacagagcggcctgtgcgtgcgtgcagatcgagagagagacgtgcagatcgagagagagagacgaacagagagagcgattcatggtaggtgcgatgcgcggcggagccatggagttggaggaccgcctggccacccttcctcgcttccgcggcgatcacgatgacgacggcaaggaaaggaggacagggacggtatggacggcaacggcgcacatcatcacggcggtgatcggctccggcgtgctgtcgctggcgtgggcgatggcgcagctggggtgggtggccgggccggtgatcctggtgctcttcgcggcgatcaccttctacacctgcggcctcctcgcagactgctaccgcgtgggcgaccccgtgacgggcaagcgcaactacacctacaccgaggccgtcaagagctacctgggcggccggtatgtctggttctgcggcttctgccagtacgtcaacatgttcggcacaggcatcggctacaccatcacagcctctatcagtgcagcggccatcaacaagtccaactgcttccactggcacggccacgatgccgactgcagccagaacaccagcgcctacatcatcggcttcggcgtggtgcaggtcatcttcagccagctccacaacttccacaagctgtggtggctctccatcatcgcggccatcatgtcgttctcctactccgccatcgccgtgggcctctccctggcgcagatcgtcatgggccccacggggaagaccaccatgaccggcaccctggtcggggtggacgtggacgctgcgcagaaggtgtggatgacgttccaggcgctgggcaacgtggccttcgcgtactcgtacgccatcatcctcatcgagatccaggacacgctgcgctccccgcccgccgagaacaagaccatgcgccgcgccaccatgatgggcatctccaccaccaccggcttctacatgctgtgcggctgcctcggctacgccgcgttcggcaacgccgcgtcggggaacatcctcaccggcttcggcttctacgagcccttctggctcgtcgacttcgccaacgcctgcatcgtcgtgcacctcgtcggcggcttccaggtcttctgccagccgctgttcgcggccgtcgagggcgccgtggcggcgcggtaccccgggtcgacgcgcgagtacggcgccgcgggcctcaacgtcttccgcctcgtgtggcgcacggcgttcgtggctgtcatcacgctgctggccatcctcatgcccttcttcaacagcatcctgggcatcctcggcagcatcgccttctggccgctcaccgtcttcttccccgtcgagatgtacatccggcagcggcaggtgcggaggttcagcaccaagtggatagcgctgcagagcctcagcttcgtctgtttcctcgtcaccgccgcctcctgcgcggcctccgtgcagggcgtggtcgactcgctcaagacctacgtgccgttcaagacgaggtcgtgagctcctgctgcttagttattatacatgtagcatacatactactcgtgcctcctttgtagtggcaccgaaacaaactgagcaaactcagccaaattagttatgcgggagtttaattttgaactactagtatgttgctgtcgaatgcaacaaaactaataacgtttacagtttttctatttggcatcaaccttgagcactgcacgtacggtcccatatgtagctcaaaaacttaattacgtgctcatcaagcagccaggctccttcattcaattccaaagcaggattaatttgggatacgtggcttaattatattggtgtgtttgcgatggcatggtacgatgggttggagcagatcctcttaggcgtgtttcgcaatcctcctccaacattattgaaaatatgtgaatgattgattgtattccaataccgggaatatgagtacatatatacagcgcat

SEQ ID NO: 1137 - DNA, 717 bp, Zea mays
  Clone ID: PAT_MRT4577_143833C.1
gtaccctcgggtttggccgggattccctctcaagtctcgagacccaccaccgcaccccgcgctcggcggactcttttgctgctgcacctgccatcgtcacgcaccggtgtgtggagcgaagccagcgagcgagaagtagccacagagcggcctcagagagacgtgcagatcgagagagagacgaacagagagagcgattcatggtaggtgcgatgcgcggcggagccatggagttggaggaccgcctggccacccttcctcgcttccgcggcgatcacgatgacgacggcaaggaaaggaggacagggacggtatggacggcaacggcgcacatcatcacggcggtgatcggctccggcgtgctgtcgctggcgtgggcgatggcgcagctggggtgggtggccgggccgttgaccctggtgctcttcgcggcgatcaccttctacacctgcggcctcctcgcagactgctaccgcgttggcgaccccgtgacgggcaagcgcaactacacctacaccgaggccgtcaagagcaacctgggcggctggtacgtctggttctgcggcttctgccagtacgtcaacatgtttcgcacaagcatcggctacaccatcacagccttcatcagtgcagcgggcatcaacaagtccaactgcttccactggcacggccacgatgccgactgcagccagaacaccagcgcctacatcatcggct

SEQ ID NO: 1138 - DNA, 370 bp, Zea mays
  Clone ID: PAT_MRT4577_143840C.1
gcggccacgcccccacaccaagccgtatcggcttctccctctagaccggtacgggtggtccgcggtcagggtgagcgagtgagcagctttgcttctccatctccccgatagcttccctccccatccccccggcccggcggtttgtacgtgagggtgacaccgcagcgctagctagctcgccagaacagcaagcggccgcccgcgacctgagagcacagcagcgccggaccggctcatggtggcgaccggcagaaaagatggcgggagcatcatctgtggacacggaggcagcggctggaaccgccaacgtaaaagctggccttcacactccccaaggggcccgggtaccccacgacgctggaggccatgg

SEQ ID NO: 1139 - DNA, 184 bp, Zea mays
  Clone ID: PAT_MRT4577_143884C.1
cgtcaatgctattttcaccattcctccagagctggcttatggcgcatctggatccactaccaataatcccacccaatgcaaacctgcgattgatgttgagatgctttcatggaccagtgtgcacagccatttgctaagatggcggcttattcacgcagctaccttaaagagggagagccctggg

SEQ ID NO: 1140 - DNA, 302 bp, Zea mays
  Clone ID: PAT_MRT4577_144014C.1
ggcatgtgctcgctcacttaccaagtcctcttctggttatggttacttatggttctgtggaggggctatggcggcggctgatgtggagtaccgttgcttcctcggcaggcttgcctgggccaccagcaacgagtcgctggagaatgcctacgacttctacggcgagatcctcgactccaaggtcatcaccgaccgggagacggagaggtctcgcggattcggctacgttaccttctccttcgagaacttcatgctctacgctatcgagaacatgaactgcaaggagctcgacggtcgtaaca

SEQ ID NO: 1141 - DNA, 1111 bp, Zea mays
  Clone ID: PAT_MRT4577_14402C.1
ttctttttacttaaaaaaaaatttttccaaaaaaaaaaaaaaaaaaaaaaaaaaaaaaaaagcctcgaggggccggggcgaggccggccgggatgtccgaggtcccacccagtaggccgttcctctcccgtgtgggtgcattctccccacctccgccgccgtttccccgcgtgctttctctctctctcgatctcgagcgacgactcggttacagccgccgtcctacgccaggttccaggtcttcgtcgggcccttctccggcaacgagcaccaacaagatttttgtgtgtaaagatttgcgagcaccattcacttttacatcagtgtgaaattaaaacacttcaagcatgagctctcaccgtgtgaagtggaatgaggacaatttgtatgaaattgagtcaaacaaaccggtgaggcagaagataacagagccaaagacaccatatcacccaatgatagatgatgatggatcattgtcgccaacacgtcctttcgacaaatgtcttgatgagactgtccaggctgaagctatcttaacagccttaaatggtgtggcttcttcaagcattagcatttcaaaggatgatggttggggatcgtcagatgatgatacagatgccatagatcaagatgctgaccctgaagctgacacgacaaggttgagtttcaaggagcatcgccgtgcccactacgatgagtaccgcaaggttaaggagctgatgaggactggatcccttactgctgaggaggccgatgaggataacagagctgccaccagctccgaagacaaaggtgtggggaaaggagggccgaatgataacatgaagccctcgcctcaaacatgaggagttcatatgaaggttctgattcctctgttatttattgtatcattgtatgcaatacagttgttactcttgttttgttttgagatgctggtgtgccaaaatggatttgatgaccgataattgtattggtgttggctacctggtcgaatggtcgtcgctccattttgttggtgacttaacaatttcaattgagaaaatatgtttcaaaccgagcaatctgcttgatgctgaaatcagttattcgccaagagtgaatcttcctatcc

SEQ ID NO: 1142 - DNA, 158 bp, Zea mays
  Clone ID: PAT_MRT4577_144152C.1
acaactacctacagtgagtcgtattaaggcatggcagcgtttgtgatcgaattcctgcttgctatctgtgctgaaacgggcgccaccgcatcgcgcgccacggggtcgtaaggcacgaagtttaagccggcgctccggaggcggctgtggtcgagcag

SEQ ID NO: 1143 - DNA, 1713 bp, Zea mays
  Clone ID: PAT_MRT4577_144161C.1
attcggttcgagtccacacctcacccaccaagagaccaatccagcagcacacgcctctccgtcgtcgtctccgataactcatcgtcgaaatcctgcccttctagcttcgcttccttcagctaactggtttcgatggcgctgctagtgcggagggcacggagggcggcgaccaaggccgcggtgtccctcgccggcagaaccggcagcgtggagcttgccatcccggcgcacttccggtgcccgatctcgctggacctcatgcgggaccccgtcacggcgccggcgggaatcacgtacgaccgcgagagcatcgaggcgtggctggacacgggccgcgccacctgccccgtcacccacgcgccgctccgccacgaggacctcgtccccaaccacgccatccgtcgcgtcatccaggactggtgcgtcgccaaccgctcccgcggcgtcgagcgcatccccacgcccaagatccccgtcacgcccgtccaggcctccgagctcctcttcgacctcgccgggtccgcgcgccgccgcgatgccgctgcgcggtgcgccgaggtggtcaccaagataaaggtcctcgccagggacagcgagcgaaacaggcgctgcttcgcgtccatcggcacgggccgcgtgctcgccgccgcgttcgagtcgctcgctgctgctgctgctgctgacgccgccgcaccggcggggcgcgtccttgaggacatcctggcggcattggtctgcatgatgccgttggacgaggaggccgccaggacgttggccttgccgacctcgctggggtctctggtcgccattgctgagaacggcagcttggcaggaaggctgaacgccgtgctggcaatcaaggaggtcgtctcatgcgacggggcggtcactgatctgagcgggaaggccgacgagatcgtagacgcgctggcaaagatcatcaagtctccaatctgtcctcaggcaaccaaggccggcatggtcgccacctatcacctggcgctatacgacgagcgtgtcgcggcgcgccttgccgctgccgggctcgtccccgtgctcgttgaggtccttgtagacgccgacaagagcatgtccgagaaggcactggccgtgctcgacgcggtgctcgcctcggaggaaggccgcgcgagcgcgcgggcgcacgcgctcgccgtgcccatgctcatcaagaagatgttccgcgtgtccgacctggctacccagcttgccgtgtcggcgatgtggcggctcggaaaggcgcacagcgacggcgaggatgacggtgcggtgacgcggtgtcttgtcgaggcgctgggggttggggcgttccagaagcttctcctgctcttgcaggtcggctgcagggacgcaaccaaggagaaggccaccgagctgctcaagttgctcaacaagtacaagagcgtaggcgaatgcgtcgacgctgtggatttcagagggctgaataagctgtcatcttaaatcaatgggggctgcgatgtaaaaaatgtgtattttgtaaaacagagagacgatttaacttgtaagtagatgcagataggctagttgcaattttgttgggcgtgcttgcatgctatttcagcagcttagtttcaaacggaaacttagatccgaattccgttttatgaagaacttcagtgtaaatttcttgttttaaaagatgtttttttttcttttaaaaaaaaaaaggaggag

SEQ ID NO: 1144 - DNA, 2133 bp, Zea mays
  Clone ID: PAT_MRT4577_144241C.1
cgttgctgtcgctctctgtccctctcgtctcgcttcttccccaacctgctcggtttcaccagatcgcgccggacacggtcgttgggccaccaccatgatctcgacgcggcttggttttcggccactcgggttggtggtggtgagagggccacaaccacgtcctaactccaccacttctctcctctacgacgcgagcaagggcgccaccgactgcggcgtcggtgggaactgggcctcggcctccccatctctctgataccagggcagatcagagctggaactgaaggtggcgggagccgagtgatccggcggtgagctgagcggggcgggatggcggcggagcaggggcggtcgctggcggagacgcccacctggtccgtggcaaccgtcaccacgctcatggtcgctgcctgcttcctcgtcgagcgctccctctcgcgcttcgccaagtggctgcgcaagaccaagcggaaggccatgctcgccgcgctcgagaagatccgcgaagagctgatgctgctcggagtcatctcgctgctgctcagccagacggcgcgcttcatatcggagatctgcgtgccgtcctcgctcttcaccagccgcttctacatctgctccgagagcgactaccaggacctgctgcgcaacacggacgccaaccagacggcgctcgacaagaacatgttcggtggccaacggctgcacgtctgtggcgagggccatgaaccttttgtttcgtacgagggccttgagcagctgcaccggtttctcttcatccttggtatcactcatgtgttgtacagttttgtaacagtggttctgtccatgatcaagatctatagctggaggaagtgggaaaccttagcaggtccaattgctgctgaggaattgaaagctaggagaaccaaggtgatgagaaggcagtcaacctttgtttttaacaatgcttctcatccatggagcaaaaataaaatacttatttggatgctttgctttttgcgtcaattcaagggctccataataaggtcagactatttggcactgaggttgggctttgtcacatatcacaagctaccacattcatatgacttccataaatacatggtacggagcatggaagatgattacaatgggactattggtatcagttggccactttgggcatatgcgattgtctgcatattaatcaatgttcatggtatcaatatatatttctggttgtcctttgttcctgttattaagctggtgcttctagtgggtactgaacttcagcacgtcattgctcagttggctttggaagtcgctgaggcaacagcgccttatgttggctcacaacttaaactgcgtgatgatctattttggtttggaaagcctcgggtactctggtggcttatacagttcatttcatttcagaatgcttttgagctggcgacattcttatggtctctgtgggaactcagtgcacatacatgtttcatgaagcactactacatggttgccattcggttgatttctgggctcctagttcagttttggtgcagctacagcacactgccgctgaatgtgattatttctcagatgggttccaagttcaagaaatcactggtctcggagaacgtgagggagtcgctgcacagctggtgcaagagggttaaggacaggagccgacacaacccgctcttctcgcggaacgggaccctcacgaccagatccgtgtgctccctagacaccacctacgagacggatcacgagacgaacacggtgtgcacgctgtcgaggacggcgtcggcaacgtcgctggacgaccagttgaccgtggtcaccgtcgatgacgagccgtcctgcattgagaaggatgtctgacgcagttgctgattcgccaaaactacatactgcatcgacctgtgtgttaggaggtactctaggactgaaatgaatgtatatgtgcagtggttgcccctatcgtggcagtgaccatgtgtatatatagaactaaaaaaactataatgtctcttagctgagagtgagaggctgtacatggaaatacttgaggcagcttggaccaaatacaaaactgcatcttttcgagataagccgtccgttgcaactgcacgtaccatgtactcctttccc

SEQ ID NO: 1145 - DNA, 415 bp, Zea mays
  Clone ID: PAT_MRT4577_144375C.1
ggaccgtagtgcccggcttgacccaccacacacgtacttcgtgcacccgtggcgcaacatcctggagggcaggttcagtccgcaggtggcggtggccgcgctgatcccctaattccagcagctgacgggcataaacgtgaacatgttctacgcgccggtgctgagcctgaccatctgctttagcgacgacacgtcgataatggcggccgtgatcacggggctggtcaacatgttcgccacacgggagtacatcgcgagcgtggacacgcctgggcctgagcgcgctgctactgcaaggcgggacgcagatattcgactcccagatcgtggagggcacgctgatcgcgctccagtaaggcaccgcctgcgagggcgagatgttccgctccaacgtcagactgatggagctcttgat

SEQ ID NO: 1146 - DNA, 323 bp, Zea mays
  Clone ID: PAT_MRT4577_144426C.1
attcccggctggacccacgcgtgcgcgcttctcctccccctccggttccggttcgggtccgagaggttctccggagggcgggggcgtgcgtgagcgtatcgagatggcggcgtctgatgttgagataccgcttgattgtccgccgtctcacctgtgccacggacgaccactctctccacaacgcctttagcacctacagtgaggtcctcgactccaagatcatcctcgatcgggagacgcagatgtaccgcggcttccgcttcgtcaccttcttcacgggagacgcgatgcggaacgccattcgagggcatgaacggcaagga

SEQ ID NO: 1147 - DNA, 2083 bp, Zea mays
  Clone ID: PAT_MRT4577_14449C.1
gccggccgttatgcggatccgctctccggtcacactccctcgcgcccgctccactccacttcccttccccagtcggacccccgatctcaatcatcctcagcggaggaaagcagagcacggcacagcgagtcgcagagggatagatccgagcacaagcaggccccgatggcgacgacggcgacgaaccggcgggtgatcctcaaggagtacgtggagggataccctcgcgaggagcacattgagctgcctactggcgccggggatcgcccgggatccaaacagcagtactacactgaactcaatcatcctcagcggaggaaagcagagcacggcacagcgagtcgcagagggatagatccgagcacaagcaggccccgatggcgacgacggcgacgaaccggcgggtgatcctcaaggagtacgtggagggataccctcgcgaggagcacatggagctgctccagggcgccgaggttcccctccgcctgacgggcgccgagccggccgggtccgtcctcgtcaggaacctctacctctcctgcgacccctacatgcggcccaagatgtcgcgcccgctgcgggagtcctacacggccgccttcgtcccgggcgacaccatcacgggctacgcccggccgcgcgcgtggtcgactcctccgacccgcgcctcgcgcccggggacctcgtctggggcatcaccggctgggaggactacagcgtcgtgaccccgcccgccaccaggctcctctccaagatctcccaccacggggccggggagggggcgggcgtgccgctgtcctactacaccggcatcctcggcatgccggggctcaccgcgtacgtgggcttccacgagatctgcgcgccgaagaagggcgagaccgtgttcgtgtccgccgcgtccggcgccgtcggccagctggtgggccagttcgccaggctcgccggctgccacgtcgtcggcagcgccgggtcccgggagaaggtggagctgctcaagaccaggttcggcttccacgacgccttcaactacaaggaggagcccgacctcggcgccgcgctcaagcgctgcttccccgacggcatcgacatctacttcgagaacgtcggcggcgccatgctcgacgccgtcctgctcaacatgcgcgtgcacggacggatcgccgtctgcgggctcatctcgcagtacaacctggcggacggggagaaggacgccgtgcgcaacctcgccgccgtcatctccaagcgcctccgcctgcaggggttcatcgagcccgaccacaagcacctctacccgcagtacgaggcgtgggtgctgccgtacatcagggacggcacgctcgcctacgtcgaggacgtcgccgaggggctcgagagcgcgcccaaggcgctcataggactcttccacggtcgcaacgtcggaaagcagctcgtccgcgtcgccgacgacgagtgagacgcgcctcacttcgattggaccagacgatccatgtgtcactgttgctatgtttcgattccccattttcatgaataattaattgtgccaatggatgcttttgttcggaatatatgccggttgctatgtttcgattccccattttcattccaagatgccgcattttactaaaaaaaaaaaaaaaaaaaaaaaaaaaaaaaaaaaaaaaaaaaaagcggccgcttttttttttttttttttgcttttttttttttttttttttttgcttaaatcacagatctaaagattggaaaagctttggaagataagattgttctaaaaatagccgtgtgccagtgcatgataaaaaaaaggcaaacaaaatccttagagcagataaacagagtcaaaccctattatttgcagaagaaagaagatgaaactgagagcacgcgcatgccgacggggaactggtcctcagccccgtgaccgccgttggccctcgcgtgtagcttcagctccttggcggtcatctcctccagctccgcgaatccaattgcgcgtctgctcgctctttctggagccaggcggcgagtcggcgaccagcaaggccagtgcgacccctggtcccttctaggacagccgaag

SEQ ID NO: 1148 - DNA, 188 bp, Zea mays
  Clone ID: PAT_MRT4577_144533C.1
aaccccgaaaaaccaaattttattcataaccaaaaggggttcacagatttttttccatacgtacatgctaattggggtaaacccagttgaccacctaaagctgcatacttacttattcaaactgatccagcttgtggcaacgtcggaagttcacatgcttacagacgacaaattttcataacaatagc

SEQ ID NO: 1149 - DNA, 284 bp, Zea mays
  Clone ID: PAT_MRT4577_144569C.1
aattccctggggggggcacgcgtcctaaacatactcctgccgaagcgctgagaagtatctagacaagagtaatggggttcaggggggcacaggaaggggggggcctcctttcatggaaaggcatgaatagcgactctgaggccactggtcttaagttcttcctcaggatctttggtatcgggccgggtgccaaacagatgttctccttcctgggcgacacctgcgacgcgcctgtggataaacactccaagctcaagggccacgccgtcaccggctttcgtatg

SEQ ID NO: 1150 - DNA, 200 bp, Zea mays
  unsure (1)..(200): unsure at all n locations
  Clone ID: PAT_MRT4577_144800C.1
cactaatnctacccatatcccagagcacttgtcaccactactgatgccattccctaccatgaacccataaatgcagtacttcatgaagcaacaagtggttgccaacttaatagcgatcccgaccctgattctgcatcaactgctgacctcaccgcttcatcagtgccagataccaatgattactccgggtatgatgccac

SEQ ID NO: 1151 - DNA, 3734 bp, Zea mays
  Clone ID: PAT_MRT4577_14481C.1
cgacacgtcccaagcggagttcgactcacaacttgttcctcaaagttcttatttgccaaaattccttccgtaagtgaagtggtgatgtaccacgaagcgacagagttggctcttatgttgtccttagcccattcacaagctaaattcttggttagctggttaatggcacctttagtcatagcatatatagttccactaaagattcctatcgctccagcaacagatgatatgaatataatgctgcgaggatgttgagcttgccgccgaagcggtcggcaacctcgcggagcaaccgctcccgctggtccctctcggagaggtcgcagacggacccggtaacgctgaatcccctggcctcccactccttgatgcgctcgccgagctcctccgccttccgggagcatgtgtgcacggccgcccccagcgccgccagctcctccactaccgcacgcccgatgccgcgggtgccgccggtgacgagggctgtcttgccgtgtagtgcccatctcccggaggaccctatcgccgtgcccgaggtctcccccgtggccatctcgcagttgtcgttaccgcagtcgtaaacggccacggcaagctgattcaggaaccgaatttttttttttgattttttttttttttattttacctctctgtctattatttttttttttttttttttttttttttttgatctaaacacaacgttcttcacattgccctgatagaattatgtaatgtaatgaacagtatcaacatgacaaccttacctttacatacattttattagattttttttctcaacaaccaagaacaacagctattgtcgtttcctcagcacaaagaaacatggcagctgccgcctagggcttgggagggtaaaacccgttcacagtcatacctccgtcgaccgcaatcgtctggccgctaatataagtggaacccggcatgcaaagaaaagcaacaagtgccgatacttctccaggttctccgacacgtccaagcggagttcgactcacaacttgttcctcaaagttcttatttgccaaaattccttccgtaagtgaagtggtgatgtaccacggagcgacagagttggctcttatgttgtccttagcccattcacaagctaaattcttggttagctggttaatggcacctttagtcatagcatatatagttccactaaagattcctatcgctccagcaacagatgatatgaatataatgctgcctgacccagataatttcaaaagaggatgtgcaatttggcacaagtgatatgcagattcaagattagtagccatcagaaacgagtattcctctgcagtaaactcagtagttggtttccttatgtttgttcctacattgtttacgaggatgttgagcttgccgccgaagcggtcggcaacctcgcggagcaaccgctcccgctggtccctctcggagaggtcgcagacggacccggtaacgctgaatcccctggcctcccactccttgatgcgctcgccgagctcctccgccttccgggagcatgtgtgcacggccgcccccagcgccgccagctcctccactaccgcacgcccgatgccgcgggtgccgccggtgacgagggctgtcttgccgtgtagtgcccatctcccggaggaccctatcgccgtgcccgaggtctccaccgtggccatctcgcagttgttgttcccggtcacgatagcggccgaggcaagtggattgtggaactgattgatagatatattgatctgggtccccaggaacgggctcgatgtgatagcatcgtcctttgtaacgatcaagactggtaagtccatcagtccaaacagttgtccatgtaccagtagaagattccgcagctactgcagctcctgcttcttcaggcggaaccccgagctgaggagttactcggaatgcttgctgccaagatatcagtatccttggtttcgtactccggggtgtagtaagtcaatttataatccttaacaccagctttaaatccaacacttgctttagtttctgtttgtggtgacataagtccctccctacaactcatgaattaagaattctcacaacgacagggtctactcgatatggattaggcgtaaatgaaacctttgcaaaaatctaaaaaaaaagatatttaattaatatcaactcattaaataaaaaaaggagtatgcttaagttaatgaatatgtttcattcatatataatgtgtacaccctgtgtacgttctatcctataggaattttactataggaattcgataggaaggaattcgataggaattgagttgttgttatggtaagttaacacggttcgttattaaaccgtggatttgattcaccaaatccatcattattgtatactctttgatagatatagcgcaacccaaaccctaatctttattttacaatttttaaagttcttcccctttgatattttgaatctaaatacctaaatactaagaaaattctctgttgacagcaatctatgcttcacagtagtatatattttgtatatcgaagtcctagataggaaagtagagtaggcacagatccttcacaaaaggcgaaatttatatgaaaaaaatggattgaactttccaacggattcattccataagtaaacgattgaatgggattcgcttgggcaacgaaatcaagtgcgagtccccttttcttttttattgaattaactaattcatttccttttgacttttggatttttggatattttttttgatttggcattattcaacaagaaaaaaaatttcgacaaattcctttttttttgaaaattatgtgataattatgagaaccaatcctactacttcgcgtcccgggatttccacaattgaagaaaaaagcgtagggcgtattgatcaaattattggacccgtgctggatatcacttttcccccgggcaagttgccttatatttataatgctttgatagtcaagagtcgagacactgccgataagcaaattaatgtgcccgggcaggtacaacaattattaggaaataatcgagttagagctgtggctatgagtgctacagaggggttgatgagaggaatggaagtgattgacacgggaactcctctcagtgttccagtcggtggagctactctcggacgaatttttaacgttcttggggagcctattgacaatttgggtcctgtggatactagtgcaacatttcctattcatagatctgcgcctgcctttatcgagttagatacgaaattatctatctttgaaacaggtattaaggtggtcgatcttttagctccctatcgacgtggaggaaaaatcggactgtttgggggggcaggagtaggtaaaacagtactcatgccgcgaccaatcaataacattactaaagctcatggaggcgtatccgtatttggcggagtaggggaacggactcgtgaaggaaatgatctttatatggaaatgaaggaatccggagtaattaatgaaaaaaatattgaggaatcaaaggtagctctagtctatggccaaatgaatgaaccgccgggagctcgtatgagagttggtttaactgccctaactatggcagaatatttccgagatgttaataagcaagacgtgcttttattcatcgataatatctttcgttttgttcaagcaggatcggaagtatccgccttattaggcagaatgccctccgcagtgggttatcaacctacccttagt

SEQ ID NO: 1152 - DNA, 226 bp, Zea mays
  Clone ID: PAT_MRT4577_14490C.1
agataaggaatatgagggcaatgttgaggccactggtgaggacttctctgttgaaccagctgatgagacgatgcctttccgtgctctcttggatgttagcctgtatgaggactacaactgggacccgagtcgttggtgccatcaagtgatctttggatggtggcctgtatatgcagcacaccgataagagatatgctgctttcaacaacgatgacaagcagctgta

SEQ ID NO: 1153 - DNA, 424 bp, Zea mays
  Clone ID: PAT_MRT4577_145492C.1
aaaacaactaaacatggaagtaaatcagaggtgcatacattttttggggcctcggaccacgatcatacccaagcgcatgcatacccacacgtatacatacgatagattacgtagccacgcttattcgggcataaaacgagggcatacaaacgtacccgcgcacaaaagggggggcgctcgatatcactttcacacacccccccgtagcacacggggggggacgacgatacgggggggatcaatcagccgaaaaaggggggctttttttcgccggcggcctcctcggggtccttgggggcctttttctttttggggggctcggggaaggggaagccgccggaaccgacgggcggcgccgccgcaaccccctcctcgatcttgggggggggggcgtgctccggggtccttttttgcctcgggcttt

SEQ ID NO: 1154 - DNA, 603 bp, Zea mays
  Clone ID: PAT_MRT4577_145816C.1
tacaacccccccccctcgagtttttttttttttttttttttttttttttttttttttttttttttttttttttttttttttttttttttttttttttttttttgcaaaccgccaaggcgccaaggcccgaacatagtatataaatattactttgttgactccatagcgctagggggatcttttgcagtcaaccacaaaaattgacaactagagtcttatttattgggtactctaacgttgggaatcagggggctactatcagcaatgggaaggaccacttaattttcaaatctgtcgacaaaaatgcccaataagaaaaaccgcctaattttaaaatctgccaaaaaaaatgatacgttgtattaaaaattacgtgtcatttttttaaaccttgcgctgtttgatctttttgctcaaattggcgaacaaactgtcctcggacccgtggccgttgttaaaaaagccttttcctgttttggtagcaaacctttttaccaaagttccaatctttccgcttaagtctgaatttgttaaatgcagcttctcgttgcaggaaccgattctgatacatgtcattgccactcccactcccacttacaatgc

SEQ ID NO: 1155 - DNA, 1682 bp, Zea mays
  Clone ID: PAT_MRT4577_145875C.1
gctgatcacctcatcggccgggaacatagcatggtcatacaaataggaaaagaatagtatatcagcccccctattgatcctccccacgtcgccgtgctcgttttgcgcgtccaccagcccgccccccaaccccacccagcgcgacgaagccggggggcgatcgctccagcgccgccggcgacctcgccccgggagccgccggcggtaccccgctctctgtcccgcctcaacgaaccctcaggtccaagtagttcgtttcgtgagttatccaaagttgcgccgcaaagatgagtactgctaatcgctaccaacacatcaagtcaactaagcctgttgtaggcaaagcaagaaaattgaaggatctcatgataaaaagtgacaataggatatgtgctgactgtggtgcacctgatcccaaatgggcatctgctaatattggagtgtttctttgcttaaaatgtggagatgttcatagggcacttggacctgacatctcaaaggttttatctgtaactttggatgattggtctgatagtgatatcgactccatggttgaggttggtggaaactcatatgcaaattcaatttatgaggcttttcttccaaaagatcacccaaaacccaaaccagattcaacgatggaatataggacaaaatttataagagctaagtatgagacacaagattttttgaagccaagtttgcgcatttcatcaagatcatcttttaaatctaccacttctgtgaagagtgtagatagcaatttctctagcacttcaaggaaggatgtctttgaagatacaagagaatttgttggagagttgaatatcacactggtcaaaggcaccaacttggccgttagagacatgctaacaagtgatccatatgttgttttaacgctcggagggcagaaagttcaatcaacggttaaaaaaagtgatctgaatccggtatggaatgaagtgcttaagatatctgttcctcgaaattatggacctctaaaacttgaagtgtatgaccatgatatgttctcagccgatgatatcatgggtgaagcagagatagatctccagccaatgatcacagccgccatggcctttggagatacttcacgtcttggtgacatgcaaattgggaggtggttcatgaccaaagacaacgccctgatgaaagatagcacggtgaatgttgtggcaggtaaggtaaaacaggaggtgcacttaaagctacagaacgtagaatcaggtgagttggagttggagctagaatgggttccgatcctctagactaatgataactcccctgatctttgtctaaaaatctatactcaagatgcatcgatgtttccaagctgtccacttgatggtcttggacatttttgctggatggtttgaatttgttaaaaatgtcactgtagaatatcatggtgtaactgtcggttgtactcgcgcctttcaccccccctcccggtaactggttatcatgccttgtaagcactcgctgtctcttgattgttgttgcattgtcccattgaaaggacctgtgtcttgtaagagatggcaattatagccagtgaactctttgtgctgatgccatgttggcgctgtagtagctaagaaaaaaaaaaaaaaaaaagcggcctcagcatgatgctctgagtgcatatacgctacaagcctaca

SEQ ID NO: 1156 - DNA, 1671 bp, Zea mays
  Clone ID: PAT_MRT4577_145926C.1
cttggtagcgactggactgcttatgttgctgactttgggcttgcaaagctgattagtgaatccatggaccaaccaaatttgaatattgggactgaaagcactattcggatacgaggaaccactggatacgtccctccagaatatggagcaggtggtcaagcatcagttgctggtgatgcctacagctttggggtcactctgcttgagatgttcacggggaaagcaccaactgatgacatgttcatagaaggcttgaccctgcacttgtttgctgaggcagggttacctgacaggatatcagcaatcattgacccagaacttttcaatgcggagctgtatgaccatgatcctgagatgctcagttgcttagcttctgtgatacgagttggtgtctcatgttcaaaggacaacccgtcagaaagaatgaacatggaacatgctgctgctcagctgcacagaatcaaggagtacattgaagaaatcccttagggtttaaatgggtataacttgatgtcctttatttatttttccaatgcagagcacttctaacaacatcattaccattgaggtggcccttttgaatgatatcctggcattcagatggacttgtgcaaatatctgtatcaccacatcaatggaataagaatagagcattgtcaggtttacctacttgttcataagcttttattatgcatgtgcaatcttcgtggttcctgaatgctcaattattataaggtgtccaaaaataacttccaagatatatacaaatttcacgtcatctcaaaaaaaaaaaaaaaaggggccgctcgcgatctagttggcttctcctcccccaccggttcgtgttcaggttctggttcgtgggcgagagggaagagatggcggcgtcggacgttgagtaccgttgcttcgttggcggcctcgcctgggccaccgacgaccactccctcaacaacgccttcagcacctacggcgaggtcctcgagtcgaagatcatcctggatcgggagacgcagaggtcccgcggcttcggcttcgtcaccttctccacggaggacgcgatgcgcagcgccatcgagggcatgaacggcaaggagctcgacggccgcaacatcaccgttaacgaggcccagtcccgcggcggccgtggaggcggcggtggcggatacggtggcgggcgccgtgatggaggcggctacggcggtggcggtggaggctacggcggtggtcgtggaggctacggcggcggcggtgggggatacggtggtgcaaaccgcggcggcggctacggcaacaacgacgggaactggaggaactgagcggtggggtccgctgaggcctagttatcttgttcgcttctgctaccgtgttcaccctagtctagagggggtttatcttcgtctgtggtcgtctcgtgtccgtatgtttcgtttcgtgttcgttgttgttgttgcccatctgtgtttttgaccgcaagctcgctcctctgatgttgttagtgatgtctacaatcgtccaatcccgagcctgcattgagctccaccgattatcttatctggctatacctgcagttgtgcatttgattccgacgggcctaaacctgaacacgccaatattaaacattgtacaaactacaagtgctccaataaagaacacaaagattcaggaaac

SEQ ID NO: 1157 - DNA, 338 bp, Zea mays
  Clone ID: PAT_MRT4577_146023C.1
cgcacagggctacaccaaccaacagcaggggaaattctcccattccactttattttatgcgggtaatatatggctgcccgcaacgggcggcaagggcctgtgcaaggacggatctaaccgccaccggaaggtgctccgggacaacatccaggggatcacgaagccggctatccggcggctggcgcgcaggggcggcgtgaagcgcatctccgggctcatctacgaggagacccgcggcgtcctcaagatcttcctggagaacgtgatccgagacgccttcacctacaccgagcacgcgcgccgcaagaccgtaacagccatggacgttttttacgcac

SEQ ID NO: 1158 - DNA, 379 bp, Zea mays
  Clone ID: PAT_MRT4577_146083C.1
aaacattcaagaccagaaaaccttattattcgaactattactcataagaaatccaaaagagggcaccaccaatgatgggttggtcggagaacgctcctgggtttgtcaaagcacggtggctgaatggcagaaattgtggcacatgtaagagggggccagagctaggcgcacagagctgggagaacgggaacaactgtgggtgtatcgagaaagtagcagggctcataccagctagctgcttgaatggtagtagctgttgctgctgcagataagcagcagagtagaatgctgccagctggttgaatggaagaaaatgctggggggaggtaggcagcagctggctgaatggtagttggtgctgctgcaaataagaagcaga

SEQ ID NO: 1159 - DNA, 718 bp, Zea mays
  Clone ID: PAT_MRT4577_146094C.1
ggaggaaagtcgagagaagaaagggaccaaagaagagaggaagggaagatgagcaacgcagctagcacaacccccctcctcgcccactacaagatggggaaatttgatctttctcacagggtggttcttgcgccgctcacaagggagcggtcgttcggaaacgttcctcagccccatgccatactgtattatcagcagagagcaaccaaaggaggccttttgattgctgaggccaccggagtttcagacactgctcaagggtacaaagatactcctggcatctggaccaagaagcaggtagaagcatggaagccgatcgtcgatggggttcatgccaaaggaggaatatttttctgtcaggtttggcatgtaggaagagtctccaatcatacttttcagcctaatgggcaggctccaatttcaagcaccgataagccaatcaaacctgcaacgagagccgatggcattggattggctaaagtctcaactcctaggcgactaacgactgatgaaatcccgttggtcatcgatgatttcagggtcgctgctagaaatgcaattgaagccggatttgatggcgtcgaaatccacggagctcatggttatttgatcgaccagttcctgaaggaccaagtcaacgatcgcaccgacaaatacggtgggagcttagagaaccgttgccgctttgcgctagaagtagtccaggccgtagctgatg

SEQ ID NO: 1160 - DNA, 2104 bp, Zea mays
  Clone ID: PAT_MRT4577_146234C.1
ggacgggggtcgccctgcgccggcaactggaggccaatagaatcgctcgcttgcgttatctggttcggctcgtcagttgtcgtttcctcccttcccatcccccactgctcagcagtcagtcagcactcgccacccacacgcctccgctccgcccacggttccactccaactctccgatctccaggaatccgcggctgaggcgccggcgatggcggctcccatggtcgacgccgaatacctgcgccaggtcgacagggcgcgccgccacctccgcgccctcatctccaacaagggatgcgccccgatcatgctccgcctcgcatggcatgatgctggaacttatgacctgaagacaaaaactggtggtgcaaatggttcgattagatatgaagaagagtacactcatggttcaaatgctggtttaaagattgctatcgatctccttgagcctatcaaagcaaagaatccaaagataacatatgcagacctgtatcagcttgctggagtggttgcagtcgaagtgactggggggccaactgttgaatttattcctggcagacgtgattcgtcggtgtgcccccgtgaagggcgtctgccagatgctaagaaaggtgcaccacatctgagggacatcttttatcggatgggcttatcggacaaagatattgtagctctatcagggggacatactctgggaagggctcaccctgagaggtctggattcgatggtgcctggacaaaggagcctcttaagtttgataactcatactttcttgagctgttgaatgaggaatctgagggacttttaaagctcccaactgacaaggcactgttatcagatcctgaatttaggcgctatgtggagctctatgcaaaggatgaagatgcgttcttcaaagattatgctgaatcacacaagaaactctctgagcttggcttcacgcctcgcagcacagcaccatccaaatcagatcttccaaccgccgccgtgcttgcacagagtgcctttggggtagcagttgctgcagccgtagttatcgctggctacttgtacgaggcttccaagaaggccaagtagagggcgaagttcttctccacatggctttgctttagtaagtctgaagatcgaataacaggaccatatctgaagatcgaataacggatcatataaatgagttactcggaaaatgttctgaaatccttacgaacagaacgttgccttcatgtttacactgtactcatgagtcacagtgatatggagatggcatagcctactattggaagtatatgcattctgtgtaatctatgcatcggattgcagctggaacttccgtggaaattgacagtgatgtgtcgacataggaactgcgatttggttcaatgaccacgtagagggaatgtactggcgggatccttttatttatagcagatagtgttggtgagggaggcctatgtcgcgttttcttgactgagcaagtacagccgactgctggctataaagatgcttccaacgtctctgtcataccaaaaaaaaaaaaaaaaaaaaaaaaaaaagtctgcgttgttaccactgctttgtctgaagtgcaaccggtttggatacaagaagtagtcaattcctatatcactgatgctgaagctcaggaactgctgaccaaactgctaatccagagcccagatgagcaaggcttctgtcttcaacaaggcattattaggaggggcaggcaagtgtggattggtgcaaactcagctctcagaactaagctgatttcagctttgcatgccagtgctaattggtggacattctggtggtccagctacctaccaaagggtggagagattcttttattggaaagggctcaaatctgatgttatgctatttgtgcagcagtgtcaaatttgtcagcaagccaagtctgagagggtgcacccagcaggcttacttcaaccattacctgtccctaggggagcttgggaagaaattacaatggattttattgagggcttgcccaaatctgaaggttttgatattattctggttgtggtggacaggtttaccaagtttgcacgttttctacccttaaacatcctttcactgctcaaa

SEQ ID NO: 1161 - DNA, 1412 bp, Zea mays
  Clone ID: PAT_MRT4577_146362C.1
cattgggtacctcgaggccggccgggactcgaccagggagggaaagataatagaagcgagagagcgagcagcagtaggcagcggcgcgggcgaggagcagaccagcacccagcagccctcgtcggggggcggcagctgcagcttcaccagccgccgcctttccccgtctcctctgcctctgcctctccccctaacccccttccatttctccaccccaccccgctcccgcttccgcttcctcgccacttagttcgttccgcacccgcagccgcggctgcgttcgcattgggggcacgcaatggagcagtacgagaaggtggagaagatcggggagggcacgtacggggtggtgtacaaggcgctggacaaggccaccaacgagacgatcgcgctcaagaagatccgcctcgagcaggaggacgagggcgtcccgtccaccgccatccgcgagatctctctcctcaaggagatgaaccacggcaacatcgtcagattacatgatgttgtccacagcgagaagcgcatataccttgtcttcgagtacctggatctggacctcaagaagttcatggactcctgcccggagtttgctaagaatcccactttgatcaagtcatacctctaccagatactccacggtgttgcgtactgccattctcatagagttcttcatcgagacttgaaacctcaaaacttattgatagatcggcgcactaatgcactgaagcttgcagactttggtttagccagggcatttggaattcctgtccgtacatttactcatgaggtagtgacattatggtacagagctccagaaattctgcttggagcgcggcagtattccacaccagttgatgtgtggtctgtgggctgtatctttgcggaaatggtgaaccaaaagccactattccctggcgattctgagatcgacgaactttttaagatattcaggatactaggtacaccgaatgagcagagttggccaggagtcagttgtttgcctgacttcaagacagctttccccaggtggcaagctcaggacctggcaacagtagtcccaaatcttgaccctgctgggttggaccttctctctaaaatgcttcgatacgagccaagcaaaagaatcacagcgaggcaagcacttgagcatgaggtacttcaaggcccttgaagtggtacagtgccctgctaaatgtgcttgacgttgcattaacatttgtatgagctgagtcgcccattcctttttatgaacgccgggactcttctcattctccccctgcatttttgtcattcagctggatatttcgaatctggtgtgttttgagatgtattaaagaacgtcaaatagattccccccttggtctctgtccattgaaagtaaatatccgtcatatgtttaaaaaaaaaaaaaa

SEQ ID NO: 1162 - DNA, 2658 bp, Zea mays
  Clone ID: PAT_MRT4577_146436C.1
gactattaaatactcaaattgacattcaaacattacgatgatgtgacacggactaatgaaaccaaacaccggaactcaggcaaaacgacatgtagaacatgtactatactagtaggattacagataacaagaacaaactgtaaaacagagtaccatatagctatacaacaaactcattgcctggccggcaggagaaccgttaacgtgcggaaaacctcaaacagtagtcaagatttagcttatcatatgtaattagggataaacgacagtgatccgaagcttagtcgacctcctccatcttgctttcgccggcgtcatcctccagcggaggcatctcagcttcggcctcagcagactcgtcctcatcgatgctcagaccgagctttagcatgcgatggatccgggtgccaaaggtgttggggtcatccaggctgaagccggaggtcaggagagctgtctcgaacagcaacatcacaagatccttgactgacttgtcattcttgtcagcctcggcgcgcttacggagctcatccatgattgggttctccgggttgatttccatagtctttttgctcgacatgtaccccgacatgctagagtccctcagggcctgcgccttcatgatcctctccatgttggctgtccagccatactcaccagtgacaaggcagcacggtgagtccacaacacggtcagacaccacaaccttctcaaccttgtcgcccagaacctccttgatgatcttgcacagaccctcaaacttctccttcagctcctccttcctcttcttctcatcctcggtctcatcaagcttcagaccctccttggtggccgagacaagcttcttgccctcaaactccttgagctgaccaacagcatactcatcaatggcatcaaccatgtacaggacctcgtagcccctcttcttcagcttctccaggaaaggggagttctccactgccttcttgctctcaccagtgatatagtagatgtcattctgtccctccttcatcctggtcacgtagtccttgaggctggtcagctcatcaccactcttggtggagtggtatctcagaagctcggcgatcttggtcctgttctgcgagtcctcatggatgccaagcttgaggttcttggagaaagcctcataaaacttgttgtagtcctccttgttctcagcaatctcaaagaagagctcaacacacttcttcacaaggttcttcctgatcaccttcaggatcttgttctgctgaagagtctcacgagagatattgaggggaaggtcctcagagtcaacaatacccttaacaaaactcagccactcagggatcagttcctcacagttgtccatgatgaacaccctgcgcacatagagcttgatgttgttttgcttcttccttgtgtcgaagagatcaaagggggccctcttaggaacaaagagaacagccttgaactccagctgaccctccacagagaagtgcttcacagccagatgctcctcccagtcatttgtcaagcttttgtagaaggcagcatattcttcctttgtgatctcttctggcttcctcatccagatgggcttctgcttgttgatcaatgaccactcgtgagaaacctccttgatcttctttttctttttttctttctcttccttctcctcgtcaacatcctcaacctttccctcctcagcgtctttcttctcttcctcatcttcatcatcagaaatctccttctccgttgtcttttcggtccacagggagatggggtagctgatgaactcagagtgcttcttgaccaaatccttgaggcgacgctcctcaaggtattctaactgatcttccttgaggaaaagtgtaatcttagtacccctgccaagctgctccccagacgtgtcacgagtaacagtgaacgacccgcccgcctgggattcccacacgtactgctcgtcatcgttatgcttggtggtcacgacgaccctctcggcgacgaggtaggcagagtagaaaccgacaccgaactgcccaatcatagacacatcagcgccagcagcaagggcttccatgaactccttggtcccggacctggcgatggtaccgaggttgttgacaaggtcggacttggtcatgccgatgccgctgtcgatgatggagagcgtgttcgaagccttgtctggtacaatgtggatgaacagctccggctgcgcatcgagcttgctcttgtcagtgaggctctcgaacctgattttgtccaacgcatcggaagagttggaaatgagctcccggaggaagatctccttgttggaatagaaggtgttgatgatgagtgagagcagctggttgatctcagcctgaaaggcgaaggtctccgtctctgtcgccatggcgccctgactcttgagctctgaagcttgcagcagtcggctagggatggaggcgttgtcggatcgcggctagggttggagccttggaggttttccgaatcgagaggggcagcgaggattgaggtagtggggtatttatttggcgccgcgcttctagaaagttcgacatagacccagactcgttcgctggtgctggagtgccatttgcgcttccgggaggttcggcatgggcggatgggcctcgctgctggaggagtgagggtatcatttccggccgg

SEQ ID NO: 1163 - DNA, 2619 bp, Zea mays
  Clone ID: PAT_MRT4577_146438C.1
actctcgagttttttttttttttttttaattgggaaacgaaaccagtttcatttcctggcatagccgatttgctacaacatgcctaaaatcctaaccattcttttttcaccactactcaaactatgggctacccaaagagaaaaaggggtagtaccctgatctgtctgtcccaatctcacacaacccaatgggcaaaacatgtactacatttttaccattacgaataataacgacaaactgttaaaaagggtaaacataacagataaaccagacttatagcctggccagcaggacaaccgataacgtgccaaaaacctcgaacaatagtgaaaattaagctatcacaggtagcttagctagggataagataaacggcaagcatgcgatgcgacacttagtcgacctcctccatcttgctttcaccagcgtcgtcctcaagctgaggcatctcagcctctgcctcaacaggctcgtcctcatcgatgctcagaccgagtttgagcatgcggtggatccggttgccgaaggtgttggggtcatccaggctgaagccggaggtcaggagagcagtctcgaacagcagcatcacgagatccttgactgacttgtcattcttgtcagcctcggcacgcttgcggagctcatccatgatagggttctctgggttgatctccattgtctttttgctcgacatgtagcccgccatgctcgagtccctcagggcctgtgccttcatgatcctctccatgttggcggtccagccatactcgccagtcacaaggcagcacggtgagtccacaacgcgatcagacaccaccaccttctcaactttgtcacccagaacctccttgatgaccttgcacagcccctcaaacttctccttcagctcctccttcctcttcttctcgtcctcagtctcatcaagcttcagaccctccttggtggcagagacaagcttcttgccctcaaactccttgagctgaccaacagcatactcgtcaatggcatcaaccatgtacagaacctcatagcccctcttcttcagcttctcaaggaagggggagttctccactgccttcttgctctcaccagtgatatagtatatgtcattctgtccctccttcatcctggtcacgtagtccttgaggctggtcagttcatcaccgctcttggtggagtggtatctcaggagctcggcgatcttggtcctgttctgcgagtcctcgtggatgccaagcttgaggttcttggagaaagcctcgtaaaacttgttgtagtcctccttgttctcagcaatctcaaagaagagctcaacacacttcttcacaaggttcttcctgatcaccttcaggatcttgttctgctgaagagtctcacgagagatattgaggggaaggtcctcagagtcaacaatacccttaacgaagctcagccactcagggatcagctcttcgcagttgtccatgatgaacaccctgtgcacatagagcttgatgttgttttgcttcttcttggtgtcaaagagatcaaagggggccctcttaggaacaaagagaacagccttgaactccagttgaccctccacagagaagtgcttcacagccagatgctcctcccagtcatttgtcaagctcttatagaaggcagcatattcttcttttgtgatttcttctggcttcctcatccatatgggcttctgcttgttgaccaatgaccactcatgagaaacctccttgatcttctttttcttcttttctttctcttccttctcatcaacatcctcaacctttccttcctcagcatctttcttctcttcctcgtcttcgtcgtcagaaatttccttctctgttgtcttttcagtccacagggagatggggtagctgatgaactcagagtgcttcttgaccagatccttgaggcgacgctcctcaaggtactccagctgatcgtccttaaggaacagtgtgatcttagtgcccctgccaagctgctcccctgacgtgtcacgagtaacagtgaacgacccgcccgcttgggactcccacacgtactgctcgtcatcgttgtgcttggtggtcacgacaactctatcggcgacgaggtaggcagagtagaaaccgacgccgaactggccaatcatggacacatcagcgccggcagcaagagcttccatgaactccttggtcccggacctggcgatggtaccgaggttgttgacaaggtcggacttggtcatgccgatgccgctgtcgatgatggagagcgtgttcgtggccttgtctgggacaaggtggatgaaaagctcaggctgcgcatcgagcttgctcttgtcagtgagactctcgaacctgatcttgtccagcgcatcggaagagttggagataagctcgcggaggaagatctccttgttggagtagaaggtgttgatgatgagtgagagcagctggttgatctcagcctgaaatgcgaaggtctccgtctcactcgccatggcgcagattcctgagctctgaaacttgcaggaggcggctagggtttgagaggtttccggatcgagagttttttttttttttttttttttttttttttttttttttaaaaagaaggaaaccccggcc

SEQ ID NO: 1164 - DNA, 3280 bp, Zea mays
  Clone ID: PAT_MRT4577_146439C.1
acatggttgatgccattgacgagtatgctgttggtcagctcaaggagtttgagggcaagaagcttgtctctgccaccaaggagggtctgaagcttgatgagactgaggacgagaagaagagaaaggaggagctgaaggagaagtttgaggggctgtgcaaggtcatcaaggaggttcttggtgacaaagttgagaaggtggtggtgtctgatcgcgttgtggactcaccgtgctgccttgtgactggcgagtatggctggaccgccaacatggagaggatcatgaaggcacaggccctgagggactccagcatggcgggctacatgtcgagcaaaaagacaatggagatcaacccagagaaccctatcatggatgagctccgcaagcgtgccgaggctgacaagaatgacaagtcagtcaaggatctcgtgatgctgctgttcgagactgctctcctgacctccggcttcggcctggatgaccccaacacattcggcaaccggatccaccgcatgctcaagctcggtctgagcatcgatgaggacgagcctgttgaggcagaggctgagatgcctcagcttgaggacgacgctggtgaaagcaagatggaggaggtcgactaagtgtcgcatcgcatgcttaccgtttatcttatccctagctaagccacctgtgatagcttaattttcactattgttcgaggtttttggcacgttatcggttgccctgctggccaggctataagtctggtttatctgttatgtttactctttttaacatcttgtcgttattattcgtaatggtaaaaatgtactacatttttaccattacgaataataacgacaaactgttaaaaagggtaaacataacagataaaccagacttatagcctggccagcaggacaaccgataacgtgccaaaaacctcgaacaatagtgaaaattaagctatcacaggtagcttagctagggataagataaacggcaagcatgcgatgcgacacttagtcgacctcctccatcttgctttcaccagcgtcgtcctcaagctgaggcatctcagcctctgcctcaacaggctcgtcctcatcgatgctcagaccgagtttgagcatgcggtggatccggttgccgaaggtgttggggtcatccaggctgaagccggaggtcaggagagcagtctcgaacagcagcatcacgagatccttgactgacttgtcattcttgtcagcctcggcacgcttgcggagctcatccatgatagggttctctgggttgatctccattgtctttttgctcgacatgtagcccgccatgctcgagtccctcagggcctgtgccttcatgatcctctccatgttggcggtccagccatactcgccagtcacaaggcagcacggtgagtccacaacgcgatcagacaccaccaccttctcaactttgtcacccagaacctccttgatgaccttgcacagcccctcaaacttctccttcagctcctccttcctcttcttctcgtcctcagtctcatcaagcttcagaccctccttggtggcagagacaagcttcttgccctcaaactccttgagctgaccaacagcatactcgtcaatggcatcaaccatgtacagaacctcatagcccctcttcttcagcttctcaaggaagggggagttctccactgccttcttgctctcaccagtgatatagtagatgtcattctgtccctccttcatcctggtcacgtagtccttgaggctggtcagctcatcaccactcttggtggagtggtatctcagaagctcggcgatcttggtcctgttctgcgagtcctcatggatgccaagcttgaggttcttggagaaagcctcgtaaaacttgttgtagtcctccttgttctcagcaatctcaaagaagagctcaacacacttcttcacaaggttcttcctgatcaccttcaggatcttgttctgctgaagagtctcacgagagatattgaggggaaggtcctcagagtcaacaatacccttaacgaagctcagccactcagggatcagctcttcgcagttgtccatgatgaacaccctgcgcacatagagcttgatgttgttttgcttcttcttggtgtcaaagagatcaaagggggccctcttaggaacaaagagaacagccttgaactccagttgaccctccacagagaagtgcttcacagccagatgctcctcccagtcatttgtcaagctcttatagaaggcagcatattcttcttttgtgatttcttctggcttcctcatccatatgggcttctgcttgttgaccaatgaccactcatgagaaacctccttgatcttctttttcttcttttctttctcttccttctcatcaacatcctcaacctttccttcctcagcatctttcttctcttcctcgtcttcgtcgtcagaaatttccttctctgttgtcttttcagtccacagggagatggggtagctgatgaactcagagtgcttcttgaccagatccttgaggcgacgctcctcaaggtactccagctgatcgtccttaaggaacagtgtgatcttagtgcccctgccaagctgctcccctgacgtgtcacgagtaacagtgaacgacccgcccgcttgggactcccacacgtactgctcgtcatcgttgtgcttggtggtcacgacaactctatcggcgacgaggtaggcagagtagaaaccgacgccgaactggccaatcatggacacatcagcgccggcagcaagagcttccatgaactccttcgtcccggacctggcgatggtaccgaggttgttgacaaggtcggacttggtcatgccgatgccgctgtcgatgatggagagcgtgttcgtggccttgtctgggacaaggtggatgaaaagctcaggctgcgcatcgagcttgctcttgtcagtgagactctcgaacctgatcttgtccagcgcatcggaagagttggagataagctcgcggaggaagatctccttgttggagtagaaggtgttgatgatgagtgagagcagctggttgatctcagcctgaaatgcgaaggtctccgtctcactcgccatggcgccctgactcttgagctctgaagcttgcagcagtcggctagggatggaggcgttgtcggatcgcggctagggttggagccttggaggttttccgaatcgagaggggcagcgaggattgaggtagtggggtatttatttggcgccgcgcttctagaaagttcgcggacgcgagggta

SEQ ID NO: 1165 - DNA, 1325 bp, Zea mays
  unsure (1)..(1325): unsure at all n locations
  Clone ID: PAT_MRT4577_146470C.1
acatttttttattttttttttttttttacttttttttttacttttttttttttttttttttttttttttttttttttttttttttttttttttttttttatttttttttcttttttttttttttttttttnntttatttattataattcggcacgaggcacactgcccctctaccctgcctgccgtttccatctccatccagttctccgcacccacccacccacccactccactcctttccccaacccatggccgccgccgccgccgccgccggcacccgggaggagatggtctacatggccaagctagcggagcaggcggagcggtacgaggagatggtcgagttcatggagaaggtcgcggccgccgccgagctcaccgtcgaggagcgcaacctgctctccgtcgcctacaagaacgtcatcggcgcgcgccgcgcctcctggcgcatcgtatcctccatcgagcacaaggaggagacgcggggcgcggcggggcacgccgccgccgccagggggtaccgcgcgcgcgtggaggccgagctctccgggatctgcgcggggatcctgcgcctcctcgacgagcgcctcgtgccggcggcggcggccgtggacgccagggtcttctacctcaagatgaagggggactaccaccgctacctcgccgagttcaagaccggcgccgagcgcaaggacgccgcggactccacgctcgccgcctaccaggccgcgcaggacatcgccgtcaaggagctgccgcccacgcatcccatcaggctcggcctcgccctcaacttctccgtcttctactacgagatcctcagctcgccggaccgcgcctgctcgctggccaagcaggccttcgacgaagctatttcagagctggatagtcttggggaagagtcgtacaaggatagcaccctcatcatgcagcttcttcgtgacaacctcaccttgtggacttctgacatgcaggaggatggtggcgatgaaatgcgggatgcaaacaagcctgacgaggagcagtagtagccaaacatctccatcgtcatgccatgccatgccatgcttgtacaaggaccattttcgtgtgtcctttccttcaatcgtcgacctttcgttttgttgttatactgctattgtggaaccctgttactgttactgttagtgtatcctattggcaataatcaaatgtggtatggttgactactaaaaaaaaaaaaaaaaatcatgagactagttcctcgtgccttctacacaaagaatgagccgcttttttttttttttttttcgatatttgacgcgaattcgcgcaccacagttctt

SEQ ID NO: 1166 - DNA, 2355 bp, Zea mays
  Clone ID: PAT_MRT4577_146477C.1
aattcggcaccaggtccccctccacccccgagcccaaacgcagctagctccccattccacccaagctcccgcagccagatgctctcccccgctcgagccccaccgccgccgcccgtccccgccgccgggtagaccgcccgatccgacggcgcccgccgcacccatgggccgcggcggcgcgcgcgcggcccccgccgccgcggtgccgccctggcacgcgctcccggacgaggtctgggagcacgccttctccttcctccccgcggactcggaccggggcgccgccgcgtgcgcctgccacgcctggctccgcttcgagcgccgctcgcgccgccgccttgccgtcgccaactgctacgccgcgtccccgcgcgacgccgtcgagcgcttccccgccgtccgcgccgtcgaggtcaagggcaagccccacttcgccgacttcggcctcgttccgcccgcctggggcgccgacgccgcgccctgggtcgccgccgccgccgccggctggccgctgctcgaggagattagctttaagcgcatggtcgtcaccgacgactgcctcgagatgatcgcggcctccttcaggaacttccaggtgctgcgcctcgtctcctgcgagggcttcagtacagccggcctcgctgccattgccgctgcttgcagaaatctaagagaacttgaccttcaggagaatgagattgaggattgctctattcattggctcagtctatttccagtatctttcacttctttggtaactctaaatttttcatgcctagagggggatgtcaatatcactgtacttgaacaattagtaaccagatgcagcaacctcaagactctcaagctcaacaatgctatacctcttgacaagcttgctaacctccttcgcaaggctcctcagattgtagaactcggaacaggaagattctctgcagattaccatccggatctcttttcgaagcttgaagcagcatttgctggctgtaaaagcttaagaaggctctctggggcttgggatgccgttccagaatacctgccagcattttattgtgtatgcgaaggcctcacatcactaaatctgagctatgctactgtacgaggccctgaactgattaaattcattagcagatgcaaaaatttgcaactcttatgggtgatggacttgattgaagaccatggtcttgctgttgtggcatcgtcttgtaacaaactgcaggagttgcgggttttcccttctgctcctttcgaagcagctgagcaggtctctttgactgaaagaggtcttgttgatgtatctgccagttgcccaatgctggagtcagtcctctacttttgcagacggatgaccaacgaggcccttattaccatcgcgaagaaccggcccaacttcacttgcttccgcctatgcatcattgagcctcacacaccagattacattacacaccagcctcttgatgcaggttttagtgccattgtggaatcatgcaagggcctcaggcggctttctgtttcaggccttctcacggacagtgtatttaaatccatcggggcacatgctgaccgtcttgagatgctctcgattgccttcgccgggaacagtgatttgggcctccattacatcctatcgggctgcaagagcttgaagaagctagagattagggactgcccatttggtgacaagcccttgctggcaaacgctgccaagctggagacaatgcgatccctttggatgtcgacgtgctcaatgaccttgggcgcatgccggcagcttgcgcgcaagatgccccgtcttagtgtggaggtcatgaatgatcctcgacggggattccccttggactctctaacagatgagagccctgttgagacgttgtatgtctaccggacaatttcaggtccaaggtccgacacaccagcttgtgtccagattctctaaggggcagctgtggtctacaaaggtactatggaagcatccattttcaatcacatcatgtaccttcaacaccttactagcataacctggatcgtctccttgaagtagcaaggctggtgacctcggtaatcctgtcataatctctgcttagctgtacaactgtttctgggagtttagggtgagagactcagggtccctttcaggtgttaataactgtagggaggacactcgatgagttacaggaactactagatagcgtcttgaggaaacttgggtttgttttcttagcgtgcctagttcttttcatgtataaaaaaatatgggatcattccaatgctgccacaatgtactgtactattggaacaattgtacttggagcctctacttttttgagttttgaccccctccgaaaaaaaaaaaaa

SEQ ID NO: 1167 - DNA, 1830 bp, Zea mays
  Clone ID: PAT_MRT4577_146531C.1
caccgcactagcctagcctccccccgccgctcggccgaatagaatcgattccccctcctccgtcgctgtccggccgaccgcggagagcggagtcgatcgggggcgacaacgatggtggttagcgtggccgcgaccgggcccggcacggacgccgagccggtgagctccaccttcttcgcgtcccgctacgtccgcgacccactcccacggtaccggatgccggagcggtcgatcccgcgggaggcggcgcagcagatcatcagcgacgagctcatgctggacggcaacccgcgcctgaacctggcgtccttcgtcaccacgtggatggagcccgagtgcgacaagctcatcatggactccatcaacaagaactacgtcgacatggacgagtaccccgtcaccactgagctccagaaccgctgcgtaaacatgatagctcacctgttcaacgcgccgatcaaggaggacgagacagctattggggtcggaacagtgggatcctcggaagcgatcatgcttgcaggtctagcgttcaagaggaaatggcagaacaagaggaaggagcaggggaaaccgtgtgacagacccaacatcgtcaccggtgccaacgttcaggtctgctgggagaagtttgcaaggtattttgaggtggagctgaaggaggttaagctatcagaagggtactacgtcatggaccccgtcaaggctgttgagatggtggacgagaacactatctgtgtcgcggcgatcttggggtcgactctcaccggagagttcgaggatgtcaagcagttgaacgaccttcttacagagaagaacaaggaaactgggtgggacgtgcctatccacgtcgacgccgcgagcggagggttcatagcgcctttcctctaccctgagctcgagtgggacttcaggctgcctctggtgaagagcatcaatgtcagcgggcacaagtacggcctcgtctaccctggtgttggctgggtcatctggcggagcaaggatgatctgcctgaggagctcatcttccatatcaactacctggggacggaccagcctacgttcacgctcaacttctccaaaggttcctgtcagatcattgcgcagtactatcaactcattcgcctaggcttcgaggggtacagaaacatcatggagaactgccaggagaacgcggcgatactgcgggagggcatcgcggcgacgggccggttcgacgtcctgtccaaggacgccggggtgccgctggtggccttctcgctcagggacagcagccggttcagcgtgttcgacgtctccgagaacctgcggcggttcggctggatcgtgccggcgtacacgatgccggccgacgcggagcacgtggcggtgctccgagtcgtcgtcagggaggacttcagccgcagcctcgccgaacggctggtctcggacgtccgcaagatcctgcgcgagctggacgcgcgcgcgacccacgccgtgagggtcgccaccgccaccgccgagcagtcgggcgacggcgtcgtggccaagaaaagcgtgctggagatcgagcgggaggtcgccgcgcgctggatgaacgccgtgaacaagaagaagacgggggtctgttgatgcgtcgtgggtcggagactgggaggtttcgccatggtagcttcgtctatatgtcgcgtgcttgtttgtgtctgtgcagggcgcttggatgcgttggtccagttccgcgtatgtgaacaaggtgtcgtatgcagtatgcaaatgttcaggatccaggaaccacaaataatggatgtaaatgttgggtttggtgctaaaaaaaaaaaaaaaaaagcggcc

SEQ ID NO: 1168 - DNA, 671 bp, Zea mays
  Clone ID: PAT_MRT4577_146534C.1
actccactagctcacgggccagattccggcgtcgctgggggcgctctcggcgctccaggtgctccgcttgggagacaacccgggcctgtcgggcgccatcccggacgcgctaggcaagctcggcaacctcaccgcgctcggcctagcctcctgcaacctcacctgcccgatccctgcgagcctcgtgcggctcgacgcgctcacggcgctgaacctgcagcagaacgcgctgtccggcccgataccgcgcggcctcgccggcttggcgagcctccaggcgctctcgctcgccggcaaccagctcacgggcgcgataccgccggagctcgggacgctcgcgaggctccagaagctcaaccttgggaacaactcgctggtgggcgccataccgccggagctcggcgcgctcggcgagctccagtacctcaacctcatgaacaatcgcctcaccggccgcgtcccgcgcacgctcgccgcgctctcgcgcgtgcacacgatcgacctgtccggcaacatgctctctggtgcgctgcccgccgagctcggccgcctgccgcagcttattttcttggtgctatccgacaaccaactcaccggcagcgtccccggcgacctgtgcggcggcgatgaagcggagtccagtagcatcgagcaccttatgctctcgatga

SEQ ID NO: 1169 - DNA, 452 bp, Zea mays
  Clone ID: PAT_MRT4577_146736C.1
cccgcgcgtacgcaagcttcgcttcatctgcaacatgtacaggaccgggtgctgggtgcgggagtatcaccggacaccgtcgggcgtctgcaatggcacgagcggatgtcaggcgatgcttatcagatgctacatcgaccgctaaagcatgttcagcatgacgccgtaggcctgcgcagcactgggggccatgacctacagatgcatcaaggcggtggaatgcgagccccatgcggtcacctacggacgtctgctgacctccatgaaatccattatgaccaacgccagcggctgctaccagcatctgaagggcgcttgcgcaaccgcccgctaggtcgtaagcttcagcagaatgcaggaacctaacctgtcttgctcggacatgttcgacggctaccgctagcgctttgcgctgtgaacctggtctgcatcgccatcgcctttgcagacta

SEQ ID NO: 1170 - DNA, 1172 bp, Zea mays
  Clone ID: PAT_MRT4577_146756C.1
gtagaccactacgcgattgggtcgctcgaggaggcccgctagcgaccggccagtgctcccccgaccccgagtcccgaggccgacgccattcctgattcctccatcttccgttccgccgcaccgccgccggagatatgtcgaggctcgctgctgccgccctccgctgcgtcgtcactgcatcgagagatacctcctcatctcgcttcgccgtgtctgcgccggtgtctgctcggctcttctccgcggatgcatccggtgaagccgccgccacggccgcagagtcgcaggatgactctttcttcaaggcatcccgcgaaggattagcctatggaaggttttacagtgtcattggtggaggcagtcgtcttgagaagaacatattgaaaactgatattatccatcaccttgacagatgtggattgtcattggatgatgtgaagattgaatacaacaagggatatgctccattggccgctttgttgaggttttcttcgaaggcaatgtttaccaccgcaattaggcaagcaaatcagaatcgtctgcacaggattgatgagataagtcgtgaaacatgggatctcaaaaagtccttcgatgggaaagcggtattactgcaaggagtcccacgaaatgccctcgcagatgacatagagcgttttttgtgtggcacgaactttgaacctccaccgtttgaaacctttctaagagctggtgtcccagagcccataagaatgatgctggttaaattccacacgaagactgatgcgatgaatgccttcatcaccaaaaacaggagtttctgtctgaacagtcaagttagcatgcgtgttctccagtaactgagtagccagtcgaatctcgtgatgtttgccccggctttgtcaaacaaaaagccttttaagtccgatctgaggtctatccagtatccacaaatgttgccgtattgtgtggttgtgcaggttatattggactggcagcctgctttaggttttgattcctactagtttgtggtttcagctgtactgcaccgcttttatttcatgagtactctggaaaatgtaccaccattccgctttacaatgaaataattaacggcacaaacgctaagggttcgaatctgcaaaaaaaaaaaaaaaaaaaaaaaaaacaaaaaaaaaaaaaaaaaagcggcc

SEQ ID NO: 1171 - DNA, 463 bp, Zea mays
  Clone ID: PAT_MRT4577_147020C.1
gggagcaccaaaaagcaccattttttccttaagaataacttaaaaaaaagccggggggggggaaaagcatccatcgacccgcagcccatgctgttggaggcaggggtctgctgaaaccgggggtgaacacagcactaacaactgacacagagggaccttgcaataaaaaacacagggggggaacaacaaacacgacacgaacgaagataaacccttgggactaggggaaacatcacgggagcgaaaaggaaaacttgggcgggcgggccccaccggtaagttcctccagttcccgggggagttgccgaaaccgccgccacgggggccaccgccgaagccgccgccaccaccaccggagccgccgccgccaccggagccgccgccaccgccggagccgccaccgccataacggggcccgccaccgccgaaaccgccgccttcacgggcaccaccggacccaccg

SEQ ID NO: 1172 - DNA, 1840 bp, Zea mays
  Clone ID: PAT_MRT4577_147063C.1
gcacgagccgcatcgttcgcttcctttcgtcaactccactcctcttggccgccgcattacctcctcttcgccgctgccgccaccgctccaccgggcagccagccagccatggatgaggagtacgacgtgatcgtgcttggcacggggctcaaggagtgcatcctcagtggtctcctttccgtcgacggcctcaaggttttgcatatggacagaaacgactactatggaggagattccacctcgctcaaccttaatcagctctggaagaggtttagaggggaagacaagcccccagcacatctaggtgcaagcagagactacaatgtggacatggtgccaaagtttatgatggcaaatgggacattggttcgaaccctcatccacactgatgtgacaaagtacttgtcattcaaagctgttgatgggagctatgttttcagcaaagggaagatttacaaggtccctgccactgatatggaggctctgaagtcccctttgatgggtctattcgagaagcgcagagcaaggaacttcttcatttatgtccaagattacaatgaagctgatccaaggacacatcaaggattagaccttactagggtgacaactagagaacttatagcaaaatatggtttaagtgatgatacagtggatttcattggacatgcacttgctcttcatagagatgatcgctatcttgatgaaccggcacttgatacagtgaaaaggatgaaactatatgcagactctcttgcgcgctttcaaggaggctcgccatatatctatccattgtatggtctgggtgagctaccacagggttttgcacgattgagtgctgtttatggtggtacttacatgttaaacaagccagagtgcaaggttgaattcgatatggaggggaaagtgtgtggtgtcacatctgaaggtgaaactgcaaagtgcaagaaggtggtctgtgatccttcgtatttaccaaacaaggttaggaagattggtagagttgttcgtgcaattgctatcatgagccacccaatccctaatacaaatgagtcccactcggttcaaattattttgcctcagaaacaacttggacgcagatcagacatgtatgttttctgttgctcatacacgcacaatgttgcaccaagagggaagttcattgcatttgtgtctgcagaagcagagactgataatccccagtctgagctaaagcctggaattgatctacttggttctgtagatgagattttctatgatatctatgacagatatgaaccagtgaatgaaccatctcttgataattgctttgtctcgacaagctatgatgccaccacacattttgagacaactgtaacagatgttctgaacatgtatacaatgatcaccggaaagactgtagaccttagtgtggatttgagtgctgctagtgctgccgaagaatactgatttcagtcatagtgtcatgtttatcaaagatcacatcgttggcgacagcacatgacccacattaatgaatggctggaatgcgtttattcggttccagattatatcatgccacatgtactgttctgcgtaatgtctattgggcacttgttgctgacagaactgtgcacaatgttgattcaagttgatggatggtggtggttctgttatttactagttagtcgaatggtgcacaacattaaacagtgaccatcatggctgtgtgatgtatcataataactgttcagtaaaaaaaaaaaaaaaaaaaaaaaaaaaaaaaaaaaaaaaaaaaaaaaaaaaaaaaaaaaaaaaaaaaaaaaaaaaaaaaaaaaaaaaaaaaaaaaaaaaaaaaaaaaaa

SEQ ID NO: 1173 - DNA, 158 bp, Zea mays
  Clone ID: PAT_MRT4577_147104C.1
gacttctactccccctcttaccaagtcctcctcggattagggttccttacggttttgtgggggggctatggcagcgggtggtgtggaataccgtttcttataccgcaggctttccttggccaccaacaacgaatccttggataaagcctttctcttct

SEQ ID NO: 1174 - DNA, 1630 bp, Zea mays
  Clone ID: PAT_MRT4577_147208C.1
cgagtagttccctctcctctctctgattcttctgcttctcggtctagctagctagctcggtgcctcggccaaccgggcgtcgcgcgctggccggcctgccaggcaagcaacaatggcagattcaggggaggggcgtcgggtgtgcggcatgccggagaaggcgcagctgcacgtggcgatgctgctgctgcagttcggctacgcgggcttccacgtggtgtcgcggctggcgctcaacatgggcatcagcaagctcgtcttccccgtctaccgcaacatcatcgcgctctgcctgctcgtgcccttcgcctactttctggagaagaaggacaggccgcagctgaccctcaacttcgtcgtccagttcttccttctcgccctctgcggcatcacggcgaaccaagggttctacctgctgggcctggacaacacgtcgccgacgttcgcgtccgccatccagaactcggtcccggccatcaccttcgccatggccgcggcgctgcggatcgagaaggtccggctggaccgccgcgacggcgtggccaaggtggcgggcacgctggcgtgcgtggcgggtgcgtccgtcatcacgctctacaagggccccaccatcttcggtcccagcggcagcggcggcggcggcggcggcctcgagctggcggcggtgggcggcgacaagaactggacgctggggtgcgtgtacctgatcgggcactgcctgtcgtggtcgggctggctggtgctgcaggcccccgtgctgaagaagtacccggcgcggctgtccgtcacctcctacacctgcttcttcggtgtcatccagttcctcgtcatcgccgccttcatggagagggacgcggaggcctggaagttccactccggatccgagctcttcaccatcctatacgccgggttcatcgcgtccggggtggcgttcgcggtgcagatctggtgcatcgaccgtgggggcccggtgttcgtggcggtgtaccagccggtgcagacgctggtggtggccatcatggcgtcgctcaccctgggcgagaagttctacctggggggcatcatcggcgccgtgctcatcgtcgccggcctctacctcgtgctctggggcaagagcgaggagagggcgcgcgtcgccagggacgccgtctccggcggcgaccgcgaggggctccttgtcgcggccgcggccggaggtggtggcggcggcatcgtcaggagcgccggcaataaggcggcgtcggccgcgacgcagcctctcctgctgccgtcctccacccccactgacaacgtctgaccgatccatggatggatgaatcgtcatccatgcttgcctttggtgcgtggagatctgaggcagcatgcagaattaccagttattagtcatttctttgaggttttccttgttgattttcacgcatgtatgtatgctgctacctacgtgtacgtacgtacgtatatgcatgcatcactatggttgttacgcctttgatcacaagacaactacgtagctaggatcgtcggagtgtgttgacgacgtttggtatgtgcatgcgcaatgcctcatcacaggaggtgtgtaataatattagtttgcaggtataaatatgcgttttattaaaagaaaaaa

SEQ ID NO: 1175 - DNA, 1774 bp, Zea mays
  Clone ID: PAT_MRT4577_147210C.1
gctcgatcttgcctgaatatagttcatttcctctgtctgactcttctttgttaatcggccttgctagctagctatctatctagctatctatctagctcggccaagtaataaccgccaaccgggcgtcgtcgcgcgaagtagagcgcacgcagcaacaatggcggacgccggggaggggcggcgggtgtgcggcatgccggagaaggcgcagctgcacgtggcgatgctggcgctgcagttcggctacgcggggttccacgtggtgtcgcggctggcgctcaacatgggcatcagcaagctcgtcttccccgtctaccgcaacatcatcgcgctctgcctcctcgtccccttcgcctactttctcgagaagaaggacaggccgcagctgaccctcaacttcgtcatccagttcttcctcctcgcgctctgcggcatcacggcgaaccaagggttctacctgctggggctggacaacacgtcgccgacgttcgcgtcggcgatccagaactcggtgccggcaatcaccttcgccatggcggcggcgctgcggatcgagaaggtccggctggaccggcgcgacggcgtggccaaggtggccgggacgctggcgtgcgtggcgggtgcgtccgtcatcacgctctacaagggccccaccatcttcggccccagcggcggcggcggcggcggcgacaagctccagctgcagcaggtggccgtggccgtggccgccggcgagaagaactggacgctgggttgcgtgtacctgatcgggcactgcctgtcgtggtccggctggctggtgctccaggcccccgtgctgaagaagtacccggcgcggctctccgtcacctcctacacctgcttcttcggcgtcatccagttcctcgtcatcgccgccttcatggagagggacgccgacgcctggaaattccactccggatccgagctcttcacaatcctatacgccgggttcatcgcgtcgggggtggcgttcgcggtgcagatctggtgcatcgaccgcggtggtccggtgttcgtggcggtgtaccagccggtgcagacgctggtggtggcaatcatggcgtcgctcaccctgggcgagaagttctacctgggcggcatcatcggcgccgtgctcatcatcgccggcctctacctcgtgctctggggcaagagcgaggagagggcgcgcatcgccagggacgccgccgccgccctcgtcgtctccggcgccggcgaccgcgaggggctccttgcggccggcggcggcggtggtggtggcatccggagcaaggcggcggcgtcggcggccgtcacgcagcctctgctgctgccgtcctccacctccaccgacaacgtctgacctatcgagatggatgaatcctaaatttgtggtgcagcatggagagatcagaggctgcatgcgtacgattcatgaggctgccatgctgcggctctgcacgaactcatcatggattggagcagccataagatccgatccagtattattgtcagttagtcttcttttgaggttttccttgttgatttcaggcatgtatgtatgtatgtatgctgctacctacgtatatgcattagtactattgtgtgtgtgtgtggtgagcgagcagacgacggcaggtcattacgactttgatcacgacctgcttttttaattcgtacgtacgtagctagctaggattgtttggaacgagcatgcgtatatgcatgatcatctcgtcagtgtgtacgtcaatattaattgattggtgtgttc

SEQ ID NO: 1176 - DNA, 205 bp, Zea mays
  Clone ID: PAT_MRT4577_147268C.1
cgccgtcgtcctccgatacctcgcgggtgaggttctcgaacttgccgggaacgccgcgagggacaacaagtaagacccgcattgtgccgcgccacatccagcttgctgtgcgccacgacgaggagctgaacaaactgttggggggtgccaccatcgcgagcggtggggttatgcctaacatggggggaacatctgctccccaaga

SEQ ID NO: 1177 - DNA, 443 bp, Zea mays
  Clone ID: PAT_MRT4577_147335C.1
ttcgatctggacgcgcgcgcgacccacgccgtgagggtctccgccgccaccgccgagcagtcgggcgacggcgtcgtggccaagaaaagcgtgctggagatcgagcgggaggtcgccgcgcgctggaggaacgctgtgaacaagaagaagacgggggtctgttgatgcgtcgtgggtcggagaatcggaggtttccccatggcagcttcgtctatatgtcgcgtgcttgtgtctgtgcagggcgcttggatgcgttggtccagttccgcatatgcgaacaacgtgatgtatgcagtatgcaaatgttcaggatcgaggaaccacaaataatgcatgtaaatgttggatttgtgccgtatgttgggtgtggagtatatttcttcgccaggtattttctgtaatcctgtctctaatattaaacgagagcgttacgttcgttaggc

SEQ ID NO: 1178 - DNA, 843 bp, Zea mays
  Clone ID: PAT_MRT4577_147337C.1
tgggtaccgggcccccctcgggtcgacccacgcgtccggctcaacttctccaaggttcctgtcagatcattgcgcagtactatcaactcattcgcctaggcttcgaggggtacagaaacatatggagaactgccaggagaacgcggcgatactgcgggagggcatcgcggcgacgggccggttcgacgtcctgtccaaggacgccggggtgccgctggtggccttctcgctcagggacagcagccggttcagcgtgttcgacgtctccgagaacctgcggcggttcggctggatcgtgccggcgtacacgacgccggccgacgcggagcacgtggcggtgctccgcgtcgtcgtcagggaggacttcagccgcagcctcgccgagcggctggtctcggacgtccgcaagatcctgcgcgagctggacgcgcgcgcgacccacgccgtgagggtctccaccgccaccgccgagcagtcgggcgacggcgtcgtggccaagaaaagcgtgctggagatcgagcgggaggtcgccgcgcgctggatgaacgccgtgaacaagaagaagacgggggtctgttgatgcgtcgtgggtcggagactgggaggtttcgccatggtagcttcgtctatatgtcgcgtgcttgtttgtgtctgtgcagggcgcttggatgcgttggtccagttccgcgtatgtgaacaaggtgtcgtatgcagtatgcaaatgttcaggatccaggaaccacaaataatggatgtaaatgttgggtttggtgccgtatgttgggtgtggagtatatttcttcgccaaaaaaaaaaaaaaagggcggccgccaccgcggtgga

SEQ ID NO: 1179 - DNA, 729 bp, Zea mays
  Clone ID: PAT_MRT4577_147424C.1
tttgggtccctcgggctgggatcattcttgctctaacgcattcctccatctcccaggcctcctcagacccgagaagccaccgaagcgcagctgcggccatggacgccaccggcactggagctggagggaaggccaagaagggagcggccggtcgcaaggccggtgggccgaggaagaagtcggtgacgaggtccgtgaaggccgggctccagttccccgtcggccgcatcgggcgctacctcaagaagggccgctacgcgcagcgcgtcggcagcggtgcccccgtctacctcgcggccgtcctggagtacctcgccgccgaggtcctggagctcgctggcaacgctgccaaggacaacaagaagacgcgcatcgtcccgcgccacgtgctgctggcgatccgcaacgacgaggagctcgggaagctgctggccggcgtgaccatcgcccacggcggcgtgttgcccaacatcaacccggtcctgctgcccaagaagacggcggagaaggcgtctagcggcgggagcaaggaggccaagtccccaaggaaggtcgccaagtcccccaagaaggcctagggtttggaggcggatccgatgttgtcatgtgtaggttgtaagcggggtcaatgtgcttggctgtgcaccttctttgctcaagttgttttctgtcattcctaatggaataggaaatgccgtgtttctgaaaaaaagaaaaaaaaaagcggcc

SEQ ID NO: 1180 - DNA, 646 bp, Zea mays
  Clone ID: PAT_MRT4577_147426C.1
ccaagacctcctcagaccccgagaagcgcagctgcggccatggacgccaccggcactggagctggagggaaggccaagaagggagcggctggtcgcaaggccggtgggccgaggaagaagtcagtgacgaggtccgtgaaggccgggctccagttccccgtcggccgcatcgggcgctacctcaagaagggccgctacgcgcagcgcgtcggcagcggtgcccccgtctacctcgcggccgttctggagtacctcgccgccgaggtcctggagctcgccggcaacgctgccaaggacaacaagaagacgcgcatcgtcccgcgccacgtgctgctggcgatccgcaacgacgaggagctcgggaagctgctggccggcgtgaccatcgcccacggcggcgtgttacccaacatcaaccctgtcctcctgcccaagaagacggcggagaaggcgtccagcggcggcagcaaggaggccaagtcccccaggaaggccgctaagtcccccaagaaggcatagggtttggaggcggatccgatgttatcatgtgtaggttgtaagcggggtcaatgtgcttggctgtgcaccttctttgttcaagttgttttctgtcatttataatggaacaggaaatgccgtgtttctt

SEQ ID NO: 1181 - DNA, 2629 bp, Zea mays
  Clone ID: PAT_MRT4577_147427C.1
aaaaatacttgtagttccgtgattttttttcaactattatagttattgtcaatgtcacgatctgtttgaatagatttacaacaaatattaactctgaccaattggtccaaaattcctaatgttttattgtcaaacaaatggtctattgttaacgccatccctagttccctatctactcgagcaatattttgatagttcatgtcaaaaaaacctagaagaattttgaaatgtaatctattgtcaggtacatctgaactaggtcctctgagcttcctgatttcatgtttcatacttgcattgcacctgaatttagcaattatgcatcaggcactcatcctattgatgttagcgaatgtagaaaactgcaatgtgtctgtgtggagcattctccagtttgtgtatagcattgaagtatgcttgtaatgttgacaattttggcggaccttttcctaaagcagtagtgtgtatgggcttgctttggcctgccagagcctgactgccaataccaacataacgaagagtcatccatcagagatgaatcaaagagccaagactgatttctctgatagatcattctcttcaagcatggacatattgtcccctttcatggtgggcagcagaagccttcagttcttatgaaatagtaacaataatctagtacttcacaagggctggtattacagtatagcagtccgataagcaatggaaaagccagttcagaagtagggtatctggcaaattcacgaggagttcagccttaatttccttttcagcaaatgatagggaattccgatgtgtctcagaagtcattgcttctgtcatgagcctaaataccttcttgttcatgtttgttttcatgaatatcatcttgccagatggatatatccgactgataccaagatctgcagccatccgccttacatagagctttttcagtagtaactccatatcacggggctcctttccgtatcgtcgacggaggtcttctgtaaactgtatcaaggtccatagatctttctctgcagcttttgccgcttcattgagcaactcaacaggattttccagataacttatgtattcagaagagagacgtggagaaatgtttatatccagctgaacatctttgtatggtactgggactaggcaaaactggtcaacctttgacaagctatcaaaaagcatatcaaagaataaatcgatgccaacatttgcaacatctccagactgttgctcaccaaacaagcttccaaatcccctgatacccatatccttctctgcaacatggaaaccttggccaagctctgaatgctcctcaatagctccgagtcgttgcaactcttgagagcaaagacttatcagtgtagaaaaggtatgcgaagccttctgtacctgatcttcctactcttcctcgtaactgatacagctgggcaagtccatatagttcagcaaactggataatcattgtattggcatgtgcaatatctattccactttcaatgatatgtgtgcagacaagaatttcccacgcgtccgcccacgcgtccgcccacgcgtccgcccacgcgtccgcccacgcgtccggcattcctcccatctcccaagacctcctcagacccgagaagcgcagctgcggccatggacgccaccggcactggagctggagggaaggcgaagaagggagcggccggtcgcaaggccggcgggccgaggaagaagtcggtgacgaggtccgtgaaggccgggctccagttccccgtcggccgcatcgggcgctacctcaagaagggccgctacgcgcagcgcgtcggcagcggtgcccccgtctacctcgcggccgtcctggagtacctcgccgctgaggtcctggagctcgccggcaacgctgccaaggacaacaagaagacgcgcatcgtcccgcgccacgtgctgctggcgatccgcaacgacgaggagctcgggaagctgctgaccggcgtgaccatcgcccacggcggcgtgttgcccaacatcaacccggtcctgctgcccaagaagacggcggagaaggcgtccagcggcgggagcaaggaggccaagtcgcccaagaaggccgccaagtcccccaagaaggcatagggtttggaggcggatccgatgttgtcatgtgtaggttgtaagcgggcaatgtgattggctgtgtatctgcttcgctcaagttgctttatgtcattcctaatggaataggaaatgccgtgtttcttacgcctgcttttggttctgcattctactgaaaaagcgtacgataattaacacattcacctttgaagaatcacgattgaaaagtacattaaataaaaaaaaaaaaaaaaaaaaaaaaaaaaaaaaaaaaaaaaaaaaaaaaaaaaaaaaaaaaaaaaaaaaaaaaaaaaaaaaaaaaaaaaaaaaaaaaaaaaaaaaaaaaaaaaaaaaaaaaggggggggccccttttaaaagaatcaaattttacttcccctttcttgcaaaggtaaaagcttttttttttggggcccctaaaataaaattaattggcccggggttttaaaaacgtcggggacctggaaaaaaccttggcgtttccccaaattaaatgcgctttggaaaaaatatccc

SEQ ID NO: 1182 - DNA, 1611 bp, Zea mays
  Clone ID: PAT_MRT4577_147438C.1
gggtccttcctccttcctctcgctcgctcgctccccccccttcccccgctccctctcctcctcctcccttcattcctacctccgctcgcgccactctcctccgaccgaggggcagggaacggtgcccacccgcccgcccgtccgaccgccatggtctcctggcggcgcagcgcgtcctggctgtcgtcggcgtcgcgctcctcgctcggcaccgccgtcggcggggaggccaaggtcacgccggaggcggatccggcggcgcagcacgacgaggccgacgaggagcgctggtcgcgcctgctgccggagctgctcacggagatcatgcgccgcgtcgacgccggcgccgagcgctggccgccgcgccgggacgtcgtggtctgcgcctgcgtgtgccgccggtggcgcgacgccgcggtctcggtcgtccgcccgccgctcgagtgcggcaggatcaccttcccgtcgtcgctcaagcagcctggaccaagggatgcgccgatgcactgttttatccggagggacaaaaaaaattcaaccttttctctctatctcagcttaacgcaggccctaacggataaagggaagtttcttttggctgctcgaaggttcagacaaggagcacatacagaatatatcatctcttatgactatgatgatctgcacccaagaagcagttcatatgttggaaagttgagatctgacttcttggggacaaagttcatcatctatgatagccaggcgccatatgacggtgccaaaccttcgaggacccgatccactcgccgctttgcaagcaagcagataagcccacaggtttcaggcggcaatttcgaagttggacaagtgacctacaggttcaacttcatgaaatcaagagggccgagacggatgcagtgcaatatccagtgccctgtaggccagggcagcgcttcggatccgtccaaggagaaaacaccctcgccgagttccttggacctgaagaacaaggctccaagatggcacgaccatcttcagtgttggtgcttaaatttccacggccgggtgaccgtcgcctccgtgaagaacttccagctcgtcgccacagctggctccggcggtccatggggcgtcggagacgaggagacggtgatcctgcagttcgggaagatcgaggacgatgcgtttacgatggactaccggcagcctctgtccgccttccaggcgttcgccatctgcctgaccagctttggcacgaagctggcctgtgaataaatggttgccggtttaccaactatgttggggatcagattgtagggggtagtctgaactagttgccctgagcacctcagatgggagaaaactggcgataagaaacagggcggacgttgtccctataagctttgactccttgtaatcgcctaaatgattgatttatatatatatgatgtgcgcctatgttgttgaagagatgacgatgacttatcgttgtaaatggcactccacttcgtttggtgacatccaataataatgtgctcatgaacttccacataaaaaaaataaaaaaaaaaaaaaaaaaaaaacctcaaaaaaaaaaaaaaaaaggggcgggccggttttagaaggaatcca

SEQ ID NO: 1183 - DNA, 1721 bp, Zea mays
  Clone ID: PAT_MRT4577_147484C.1
cttttctcgtgggcggacgcgtgggcggacgcccccttccggtcttctcttctccactaccacccgcccgcccgccttctcctccaccactgccccgtcgtggaataggggcaagttcaggcatctcgcttctgtcctggtcgaggggatcggagaaaaatgggctcggaggcggactgcgacaggatcaggggcccgtggagccccgaggaggacgacgcgctgcggcggctcgtggagcggcacggcgcgcgcaactggacggcgatcgggcgcgagatcccggggcggtcgggcaagtcgtgccgcctgcggtggtgcaaccagctgtcgccgcaggtggagcgccggcccttcacggcggaggaggacgcggccatcgtccgcgcccacgcgcgcctcggcaaccgctgggccgccatcgcgcgcctcctccccggccgcaccgacaacgccgtcaagaaccactggaactgctccctcaagcgcaagctcgccgccgcgtccgccccggcgggttcctccgacgtcgacgcgcgcccgaccaagcgcgtcagcctctcgcccgacagcccgtcggggtcggggtcagggtccgggtccgggtccgggtccgaccgtagcgacctgagccacggcgccggccaggtttaccgccccgtggcgcggtccggtgggttcgagccggcggactgcgcgatgagccgtccgctggaggaagaggaggaggaaaaggaggacccgctcacctccctcagcctctcgcttcccggcacggaccagcggttccaccacgaccgcgcccacagccagttccaggagctcccggcgtcgccgccctcgccctccccgcctccgccgccggcgggtccgacctcggcgtacccgttcagccccgtgttcatggaggcgatgcaggagctgatccgcacggaggtgcagcggtacatggcgagcgtgggcgtgcgcgccgggtgcggcgccgccggcggggccgacctctgcatgccgcagctcgtcgacggcgtcatgcgcgccgccgccgagcgggtcggccggatgcagtagctcctgggcgtgcatgagccatcaaatactctcccaaaccgtcaatcgatcttctaggacgaacgcgcagcagctgttcttatcagtagcaaacttccaagttattattttcctttttttaaaactttattctctcgaaccgctgtgaaaccgaaacagcagtgaaaagagtcagcaactgaaaaaaaaaaatatgtgggaactgaaaggtggagaaaaatgtagtaaaggcttgctgaaagccgtgtaaagcgctgcctgcctcctctctctctctctctctctacaggaatgaatcggatcggaacggaatgaaacgagaagagggggacgacgcacattctggtttcgtcgtcacacggccgtagaaacccggaaacggaccaaatcagatctgatcagtgcgaagcattgtgttaattaagatcccgtccgtcctgtgtagcagcgctacgtagactactactactactagtcgttctctggccgttgtatttagcagaggagctcgcgtttgtttattcttcggcggctgtcgctctgaatccagaaaggaacagagcggcggtgtaaagccgggagcggaagcggaggttggcaataatcgagatcgagcctgccattttaaaaaaaaaaaaaaaaaaggggcggcc

SEQ ID NO: 1184 - DNA, 344 bp, Zea mays
  Clone ID: PAT_MRT4577_147564C.1
tacaataccctaaagtgagtcgtattacctgcgccgccgcgggttagcgccgtcgccgatcgggggctcccgcttccccctgagggcggcgcgcgcccggagattgaccgcggtgctggcggttgcgccagtcagaggaatgtcccatcgtcatctggatctagtaggagtgtcgtgcgctccgagagcaggcatggtcatgatctcgcaccgggttcattcggttctccgtctcggtcacccggggacaaatgacgtcactggctggcaagaggtgcgttctgctgctgatcgagtcgaccgtctcgacgatatcagatcacacaacggtgcaccaggcttgt

SEQ ID NO: 1185 - DNA, 343 bp, Zea mays
  Clone ID: PAT_MRT4577_147568C.1
atctacctgctcctacgcctacttctggatccaggcaagccagggatcgctatgttggacttgtaggagcacgacttagaatcgaaagccgacgccggagcgtccaagacctacgctcatcacgctggtactgtccgtaagaacggtttcatcggcatcaagaaccggccctgaaaggttgtggtggttcctacatcagagactgttcaccatggacatgccaaatgccactttgctgccatagacatattcaacgggaaaaagctcgaagatattgctcattagtcacacaactgtgatattacctatgtgaaccgtactgagtaccagctgattgatctat

SEQ ID NO: 1186 - DNA, 301 bp, Zea mays
  Clone ID: PAT_MRT4577_147672C.1
ggaaaaaaaccttggtcattcttctttcggctcgtttaatagcgggggcaaacaggggggggggcgggggtccccacccctaatccaaggggggaacgggccctaacccggggaccgaagcgaacgggaccccgatcctttagatgggtaagataactcggcccaagccagggggggcccacacataagtccctccagccgccgccgccgccgccgtagccgccaccaccaccctggggccgaccggcgtagccgccaccggctccgtagccgccggcaccacccttgggccaaccgggcc

SEQ ID NO: 1187 - DNA, 2546 bp, Zea mays
  Clone ID: PAT_MRT4577_147684C.1
ctgtgcggggctcctgccggccgggccgggaccgctccttcccgttcatccatcacaccatccccactctctcctctccacccggcgagcggacacccccctgtcctcttgacccgatcccgtccccgcccgcccgccccgccgccgcgcgcgctggtccggacgctcgggcgctggtgatccggttgatgcagcagcggggcctcgcccacaactgccgctcccgcggcttctcccgctcccgccgcgcagtcgagggcgcctgaaacgcacccgccccacgcacgcagggcaaccgaaaacccctcgatccggctctcctcgcgctgtagcttttataacgccgtagacgacaacgaaagagaacggaaagaaataaaacccaccacacctaccgtcgtccgtaaaggaaggaaggactcgagatggacaccgtcggcgtccccgtggtggccgttgcgaatgggatcggggaggtggagcgcaaggtgcagaagagctactgggaggagcactccaagtgcctcactgtcgagtccatgatgctcgactcccgcgccgccgacctcgacaaggaagagcgacccgagatcctgtctttgcttccctcttacaaagggaaatcagttctagaacttggtgctggaataggacgctttactggagatctggcaaaagaagctgggcacgttctggcactagacttcattgaaagtgtgattaagaagaaccaaagcataaatgggcatcacaagaacataaccttcaggtgtgccgatgtgacatctaacgacttgaagattgaagataactctgttgatctgatattttcaaactggctattaatgtatctttcagatgaggaggtccaaaagcttgtggggaaaatggtaaaatggttaaaggtcggaggccatattttctttagagaatcatgttttcaccaatctggagattccaaaaggaaggtgaacccaacacactatcgagaaccaaggttttataccaaggtatttaaagagggccattcatttgatcaagatggaggttcgtttgaactttctctagtgacctgtaaatgcattggggcttatgtcaaaaacaagaagaatcaaaaccagatatgctggttatgggaaaaggtaaaatcaacagaagacagagattttcaaagattcctggacaacgtgcaatacaaaacaagtgggatattacgttatgagcgtgtctttggtgaaggttttgtgagcactggtggaatcgagactacaaaggaatttgtgggcatgctcgatcttaaaccgggccagaaagtacttgatgtcggatgtggaattggaggcggcgacttttacatggctgcaaactatgatgtccatgttcttggtattgatctttcggtgaacatggtttcatttgcaattgaacgtgccattggacgcaagtgctctgttgaatttgaagttgctgattgcaccacaaaggattacccagaaaatagttttgacgtcatctacagccgtgacaccatccttcacatacaagacaagcctgctctgttcagaagcttcttcaaatggctaaagcccggcggcaaagtcctaatcagcgactactgtaagaatcctggaaaaccatcagaagaatttgctgcgtacattaagcagagaggctatgaccttcacgacgtgaaggcttatggacagatgctgaaggatgctggttttcataatgtcatcgcggaagatcgcactgagcagttcttgaatgttctacagagggagataggtgaagttgaaaagaacaaagacgctttcctggcagacttcacccaggaggactatgacgacattgtgaatggctggaacgcgaagctgaaacggagctctgccggcgagcagaggtgggggttgttcattgccaccaagtgatttggcctggcagcaggagggctcttcggaataagaatggatgtggctgtaactctgcttctagaccggtgatggttcagcttagaagcaggggatcttcatcatcagaataaaaacgtgtgttgttgtgttgctgtgtctacgccactagtatttctgttgttacttatgttctaggtaaactgcgcagccagagcagagctgaagaatatgtactgcttgctcgctcttgtgtggttgtgtctaccctactagcatttcagctttgttgtaggtaaactgcgaacccagagttgcagaacccgtactgctcgtttaagttcatggtgaactacgagctaaaaggctgttgccagagtcgatgtcacttgtcactggaggtccccggttcaattcagatgttgctttggcaaaaaaaaaaaaaaaaaaaaaaaaaaaaaaaaaaaaaaataaaaaaaaaaaaaaaaataaaaaaaaaaaaaaaaaaataagaaaaaaaaaaaaaagggggccccccccttttggcacttgtcccccggggtctcccggttcagttcagatgttgctttggcacgtgtttccttttcccccggaggtcagctctcgtggagaaaa

SEQ ID NO: 1188 - DNA, 626 bp, Zea mays
  unsure (1)..(626): unsure at all n locations
  Clone ID: PAT_MRT4577_147695C.1
cggccgcgtgggcgcccatgcacgcacccgccgcctacgtgcgcctccctacttgcccctgccggcctgccctgttcatgtacccaccacaatcttacacctaggaggacgctacgagctcaagctctgggctgtggcgagcggcgagcattgagtcgaggggcanccganaagatggcaatgacgcggccgttcttggcgccgctgatgatagtagcggctgttcttctttcacgcatggcggcggcggcagcggacgacggcgacgtgctgctgcaggtgaagagcgcgttcgtcgacgatccccaggggtcttagcgggctggaacgacagtgctggctccggcgccggctcgtcggggttctgttcctggtccggcgtggcgtgcgacgcgtcggggctcagggtcgtgggcctcaacctgtccggcgccgggctggccgggacggtgtcccgcgcgctggcgcggctcgacgcgctggaagcgatcgacctgtcgtcgaacgcgctcacgggccccgtcccggcggcgctcggtgggctacccaacctccagttactgctgctctactccaaccagctcacgggccagattccggcgtcgctgggggcgctctcggcgctc

SEQ ID NO: 1189 - DNA, 660 bp, Zea mays
  unsure (1)..(660): unsure at all n locations
  Clone ID: PAT_MRT4577_148063C.1
gtacgcccgcagtatcggtccggaatcccgggtcgaccacgcgtccggtggtattggtatgacacagtcagaatcttgtgaacaacctgggtaccattgccaggtcagggactaaggagtttatggaggcactggctgctggtgctgatgtgtccatgattggtcagttcggtgttggattctactctgcctaccttgttgccgagagaagtagttgtgaccaccaagcacaacgatgacgagcagtatgtgtgggagtctcaggctggtgggtccttcactgtcacacgtgacacatctggggagcagcttgggaggggtactaagatcaccctctacctcaaggatgatcagttggaataccttgaagagcgccgcctcaaggacctgatcaagaagcactctgagtttatcagctaccctatctctctatggactgagaagaccactgagaaggaaatttctgatgatgaagatgaggaagagaagaaggatgctgaggagggcaaggttgangatgttgatgaagagaaggaagaaaaggagaagaaaaagaagaagataagggaggtttctcatgaagtggtccctggtcaacaaacagaagcctatctggatgaggaagcctgaggagatcactaagggaggagtatgctgctt

SEQ ID NO: 1190 - DNA, 1890 bp, Zea mays
  Clone ID: PAT_MRT4577_148084C.1
acatgcatagtaaagttagcgtgggtgtcgatggattacttggctgctgctgtacccgtgaccttggctctgggagtgggagctatcttgttggtcttacgatggacgtactgccgccgccgaacaagcgccgaagaagcaagactgcccccggggtcaaggggcctcctgttcctgggggagacgctccactacctggcagcgtcctccaccccgggggtattgccaccattcttccagcgacggttggagaggtatggccccatcttccggacgaacctggtcggggaggatctcgtcgtgtcgctggacgcggagctgaacgcgcacgtgctgaagcaggaggagcgcggcttccagatctggtacccgccctccttcatgcgcgtcttcggcgccgacaacatcaccgccaagctcggcgtgctccaccactacatgaggaccctcgtgctccgcctcttcggccaccagaccgtccgctccgtgctgctgcacgacgtgcagcggagcgcgcgcgacgagctgcgctcatggctcggccgcccggacgtcgaggtcaggacggccacctccaggatgatatttggcgtcactgccaagaagctgatcagccatgacgacgcagcatctggagaaacgttgtggagatgcttccacgactggacttcggggctgctctcgtttccggtttccattcccggcacaaccttctacagatgcatgcagggacgtaagaaggttatgacgatgctgaaacagcagctcgtcgagcgtcgacggaacgcagcggagcgcgagacgacagaggatttcttcgatctcgtgatcgatgaactgaacaagccagaccctatgatggacgagagcaccgcgttggacttgctgttcaccatgttgtttgcgagccatgagacgacgtccatggtattaaccgtcatactcaagtatctgactgacaacccaaaagctttgcaagagctgacagaggagcacgaaagaatcctggaaagtagggccgatccaggctctgacctcacgtgggaggagtacaggtctatgaaattcacatctcatgttatacatgagtcgctaaggctcgcaaacatcgcactggccatgttcaggaaagcaaatcaggatgtgcacataaatgggtacacaattccaaaaggatcaaagatcatgatgtgtgcactagcatcgcacttgaatacggaggtctacgaggacccctcagtgttcaatccatggagatggaaggatattcctgaaccagtcggcacctctaaggactttatggccttcgggggtggtttgcgcctatgcgctggtgccgagttttccaagatgcagatggctatgttcctccattacttggtcacaaattacagctggaaacccgtcagcggtgggacaatgttattctatccaggactgcaatttccagaaggcttccacatccagcttcttccaaaaatcccaaacgtggttccataaaccctatgaagaaatatgaatacgaataatttaagcaaatattctaaatgtaccctggggaattgaagttcgataacgatgtggtacgggctgatttggtaaccatggatcacaggaggatgggagaggattgatggagaaattagttcatttctccctcaacctctttcaatcctcttatgatccacttatcaccaaatcaaccctaatgatagcaggtcgaattgtcggaacaaataatagtttcaccaaacagaaggggagtatgcatgtgtgtaactttttatagttataaataatagtagagtaaattcagctcgttgtgtaacaactatgcaggtgagtaaaaattggttcagcatattgtatatattatgcccagttcaatgg

SEQ ID NO: 1191 - DNA, 2070 bp, Zea mays
  Clone ID: PAT_MRT4577_148098C.1
aaattacaaaaaaaaaaaaaaaaacggtcagtcttttgctgtgctggctgtggcacttctttgatgatacgagtactagcaaataatgaagagctctggtagtggcaacttccgtttcagcccgccgcgcgtaggccgctggttggccaggggacaccacgccttccattattagagtaccactactccattagtaccagtgtaccacccccacaaaccaccaccaccaccaccgaaaacgaatcccagaacagtaccgcagcggcagccatggtgctctcgcacgcgagctccggccgggacgacgacgcggtggcctccaccttcgcgtcgcgctacgtgcgcgagcgcctgccgcggtaccggatgccggagcggtcgatcccgcgggaggcggcgcagcagatcatcagcgacgagctcatgctggacggcaacccgcgcctgaacctggcgtccttcgtcaccacgtggatggagcccgagtgcgacaagctcatcatggactccatcaacaagaactacgtcgacatggacgagtaccccgtcaccactgagctccagaaccgctgcgtaaacatgatagctcacctgttcaacgcgccgatcaaggaggacgagacagctattggggtgggaacagtgggatcctcggaagcgatcatgcttgcaggtctagcgttcaagaggaaatggcagaacaagaggaaggagcaggggaaaccgtgtgacagacccaacatcgtcaccggtgccaacgttcaggtctgctgggagaagttcgcaaggtattttgaggtggagctgaaggaggttaagctatcagaagggtactacgtcatggaccccgtcaaggctgttgagatggtggatgagaacactatctgtgtcgcggcgatcttggggtcgactctcaccggagagttcgaagatgtcaagcagttgaacgaccttcttacagacaagaacaaggaaactgggtgggacgtgcctatccacgtcgacgccgcgagcggagggttcatagcgccattcctctaccctgagctcgagtgggacttcaggctgcctctggtgaagagcatcaatgtcagcgggcacaagtacggcctcgtctaccctggcgttggctgggtcatctggcggagcaaggaggatctgcctgaggagctcatcttccatatcaactacctggggacggaccagcctacgttcacgctcaacttctccaaaggttccagtcagatcattgcgcagtactatcaactcattcgcctaggcttcgaggggtacagaaacatcatgcagaactgccaggacaacgccgcgatactgcgggagggcatcgcggcgacgggccggttcggcgtcctgtccaaggacgccggggtgccgctggtggccttctcgctcagggacagcagccggttcagcgtgttcgacgtctccgagaacctgcggcggttcggctggatcgtgccggcgtacacgatgccggccgacgcggagcacgtggcggtgctccgagtcgtcgtcagggaggacttcagccgcagcctcgccgaacggctggtctcggacgtccgcaagatcctgcgcgagctggacgcgcgcgcgacccacgccgtgagggtcgccaccgccaccgccgagcagtcgggcgacggcgtcgtggccaagaaaagcgtgctggagatcgagcgggaggtcgccgcgcgctggatgaacgccgtgaacaagaagaagacgggggtctgttgatgcgtcgtgggtcggagactgggaggtttctcgccatggtagcttcgtctatatatgtcgcgtgcttgtttgtgtctgtgcagggcgcttggatgcgttggtccagttccgcgtatgtgaacaaggtgtcgtatgcagtatgcaaatgttcaggatccaggaaccacaaataatggatgtaaatgttgggtttggtgccgtatgttgggtgtggagtatatttcttcgccaggtatttgctgtaatcctgtccctttacgttcgtgcactgcaatgagaataaaaaaaaataagtgtcgttcacggaac

SEQ ID NO: 1192 - DNA, 2634 bp, Zea mays
  Clone ID: PAT_MRT4577_148101C.1
ccacccccacaaaccaccaccaccaccaccgaaaacgaatcccagaacagtaccgcagcggcagccatggtgctctcgcacgcgagctccggccgggacgacgacgacgcggtggcctccaccttcgcgtcgcgctacgtgcgcgagcgcctgccgcggtaccggatgccggagcggtcgatcccgcgggaggcggcgcagcagatcatcagcgacgagctcatgctggacggcaacccgcgcctgaacctggcgtccttcgtcaccacgtggatggagcccgagtgcgacaagctcatcatggactccatcaacaagaactacgtcgacatggacgagtaccccgtcaccactgagctccaggtagtatgttagcaccacagaaggtagaagaaaggagatcagagattagagctaggaagacggaaggaagacgagagctagacggggtctaagtaaattggtattttgtatttcgttgtttgatgccttttacagctgactcagcctatatttatatctcctcaagcccacataacccatagctcatctactacacctaatatatctaacatagtactacaactaataaatctcttataagcttgactagatctataaaaaaaatagcattggtgtttatacatctttactataaaattacattattctatagttaattcaattattgcataataaatattagtaatcttgttatatatttgatcgaacttttattgtgaatcacagagaataagttttctattctacttgggaaaaccatatatgagcaatgccaaaagttctcgagtttttcgaccggaaaatcctgaatatacctgataaacaatgaacatatatggacgacctgaagagaaaaaaaaaagttcgattgttttgtgtttcccagttcagactaataagttacagtaacagatggtttgtagagatgtttaacttgtctctgccaaacaataactacgacctgtttatacactcctgttatgttacttgccactgtgcatttgcttactgcctgccctctattcctgcagaaccgctgcgtaaacatgatagctcacctgttcaacgcgccgatcaaggaggacgagacagctattggggtcggaacagtgggatcctcggaagcgatcatgcttgcaggtctggcgttcaagaggaaatggcagaacaagaggaaggagcaggggaaaccgtgtgacagacccaacatcgtcaccggtgccaacgttcaggtctgctgggagaagtttgcaaggtattttgaggtggagctgaaggaggttaagctatcagaagggtactacgtcatggaccccgtcaaggctgttgagatggtggacgagaacactatctgtgtcgcggcgatcttggggtcgactctcaccggagagttcgaggatgtcaagcagttgaacgaccttcttacagagaagaacaaggaaactgggtgggacgtgcctatccacgtcgacgccgcgagcggagggttcatagcgcctttcctctaccctgagctcgagtgggacttcaggctgcctctggtgaagagcatcaatgtcagcgggcacaagtacggcctcgtctaccctggtgttggctgggtcatctggcggagcaaggatgatctgcctgaggagctcatcttccatatcaactacctggggacggaccagcctacgttcacgctcaacttctccaaaggttcctgtcagatcattgcgcagtactatcaactcattcgcctaggcttcgaggggtacagaaacatcatggagaactgccaggagaacgcggcgatactgcgggagggcatcgcggcgacgggccggttcgacgtcctgtccaaggacgccggggtgccgctggtggccttctcgctcagggacagcagccggttcagcgtgttcgacgtctccgagaacctgcggcggttcggctggatcgtgccggcgtacacgatgccggccgacgcggagcacgtggcggtgctccgagtcgtcgtcagggaggacttcagccgcagcctcgccgaacggctggtctcggacgtccgcaagatcctgcgcgagctggacgcgcgcgcgacccacgccgtgagggtcgccaccgccaccgccgagcagtcgggcgacagcgtcgtggccaagaaaagcgtgctggagatcgagcgggaggtcgccgcgcgctggaggaacgccgtgaacaagaagaagacgggggtctgttgatgcgtcgtgggtcggagactgggaggtttcgccatggtagcttcgtctatatgtcgcgtgcttgtttgtgtctgtgcagggcgcttggatgcgttggtccagttccgcgtatgtgaacaaggtgtcgtatgcagtatgcaaatgttcaggatccaggaaccacaaataatggatgtaaatgttgggtttggtgccgtatgttgggtgtggagtatatttcttcgccaggtatttgctgtaatcctgtccctttacgttcgtgcactgcaatgagaataaaaaaaaaataagtgtcgttcacggaaaaaaaaaaaaaaaaaaaaaaaaaaaaaaaaaaaaaaaaaaaaaaaaaaaaaaaaaaaaaaaaaaaaaaaaaaaaaga

SEQ ID NO: 1193 - DNA, 1722 bp, Zea mays
  Clone ID: PAT_MRT4577_148134C.1
gggacctcgagccggccggaaaaaaaaaaaaaaaaaaaaaaattggctagggacatgtaaaaccttgtacaccactagtccattacctagcaagcagcagcctgatccaacaagtgcagtgtgtgcacggtacgtgatctcaagccgccaaagttaacaatggcagaacagcacaaaggcccaacaaacagggtagcctccgatggcctcccggacggtgttgcgccgccgcggaagaagagcaacgtccggttcgccttcgcctgcgctatcttggcatccatgacctccatcctcctcggctacgacatcggggtgatgagcggcgcggcgctgttcatcaaggaggacctcaagatctcagacgtggaggtggaggtcctgcttggcatcctcaacctctactcgctgatcggctccttcgcggcagggcgcacctccgactggatcggacgccggctcaccatcatccttgcggccgtcatcttcttcgtcggggccttcatgatgggcttctcggtcaactaccccatgctcatggccggcaggttcgtcgcgggcatcggcgtgggctacgcgctcatgatcgcgcccgtgtacacggccgaggtgtcccccgcgtcggcccgcggcttcctgacgtcgttcccggaggtgttcatcaacttcggcatcctcctaggctacgtgtccaactacgccttctcccgcctcccgctccgcctgggctggcgcgtgatgctcggcatcggcgcggccccgtccgtggtgctcgccctcatggtgctcggcatgcccgagtcgccccggtggctcgtcatgaagggccgcctggcggacgccaaggtggtgctggggaagacctccgacacgccggaggaggccgcggagaggctcgctgacatcaaggccgccgccggcatcccgcaggagctcgacggcgacgtggtggccgtgccaaagaagcgggacagcgaggaggcgcgggtgtggaaggagctcatcctgtccccgaccccggccatgcgtcgcatcctcctctcgggcatcggcatccacttcttccagcaggcgtccggcatcgacgccgtggtgctgtacagcccgcgcgtgttcaaggccgccggcatcaccagcgacaaccagctcctgggaacgacctgcgcggtgggcgtcaccaagacgctcttcatcctggtggccacgttcctgctcgatagagtcggccgccggcctctcctgctggcgagcaccgggggcatggtcgtcagcctcgtcggcctcgggttcggcctcaccgtcatcggccaccaccaagagggcaccaccatcccctgggccatcggcgtctgcatcgcctccatcctcggggtggtggccttcttctccatcgggctcggccccatcacgtgggtgtacagctccgagatcttcccgcttcacctgcgcgcgctcgggtgcgctctcggcgtaggcttgaaccgcgtcaccagcggggtcatctccatgaccttcctgtcgctgtccaagggcatcactatcgggggcagcttcttcctctacgcgggcatcgcctcgctcgcctgggtcttcttcttcacctacctccccgagacacgcggccgcacgctcgagcagatgggcgggctcttcggcatccccaacatggccggcgacagcgaccagctgaccagcagtcgcccgagaaggagaagaccttga

SEQ ID NO: 1194 - DNA, 2698 bp, Zea mays
  Clone ID: PAT_MRT4577_148316C.1
ggcgagggagctcaccaggagagaggggcctgtgtgagcattgagcaaagcaaacgaagcagtacatacatctctcgtgggaccctgcaggccggccggctccatgcaacaagggaggacgacgagcggtggcggtgggcgatgatgatgatgatgatggcgggggagcacgtgctggccgctctgggcaccctgctgctggcctcgctcctgaccctggtgctgaaccacttcctgcccttgcttctgaaccccaaggcccccaggggaagcttcgggtggccgctcctcggcgagacgctcaggttcctcacgccgcacgcctccaacacgctgggcggcttcctcgaggatcactgctccaggtatgggcgggtgttcaagtcccacctgttctgcaccccgacggtggtgtcctgcgaccaggacctcaaccacttcatcctgcagaacgaggagcggctgttccagtgcagctacccgaggccgatccatggcatcctgggcaagtcctccatgctcgtcgtcctgggcgaggaccacaagcgcctcaggaacctcgccctcgccctcgtcacctccaccaagctcaagcccagctacctaggcgacatcgagaagatcgcgctgcacgtcgtcggcgcatggcgacggcacggcggcgtcagggtcgtcgcattctgcgaggaggcaagaaagttcgcattcagtgtgatagtgaagcaggtgctggggctgtcgccagaggagccggtcactgcaaggatactcgaggacttcctggccttcatgaagggcctcatctccttccccctctacatcccagggaccccatatgccaaggctgtccgggcgagagagaggatatccagcactgtgaagggcatcatcaaggagcggaggagcgctgggtcatggaacaagcagggcgacttccttgacgtgctgctgtcaagcaacgagctatctgacgaggagaaagtgagctttgtgctggactccctgctgggagggtatgagaccacctcgctcctcatctccatggtcgtttatttccttggccagtctgctcaagatctggacctggttaagagggagcacgacagcataagatccaacaaaggcaaggaggagtgcttgacttcagaagactacaagaagatggaatatacccaacaagtcatcaacgaggcgctgagatgcggcaacatcgtcaagttcgtccaccggaaggcgctgaaagacgtcaaatacaaagagtatctgattccatctggctggaaggtcctaccggtcttcactgccgttcatctgaacccctcacttcatggagacgcgcagcagtttcagccctgtaggtgggagggcacaagccaagggacaagcaagaggtttacaccgttcggtggtggcccccggctctgcccaggatcagagctcgctaaagtggagactgctttcttcctccatcaccttgtcctcaattatagatggagaattgatggcgatgacattccaatggcatacccgtatgtggagtttcagagaggtctgccaatagaaatcgagccaacgtcccctgaatcttgactgtcctggagctacagccatcagttatcacaccagagagaaaaggggaaggtgcatggagtatacatgaatggtcagtgacagatctcacaagtgaaggaacactgagggcgcgtgctagtagctagcatatgaggcagctgagactgtaatttaatgtacatggtgtagatatattttgtccatggcaattgcttgaagtggctgattcacttcaccctgtaaaacattctccagtggtttcaactgctatcctataaaaaagaagggcccctgtgtttagtaaaaaaaaaaaaaaaaaaagcagctcatatagtttcgccaagatatacgcagtgaagcagacaaacaaatttttttttttttttccaaaaaaaatattcatcatagaatcagttgaacctgtagtctacactctaaaccaagcgacaggagtttgcacacacgtacggtccacggaggagctaccacacacacgtacaaatcaacacgcacgctggcaccgatcccgaccgaggcaggcaggagcagggcacggccggtggctcggtcagttggtacctgttgtgttgcagtcgaagcaggtgtggttgcggccgatctccgtgatcctgtcgtagccgtgcctgaagacgccgaggccgaagaggacgccgacgaggaggacgatgaccaggatcaccagcaggtagcaccccacccactccttggtgcacctgagcttgcacatggctctctcccccggccctggctgccgcctctctccctctccctctccctctccgggaccgggaggagggggttcttatcggaggagggaaatatgctaggcgagtgcctgtcgctcgcccggtcgcccctgtcccttcggcggtatggcgacggtatcgggcagagctgtgctgtgctgtgtgttgggctgttagtgatgatgatgtgccttttgcctttgtgccatgccaagaatctgatcgccgcggactgcgtggactaatgccacgaacacatacatatatggctatctttttctcccgccgtacgaatcatcggcgtgtaaagctgtataatagtgtggccgggagatggcacaggcgactgagagagggac

SEQ ID NO: 1195 - DNA, 804 bp, Zea mays
  Clone ID: PAT_MRT4577_148470C.1
ttgggtacctcgaggccggccgggacggcctcacccgtccacccacccacccgcctcgcctccatccacagcgaccacgcccatcttcgctctgtccgctcacccccacctctccgcccccgtctccgtccgcacccgtccgcctccgacttccccgtggcccagccggatccggagccgaactcgaccttgttcaggaaggagagcccgaaccgcggcgggcgggagggctctttttagcttgccccgcctgaggccagccgccccatgggccagtcgcctgagcgcgctacgtatcagctcatcgaccggcgggaaggctgtagcgtcggttggacgtcgtgagcgtgcagagcaattaagcaaagcagggcttggcggagtttgtaccgtcatttgttaaaccatcttttggaaatggtacagttctagataagtcagatttcaggggttcttctggaaaaacaattctagataggcctgagccatcaaagtctaataactcagatgatgaggcacaccagttttggcataagcagcttccggatgacattattccagacttcacttcttttgagaaagttgaacaagggcctgaactgtcccttgctggattatccttgaatgcaccccccttttatgggacaacttccagtcgcttctcaagagaatatcacgaattatcttctccagttaccaagggcctggaactggaactagaacatactaatatgctatatgaagataaaagcaactgggagcaaaattatattggtgatcttcatattgctaatggaaaccaga

SEQ ID NO: 1196 - DNA, 848 bp, Zea mays
  unsure (1)..(848): unsure at all n locations
  Clone ID: PAT_MRT4577_148473C.1
cgattgggtacctcgaggccggccgggaccacccgcctcgcctccatccacagcgaccacgcccatcttcgctctgtccgctcacccccacctctccgcccccgtctccgtccgcacccgtccgcctccgacttccccgtggcccagccggatccggagccgaactcgaccttgttcaggaaggagagcccgaaccgcggcgggcgggagggctctttttagcttgccccgcctgaggccagccgccccatgggccagtcgcctgagcgcgctacgtatcagctcatcgaccggcgggaagcaagtatgtactcagaatcaaggggagaggctcgtgattttgctagggtccggaatacctgctttgagcaggctagacaggcttacttggttggcaacaaggctcttgcgaaggagctcagcatgaaggggcaggcctacaatgtgcaaatgaaagcggctcatgagaaagctagagaagctatttaccgacaaaggaatcctgtttcttcccaacgtgggggtggtgaccacctgattgatttacatggcctgcatgtgaacgaagcaatccacatcctgaagggtgagctcaccgccttgaagagcgcggcgagggcagcaggggagaggatgcaagtcatggtttgcgttggaacaggccaccacaccaagggctctcgcactgcgaggttgcccatncgctgtggagcagttcctgctggatgaaggcctccagtacacgcagcctcaggcgggtctgctccgagtgatggtgtactaacatctcttaggtgagacatcacggntgaggaaaaaaactccaaaaaaaaaaaaaaaaagcggcc

SEQ ID NO: 1197 - DNA, 826 bp, Zea mays
  unsure (1)..(826): unsure at all n locations
  Clone ID: PAT_MRT4577_148474C.1
attgggtacctcgaggccggccgggacggcctctcccgtccacccacccacccgcctcgcctccatccacagcgaccacgcccatcttcgctctgtccgctcacccccacctctccgcccccgtctccgtccgcacccgtccgcctccgacttccccgtggcccagccggatccggagccgaactcgaccttgttcaggaaggagagcccgaaccgcggcgggcgggagggctctttttagcttgccccgcctgaggccagccgccccatgggccagtcgcctgagcgcgctacgtatcagctcatcgaccggcgggaaggctgtagcgtcggttggacgtcgtgagcgtgcagagcaattaagcaaagcagggcttggcaagtatgtactcagaatcaaggggagaggctcgtgattttgctagggtccggaatacctgctttgagcaggctagacaggcttacttggttggcaacaaggctcttgcgaaggagctcagcatgaaggggcaggcctacaatgtgcaaatgaaagcggctcatgagaaagctagagaagctatttaccgacaaaggaatcctgtttcttccncaacgtgngggtggtgaccacctgattgatttacatggcctgcatgtgaacgaagcaatccacatcctgaagggtgagctcaccgccttgaagagcgcggcgagggcagcaggggagaggatgcaagtcatggtttgcgttggaacaggccaccacaccaagggctctcgcactgcgaggttgcccatcgnctgtggagcagttcctgctggatgaaggcctccagtacacgca

SEQ ID NO: 1198 - DNA, 955 bp, Zea mays
  Clone ID: PAT_MRT4577_148475C.1
cattgggtacctcgaggcgtcgggcataattatcatattgcccttacctgacctcgccttcacctcagctgacggcctcacccgtgcccccacccacccgcctcgcctccatccacagcgaccacgcccatcttcgctctgtccgctcacccccacctctccgcccccgtctccgtccgcacccgtccgcctccgacttccccgtggcccagccggatccggagccgaactcgaccttgttcaggaaggagagcccgaaccgcggcgggcgggagggctctttttagcttgccccgcctgaggccagccgccccatgggccagtcgcctgagcgcgctacgtatcagctcatcgaccggcgggaaggctgtagcgtcggttggacgtcgtgagcgtgcagagcaattaagcaaagcagggcttgggtaaatcattattgaaagcatctcccttttacatgtaaccttgcatacaatatctgttaagatgagttcactaaataaagttgtttcaaatagtggagatgcatgttcagtcttagctagtaaagtcacatcattaaatcccaatgcagcggagtttgtaccgtcatttgttaaaccatcttttggaaatggtacagttctagataagtcagatttcaggggttcttctggaaaaacaattctagataggcctgagccatcaaagtctaataactcagatgatgaggcacaccagttttggcataagcagcttccggatgacattattccagacttcacttcttttgagaaagttgaacaagggcctgaactgtcccttgctggattatccttgaatgcaccccccttttatgggacaacttccagtcgcttctcaagagatatcacgaattatcttctccagttaccaagggccttactggaactggaacatactaatatgctatatgaagataaagcactggagcaaa

SEQ ID NO: 1199 - DNA, 626 bp, Zea mays
  Clone ID: PAT_MRT4577_148478C.1
cagcgaccacgcccatcttcgctctgtccgctcacccccacctctccgcccccgtctccgtccgcacccgtccgcctccgacttccccgtggcccagccggatccggagccgaactcgaccttgttcaggaaggagagcccgaaccgcggcgggcgggagggctctttttagcttgccccgcctgaggccagccgccccatgggccagtcgcctgagcgcgctacgtatcagctcatcgaccggcgggaaggctgtagcgtcggttggacgtcgtgagcgtgcagagcaattaagcaaagcaggtgcactctttgctcaacttttttattgctattttggctgcgctcaagtgtaattattagtatgattgtggctggagttgcaagcaattgatgggtttgaagccttgagggcttcagtttgagaacggctactagggcagcatctcaagtttatccgttgctggctcatttgataacagcattaattcgttattttgttgcctattgtctgcttcgattgctgtttatgtatgtatacacaacaatgtttagttgaccagaaaaaaaaactacacggcgttcgctttagctaaagcacagctgcaaccgctgcagctatggct

SEQ ID NO: 1200 - DNA, 4590 bp, Zea mays
  Clone ID: PAT_MRT4577_148479C.1
aattcggcacgaggcgcctcgcctccatccacagcgaccacgcccatcttcgctctgtccgctcacccccacctctccgcccccgtctccgtccgcacccgtccgcctccgacttccccgtggcccagccggatccggagccgaactcgaccttgttcaggaaggagagcccgaaccgcggcgggcgggagggctctttttagcttgccccgcctgaggccagccgccccatgggccagtcgcctgagcgcgctacgtatcagctcatcgaccggcgggaaggtattggtttcctgtttccctgtttcttctctagatagatctggtgaattccacgaagatctggtccgaatcgggtacactgggtcggtcggttggtaattcctgttccgtgtgtggagttaaaaaacagctcttcttttttcacgccgctgtaggctgtagcgtcggttggacgtcgtgagcgtgcagagcaattaagcaaagcaggtgcactctttgctcaacttttttattgctattttggctgcgctcaagtgtaattattagtatgattgtggctggagttgcaagcaattgatgggtttgaagccttgagggcttcagtttgagaacggctactagggcagcatctcaagtttatccgttgctggctcatttgataacagcattaattcgttattttgttgcctattgtctgcttcgattgctgtttatgtatgtatacacaacaatgtttagttgaccagaaaaaaaaacatacacggcgttcgctttagctaaagcacagctgcaaccgctgcagctatggctggaaactactcagtgaagcactgttgaatggctgcagcagtcgtctgtttaagctcagctgaacagcttatagttgtgaaattggagggtgcaaacgaacaccatgttgcaaagaaaacacttcctttatgatgcagtaccctgctgcatcttcttttagtaaaggacgcatgcatatgagtgacaggaaacatctgctttttgtttctgtttgaacatgctatcggttttgggaaagaaagctacaattcttgggtcttgatttcaaccatactattgaaatcctcacccagccagagatgcaagatgatgctacacacaatcacacactgaatctgccccacagcacaccgaacttcagcactggggatttccctgcacttccaacagctgaggaccaaaatggtttcaatcagggtaatgtggatgtacttggcatgttcaatgggcgcagttcatctgcgatgcctactggagctggtgattttgtttcagccgttcgcaaacttgcatcgcagaactctggccagtggaagtttaaaaaaggtcctgagtatggtaatggcatttcagctctttctgtacccaagcagtacagttctagcactaaacaatcgtctgggaacaagtttcaaagcatcagcagtggaagagttgccccatggcttgagactggtgatgcagtggcaagtatgtactcagaatcaaggggagaggctcgtgattttgctagggtccggaatacctgctttgagcaggctagacaggcttacttggttggcaacaaggctcttgcgaaggagctcagcatgaaggggcaggcctacaatgtgcaaatgaaagcggctcatgagaaagctagagaagctatttaccgacaaaggaatcctgtttcttcccaacgtgggggtggtgaccacctgattgatttacatggcctgcatgtgaacgaagcaatccacatcctgaagggtgagctcaccgccttgaagagcgcggcgagggcagcaggggagaggatgcaagtcatggtttgcgttggaacaggccaccacaccaagggctctcgcactgcgaggttgcccatcgctgtggagcagttcctgctggatgaaggcctccagtacacgcagcctcaggcgggtctgctccgagtgatggtgtactaacatctcttaggtgagacatcacggtgaggaaaaaaactccaaaaaaagagaaaagagatgtacgaaaacgcaggaaaaaaaagcgtcgttggagcacgcactgttattccgtgtagctgtatattaaaagaggcagcaggagaatagcctgacaacaggatacagtgtaaaattatacgtagcttccttcattcaattcacattccttttccaaaaaaaaaataacaaaaaaagttaccaagggcctggaactggaactagaacatactaatatgctatatgaagataaaagcaactgggagcaaaattatattggtgatcttcatattgctaatggaaaccaggaccttcattatgattctgaatctggtgtaagcttttctgatagctttgctagtgagtatgttgccccatcagatggcctttttgctcccctggagtacttggcatctcagttccctggattttcagcagagagccttgcagagctttactacgcaaatgggtgtgatttcaaccatactattgaaatcctcacccagctagaggtaattccttctttactgcaacactaatttaagtcttccagatatccactcagaattagctttacccccaaaagggaagtgattaaattcatgctcttttgctcagatatcagatcagtgttctttagaattattgtcaaaagtggtttggaagttttttttgggacatctgtggttggaaatattctttttgttccaattataagatgtgctggcttctttctagatacatgtcttttgctatgcacctagatatacattatatctagatacatagtaaaagctatatctctagaaaagctagaaggtcttataatttggaaaggagtaattattagatatacattatatctagatacatagtaaaagctatatctctagaaaagctagaaggtcttataatttggaaaggagtaattattatacgcaatggaatatgtctcccaccatttcaatcaaaatgttcggttgccacctgttagacaagaaccatatactagcatgagatttttttgtggagctcatcaagcatgccatggactggttgcacagcatcgttatcatgctgtttataagagtactatttactaaagcagtaatgctacatgaaaagacaatttgaatcatcacatctttgattgcaatgctgcattgattttataatgcttggttacatccagaacattttggcactatccataattatgttttctctgatttttcagatgcaagttgatgctacacccaatcacacactgaatctgccccacagcacaccgaacttcagcactggggatttccctgcacttccaacagctgaggaccaaaatggtttcaatcagggtaatgtggatgtacttggcatgttcaatgggcgcagttcatctgcgatgcctactggagctggtgattttgtttcagccgttcgcaaacttgcatcgcagaactctggccagtggaagtttaaaaaaggtcctgagtatggtaatggcatttcagctctttctgtacccaagcagtacagttctagcactaaacaatcgtctgggaacaagtttcaaagcatcagcagtggaagagttgccccatggcttgagactggtgatgcagtgggtaatactcatctgatactctgaagtccttctggtccatattgcacagttccctctacgtttcatgtttggatgagtattgctcttgcccgttttcttcatttagtgaaaaatcgggaatggatagatagaaatcagggagaattatgctaacttttgagttcctttactgtgatccaattatcgctgattaatttgtctctgtatatgcaatccaccagcaagtatgtactcagaatcaaggggagaggctcgtgattttgctagggtccggaatacctgctttgagcaggctagacaggcttacttggttggcaacaaggctcttgcgaaggagctcagcatgaaggggcaggcctacaatgtgcaaatgaaagcggctcatgagaaagctagagaagctatttaccgacaaaggaatcctgtttcttcccaacgtgggggtggtgaccacctgattgatttacatggcctgcatgtgaacgaagcaatccacatcctgaagggtgagctcaccgccttgaagagcgcggcgagggcagcaggggagaggatgcaagtcatggtttgcgttggaacaggccaccacaccaagggctctcgcactgcgaggttgcccatagctgtggagcagttcctgctggatgaaggcctccagtacacgcagcctcaggcgggtctgctccgagtgatggtgtactaacatctcttaggtgagaaaaaaaaacctccaaaaaaaagagaaaagagatgtactaaaacgcaggggaaaaaagcgtcgttggagcacgcactgttattccgtgtagctgtatattaaaagaggcagcaggagaatagcctgacaacaggatacagtgtaaaattatacgtagcttccttcattcaattcacattccttttccatccaaaaaaaaaaaaaaaaaaaaaaaaaaaactcgagagggg

SEQ ID NO: 1201 - DNA, 1523 bp, Zea mays
  Clone ID: PAT_MRT4577_148480C.1
cattgggtacctcgaggccggccggcctcacccgtccacccacccacccgcctcgcctccatccacagcgaccacgcccatcttcgctctgtccgctcacccccacctctccgcccccgtctccgtccgcacccgtccgcctccgacttccccgtggcccagccggatccggagccgaactcgaccttgttcaggaaggagagcccgaaccgcggcgggcgggagggctctttttagcttgccccgcctgaggccagccgccccatgggccagtcgcctgagcgcgctacgtatcagctcatcgaccggcgggaagggcttgggtaaatcattattgaaagcatctcccttttacatgtaaccttgcatacaatatctgttaagatgagttcactaaataaagttgtttcaaatagtggagatgcatgttcagtcttagctagtaaagtcacatcattaaatcccaatgcagcggagtttgtaccgtcatttgttaaaccatcttttggaaatggtacagttctagataagtcagatttcaggggttcttctggaaaaacaattctagataggcctgagccatcaaagtctaataactcagatgatgaggcacaccagttttggcataagcagcttccggatgacattattccagacttcacttcttttgagaaagttgaacaagggcctgaactgtcccttgctggattatccttgaatgcaccccccttttatgggacaacttccagtcgcttctcaagagaatatcacgaattatcttctccagttaccaagggcctggaactggaactagaacatactaatatgctatatgaagataaaagcaactgggagcaaaattatattggtgatcttcatattgctaatggaaaccaggaccttcattatgattctgaatctggtgtaagcttttctgatagctttgctagtgagtatgttgccccatcagatggcctttttgctcccctggagtacttggcatctcagttccctggattttcagcagagagccttgcagagctttactacgcaaatgggtgtgatttcaaccatactattgaaatcctcacccagctagagatgcaagttgatgctacacccaatcacacactgaatctgccccacagcacaccgaacttcagcactggggatttccctgcacttccaacagctgaggaccaaaatggtttcaatcagggtaatgtggatgtacttggcatgttcaatgggcgcagttcatctgcgatgcctactggagctggtgattttgtttcagccgttcgcaaacttgcatcgcagaactctggccagtggaagtttaaaaaaggtcctgagtatggtaatggcatttcagctctttctgtacccaagcagtacagttctagcactaaacaatcgtctgggaacaagtttcaaagcatcagcagtggaagagttgccccatggcttgagactggtgatgcagtggcaagtatgtactcagaataaggggagaggctcgt

SEQ ID NO: 1202 - DNA, 376 bp, Zea mays
  Clone ID: PAT_MRT4577_148566C.1
ggattcccggtcgactcacgcgtccgcccacgcgtccgcccagcgtccgggctcaccacaccaaccaacaagcaaaaattccggagatggtactagtctccgcggcgaagatgtcagtgcgcggcaagggcggcaagggcctgggcaagggcggcgcgaagcgtcaccggaaggtgctgcgcgacaacatccaggggatcacgaagccggcgatccggatgctgtcgcggcggtgcggcgtgaatcgcatctcggagctcatctacgaggagacccgcagcgtgctcaagaactttctggagaacgtcattcgatactccgttacctacaccgagcacgcgcgccgtaagaccgtcaacggcatggacgattacta

SEQ ID NO: 1203 - DNA, 581 bp, Zea mays
  Clone ID: PAT_MRT4577_14870C.1
tccaaacagggtctcaagccaccatcgactttcaagtctcgctacgtagcagtgcaataaaaaaagcagccgcaatggcgagcagcaccatggccctctcctccacggccttcgccggcaaggccgtgaacgtgccgtcgtcgtccgccttcggcgaggcccgcgtgacgatgcgcaagacggcggcgaaggccaagccagcggcggcgtccgggagcccgtggtacggccccgaccgcgtgctgtacctgggcccactgtccggcgagccaccgaggccttcgccgagctcaaggtcaaggagctcaagaacggccgcctcgccatgttctccatgttcggattcttcgtccaggccatcgtcaccgggaagggcccgctcgagaacctcgctgaccacattgccgaccccgtcaacaacaacgcttgggcctacgccaccaacttcgtccccggcaagtgagggaggcgccgccggtgacctttaggtgtccggatgcatgtgagcgcacgctggttttcggtttgtaccatgatgtaaactattgttcaatcgacaaggaataattgtgttcattgtc

SEQ ID NO: 1204 - DNA, 2257 bp, Zea mays
  Clone ID: PAT_MRT4577_148772C.1
ttgggtacctcgaacgagaatatccacctcctcctcgcccctctctctctctctctaaaagaatgaaaagataagggggaaatcctcaagtgctgcttacataaacgctttcatcgttgcatcgggggcggtcggaccgggaaggaaaaagcattccaacgctgcatctgcactgcacggtacctcatcctcctctatctctaagaatttaaaagagaaggaggaggaaagtcctcgactgctcgttccataaaccctaacctcgttggattctcggcaaaaatcctcccaattcggaaccctccgatgttccagctacctgcgggagctgagccgtgctcggtttggcgaaattttgcacccctcttgtgctaggaccacccggttcaagctgttcctcgctcctcggaaggatcaggtcttcaccggtgctctccggcgccggatccaggtttgtttcggcgagaggtcgggctcttggcgggggccagcccagcttcgagctcaatttgccggcctgagatggaatcgcgactgcggtgccggtgccggtggctcagctagtcgcgtcgagtcgacgcgcgattcctgccatttgggtgggccagcctttcctggcaatctcggggggcgtttcgcctcgctgcgtggcagaaaggtgtgacgtgtgatgcatcccaaggcacgaatccacgccgacccggtgcgcgaggtcgaccacttcgactgcctgccggattcgctcgtcctgctcatcctgaacaaggtcgaggacgtgcggtcgctcggccggtgctacgccgtgtccaagcggctctgtgggctcgtttccctcgtccatgatgtgtatgtcaagattgaccgcgtcgttgcggtcgacggcgacgccgagggcacgctcaacctgtcctcgccgaagcctcggagcatcttctcgcacttcctgaagctgatgctcttcacaatcatcaagccgttccacaacatgcgcagccctaatggtactgcgaggccattgttcccgcagctctcgcagcactcaccggcacaggtgctcaggaacttcacgcacgtcaggaaccttcggatcgagctcccctctggggatgtgggtactgaggagggagttctcctgaaatggcgagcagagtatgggagcacacttgagaattgtgtgatcctggggggtacccgggttgaccgcaagcctgttggtggagagcatgagccagctttggaggacaatggaagcatgccagagtctttctataccaatggtgggctgaaacttcgtgtcgtctggacaatcagctctctaatcgcggcatcaacaaggcactatcttctccgctcaatcatcaatggccatcccacactacagagcttggtactgacagatgctgatggccaaggcacattgtgcatgggggcaaagcagctggaggagttcagagagaaccagttgtcggcctcggcatgttccaacaggactcaggtcccagcctgcaacatgaagctcaagtatgctccatatgttgaactgcctggtggtatggcgttgcaaggcgctactttggtggctatcaaaccctcacctgagggaagcaatggaagccaccctaaccgcaaggaagccgaaggattcgtctttggagcattcgatgggccatttaaagctgctgtgaaggcgctgatgaagagacgcacttaccttctggagatgaatggcttctaggaatcttggtatctagcttgttggtgctatgcatggtacatttagctgagtgtctcatatgtgtaatattcaagaaggcaccatctctagttttgatgcttgctgtctgctgttttagctatttgtacagtgttaacatttggttagataaagatcatatcaagtcctctagcgcaatagtgaatctctctacagttcactattctggcccatgatgtcctgtgtgatatggaagactgaagcatcctactgttaactcttttcaagtgaaacagccttgtgaccatctaatgtgtcagcactgggattgagatattcagatgctctcaccagtggacacaagttattatatatataatgtacatttttctcctctttcagtttcatgcacaaagtctcgaaaatttttctcctctttcagtggaagttgaaggtaacctggaaaaggagccagattatgccttcatgcacatgtcattcatttttggattgtgaaatgaaaaaggctcatctgatgctgac

SEQ ID NO: 1205 - DNA, 1480 bp, Zea mays
  Clone ID: PAT_MRT4577_14878C.1
tgggacctcgaggcggcgggaccgtcaaaatgcttgctagatagttatctcgcctcctctcttcctcgacacgcacagcaaccgcaccaagctcgacccaccgcccagccgtctgcactagctaggagcctgcgcccggagttccgcccgcgtcgtgctcgccccgccgtcgacgatcaccatgagcaggctgcctttggtgcaatcgatgctcaggtaaaggagaagaaagtgtcgaggcagatctccaggagttctaggacatcgacgagttcgaggattaggctagcgatctcccccagtcagctgcctatggtgggttgtttacgttggctatgtttctattatgtggactttgatttatattatgtaaatgacgctagtctttaatattatttactctatattgttattcgaaggattgtgctatgataagtcatttatataaaaaaaaaaaaaaaaaagcggccggccgggagcatctcaagccaccatcgaccttcaagtctcgctacgtagcagtgcaataaaaaaagcagccgcaatggcgagcagcaccatggccctctcctccacggccttcgccggcaaggccgtgaacgtgccgtcgtcgtccgccttcgagcgaggcccgcgtgacgatgcgcaagacggcgagaaaggccaagccggcggcggcgtccgcgagcccgtggaacgaccccgaccgcgtgctgaacctgagcccactgtccggcgagccgccgagctacctgacgggtgagttcccggccgactaccgctgttacaccgcgaagctgtcgttggatccgtagacgttcgccaagaaccgggagctggaggtgatccactcccgctgggccatgctgggcgcgctcggctgcgtcttccccgagctgctcgcccgcaacggcctcgccgacgaccccgaggccttcgccgagctcaaggtcaaggagctcaagaacggccgcctcgccatgttctccatgttcggattcttcgtccaggccatcgtcaccgggaagggcccgctcgagaacctcgctgaccacattgccgaccccgtcaacaacaacgcttgggcctacgccaccaacttcgtccccggcaagtgagggaggcgccgccgccggtgacctttaggtgtccggatgcatgtgagcgcgcgctggttttcggtttgtaccatgatgtaaactattgttcaatcaacaagcgaataattgtgttcattgtcattattttcccctctctctttttcgttcctgccgattttatctaaatcaggtgtttgataaacggcataattggtttcctgcttggccgtgtccagtctcccccccagtgttgaccgtgtgcatgcatatgattggtgacctacactggctgtgcgtagtctgtgcatgcatatgattggtgacctacactggctgtgcgtagtctgaatgtacaagcacaacctagtcattttaccacc

SEQ ID NO: 1206 - DNA, 541 bp, Zea mays
  Clone ID: PAT_MRT4577_148808C.1
gccacccgtccgcccacgcgtccgggtccttattatcgccattctcaacgacggcactatcatgaccatctctaaggacagcagataagccgcctgcggtgcacggacagctgggaacctgaaggagatctttgccacgggcatcgtgcttggaagctacctctctctgatgactgacatcgtcttctgggctatccacaagaccgacttgttctccaacaacttcggggttaggacgatcagggacagggaccatgaaatgatgttcgcgctgcaccttcaaatgagtatcgcgagccacgctctgatcttcttcacccggcccccgagctggttcttggtggagcgccctgtgctgctcctggtcaccgcgatcctgctcgcccagctcgtcaacaccttcctcgctgtctacaccaactggggcttgggctggatcaagggtatcgggtgtggctggaccggtgtggactggctttacagcatcgtgaactacttccctctggacctgctcaagttcttgatccggtacatgctcatc

SEQ ID NO: 1207 - DNA, 3319 bp, Zea mays
  unsure (1)..(3319): unsure at all n locations
  Clone ID: PAT_MRT4577_14887C.1
gttgtgtgcgaccgacgacgcacagacgatcagagaggtctcctgccgccgtgccacggacgcgaccgacgcgtaaaagttacgctccgcctaggtcgcgcacgggcgccttgcatccgcgccccagtggcctcatttccaggaggcctggggcctgggcacggaacgtgcagcgggcctgtgctttatgccaaacacgaaagggttattaggccccgctcaatattggttttggtctaagagccaagcctggaacgcttggttgggctacgatcctttcggcccacgattgctgtgagatcatcgactgaaagcatgtgatggcggcaatgctttccgctgcttttctttaccgtcctcctagtagacactgacattttaaagactacgattctagtggttgtaataaacagcgacacgtgactgtcgactgtcgttatagccggcagtaaccgccatacagcttgtttcacttgtctcactgagtcactatcagcttctttcatccataaccaaagcaatttgttttctcaccattccttttaaaaaaaggtgaaataaacatgagtccgagtgagcactgagtcgcagaaatatcaaacctaggaccggagacgaggtgctacttcttcaaaatctgaactgtgccatcacaaaagaaagaaagaaagaaaaaagaagagaaatccacaccacagccaccgcaagatcccgggcgcccaatcacccttctccacggagattcctagcctcagccacagcccacatctgcctcatcgtctccctgaggctcccgtcgcgccacgtgttccagcatcccggacgcaccaatggcatccaagcatcagatttattttttattttctggcaacattcaagatagaacttgctcgcggcggtgtttccctccgtcgctttaaataccttcgtcgcctccacaagtccacagcatctcaagccaccatcgaccttcaatgtctcgctacgtagcagtgcaatacaaaaaaagcagctcgcaatggacgagcaggaccatggagcctctcctccacggtgcttcgccaggtgaggtgcgtgtaacgtgacgtcgtcggccgccttcggagaggcccgtgtgacgatgcgcaagacggttggtgcaaggccaaccggcgcggcggcgtccgggcagaccgtggtacggcccccgaccgcgtgcttgtaccttgggcccacttgtcctggcgagcccgccgagcctacctgacggggccgagttccccgggcgacttacggctgggacaccgcgggggctgtcgtcggacccaggagacgtgtcgccaagaaccgggagcgtggaggtgatccactcccgctgggacatgctggggcgcgctcggttgatgctctcacggagctgctcgcccgcaacggcgtcaagttcggcgaggcccgtgtggttcaaggaccggctccccacatcatcagcgagggccggcatgaactacctcgggaaccccgaacctcattccacgcgacagagcatcccttgctatctgggccttgccaggtcgtgctccatgggccgggccgtccgagggctacccgcatttcgcccggcggcgccctttccgggcgaggggtcgtcgaacccgctcctatcccccggcggcagctttcgacccgcttcggggctcgccgaacgaccccgaaaggccttcgcttgagccttcaagggtgaagggagcttcaagaacggccggcctccgccatgtttctccatgtttcggattctttcgtccaggccatcgtcacccgggaaagcgcccgctcgagaaactgcgctgaccacattgccgaccccgtcaagcaacaacgcttgggcctacgccaccaacttcgtccccggcaagtgagggaggcgccgccggtgacctttaggtgtccggatgcatgtgagcgcacgctggttttcggtttgtaccatgatgtaaactattcgctcaatccccaaggaataattgtgttcattgtcaaaaaaaaaaaaaaaaaaaaaaaaaaaaaccagcggcatctatagcaaccgtgtccaacactttcacgctcaggcgctcagctctagcaatggctgcctccacgcatggcgatctcctcccacggcgatggccccggcacccccatcaaggtgggctccttcggcgaggggccgcatcaccatgcagaaagagcgagttccacgacctatactccggcgctcatcgcgcgcagctccctgctcacgtgacccgcagcgcgtgcgagtacctgcgnctctctctctaccggcgagcccccgagctacctcaccgtgcgagttccccgagagactacggtatgggacaccgccgggatgaccgccgaccccgagacctctcgccaagaaccngcgagctggaggtgatccacttcccgctgggccatgcttcggcgcgctcggtatgcgtcttcccccgagctgctctgcccgcaacggcgtcaagttcggcaagggccgtcttggttcaagggccgggctccccagatcttcaagcgagggcggtgctgagactacctcggcaaaccccaagccctgatcccacgcgccagagcatcctcgccatctgggccttgccaggtcgtgctcatgggggcgccgtcgagggctttaccgtattgccggcgggcgccttctcgggcgaggtcgtcgacccccgctgtacccctggcggggcagcttcgacccccctcggcctggccgaacgacccccgaggccttctccgagcctcaagggtgaaggagctcaggaccgggccgcctccccatgtttttccatgtttcggcttcttcgtccaggccatcgttcaccggcaagggtgccgctcgaagaacctcgctggacacatcgctgacccagtcaacaacagacgcatgggcctacgccaccaacttcgtccccggcaactaaagctcatcagctgctcagttggctatgcaactttcatggtctttcggatcgcagatgggtgtacgtacgtggattgattgatgctgcaaagttaattagctgcatgtgtgtcttttgtttccccgttgcatttcagggggcaagtcgggatgatgagttggcgttgtacactaaaatgaatgatgcttgtgcaatagtagttgtggttttgtttcccggtggttaattgttgaaatccattaatttgtttttcttctatactcctttttctctctagctctttatcttaagaaggcaagcataaatgtgcttggataaacagcagatatcaatgaaaatgaaagtagtcttatacc

SEQ ID NO: 1208 - DNA, 860 bp, Zea mays
  Clone ID: PAT_MRT4577_148946C.1
aattcggcacgagggttatgacagggttatggcttacaagttccatgaagatgagcatggggaggtctttgctgagatcaccaaacctggtattgagccctatataggcctgcactatccagccactgatatccctcaagctgccaggtttctcttcatgaagaacaaagtcagaatgatctgtgattgccgtgcaagatccgtgaagattattgaagatgaggcactctccattgatattagcttgtgtggttcaactcttagagcaccacatagctgtcaccttaagtatatggagaacatgaactcgattgcatctcttgtcatggctgttgtggtcaatgaaaatgaagaggatgatgaacccgagcctgaacaaccaccacaacagcagaagaagaagaggctgtggggtctcattgtttgccaccatgagagccccagatatgtcccgttcccactgcggtatgcctgtgaattcttggcccaagtgtttgctgtccatgtaaataaggagtttgaattggagaagcagatacgagagaaaagcattctgcgaatgcagacaatgctctctgacatgctattcaaggaatcatctcccttgagtatcgtatccgggagtccaaatatcatggacctcgttaagtgtgatggtgctgctcttttgtatggggacaaagtatggcggcttcaaacggctccaactgagtctcagatacgtgatattgccttctggctttcagaagttcatggggattccactggcttgagcactgatagcctccaggatgctggatatccaggagccgcttcccttggtgacatgatctgtggaatggcagtggctaagatcacgt

SEQ ID NO: 1209 - DNA, 347 bp, Zea mays
  Clone ID: PAT_MRT4577_149075C.1
atctgttcttcacctcactaacaccagctagcaactctttctctcctgcaataatggccgggcgctcgttctcctgccagccgcagctggtcgcggcggcggcggtcctggcagctgcgctgctgctgctggcggcggtggcctggacggcgtcggcggtcgtgagctgcggcgaggtgacgacgtctgtggcgccgtgcctcatgttcgcgatggtcagcgcggcgtcgccctacgtggtgatctgcagcggtgtgcgctagatcaacagcctcgcgtcgttcgcgacctaccggcaggtcacctgcaactgccttacgagcatgacggggcgcttcgggggccgc

SEQ ID NO: 1210 - DNA, 1032 bp, Zea mays
  unsure (1)..(1032): unsure at all n locations
  Clone ID: PAT_MRT4577_149280C.1
aagggcggtttctaaacaacaaactttcgggatgaagggggttttccccctcacattcacgaaaacaaagaacgcctctaactatcgaaggcagccatagaaaacgctggctacactcgaaaggtgggcattggaatggatgttgctgcttctgagttcttcggggagaaagacaagacttatgatcttaacttcaaggaggagaacaacgatggctcaaacaaaatttcacgcgacagcctgaaagacctgtacaagtcctttgtttatgagtaccctatcgagtcgatcgaagacccatttgatcaggatgactggagcacttatgccaaactcactgatgagattggacagaaagtgcagattgtaggagatgatcttctcgttaccaaccccaccagggtcgccaaggccatcaatgagaagacctgcaatgctctcctcttgaaggtgaaccaaatcgggtctgtgaccgagagtatcgaagctgtcaggatgtctaagcgcgccgggtggggagtgatggcaagccacaggagtggcgagacagaggacaccttcattgctgacctctcagttggcctgtctacgggccaaatcaagacgggagctccttgccggtctgagcgcctggccaaatacaaccagctgctcaggatcgaggaagagctcggtgatgccgcggtctacgccggagcaaagttcagggcaccagtggagccctactaagaaaggaagaggatgaggatgttttcttgtggagctatactagctcgctgctgccttttgttacaatgtttgtacggtcgcaataaatgtatggtcgtgtttgctcgagagctactcaggtgattttgtcgtgggagcaccaaaagcagaaaagaaccctttttttcaatctctctagattctgacgagtggtggtctgcactcgtcgtaatgtcgtttgcctaaactgattttgatggaacaggaaatcttgctggtcttgccataaaaaaaaaaaaaaaagggcgccgctcgcganctaga

SEQ ID NO: 1211 - DNA, 1083 bp, Zea mays
  Clone ID: PAT_MRT4577_149284C.1
acggtcaggatgcgacaattgttggggatgaaggtggttttgcacctaacattcaggaaaacaaagaaggccttgaactattgaaggcagccatagaaaaggctggctacactggaaaggtggtcattggaatggatgttgctgcttctgaattcttcggtgagaaagacaagacttatgatcttaatttcaaggaggagaacaacgatggctcaaacaaaatttcaggcgacagcctgaaagacctgtacaagtcctttgtttctgagtaccccattgagtcgatcgaagacccatttgatcaggatgactggagcacttatgccaaactcactgatgagattggacagaaagtgcagattgtaggagatgatcttctcgttaccaaccccaccagggtcgccaaggccatcaatgagaagacctgcaatgctctcctcttgaaggtgaaccaaatcgggtctgtgaccgagagtatcgaagctgtcaggatgtccaagcgcgccggatggggagtgatggcaagccacaggagtggcgagacagaggacaccttcattgctgacctctcagttggcctgtctacgggccaaatcaagacgggagctccttgccggtctgagcgcctggccaaatacaaccagctgctcaggatcgaggaggagctcggtgatgccgcggtctacgccggagcaaagttcagggcaccagtggagccctactaagaaaggaagaggatgaggatgttttcttgtggagctatactagctcgctgctgccttttgttacaatgtttgtacggtcgcaataaatgtatggtcgtgtttgctcgagagctactcaggtgattttgtcgtgggagcaccaaaagcagaaaagaactgtttttttcttctctctctctagattctgacgagtggtggtctgcactcgtcgtaatgtcgtttgcctaaggccccgttcggtttggcctgaacgacctggaatacagcatattccagctgaaattatgtcacttggattaaaactggatcaatcctaaatatctgttcggataagaaaaaaaaaaaaaaaaaagcggcc

SEQ ID NO: 1212 - DNA, 191 bp, Zea mays
  Clone ID: PAT_MRT4577_149388C.1
ctgttttctgctcatgcttctgtcgtatcgtttcctaacagggagcaaacaaagggaacaacaggggtaccaacacctaatccaaaggtagaacggacactaacaccgtgacggaagcgaacggtaacacgatactatagatcgataagataactatccgcgacgccaggatgggcccacacatcagtccc

SEQ ID NO: 1213 - DNA, 520 bp, Zea mays
  Clone ID: PAT_MRT4577_149407C.1
tcggccgggccgtcttctccctcactcccgttccatttccccatctcccagatccaattcgcgagttctccctcctctgccgccatggcgctctctgtggagaagacctcgtctggacgggcagtacaaggtcaaggatctctcgcaggcggacttcggccgcctcgagattgagctggccgaggtcgaaatgcccggcctcatggcgtgccacgccgagttcggcccgtccaagcccttcgccggcgctaggatctcggggtctctccacatgaccatccagaccgccgtcctcatcgagaccctcaccgcgctcggcgccgaggtccgctggtgctcctgcaacatcttcttcacgcaggaccaccccgccggcggcattgggcgcgaattgggcggcggggtcggctggaagggggagaccctcgaagaatactggtggcgcaccgagcgctggctggactgacgcgaggcctacggaccccaccttatcctagacaacggatgggacgacacactg

SEQ ID NO: 1214 - DNA, 1812 bp, Zea mays
  Clone ID: PAT_MRT4577_149410C.1
gggtacctcgaggccggccggggccgtctcctccctcactctcgttccatttccccatctcccagatccaattcgcgagttctccctcctctgcggccatggcgctctctgtggagaagacctcgtctggacgggagtacaaggtcaaggatctctcgcaggcggacttcggccgctcgagattgagctggccgaggtcgaaatgcccggcctcatggcgtgccgcgccgagttcggcccgtccaagcccttcgccggcgctaggatctcggggtctctccacatgaccatccagaccgccgtcctcatcgagaccctcaccgcgctcggcgccgaggtccgctggtgctcctgcaacatcttctccacgcaggaccacgccgccgccgccatcgcgcgcgactcggccgccgtgttcgcctggaagggggagacccttgaggagtactggtggtgcaccgagcgctgccttgactggggcgaggcgggcggccccgacctcatcgtcgacgacggcggcgacgccacgctgctcatccacgagggtgtcaaggccgaggaggagtacgagaagaccggcaagatccccgacccggagtccaccgacaacgctgagttcaagatcgtgctcaccatcatccgcgacgggctcaaggctgaccccaagaagtaccgcaagatgaaggagaggcttgtcggcgtctctgaggagaccaccacgggtgtcaagaggctctaccagatgcaggagaccggcgccctcctcttccctgccattaacgtcaacgattccgtcaccaagagcaagtttgacaacctgtatggttgccgccactcactccctgatggtctgatgagggccaccgacgttatgatcgccggtaaggttgccgtggtctgcggatacggtgatgttggcaagggttgtgccgctgcactcaagcaggctggtgcccgtgtcattgtgaccgagatcgaccccatctgcgccctccaggctctgatggagggtcttcaggtccttcccttggaggacgttgtctcggaagctgacatcttcgtgaccaccactggcaacaaggatatcatcatggttgaccacatgaggaagatgaagaacaatgccattgtctgcaacattggccactttgacaatgaaattgatatgctcggccttgagacctaccctggcgtcaagcgcatcaccatcaagccccagactgaccgctgggtgttccccgagaccaacactggcatcattgtccttgctgagggtcgcctgatgaaccttgggtgtgctactggccatcctagctttgtcatgtcctgctcattcactaaccaggtcattgcccaacttgaactgtggaaggagaagagctctggcaagtatgagaagaaggtgtatgtgctccccaagcaccttgatgagaaggttgctgctctccacttgggcaagcttggtgccaagctgaccaagctcaccaagtctcaggccgactacatcagcgtgccgatcgagggtccctacaagcctgcccactaccggtactaggcagccagcacacggcttgcagctcactcgggccgttgtgtgctatgaagttcgctacactggcctgtcagttatcttttgcatgcatatgcattatcatatacgcagtcgcgtagcaggtttgcttttgctgaagaataatggtgtagtcggctggggtgaggcgatgtgcgttgccagatacagttttgtcttgttgactctacttatctgattatcatttgtaagcgatttgctcaagttatttgtcgtttatg

SEQ ID NO: 1215 - DNA, 1687 bp, Zea mays
  Clone ID: PAT_MRT4577_149511C.1
aggctcccactagaaaagcacacccaccttctctctcttcaccagcctgtccccaacaggccaacaatgcacaccaacatccactctctcgtcaggctcctctcccccaaaaatgagcgctgagttctgcgctgctgccggtgtcgtggccatggagctcggagtcggagatgtgctggggctgcagcaaggcatcgcaatcaccgcgccatcgcccagggacagcgacctgggtcttctcaagcgagcaggcctcacccaggctgcggctgctgccccctacccctcccccttccttgacgaggagaagatgctcaggttctccaaggcggctcacacattgcactcaggcttggattttggaggcccaggtgagcaggctttcctgctgtccaggaccaagatgccatttactccctcgcagtggatggagctggagcaccaggctctgatatacaagtacctcaatgcaaaggcccccccataccttccagcctgctcatttcaatcagcaagagcttcagatcatccaatagagtgagctggaggcctctgtatcaaggctacacaaatgcagactctgacccagaacctgggagatgccgacggacggatggaaagaagtggcggtgctccaaggaagcaatggctgatcacaagtactgtgagcggcacatcaacagaaaccgtcaccgttcaagaaagcctgtggaaaatcaacctaagaagaccaccaaggaggtgcctgctgctgctggctcattgccatgtgctgggccacaaggtagcttgaagaaggcaaaagttaatgactccaagccaggcactgtcagctattgggcagatagtttaaacaggacaatgttgagcagagagaaagcaaacaaaccgacggaagatagctctttgctgcttacttctacgaacagccaacccaccttgtccctgctctctcagctgaagcagcaaaacaaaccagataagttaggccccacactggaaaatgagtcaaacccagacacaatattgaaagcctggggtggcaaccagcctagccacaagagcatttcctctacagagcgccatgatgctgaatccctccaatcagtccttcaaaatttcagcctagcccagaatgagaagatggagtcagaaaagaacaaatattctgattccgtgctagtttcatcgactttctattctgcagacggtccaagagctacctgccttacacctaacatgacacaggtgaagcaggattgcatatcaagctcttgggagatgcctcaaggtggacctctaggcgaaatcttaacgaactccaagaatagcaaggacttaagcaagtgtaaaccaaggtcatatggttggttgttgaatcttgaccatgcaccatgattcctcaatccatgaagagcttgacatagatatcccatcatgtaggcaaacaatggtcagaaaaaggttatgaccacattgcttgccccatgcatgcttgctatctacatttgtatttctgttacgtagcatttagctagttgaattatcagttcttctggatacggctgtatcttaaacaagttctagtttgtgtcagatgatatcttgcttgctagatgtttcatgttacactttcaacaggaacttcagacaaccactttgattgacaaaaaaaaaaaaaaaaaaa

SEQ ID NO: 1216 - DNA, 1678 bp, Zea mays
  unsure (1)..(1678): unsure at all n locations
  Clone ID: PAT_MRT4577_149626C.1
ttgggtacctcgaggccggccgggagctgtgatgaaaagacctgcactggtgggtccagtgcgatcttctgatcttgtgatgtgtctcgctactctgagcttggacaacgaattgcgcgcggaaaacatctccgttccccaccaccaccttcgctccttctgcttcgcccgtccccctccgtcgcgtcgactcccaagatggataagctcagtggttctgcacgtcttatgattgtttcagatcttgaccatacaatggttgatcatcatgacgaggagaacctgtccttgcttaggtttggtgccctgtgggaatctgtttactgtgaggattctctactagtcttctcgactggaagatcaccaactctttacaaggaattaaggaaagagaagcctatgctaactccagacatcactatcatgtctgttggcactgagataacatatggggaggcaatggttcctgatgatggctgggaagaatatctgaacaataagtgggacaggaatattgttgtagcagaaactgtgagcttttctgagctgaagcttcagccagagacagaacagcgcccgcacaaggtcagcttttttgttgataagaagaatgcccaggaagtgataaaatctgttgccgagagattggacaaatgtgggctagatgccaaaataatatatagtggtggccaggaccttgatatattacctcaaggagctggaaagggccaagcacttgcatatttgcttgaaaagctaagctcatgtggaaaaccgcccaacaatactcttgtttgtggtgactctggtaatgatgcagaattattcagcatccctggtgtacatggtgtcatggtcagcaatgcccaagaggaactacttcagtggtacacagaaaatgcgaaggataacccaaagataattcattcaaatgagagatgtgcagctggtattatacaagctattggacacttcaagctaggacctaacatttctcctagagacctgcagtttccnttaggcaaaggaagcctctttcaaacctacagatgctgtagtgaagttctacgttctctatgagaagtggcgcagggctgaggttccaaagtctgattcagttataaagtacttcaaaaacatcactcatgcaaatggagttaccatccatcctgctgggcttgaactctcactccatgcatccattgatgcgttgggatcatgttatggtgacaaacaagggagaaagtaccgagcatgggtggacagactttttatcacacagactggttcagatagttgggtggggaggtttgacttgtgggaatcagaaggtgatgtgcgtgtgtgttctctgtcaagtcttgctttgattctgaaggctgaatccccagagggctttgtgctaacccacatccaaaagacatggctgaacggatactcgtcaggggttgagcaggcgtttaagctgtagagcagtataccgtctcggctcgtggttggagttttcttgagaatagaatagaataatgtacctgtttataatattaacttcccaaaaccgcactggaggatcaccagggagaggattcggtgccttctcttatttggctttcatgagaagatgaaattgactcatcttggtatatatttacaaatcttgaataaaaaaaaaaaaaaa

SEQ ID NO: 1217 - DNA, 1743 bp, Zea mays
  Clone ID: PAT_MRT4577_149629C.1
gccaacgaattgggatcgaaaaacatctccgttccccaccaccaccttcgctccttctgcttcgcccgtccccctccgtcgcgtcgactcccaagatggataagctcagtggttctgcacgtcttatgattgtttcagatcttgaccatacaatggtgaatgtcgtccaactcatatcttggtctgccttaagctatctgtatgtaaactcttcattcttttgggatggctaaaacttgcaggttgatcatcatgacgaggagaacctgtccttgcttaggtttggtgccctgtgggaatctgtttactgtgaggattctctactagtcttctcgactggaagatcaccaactctttacaaggaattaaggaaagagaagcctatgctaactccagacatcactatcatgtctgttggcactgagataacatatggggaggcaatggttcctgatgatggctgggaagaatatctgaacaataagtgggacaggaatattgttgtagcagaaactgtgagcttttctgagctgaagcttcagccagagacagaacagcgcccgcacaaggtcagcttttttgttgataagaagaatgcccaggaagtgataaaatctgttgccgagagattggacaaatgtgggctagatgccaaaataatatatagtggtggccaggaccttgatatattacctcaaggagctggaaagggccaagcacttgcatatttgcttaaaaagctaagctcatgtggaaaaccgcccaacaatactcttgtttgtggtgactctggtaatgatgcagaattattcagcatccctggtgtacatggtgtcatggtcagcaatgcccaagaggaactacttcagtggtacacagaaaatgcgaaggataacccaaagataattcattcaaatgagagatgtgcagctggtattatacaagctattggacacttcaagctaggacctaacatttctcctagagacctgcagtttccttatgcaaaggaagcctctttcaaacctacagatgctgtagtgaagttctacgttctctatgagaagtggcgcagggctgaggttccaaagtctgattcagttataaagtacttcaaaaacatcactcatgcaaatggagttaccatccatcctgctgggcttgaactctcactccatgcatccattgatgcgttgggatcatgttatggtgacaaacaagggagaaagtaccgagcatgggtggacagactttttatcacacagactggttcagatagttgggtggggaggtttgacttgtgggaatcagaaggtgatgtgcgtgcgtgttctctgtcaagtcttgctttgattctgaaggctgaatccccagagggctttgtgctaacccacatccaaaagacatggctgaacggatactcgtcaggggttgagcaggcgtttaagctgtagagcagtataccgtctcggctcgtggttggagttttcttgagaatagaatagaataatgtacctgtttataatattaacttcccaaaaccgcactggaggatcaccagggagaggattcggtgccttctcctatttggcgcgtaagataaatgttttgtctcatggctttcatgagaagatgaaattgactcatcttggtatatatttacaaatcttgaataatgcagcgttatctatatccagggatgtcaacggcaatccagggaaaaaaaaaaaaaaaaaagcggcc

SEQ ID NO: 1218 - DNA, 429 bp, Zea mays
  Clone ID: PAT_MRT4577_149992C.1
cctcgatccgatccggcgagtgcacaccacctttccccactccgatcgaatcaatggccgtcgagggcgataagaagatggtaaccctcaaaagctccgatggcgaggagttcgaggtgaaaaaggcggtggcaatggactcccagaccatccgccacatgatcgaggatgactgcgccaacaacggcatccctcttactaacggttactccaagagcctattcaaggtaatcgagtactgcaacaagcacgtacatgccgtcgacggcgccgtcgccgtcttgaaggccggtttcgacgacgtgggtgccgtctgcgccaacagcaaacgcgtcttcggtgaggactctaagaactgggatgcggactttgtcaaggtcgaccaggccacgctttttgaccttatcttggctgcaaactatctgaaca

SEQ ID NO: 1219 - DNA, 301 bp, Zea mays
  Clone ID: PAT_MRT4577_150003C.1
tcggctaattcttcccctcttaccaagtcctcctcgggttagggttccttagggttttttagaagggcgatggcagctgctgatgtggagtaccgatgcttcgtcggcgggcttgcctgggccaccagcaacgagtcgctggagaatgccttcgcctcctacggcgagatcctcgactccaaggtcatcaccgaccgtgagacggggaggtcccgcggcttcggcttagttaccttattctacgaaaactccatgcttgacgctattaagaacatgaacggcatggagctcgacggccgta

SEQ ID NO: 1220 - DNA, 1475 bp, Zea mays
  Clone ID: PAT_MRT4577_150025C.1
cagctagcaatgtcggggatggcggcgcgcatcggcgagtggaagccggtgatggcgatgctcatcttcgacctcatctccgccgtgacgacggccctgatcaagaaggcgctgcaggaggggctggaccgcctggtgctcatcacgctgcggcagctcgtggccaccgtcttcctcgcgccgatcgcctacttcagagagcggagcacgaggcctaagctgacactggagatcctagtctacctcttcttcagcgcagcgtttggcgccgctctctcccagtacaccttcttctacgggctgcagtacaccaccgcgacgttcgccataactttcaccaacgtggctcctgtgctcactttcctcattgcagtcttgctaagggtggagtcactgagcatgaagaacaaggcaggagcagcgaagatcgccgggacgctgacgtcgttcgccggcgtcatgctcctcaccctctacaagggcgtctcactgacgcaccagcaagctggagaagcgagcccggaggatcacaacctcggagcagcagcagcatcgccgtctgacaggaagagctggacgctgggcaccctggcattgctcgccaactgcctgtgcttctccttctggctcctgctgcagtccaggctgaccaagaagtacccggcgctctactccagcacggcctacatgttcctcatcagctcgatgcagggaggggccctcacggcggccattcagaggcgagcgtcggtgtggcttctcacaaggccgatagagatcgtcacggtcttatatacaggaatcatggggtccggagtgggctacgtgctgatgacgtggtgcgtggagaagcgagggccggtgttcacgtcagccttcatccctgtcatccagatcatggtcgccatggtcgacttcttctttctccatgagaatctctatctcgggagtgttctgggatccatactcttgatcctgggcctctatattctgctgtggggaaagaagagggatgcctcatcatcagcggctgccaaggaagaggaagatggagagaaagaagatgaggaggaggaggacaaagagaagcaagtcagatcatgaggaccagaccactctcatatatatatatggattaggaccaaattaaagatacagttcttcggactgtgtgatgatctatacttgacagagatatatatatatatatatatatagtatttgtttaatatataactctgctagtatatatagtatttgttctgaattcaaaatcagtataaatttataagtgttctctctagcaaaaagagcaaaacaaaaataaaaaaaaacagaacagggggccgctataaaggagcccatattacgcaacccgttataggaaagcatacatcttctaaacgagaccctgaagaaaaatcaacgggccgacttttaccaagcacagggctgggaaaaaccgggcctaaccc

SEQ ID NO: 1221 - DNA, 260 bp, Zea mays
  unsure (1)..(260): unsure at all n locations
  Clone ID: PAT_MRT4577_150162C.1
ggagcaaatcgcttccaaaggataaacagaaaagncgaggcaacaagacaaaactgtttgaggcaacgcacttcgccttacccgagccgagctcaccattttttttcaggaaaagcaaacaggtccttccttcccccctcagctcaagcgataaccataagaaaccctgctacgcgactgcgnctattgcatatgcgtgcaaaagataactgacaggccagtgtagcgatcttcatagcacacaacggcccgagggagct

SEQ ID NO: 1222 - DNA, 365 bp, Zea mays
  Clone ID: PAT_MRT4577_150265C.1
aaaaagcatcaggcagcacaaagaaccaccattttttccttatgataaacttaaaacaaaccctgacgggggtaacagaattcattgatcccaaaaccatgctgtttgacccatggctttgctggaccctaggataaacacagcattaacacctgacacatagggaccttgcaatcaaaaacacaaatgggcatcaacaatcgagacgaacgatgatagcccctttggactagggtaaacatcacgtgactgaacaagataacttggtcgcgcgggccccaccggtcatttcttccatttcccgcctgagttgccgcagacgccgccactgttgccaccggcgtaggcgccaccaccaccaccgt

SEQ ID NO: 1223 - DNA, 238 bp, Zea mays
  Clone ID: PAT_MRT4577_150347C.1
gtgaggttctgcggggttcggtttcgcgggtgagcggatcgagatgggcggcgtcagatgttgagtacccgctgcttggtaccgcggcctcgcctgagccacggacgaccacttcctccacaacgccttcaggacctacggtgaagccctcgagtccaagattattcctcgatcgggagacgcagaggtccctgcgcttccggcttcgtcacctttctccacggacgagggcgatgca

SEQ ID NO: 1224 - DNA, 194 bp, Zea mays
  Clone ID: PAT_MRT4577_150619C.1
gatcctgcaccccgagccgaacaccacagctactcgccagaagttgcaggagcggagcacaactacgtgcagagaacaggacatatgactacgccggacggcgaagggtgacgccgtggggtatctcgccgtacggatcgcgcgctgctgctggcccgggagcgagtcgagatcgactacgagctccgccccat

SEQ ID NO: 1225 - DNA, 590 bp, Zea mays
  Clone ID: PAT_MRT4577_150645C.1
ggggggttttttttttttttttttttttttttttttttttttttttttttttttttttttttttttttttttttttttctggggaaaaaaagatttttttgggggggcaatttatgcaacaggccccccggctttataattattccaaagggggcgggcccccccaatcacccgggaaggggggccccggggggagagaaaagcctttttagaggggggggggaaaaggcccaaattaaaaaataaggggaccctctggcccgtccactcctcatatatccaacgaccccccccggccgggcggtttactcgctgcccggcccggagggagctttcgggaccccggggaaaatgaccctggggccgaccagctccttgccgacctcgggggggaatgggtcctaccggaggaagagctcgacgaggaggagcctgccgaccagcaccacaaagtttttcccggggccctgcttgttgccaaccctggggttctcggcctcacggccgtgggaccagtacacgtactgcagcagcttgctgccctcctcgccgaggaagcggccgggcacaaagtccccggcggggtcccc

SEQ ID NO: 1226 - DNA, 400 bp, Zea mays
  Clone ID: PAT_MRT4577_150676C.1
cagaatcagagccgaagtcaacacaaaagcttatatctagaaagcagcaccaagagagggcttttgtaaaaacatgggtccgatcgccacaaatgtggagctgaacatgaatggtaatagtagtgttagtttaataagcgagaaggaatcagagtaacattgtggcactgccatcatgttagacattatcatagatgacaccatgctcgacatcatcatcgttggtatcatacttaacatcattatagatggcatcatactcagcgtcatcatcgaaagcttcatactcggcatcattattggagaaaccaagtttggcataattaacgatggcatcatactagctatcgtctttgatgacatcatagtcggaaccatcataaatggcatcatattcgga

SEQ ID NO: 1227 - DNA, 2251 bp, Zea mays
  Clone ID: PAT_MRT4577_150748C.1
cattgggtacctcgaggccggccgggccggatagaaactagacgcaaccagtttctctttccctcccgattttctgtttttcttctcttggattgggctcaccctgctcaaaacttcggcggcagcggcagcggtagcggtggcggcgccggctttctccatgaacacggtggctttgttgtccttggcgccgcagctgctcattaagccctccctcacctgtttctccagaaagggcgttggccgctatggcggaatcaaggtgtacgccgtgctcagagacgacggagctgagtttgccaagaacaacaacctggaggccctgttccatgtggatgaccccgggccgagggtccccatcaagaagggcaagttcctggacgtgaacgaggctctcgaggtggtccgttttgacatccagtactgcgactggagggcgcggcatgatcttctcaccatcatggttctccacaacaaggtggtagaggtcctcaaccccctagcgagggagttcaagtcgatcgggaccttgaggaaagagcttgccgagctacagcaggagctggcaaaagctcacaatcaggttcatctctcggaaaccagagtctcatctgcgctcgacaagctagcgcatatggagaccctggtgaacgacaggctgttgccaccggacggagcctctagtacgtccacggcgcagcccacttccttggttccaagcacttcgtccaccgcccgtgtccgagccaagaaaccgccacgtcggggccttaacgtgtctggcccggtgaagccgtacaatcccagcctgaagaacttctggtacccagtcgccttctccagtgatctgaaagatgacaccatggtgccgatagcttgcttcgaggagcagtgggtgatattccgtggaaaagacggaaggcctgggtgtgttcagaacacatgtgctcacagggcttgcccgctgcatcttggttcagtgaacgagggtaggatccagtgcccttaccatggttgggagtactctactgatgggaaatgtgaaaaaatgccatcaacaaagatgctcaacgtgcgcatccagtcattgccatgctttgagcaggaaggaatggtctggatttggcctggggatgacccaccaaaggctacaatcccttctcttctgcctccttcaggatttacagtacacgcagagatagtgatggaactgccagttgaacatggactactcctggataacctcttggaccttgctcatgctccttttacacacacatccacctttgccaagggctggagtgttccaagtttggtgaagttcttaacacctgcgtctgggctccaagggtactgggatccttacccgatcgacatggagttccgaccgccatgtatggtcttgtcgaccattggcatctcaaagcctgggaagctagaagggaagagcacccagcaatgctccacgcacctccaccagctccacgtctgcttgccctcctctaggaacaaaactaggctgctgtaccggatgtcgctagacttcgctccgtggctcaagcatgtaccgctcatgcacctgctgtggtcacatttcgcagagaaggcatgtcagtcaatgtgataaagtcttgaacgaggacctacggcttgttcttggtcagcaagaacggatgatcaatggcgccaacgtctggaactggccggtatcatatgacaagctcggggtccggtaccggttgtggagagacaccgttgagaggggctctgaacggttgccattcagtaaccaagctgagagtggatcatagccggccggtgggtctcttaatttcctcctcgtcacatttattcgcgagacgacggccagaattagttacctaggcgtgcgtctctgtgctctgctccctgatgctgctgcgtctatctggaaggcgaaggttgatgggtaacatcatcgtgtctctctctcccctctggtgttggaatgtacactagcgtcgttatcatgagatgcaattgtaatctgaggttgatattttctttctttctttctttttccttttcgctttcttcttttcttcaccctttttgtgtaaagattcagcgaatgttactttgtcaaagcatgtataatcaatcatactactaactatggagacatgttcatatgagaaatggcagcagcacatctttgcttataaaaaaaaaaaaaaaaaaaaaaaagaaaaaaaaaaaaaaaaaagcggcc

SEQ ID NO: 1228 - DNA, 177 bp, Zea mays
  Clone ID: PAT_MRT4577_150830C.1
tcgcaacaccctagagtgagtcgtattatactggaccatcgcgctctgcctggtcatctccgtcctgccctacctggtgctcacggtgagcgcagcaggtgtgctggacagcggtgccttctactcggggctgtagctgcgggcgctgggctgtgcgcagcaccctgtgctgtcgtc

SEQ ID NO: 1229 - DNA, 526 bp, Zea mays
  Clone ID: PAT_MRT4577_151076C.1
agaaatgtacttgcttatttctgggaagccacggacatctgacaaaaaactttattattgaactataactcatacgaaatctaaaagagggcaccgccaccgacggggtggtggtagaatgctgatgcgtttgtcaaagcaagatggttgaatggcaacgattgctgcagttgtaagagggtgacagcgttaggcgcagcctgctgctagaacggcaacagctgtggctgtgtctagaacgtaacagggctcacaccagctagctggctgaatggtaatagctgttgctgctgctgataaacatgagagttcaatgctgtcacttgcatgaatggaagaaattgatgggggtaggcatcagataactggctgaatggctggtgatgttgttgcaaatgagaatcagagttcactgcaggtagctgggtgaacggaagaaactgctgatgctgatagtaggcatcaaagtttgctaacacaagttgcagaacttgttgtgccctgacgttttgcgccaataaatgca

SEQ ID NO: 1230 - DNA, 351 bp, Zea mays
  unsure (1)..(351): unsure at all n locations
  Clone ID: PAT_MRT4577_151226C.1
ggaaggcncggccgcgcgtgcggcccatacaaagcacaatattgtaccaacaatttcatccaaactatttagcctccttatcgtcggtgatctttctgcaagtgctgctactgccaccatcttcccgaaatgctcacacgctcctatagcttccctacttcccccgtaccatatcaccagctgtgtcttccatatgtgaaaacccaattcttcaaccctacaggatccaacaggcaatcacagttagcattttacctttatcacccttgttcctacaacaatcattaaccctattacatcaattacctttcgtgcatttattggcacaaaacattatggcacaacatctac

SEQ ID NO: 1231 - DNA, 224 bp, Zea mays
  unsure (1)..(224): unsure at all n locations
  Clone ID: PAT_MRT4577_151308C.1
cganacnggacatatgacgnaaacntcancncagagangatccggganangatgtggcangagangcttcactaccacccggaagttgccacancaanaagcatgtcatgagagaagccanagcccccaggacatcagcgggggcgcaccnctgcttgtttgtctttgataanagccgactgcgagtagccgattatngcggcacctagctgttatantncant

SEQ ID NO: 1232 - DNA, 702 bp, Zea mays
  Clone ID: PAT_MRT4577_15138C.1
atcgccgggctcatctccatcgacctcgcgcgcgacatgctccaggtgcatcccaactcgaacgctctggtgatctcgacggagatcatcacgcccaacttctaccacgggagccggcgggacatgctgctgcccaactgcctgttccggatgggcgcggcggcgatcctgctgtccaaccggcggcgggaggcgcggcgcgccaagtacaggctggtgcacgtggtgcgcacgcacaagggcgcggacgaccgcgcgtaccggtgtgtgtacgaggaggaggacgacgaggggcactcgggcatctcgctctccaaggagctcatggccatcgccggcgaggcgctcaagtccaacatcaccaccatgggcccgctggtgctgcccatgtcggagcagctgctcttcttcttccgccccgtcgggcgcaaggtgatcaacaacaagtggaagccctacatcccggacttcaagctggcgttcgagcacttctgcatccacgccggcgggcgcgccgtcatcgacgagctgcataagaacctggagctgtcgccgcggcacgtggaggcgtcgcgcatgacgctgcaccggttcggcaacacgtccagcagctcgctgtggtacgagctcgcctacatcgaggccaagggccgcatgcgcaagggcgaccgcgtgtggcagatcggcttcggcagcggcttc

SEQ ID NO: 1233 - DNA, 249 bp, Zea mays
  Clone ID: PAT_MRT4577_151489C.1
gggcggcccacgcggacggggaaagccgcccaagagaatgttcaccaacaggcggaagctgactcagatgaagggagggaaaagggggagggggaggccaacaactggcacagagcgccaccgacaggcatgcagcagggggaagagcataaggaggaacaaagacaaagcagcgactgggagagggacctaccggcgaagacactgagaggcttgctgggggagaacgaagacccaactcggcagggg

SEQ ID NO: 1234 - DNA, 906 bp, Zea mays
  Clone ID: PAT_MRT4577_151621C.1
cattgggtacctcgaggccggccgggagatagagagagagagcatagacaggagagagagagagaggggaagagagagagagagagagagagatagatgtggtaactcaagaactgttcttatgcatgcagcagccataagcattgctactagggtttcatgcggggcgaagcagctggtctctgccgcctgaacgccgccggaatctgcgaggcctccccgagctgcgtgcgtcgtcggataaggcagccggcacggcaatgccggttccgcttgctccgtacccagctcctccggcgccattcacgcctcccaatggggcccagagccagctcgtctgcaccgggtgccggaacctcctcatgtacccagctggtgcgacgtcggtctgctgcgccgtctgcagcaccgtcaccgccgtgccggctccaggaactgagatggcgcagctagtatgcggaggatgccacaccctcctcatgtacatacgcggcgcgacgagcgtgcagtgttcttgctgccacactgtgaacctggctatggaagcaaatcaagtcgcgcatgtgaactgcgggaactgccgcatgctgctcatgtaccagtacggggctcggtccgtgaagtgcgcggtctgcagttttgtgacatcggttggaagcagaagcccagcagctgagctgatagtgtccctgaaagtgctgtgagaccacctatgaaaaggatgctttgagtgcacatgtatagagttcttccctgaagcgattctttcactttcttttcttttggtttcttttcttttttgggtcctccgtcacatctccaccccacccgtccacttctgcgttccttcgatggatctggcgagcccgcggaataaatgagagtttttggatatatagctagggg

SEQ ID NO: 1235 - DNA, 1431 bp, Zea mays
  Clone ID: PAT_MRT4577_151622C.1
gagagagagagagagagagaagacaggagagagagagagaggggaagagagagagagagagagagagagagagatagatgtggtaactcaagaactgttcttatgcatgcagcagccataagcattgctactaggtgccgattcccctcttcttctttgttttttattcccctcttgctcttctttgatgatgatgattggctgggaactacatcttggaattcctttttttctctctctcgctttcgttgtttgattattggccttggtaaggccatggtgggtgattcctcgcctgttttatctgcaaactggattagctgcgagtttttttcttcttctttcaacccgctgcgttatcctacctaagctcggtttactcgttgcatcaggccaacaatggcaagtggcttccatgaacatggctgtccatgaaaaatcccccgtatgcatgctcggtctaatctcctcaagctagcgaaacgaaatttcctaaaagccggtctggtcctcgaatacagcttgttgcctgagccgctgggagtcctatggagtagtagagttcttcaccttcttctgcgcgcgattactgttagccggcttgaggagaagctggaacgatcttgacgtgcattcagagaatcgatttttccccgtctcccaaggactcctcgtccattagtaatcgattttactgctactgaacagctctttgcgtgcattttctccgagatttctgtggatttcaaatatcaatgcaactgaagacactctgtctctctccctcgctctgtttcgtcagcgtctcctgcacgtgctgtgtcgtttccagggtttcatgcggggcgaagcagctggtctctgccgcctgaacgccgccggaatctgcgaggcctccccgagctgcgtgcgtcgtcaaataaggcagccgccggcacggcaatgccggttccgcttgctccgtacccagctcctccggcgccattcacgccgcccaatggggcccagagccagctcgtctgcaccgggtgccggaacctcctcatgtacccagctggtgcgacgtcggtctgctgcgccgtctgcagcaccgtcaccgccgtgccggctccaggaactgagatggcgcagctagtgtgcggaggatgccacaccctcctcatgtacatacgcggcgcgacgagcgtgcagtgttcttgctgccacactgtgaacctggctatggaagcaaatcaagtcgcgcatgtgaactgcgggaactgccgcatgctgctcatgtaccagtacggggctcgaagactaccattgtttcgctgctattcttactgtaaaacaacttgtgtttctcatgagaaacagagaactaaccgccaagtttcactctactcagacctcacctggtgcagagcagaagcccagcagctgagctga

SEQ ID NO: 1236 - DNA, 963 bp, Zea mays
  Clone ID: PAT_MRT4577_151624C.1
cattgggtacctcgaggccggccgggagataccttttcggcccccatctatactctgtctgctgttcttccctataaattcgtcgacctctccatatcacagagagatagagagagagagagatagacaggagagagagagagaggggaagagagagagagagagagagagagatagatgtggtaactcaagaactgttcttatgcatgcagcagccataagcattgctactagcgtctcctgcacgtgctgtgtcgtttccagggtttcatgcggggcgaagcagctggtctctgccgcctgaacgccgccggaatctgcgaggcctccccgagctgcgtgcgtcgtcggataaggcagccggcacggcaatgccggttccgcttgctccgtacccagctcctccggcgccattcacgccgcccaatggggcccagagccagctcgtctgcaccgggtgccggaacctcctcatgtacccagctggtgcgacgtcggtctgctgcgccgtctgcagcaccgtcaccgccgtgccggctccaggaactgagatggcgcagctagtgtgcggaggatgccacaccctcctcatgtacatacgcggcgcgacgagcgtgcagtgttcttgctgccacactgtgaacctggctatggaagcaaatcaagtcgcgcatgtgaactgcgggaactgccgcatgctgctcatgtaccagtacggggctcggtccgtgaagtgcgcggtctgcagttttgtgacatcggttggaacctcacctggtgcagagcagaagcccagcagctgagctgatagtgtccctgaaattgctgtgagaccacctatgaaaaggatgctttgagtgcacatgtatagagttcttccctgaagcgattctttcactttcttttcttttgggtttcttttttgggtcctcctcaacattctcaccccacccgtccacttct

SEQ ID NO: 1237 - DNA, 511 bp, Zea mays
  Clone ID: PAT_MRT4577_151786C.1
catgcgaccaccccaagagcccctcctgagacatgaagccgtgcattgacaaaaacagctgcatgttgatatctgggtgatggagacacaccaggggccattgcccactcccagcgaccatctctatgcttagcaagcccatatgcactcgataggggcacactattggcatcccttccaccacaaagcaaaaggagaccatcagaacgggcactagcagttgcatacatgcatggtggtggtccttcaccttccggctcaagttttctccattcatatggcttagccgcagtatcaagggcccatacatctgccaggggccgttttccatcattgccaccaattgtcaataagaatcgctgcccaaccaaggccatcacatgtccataccgtggaccaggaccaggaccttgaaccaccactctatgccatcgcggtcgttgttgtgtaagatccagaacatgaaggtcccagcagataagccggcagggccaattccaccctgaatgac

SEQ ID NO: 1238 - DNA, 1444 bp, Zea mays
  Clone ID: PAT_MRT4577_151969C.1
cgtagagtcggttgaaaaaagaggtgggtggcgccggtgctgcggactaggtcgatcagcgcgacgacagcgtcgctggagcggcgggtgacgaggcgccaggcgccgagccggcggagcgaggcgtcgaggtgcttcaggctttggctgagccaccaccgggacaccctgccggggtagtagggcccgtcctcctctggcgaccacacgtacgccggcacgacctccccggccgtccgagcggccgccgccagcgccgggttgtcctccacacgcaggtctcgcctgaaccagaccaccgtccgcacccccggctccccgccgccgctcatcgaggactgcgatgctgtcatggcaccctcaccctatccggcacggctgaccaagaattccagacacagcaagctcttggccctttggcaagatccgcagcagctcaatcaagaatcggtcaagcagccaagaacaagctcttggctcccttctatgactatcagttgcgcaggcgaatcaagctgcttcacgcactgagccaggattgctccaggaactgcggaaaggctggactggatgggcctcttctcttcagagaggctgcagtggagatcggataatctgacaaatccaatctaccctcctctgattgaaaatctgattgaaaaaaagggtccagagtattttttttcgcctggggaatcgatgatgttgtgcagagattggcagaggggctctgggttgcgggaaaggcgagggtgtggtgtggtccagtgcagagggaggcctgcggatattgggattggttgacggtcttggctgagattgggaggcacgttgtggaaggcagggagtgggaggtctacagattgcacttcggtgaggagcacgagctctcgtctgtgctgcggaagaagattgtggatgcagtcaccaacatgctgatggggtgggactgatggcactgctgctgccgtgcctcggtctgaaacattatgcttagtgttcttccagaaactaacctatttggtgcaagcaaagaagaaacagctgatctctatctcttagattgcagcggttttcagctaatgcagagaccatgaaacctttggttatccaaacatgcactaggaaccggggtcctactagttagtgggcaccagacctgatgtatatgcatatactgaagcatgagatagggagatatgttgcataaaataaaaaaaaggaagtctacagattgcactttggtgaggagcatgagctctcgtctgcgctgcggagcaagatcgtggatgaagtcaccaacatgctgatggggtgggactcatgacactgctctgccgtgcctctgaaaaattatcattactgttccagcaggaatcaattaacttatttggtgcatgtaaaaaaggaacgacttatctcttaaatgtagcggtatttaact

SEQ ID NO: 1239 - DNA, 3461 bp, Zea mays
  Clone ID: PAT_MRT4577_152093C.1
cattgggtacctcgaggccggccgggacccgttcgcctctcaccttttcgctgtactcactcgccacacacaccccctctccagctccgttggagctccggacagcagcaggcgcggggcggtcacgtagtaagcagctctcggctccctctccccttgctccatatgatcgtgcaacccatcgagctacgcgcgtggactgccttccctgggtcggcgcaggaggggatcggaaggatggcggcgtcggtttccagggccatctgcgttcagaagccgggctcaaaatgcaccagggacagggaagcgacctccttcgcccgccgatcggtcgcagcgccgaggcccccgcacgccaaagccgccggcgtcatccgctccgactccggcgcgggacggggccagcattgctcgccgctgagggccgtcgttgacgccgcgccgatacagacgaccaaaaagagggtgttccacttcggcaagggcaagagcgagggcaacaagaccatgaaggaactgctgggcggcaagggcgcgaacctggcggagatggcgagcatcgggctgtcggtgccgccggggttcacggtgtcgacggaggcgtgccagcagtaccaggacgccgggtgcgccctccccgcgggcctctgggccgagatcgtcgacggcctgcagtgggtggaggagtacatgggcgccaccctgggcgatccgcagcgcccgctcctgctctccgtccgctccggcgccgccgtgtccatgcccggcatgatggacacggtgctcaacctggggctcaacgacgaagtggccgccgggctggcggccaagagcggggagcgcttcgcctacgactccttccgccgcttcctcgacatgttcggcaacgtcgtcatggacatcccccgctcactgttcgaagagaagcttgagcacatgaaggaatccaaggggctgaagaacgacaccgacctcacggcctctgacctcaaagagctcgtgggtcagtacaaggaggtctacctctcagccaagggagagccattcccctcagaccccaagaagcagctggagctggcagtgctggctgtgttcaactcgtgggagagccccagggccaagaagtacaggagcatcaaccagatcactggcctcaggggcaccgccgtgaacgtgcagtgcatggtgttcggcaacatggggaacacttctggcaccggcgtgctcttcaccaggaaccccaacaccggagagaagaagctgtatggcgagttcctggtgaacgctcagggtgaggatgtggttgccggaataagaaccccagaggaccttgacgccatgaagaacctcatgccacaggcctacgacgagcttgttgagaactgcaacatcctggagagccactacaaggaaatgcaggatatcgagttcactgtccaggaaaacaggctgtggatgttgcagtgcaggacagggaaacgtacgggcaaaagtgccgtgaagatcgccgtggacatggttaacgagggccttgttgagccccgctcagcgatcaagatggtagagccaggccacctggaccagcttctccatcctcagtttgagaacccgtcggcgtacaaggatcaagtcattgccactggtctgccagcctcacctggggctgctgtgggccaggttgtgttcactgctgaggatgctgaagcatggcattcccaagggaaagctgctattctggtaagggcagagaccagccctgaggacgttggtggcatgcacgcagctgtggggattcttacagagaggggtggcatgacttcccacgctgctgtggtcgcacgtgggtgggggaaatgctgcgtctcgggatgctcaggcattcgcgtaaacgatgcggagaagctcgtgacgatcggaggccatgtgctgcgcgaaggtgagtggctgtcgctgaatgggtcgactggtgaggtgatccttgggaagcagccgctttccccaccagcccttagtggtgatctgggaactttcatggcctgggtggatgatgttagaaagctcaaggtcctggctaacgccgatacccctgatgatgcattgactgcgcgaaacaatggggcacaaggaattggattatgccggacagagcacatgttctttgcttcagacgagaggattaaggctgtcaggcagatgattatggctcccacgcttgagctgaggcagcaggcgctcgaccgtctcttgccgtatcagaggtctgacttcgaaggcattttccgtgctatggatggactcccggtgaccatccgactcctggaccctcccctccacgagttccttccagaagggaacatcgaggacattgtaagtgaattatgtgctgagacgggagccaaccaggaggatgccctcgcgcgaattgaaaagctttcagaagtaaacccgatgcttggcttccgtgggtgcaggcttggtatatcgtaccctgaattgacagagatgcaagcccgggccatttttgaagctgctatagcaatgaccaaccagggtgttcaagtgttcccagagataatggttcctcttgttggaacaccacaggaactggggcatcaagtgactcttatccgccaagttgctgagaaagtgttcgccaatgtgggcaagactatcgggtacaaagttggaacaatgattgagatccccagggcagcccttagtggtgatctgggaactttcatggcctgggtggatgatgttagaaagctcaaggtcctggctaacgccgatacccctgatgatgcattgactgcgcgaaacaatggggcacaaggaattggattatgccggacagagcacatgttctttgcttcagacgagaggattaaggctgtcaggcagatgattatggctcccacgcttgagctgaggcagcaggcgctcgaccgtctcttgccgtatcagaggtcctggaccagaggggagtgggcgagctggtgaagtttgctacagagaggggccgcaaagctaggcctaacttgaaggtgggcatttcgtggagaacacggtggagagccttcgtctgtggccttcttcgcgaaggctgggctggattacgtttcttgctcccctttcagggttccgattgctaggctagctgcagctcaggtgcttgtctgaggctgcctcctcgttggcaaccggattgcctgctgctggtggatgtggtgatcaacagtattattacagagccatgctatgtgaacattactagtagcagtgctcataaaagctacaatcccatctcccttttttttccagtcatgtaaaacttccaaactgctccatggttcaaaactctgttcttcaatacatcatcaattatcgattatataaaaaaaaaaaaaaaaaaaaaaaaaaaaaaaaaaaaaaaaaaaaaaaaaaaaaaaaaaaacaaaaat

SEQ ID NO: 1240 - DNA, 1094 bp, Zea mays
  Clone ID: PAT_MRT4577_152094C.1
cattgggtacctcgaggccggccgggaaggattttccgtgctatggatggactcccggtgaccatccgactcctggaccctcccctccacgagttccttccagaagggaacatcgaggacattgtaagtgaattatgtgctgagacgggagccaaccaggaggatgccctcgcgcgaattgaaaagctttcagaagtaaacccgatgcttggcttccgtgggtgcaggcttggtatatcgtaccctgaattgacagagatgcaagcccgggccatttttgaagctgctatagcaatgaccaaccagggtgttcaagtgttcccagagataatggttcctcttgtcggaacaccacaggaactggggcatcaagtgactcttatccgccaagttgctgagaaagtgttcgccaatgtgggcaagactatcgggtacaaagttggaacaatgattgagatccccagggcagctctggtggctgatgagatagcggagcaggctgaattcttctccttcggaacgaacgacctgacgcagatgacctttgggtacagcagggatgatgtggggaagttcattcccgtctatcttgctcagggcatcctccaacatgaccccttcgaggtcctggaccagaggggagtgggcgagctggtgaagtttgctacagagaggggccgcaaagctaggcctaacttgaaggtgggcatttgtggagaacacggtggagagccttcgtctgtggccttcttcgcgaaggctgggctggattacgtttcttgctcccctttcagggttccgattgctaggctagctgcagctcaggtgcttgtctgaggctgcctcctcgttggcaaccggattgcctgctgctggtggatgtggtgatcaacagtattattacagagccatgctatgtgaacattactagtagcagtgctcataaaagctacaatcacatctcccttttttttccagtcatgtaaaacttccaaactgctccatggttcaaaactctgttcttcaatacatcatcaattatcgattatatatgtggcaaggttttttccaaaaaaaaaaaaaaaaaagcggcc

SEQ ID NO: 1241 - DNA, 3924 bp, Zea mays
  unsure (1)..(3924): unsure at all n locations
  Clone ID: PAT_MRT4577_152095C.1
ttgggtacctcgaggccggccgggcacccgttcgcctctcaccttttcgctgtactcactcgccacacacaccccctctccagctccgttggagctccggacagcagcaggcgcggggcggtcacgtagtaagcagctctcggctccctctccccttgctccatatgatcgtgcaacccatcgagctacgcgcgtggactgccttccctgggtcggcgcaggaggggatcggaaggatgacggcatcggtttccagggccatctgcgtacagaagccgggctcaaaatgcaccagggacagggaagcgacctccttcgcccgccgatcggtcgcagcgccgaggcccccgcacgccaaagcccgccggcgtcatccgctccgactccggcgcgggacggggccagcattgctcgccgctgagggccgtcgttgacgccgcgccgatacagacgaccaaaaagagggtgttccacttcggcaagggcaagagcgagggcaacaagaccatgaaggaactgctgggcggcaagggcgcgaacctggcggagatggcgagcatcgggctgtcggtgccgccagggttcacggtgtcgacggaggcgtgccagcagtaccaggacgccgggtgcgccctccccgcggggctctgggccgagatcgtcgacggcctgcagtgggtggaggagtacatgggcgccaccctgggcgatccgcagcgcccgctcctgctctccgtccgctccggcgccgccgtgtccatgcccggcatgatggacacggtgctcaacctggggctcaacgacgaagtggccgccgggctggcggccaagagcggggagcgcttcgcctacgactccttccgccgcttcctcgacatgttcggcaacgtcgtcatggacatcccccgctcactgttcgaagagaagcttgagcacatgaaggaatccaaggggctgaagaacgacaccgacctcacggcctctgacctcaaagagctcgtgggtcagtacaaggaggtctacctctcagccaagggagagccattcccctcagaccccaagaagcagctggagctggcagtgctggctgtgttcaactcgtgggagagccccagggccaagaagtacaggagcatcaaccagatcactggcctcaggggcaccgccgtgaacgtgcagtgcatggtgttcggcaacatggggaacacttctggcaccggcgtgctcttcaccaggaaccccaacaccggagagaagaagctgtatggcgagttcctggtgaacgctcagggtgaggatgtggttgccggaataagaaccccagaggaccttgacgccatgaagaacctcatgccacaggcctacgacgagcttgttgagaactgcaacatcctggagagccactataaggaaatgcaggatatcgagttcactgtccaggaaaacaggctgtggatgttgcagtgcaggacagggaaacgtacgggcaaaagtgccgtgaagatcgccgtggacatggttaacgagggccttgttgagccccgctcagcgatcaagatggtagagccaggccacctggaccagcttctccatcctcagtttgagaacccgtcggcgtacaaggatcaagtcattgccactggtctgccagcctcacctggggctgctgtgggccaggttgtgttcactgctgaggatgctgaagcatggcattcccaagggaaagctgctattctggtaagggcggagaccagccctgaggacgttggtggcatgcacgctgctgtggggattcttacagagaggggtggcatgacttcccacgctgctgtggtcgcacgtgggtgggggaaatgctgcgtctcgggatgctcaggcattcgcgtaaacgatgcggagaagctcgtgacgatcggaggccatgtgctgcgcgaaggtgagtggctgtcgctgaatgggtcgactggtgaggtgatccttgggaagcagccgctttccccaccagcccttagtggtgatctgggaactttcatggcctgggtggatgatgttagaaagctcaaggtcctggctaacgccgatacccctgatgatgcattgactgcgcgaaacaatggggcacaaggaattggattatgccggacagagcacatgttctttgcttcagacgagaggattaaggctgtcaggcagatgattatggctcccacgcttgagctgaggcagcaggcgctcgaccgtctcttgccgtatcagaggtctgacttcgaaggcattttccgtgctatggatggactcccggtgaccatccgactcctggaccctcccctccacgagttccttccagaagggaacatcgaggacattgtaagtgaattatgtgctgagacgggagccaaccaggaggatgccctcgcgcgaattgaaaagctttcagaagtaaacccgatgcttggcttccgtgggtgcaggcttggtatatcgtaccctgaattgacagagatgcaagcccgggccatttttgaagctgctatagcaatgaccaaccagggtgttcaagtgttcccagagataatggttcctcttgttggaacaccacaggaactggggcatcaagtgactcttatccgccaagttgctgagaaagtgttcgccaatgtgggcaagactatcgggtacaaagttggaacaatgattgagatccccagggcagctctggtggctgatgagatagcggagcaggctgaattcttctccttcggaacgaacgacctgacgcagatgacctttgggtacagcagggatgatgtgggaaagttcattcccgtctatcttgctcagggcattctccaacatgaccccttcgagatgcccgtacacctaccaggtcctggaccagaggggagtgggcgagctggtgaagcttgctacagagaggggccgcaaagctaggcctaacttgaaggtgggcatttgtggagaacacggtggagagccttcgtctgtggccttcttcgcgaaggctgggctggattacgtttcttgctcccctttcagggttccgattgctaggctagctgcagctcaggtgcttgtctgaggctgcctcctcgttggcaaccggattgcctgctgctggtggatgtggtgatcaacagtattattacagagccatgctatgtgaacattactagtagcagtgctcataaaagctacaatcccatctccctttttttttccagtcatgtaaaacttccaaactgctccatggttcaaaactctgttcttcaatacatcatcaattatcgataaaaaaaaaaaaaaaaaaaaaaaaaaaaaaacctggggggggggcccggcccccaattccccctataggggtcgtttttcacaannnnnnnnggggggggnntggnnccnnnatnnnntggaaagaggattttcttaaaatgatttttatttggcttaaacccccttatactcctcaaccctttcccaattgtcgcaatcctccaatcctcctgtaccccccctcttgtcctcctccccgatgttgcgattgaacctctttcccccacttctctcacatttccgtcctatgtctcccctttggaaaccccattgtccttttcgtctattgtcatcattttcagaaatcaggcgagggntttgtcagcaggccctgtccttgttcagtatgtattggagggtgtccgcgtgtgagcggtccctcgtgtcgctcggctggcttcatgcgggccccccatatgcgtatcccattcatcgccaccaggtagattctgcgcgatggcatcaccgagtagttgacgctctgctgtgttgagtctgcgttttgcgatgttanaatcgaccgggcacangtacgcactcaccggtcttatccgcgcacgcgtagatcaacaa

SEQ ID NO: 1242 - DNA, 3003 bp, Zea mays
  Clone ID: PAT_MRT4577_152101C.1
ccggccgggataccagccacggctgcatttatttgtcactgatcgttgatcagcctagctagctagcgctgttttcctgtgtgctaatggcgcccgttcaatgtgcgcgttcgcagagggtgttccacttcggcaagggcaagagcgagggcaacaagaccatgaaggaactgctgggcggcaagggcgcgaacctggcggagatggcgagcatcgggctgtcggtgccgccggggttcacggtgtcgacggaggcgtgccagcagtaccaggacgccgggtgcgccctccccgcggggctctgggccgagatcgtcgacggcctgcagtgggtggaggagtacatgggcgccaccctgggcgatccgcagcgcccgctcctgctctccgtccgctccggcgccgccgtgtccatgcccggcatgatggacacggtgctcaacctggggctcaacgacgaagtggccgccgggctggcggccaagagcggggagcgcttcgcctacgactccttccgccgcttcctcgacatgttcggcaacgtcgtcatggacatcccccgctcactgttcgaagagaagcttgagcacatgaaggaatccaaggggctgaagaacgacaccgacctcacggcctctgacctcaaagagctcgtgggtcagtacaaggaggtctacctctcagccaagggagagccattcccctcagaccccaagaagcagctggagctagcagtgctggctgtgttcaactcgtgggagagccccagggccaagaagtacaggagcatcaaccagatcactggcctcaggggcaccgccgtgaacgtgcagtgcatggtgttcggcaacatggggaacacttctggcaccggcgtgctcttcactaggaaccccaacaccggagagaagaagctgtatggcgagttcctggtgaacgctcagggtgaggatgtggttgccggaataagaaccccagaggaccttgacgccatgaagaacctcatgccacaggcctacgacgagcttgttgagaactgcaacatcctggagagccactataaggaaatgcaggatatcgagttcactgtccaggaaaacaggctgtggatgttgcagtgcaggacagggaaacgtacgggcaaaagtgccgtgaagatcgccgtggacatggttaacgagggccttgttgagccccgctcagcgatcaagatggtagagccaggccacctggaccagcttctccatcctcagtttgagaacccgtcggcgtacaaggatcaagtcattgccactggtctgccagcctcacctggggctgctgtgggccaggttgtgttcactgctgaggatgctgaagcatggcattcccaagggaaagctgctattctggtaagggcggagaccagccctgaggacgttggtggcatgcacgcagctgtggggattcttacagagaggggtggcatgacttcccacgctgctgtggtcgcacgtgggtgggggaaatgctgcgtctcgggatgctcaggcattcgcgtaaacgatgcggagaagctcgtgacgatcggaggccatgtgctgcgcgaaggtgagtggctgtcgctgaatgggtcgactggtgaggtgatccttgggaagcagccgctttccccaccagcccttagtggtgatctgggaactttcatggcctgggtggatgatgttagaaagctcaaggtcctggctaacgccgatacccctgatgatgcattgactgcgcgaaacaatggggcacaaggaattggattatgccggacagagcacatgttctttgcttcagacgagaggattaaggctgtcaggcagatgattatggctcccacgcttgagctgaggcagcaggcgctcgaccgtctcttgccgtatcagaggtctgacttcgaaggcattttccgtgctatggatggactcccggtgaccatcagactcctggaccctcccctccacgagttccttccagaagggaacatcgaggacattgtaagtgaattatgtgctgagacgggagccaaccaggaggatgccctcgcgcgaattgaaaagctttcagaagtaaacccgatgcttggcttccgtgggtgcaggcttggtatatcgtaccctgaattgacagagatgcaagcccgggccatttttgaagctgctatagcaatgaccaaccagggtgttcaagtgttcccagagataatggttcctcttgttggaacaccacaggaactggggcatcaagtgactcttatccgccaagttgctgagaaagtgttcgccaatgtgggcaagactatcgggtacaaagttggaacaatgattgagatccccagggcagctctggtggctgatgagatagcggagcaggctgaattcttctccttcggaacgaacgacctgacgcagatgacctttgggtacagcagggatgatgtgggaaagttcattcccgtctatcttgctcagggcattctccaacatgaccccttcgaggtcctggaccagaggggagtgggcgagctggtgaagcttgctacagagaggggccgcaaagctaggcctaacttgaaggtgggcatttgtggagaacacggtggagagccttcctctgtggccttcttcgcgaaggctgggctggattacgtttcttgctcccctttcagggttccgattgctaggctagctgcagctcaggtgcttgtctgaggctgcctcctcattggcaaccggattgcctgctgctggtggatgtggtgatcaacagtattattacagagccatgctatgtgaacattactagtagcagtgctcataaaagctacaatcccatgtcctttttttccccagtcatgtaaaacttccaaactgctccatggttcaaaactctgttcttcaatacatcatcaattatcgattatataaaaaaaaaaaaaaagggcggccgtcgcgatctagaactagttctagatcgcga

SEQ ID NO: 1243 - DNA, 407 bp, Zea mays
  Clone ID: PAT_MRT4577_152170C.1
gctgcctcctccttatcctcccatcgtgagaagtgattgcggtccatggcaaggctatcggcggtgtccccgcaaagaaggcaacgtccacgatctccaatgccgtactccagttccacgtcggcaggattgccagcttcctcatggcggtcaagtacgccaagcgcgtcagctccggctcccccgtttacctcaccaccgtcctcgagtacctagcggctgaggttctcgaacttgccgggaacgcctcgaggtacaacaagaagacccgcattgtgccgcgccacatccagcttgctgtgcgcaacgacgaggagctgaccaaactgtttgctgtgtccaccatcgcgagcggatgtgttatgcctaacatccatcagcatctgcttcccaataaagctgccttc

SEQ ID NO: 1244 - DNA, 238 bp, Zea mays
  Clone ID: PAT_MRT4577_152177C.1
gggtcgcatcgacaaacttaaacaaaaatgcatgttgaactactacaggtggcgacaaatgccataacacaaatactgatcgccggataagatagcactacttcgatggaaccaaactttactcgccatcctcatcgttgacatctgctccggccgaggagttgagctggctgagcctttaaatgagactggcctttctctgcttgtatgtcacttttgttgatgttgtacccatggt

SEQ ID NO: 1245 - DNA, 882 bp, Zea mays
  Clone ID: PAT_MRT4577_152258C.1
cctcgaggccggccggggtcgccttgtcggcgtccgccactccgccccctccagccagatccctcctattcccccacttcacgcttacccgcgacgtcaacacctgcagcctcgtcgtcgacaccgtgggtgaataccactcgggtgtgggtgccaagcgcaatggacggcgcaaggggaagaaagggaagaagggaaagcaggatgcacctgtgactgacttcgtgccggttaagacacagattaggctggacgagaacaccgccaacaatgaggctgctggggctgcagcggagccggtgtttgttgttggtgaggctgtcaatgacagcttgccagtggttgcttctgagtctgatttcagccgtggtaagtaccttatttacattggtggtggcgagaggtgcaagagcatgaaccatttcatttgggggttcttgtgtgcccttggtgaggcacaattcttgaaccggactcttgtcatggacttgaatgtctgcctcaatgcacggtatacttcgagtggcaaggatgaagaaagagatttcaggctctactttgattttgagcatttgaagcaatctgcgtccgtgattgaccagagccagttctggcaagattggggacagtggcacaagaaagataggctcaagaacttctacactgaagacatcaggatgaccccaatgaaacttcgtgacatcaaggacacattgatcatgaggaagtttgggaatgttgagcctgataactattggtcacgtgtgtgcgagggtgagactgagggaataatcaagcgcccatggcatttcctgtggaaactccctcgcttgatggagattgtatctgccattgcctcacggatgaactgggactttgact

SEQ ID NO: 1246 - DNA, 314 bp, Zea mays
  Clone ID: PAT_MRT4577_152259C.1
agcaccattgttagttcaatgggcagcagagtcctcggtccacaggctataagcttggatcagggccggtaaccgatcgacacatgaacacacattattgggcgcaagacacttacggcacacattatgacatatcatcacagctgagataaatccgtctggtttatgagtccatcacggtaagttacatagacagtccacacgggaatctgtggtattccgcacaggcaatttgcaaggagacgacgttcagaacacaaaggggttgccgtagacctcgaacatcttcgagcaagaccagttacgttccggca

SEQ ID NO: 1247 - DNA, 585 bp, Zea mays
  Clone ID: PAT_MRT4577_152260C.1
gaacgctaacttgtttcgacgattcctgttgactccggatgaattttaaggtgattccagttgggttggaaagcgtatctccttaggtttccatccatataaagcataacctaatcggagttcggatgcatcttgggcgtctgttttagtgtagactagtcctagacttcgaggtggagacgaagttgagtcagacttggatttctcttgttgtgaatatcctagcttctcgtccttgacatcttggcctttcccaagtccttactagtcctctccaaggttccttagcccaccaaatgttcaggaagaagctgagcatgtattcacgccatccttgcaatcacgtgtaagctcgttgaatgtctccacatgcctcttccccctcaagaatacctcagtgtcaactgcaatcctcatatagccatcaaattctactggctgaccattgctcagctccttagtttcagtgaaccactcactattctcatcccacaggtagcaatgtacaaataccggccagcaccaaccttatcattaagtgccataaggagactgtctggtgaggtatctctgtcaaggtttggc

SEQ ID NO: 1248 - DNA, 578 bp, Zea mays
  Clone ID: PAT_MRT4577_152261C.1
ctgcgacacggaggcgcccgtggactgcacaggagacagggaactcttccgcgtccgcatgcgcgcggccatcgagcggttccccgacctccacttctaccgctttggccgtcccgtggcggtgccggggagtcccatggagtgtgacctcgcgtggcgcttccgccccgctgccgacgccatcggcaccggccggaccacatactacaaggactaccgccggttcacgcttacccgcgacgtcaacacctgcagcctcgtcgtcgacaccgtgggtgaataccactcgggtgtgggtgccaagcgcaatggacggcgcaaggggaagaaagggaagaagggaaagcaggatgcacctgtgactgacttcgtgccggttaagacacagattaggctggacgagaacactgccaacaatgaggctgctggggctgcagcggagccggtgtttgttgttggtgaggctgtcaatgacagcttgccagtggttgcttctgagtctgatttcagtcgtggtaagtaccttatttgcattggtggtggcgagaggtgcaagagcatgaaccatttatttgggg

SEQ ID NO: 1249 - DNA, 374 bp, Zea mays
  unsure (1)..(374): unsure at all n locations
  Clone ID: PAT_MRT4577_152369C.1
tcccgttaaccaggcccagtcccgtggcggtggcggtggcggcggtggctacggcggcggtcgcggcggcggcggctttggtggcgggcgccgtgacggcggttttggcggcggtggcggcttccgcggtcggcgcgagggtggtggcggcggcttcggnggcggtggcggctactgcggtcggcgcgtgggtggtggtggcggcttccgcggcggcggcggcggctggtgggactgttgtgtgggcccttcctggcttcggccgggttgtcttatctgtctttcgtgtcgtggttccgttcgcttctgtccccgggttagtgtccgttctccctttggattaggtgttggttcccctggtggtccctttgttt

SEQ ID NO: 1250 - DNA, 371 bp, Zea mays
  Clone ID: PAT_MRT4577_152373C.1
aacaccctatagtgagtcgtatattcacctctctgctcaccatctcatcaactctccaagcatgacgcaactcccacgccccccttcgggcttctcatgccgatgcgttaggcgcggcattgatgaaaactacgatggtgtcatttaccagtacgcctcaagctcctatgttaaagaaggatatatcgaacccagagccgtgatctatcctaccgatgacgaggacgtcttcaaggccatcgagtacgcgagaaccaacgatgtctgaatcgcgatccgtaccggcggccacagctactgcggctcttcctcgaccaatggtgccaacatccagctggacctgtcgccgacctacacagactttcactggg

SEQ ID NO: 1251 - DNA, 325 bp, Zea mays
  Clone ID: PAT_MRT4577_152422C.1
cctggatattgctcgagctgaattggagcgatgagaccaactagcaacatagaaagcacaatagtgtaccaacaatggcagctaagatattgtgcctccttatgctccttggtctttctgcaagcgctgctacggcgaccattttcccacgatgctcacaagctcctatagctacccttcttcccccgtacctgtcaccaacggtgtcttcggtaatgtgacaacccaattcttcaaccctacagagatacaacagacaatcaccagctggcatcttaccttaatcaccccttgctcctccaacaatgatcagccctattacaga

SEQ ID NO: 1252 - DNA, 2599 bp, Zea mays
  Clone ID: PAT_MRT4577_152459C.1
gctcaggaggcggcggagagaagggagaaaatccccggtagggaggggggaaggaagccaaaggcccaaaggtctcggcgctgccgtagtaccggctgaggcaagatggtgaaggcacgaatgacgccgcctcatcggcatgcgcctagccaacgtctacgacatcacccccaagacataccttttcaagctgatgaacagcagtgggattactgaatcaggggaaagcgagaaggtcttgttgctcatggagagtggtgtcaggttccacaccacccaatacgttcgtgacaagagtaccaccccttcaggtttcactctgaaactacgaaagcacattcgtaacaagagacttgaagatgtccgtatgctcggatatgacaggattatccttttccaatttgggcttggtagtaatgcacatttcataattttagagctatatgcacaaggaaacattcttctcacggattcagaatacacagtattgacactactccgttctcacagagatgacaacaaaggattggccatcatgtcacgtcatcgctatccagtagaagcttgccgtgtttttggcaggactgactttgcaaagttaaaggacatgttgacaaagcctgataaggctgatgataaagaggaaattacgtctggatcaaccgatgctcaggaaacttctcaatccaccaatgatgaagtgttggtaactgaaatatctgaaaaatcactgagtaaaaaaaaaaaaaaagggctgactggcgaggcaaaagcgcaaacgcgaccacagacagagcgcgcttcaaggccttttttttttttgagataacaaggaggagaggaggagatggcggtcacgatcacctgggtgaaggcgaggcagatcttcgacagccgcggcaaccccaccgtcgaggtggacgtgggccttagcgacggcagctacgcgaggggggccgtacccagcggcgcatccactggaatatatgaggccttggagttgagggatggaggatctgattatcttggcaagggtgttcttaaggctgtcagcaatgtaaacaacattattggaccagcgattgttggaaaggaccccactgagcaggttgagattgacaacttcatggtccaacagcttgacggaacctccaatgagtggggctggtgcaaacagaagcttggagcaaatgccatccttgcggtttcacttgctgtgtgcaaagctggagctatggtgaagaagattcctctttaccagcacatcgcaaatcttgctggaaacaaaactctggtgctccctgtacctgcctttaatgtgattaatggagggtcacatgctggaaacaagcttgccatgcaggagttcatgatcctcccaactggtgcctcctcgttcaaggaggccatgaagatgggagttgaggtgtaccacaacctgaagagcataatcaagaagaagtacggtcaggatgcgacaaatgttggggatgaaggtggttttgcacctaacattcaggaaaacaaagaaggccttgaactattgaaggcagccatagaaaaggctggctacactggaaaggtggtcattggaatggatgttgctgcttctgaattcttcggtgagaaagacaagacttatgatcttaatttcaaggagaagaacaacgatggctcaaacaaaatttcaggcgacagcctgaaagacctgtacaagtcctttgtttctgagtaccctatcgagtcgatcgaagacccatttgatcaggatgactggagcacttatgccaaactcactgatgagattggacagaaagtgcagattgtaggagatgatcttctcgttaccaaccccaccagggtcgccaaggccatcaatgagaagacctgcaatgctctcctcttgaaggtgaaccaaatcgggtctgtgaccgagagtatcgaagctgtcaggatgtccaagcgcgccggatggggagtgatggcaagccacaggagtggcgagacagaggacaccttcattgctgacctctcagttggcctgtctacgggccaaatcaagacgggagctccttgccggtctgagcgcctggccaaatacaaccagctgctcaggatcgaggaggagctcggtgatgccgcggtctacgccggagcaaagttcagggcaccagtggagccctactaagaaaggaagaggatgaggatgttttcttgtggagctatactagctcgctgctgccttttgttacaatgtttgtacggtcgcaataaatgtatggtcgtgtttgctcgagagctactccggtgattttgtcgtgggggcccccaaagcagaaaagaaccctttttttttcaatctctctagattctgacgagtggtggtctgcactcgtcgtaatgtcgtttgcctaaactgattttgatggaacaggaaatcttgctggtcttgccatatgcgtgcgagtgactttcttgttccttatggtgtgtgaggccattttcgtattcagcatggaaaattacgggttcgttttgtagcgacaggcagcttgggcgtaggagccacgacccgcaaaaataaaatcttgttggttgc

SEQ ID NO: 1253 - DNA, 2506 bp, Zea mays
  Clone ID: PAT_MRT4577_152461C.1
ttgccccacggaacaaggaaaagggtatatgctcccgcagccctcgtggaaaccaagggcggaccttcccctcctccaagcaaatccgaggcccacccacgggccgctcgaacatctgtcaccgccaagtggccccaccccacccctcccctccgctgccccttcttctacaaataccccggccggccgcggccgttcccgaatcgagcggtgactggcgaggcaaaagcattgcgaccacagacagcgcgcgcttcaaggcctttttttttttgagataacaaggaggagaggaggagatggcggtcacgatcacgtgggtgaaggcgaggcagatcttcgacagccgcggcaaccccaccgtcgaggtggacgtgggccttagcgacggcagctacgcgaggggggccgtacccagcggcgcatccactggaatatatgaggccttggagttgagggatggaggatctgattatcttggcaagggtgttcttaaggctgtcagcaatgtaaataacattattggaccagcaattgttggaaaggaccccactgagcaggttgagattgacaacttcatggtccaacagcttgatggaacctccaatgagtggggctggtgcaaacagaagcttggagcaaatgccatccttgcggtttcacttgctgtgtgcaaagctggagctatggtgaagaagattcctctttaccagcacatcgcaaatcttgctgggaacaaaactctggtgctccctgtacctgcctttaatgtgattaatggagggtcacatgctggaaacaagcttgccatgcaggagttcatgatcctcccaactggtgcctcctcgttcaaggaggccatgaagatgggagttgaggtgtaccacaacctgaagagcataatcaagaagaagtacggtcaggatgcgacaaacgttggggatgaaggtggttttgcacctaacattcaggaaaacaaagaaggccttgaactattgaaggcagccatagaaaaggctggctacactggaaaggtggtcattggaatggatgttgctgcttctgagttcttcggtgagaaagacaagacttatgatcttaatttcaaggaggagaacaacgatggctcaaacaaaatttcaggcgacagcctgaaagacctgtacaagtcctttgtttctgagtaccctatcgagtcgatcgaagatccatttgatcaggatgactggagcacttatgccaaactcactgatgagattggacagaaagtgcagattgtaggagatgatcttctcgttaccaaccccaccagggtcgccaaggccatcaatgagaagacctgcaatgctctcctcttgaaggtgaaccaaatcgggtctgtgaccgagagtatcgaagctgtcaggatgtccaagcgcgccggatggggagtgatggcaagccacaggagtggcgagacagaggacaccttcattgctgacctctcagttggcctgtctacgggccaaatcaagacgggagctccttgccggtctgagcgcctggccaaatacaaccagctgctcaggatcgaggaagagctcggtgatgccgcggtctacgccggagcaaagttcagggcaccagtggagccctactaagaaaggaagaggatgaggatgttttcttgtggagctatactagctcgctgctgccttttgttacaatgtttgtacggtcgcaataaatgtatggtcgtgtttgctcgagagctactcaggtgattttgtcgtgggagcaccaaaagcagaaaagaactgttttttttcttctcaaaaaaaaaaaaaaaccctggggggggggcccggcccccaatcccccctttggggggtcttttaccccccccccccgggccgtttttttacaccggggggaggggaaaaccccgggcgtcccccaatttaatcgcctggaaaaacatccccttttccccggggggggaaaaaccaaaaaggccccccccgttcccccttccaaaaatttgcccaccttgaagggcaaaggggcccccccctgtaccggccctttaagccgggggggggggggggttccccccagggggccccttacctttgccagccccttagcgcccgctcttttcgttttttcccctccctttccccccaggttggggggttttccccgaaaagctttaaatggggggctccttttggggttccaatttagggttttccggccccctcaccccaaaaaattggattgggggagggtccccttggggccccccccccggaagacaggtttttccccttggccgtggaggcccccgtttttataaaggggctctttggccaaaggggaaccccactcaccccttttgggggctttttttttggattaaaaggggattttgccccttttccgcctttggggataaaaaaagggctctgttttaacaaaaattttccccccaatttttaaccaaatttttccccgctcgccagtt

SEQ ID NO: 1254 - DNA, 1217 bp, Zea mays
  Clone ID: PAT_MRT4577_152504C.1
cattgggtacctcgaggccggcgcgtgcttttccggccgcagcggctaacgcgtggccacgccatccctccgcgtgcctaattaattggaagcacccagcgcacatcatcagtcgaagtgagcgtcagcgagcgaccgcaccggcacggcgcccatccatccatcgccatcctctagcccagtccaaaggaaccctagccatgagcgccgcctccaagaagctcttccaggccgccaggtccctcgtcctctccgcttctaaccgctccgtcctcgccgccgagggccgcaccgccgcgctcgccacgctcaccaactttggcaggaagaccctccccaccgcctacttatcctaccacaagcagggatcccaccatgccgcgtcggggtggggagccatcgccgccgcagtcccagctgcagtttacatgctccaggaccaggaggctcatgctgcagagatggagcgcaccttcattgccatcaagcctgatggtgtccaaagaggcctgatttctgagattatgagccgatttgagagaaaaggctataagcttgttgccatcaagctgattgttccatccaaagaatttgctgagaagcactaccatgatctcaaggaaaggcctttcttcagtgggttgtgtgattttctcagctctggccctgtgcttgcaatggtttgggaaggagagggtgtcatcaagtatgggagaaaactaattggtgccacagacccacagaaatctgaaccaggaaccatcaggggtgatcttgccattgttgttggaagaaacatcattcatggaagtgatggcccagagacagcgaaggatgagatcgctttatggtttgaacccaaggagctggtctcttacaccagcaatgcggagaagtggatctatggggtgaattaacgagagagtcaatctgttttttttccttcttttgatctcggttttcacataattgccgacagacctaggcacaaggatgtaataaagtcgctaccgtcacttctgagttggattgtgaccttcaggtgtagtaaggcacaaggaaggatggaaaggaaaggaatataccgtgaaatatagagcgtgcactgagtagtcgcgatgttcaaatcaaactatatatcaccgtcactggagtcatgtaatccaagatggtgatgcagatgtttctttggatctatttctctagatatccctacc

SEQ ID NO: 1255 - DNA, 1171 bp, Zea mays
  Clone ID: PAT_MRT4577_152506C.1
ggaaacctttgcgttttttaagcgagccacgccaataacggagaggcatgcaccgacgatcggcatttccttccagtggtcgggaaagggaggacagcagagcagaggtcgagcatcgcatcgcgcgctttgcctgccgcagcggctaacgaacgcgtggatcatcccttctattattaattaattgggaggagtgggagtgatagctgcagcacccagcgcccatccggaaccctagcctcctcgtcgttgaatccaccacaccacaccatgagcgggagcgcctccaggaagctcttccaggccgccaggtccatcgtcctctccgcttctcaacgctcctccttctccgtcctcgccgccgagggccgcaccgccgcgctcgccaactttggcaggaagatcctccccagcgcctgctcctaccacaggcagggatcccacgccgcgtcgggatggggagccatcgctgccgcagtccccgccgcagtttacatgctccaggaccaggaggctcatgctgcagagatggagcgcactttcatcgccatcaagcccgacggcgtccaaagaggcctgatttctgagattgtgaaccgattcgagagaaaaggctacaagcttgttgccatcaagctgattgtcccatccaaaggattcgctgagaagcactaccatgatctcaaggaaaggcctttcttcaacgggttgtgtgacttcctcagctctggccctgtacttgcaatggtttgggaaggagagggtgtcatcaagtatgggagaaaactaattggtgccacagacccacagaaatctgaaccaggaaccatcaggggcgatcttggcgttgttgtgggaagaaacatcattcatggaagtgatggcccggagacagcaaaggatgagatcgccttgtggtttgaacccaaggagctggtctcttataccagcaatgcggagaagtgggtctatggggtgaattaaccagcgactaaatctcttgaggtttgcttttttcttttcagttttcacataattgccgacagaccaaggcaggatgtaataaagtagctaccgtcacctattacttttgagttggattgattgtggtgcagtaaggcacaaggaaaggaaggaatacaccgtgaaatttgttaaaaaaaacaaaacg

SEQ ID NO: 1256 - DNA, 1349 bp, Zea mays
  Clone ID: PAT_MRT4577_152508C.1
cgattaggtgcacttttaacagctttacggccgcttttttttttttttgaataaaaacagacggcgggccatcatcatggtagggatatctagagaaatagatccaaagaaacatctgcatcgccatcttggattacatgactccagtgacggtgatatatagtttgatttgaacatcgcgactactcagtgcacgctctatatttcacggtatattcctttcctttccatccttccttgtgccttactacacctgaaggtcacaatccaactcagaagtgacggtagcgactttattacatccttgtgcctaggtctgtcggcaattatgtgaaaaccgagatcaaaagaaggaaaaaaaacagattgactctctcgttaattcaccccatagatccacttctccgcattgctggtgtaagagaccagctccttgggttcaaaccataaagcgatctcatccttcgctgtctctgggccatcacttccatgaatgatgtttcttccaacaacaatggcaagatcacccctgatggttcctggttcagatttctgtgggtctgtggcaccaattagttttctcccatacttgatgacaccctctccttcccaaaccattgcaagcacagggccagagctgagaaaatcacacaacccactgaagaaaggcctttccttgagatcatggtagtgcttctcagcaaattctttggatggaacaatcagcttgatggcaacaagcttatagccttttctctcaaatcggctcataatctcagaaatcaggcctctttggacgccatcaggcttgatggcaatgaaggtgcgctccatctctgcagcatgagcctcctggtcctggagcatgtaaactgcagctgggactgcggcggcgatggctccccaccccgacgcggcgtgggatccctgcttgtggtaggagtaggcggtggggagggtcttcctgccaaagttggcgagcgcggcggtgcggccctcggcggcgaggacggagcgttgagaagcggagaggacgagggacctggcggcctggaagagcttcctggaggcgctcccgctcatggtgtggtgtggtggattcaacgacgaggaggctagggttccggatgggctcagtgatgggcgctgggtgctgcagctatcactcccactcctcccaattaattaataatagaagggatgatccacgcgttcgttagccgctgcggcaggcaaagcgcatgcgatgcgatgctcgacctctgctctgctgtcctccctttcccttctcaccgccacgtgcaggaaatgccgatcgtcggtcccggccggcctcgaggtacccaatg

SEQ ID NO: 1257 - DNA, 649 bp, Zea mays
  Clone ID: PAT_MRT4577_152531C.1
ttatcatctgcgcctctacattgcttctcgctctgctcctccgcctccgcctgatccatccaagacaggaatcgccatgacggactcgggggatgaccacttcgaatcgaaggccgacgctgtagcgtccaagacctacccgaagtagggtggcaccggccgtaagaacggcttcttcgtcatcaataaccgtccctgcaaggttgtggaggttctctacctccaagactgccaataatgagcacgactaatgccactttgtggccatagacatattcaatgggaaatggcttgaacatattgttccttcatcacacaactgtgacattccgcatgcgaaccgcactgagtatcatatgattgatatttctgacgatggatctgtgagacttcttacttcacatggtgacactaggatgatcttagactcccaactgatgagactcttgtggcccatattagggaaggcatctaaagcgttaaggatcttgttgagactgtccagactgctatgtgggaggagcagatctgcgcgatgaaggatggtggtccccagtaacttccttggatttggagacggaaccctactgtatctcaacttaaatcggaaaagaactgtatctccagaggattgctaccgagacattca

SEQ ID NO: 1258 - DNA, 272 bp, Zea mays
  Clone ID: PAT_MRT4577_152593C.1
attattctcgatttcaggttctgagtttgtggagatgtttgtaggtgttggtgcttccagagtacgtgaacttttcaagacagccaaggagaacgctccttacatagtgtatgtcgatgaaattgatgctgttgtacggcatagaggtacaggtattggtggtggaaatgaatgatagggagcagactctaaatcaataactaactgggatggatggttttgagggcaacaccggaattacggtattgctgccactatccatctgacatctt

SEQ ID NO: 1259 - DNA, 188 bp, Zea mays
  Clone ID: PAT_MRT4577_152730C.1
gttagaataccttgaggagcgggagcctcaaggatttggtcaagaagcactctgagttggtgaggtaccccatctgcctgtggaccgaaaagacaacggagaaggagatttctgatgatgaacatgaggaagagaagaaagacgctgaggagggaaaggttgaggatgttgacgaggagaacgaagag

SEQ ID NO: 1260 - DNA, 871 bp, Zea mays
  unsure (1)..(871): unsure at all n locations
  Clone ID: PAT_MRT4577_153066C.1
cctcgaggccggccggggcctcacatctcattcctctcctctctcctccccccctctcgctcgagctctgttggaggcaggagggcaggccagggcgccaggccaggcgaggtggttcggttgacgagttcttcctcttcctcgacatcgccgatcccgccacgcgctgcccgcagcggaggtgagacacaataatcttagatggagaggttaagcaccaaccagctctacagttctggtgttcctgtaaccgtaccaacatctctgccttgtataccagtctctctggatgagagcttcccgaggcttcccgatgcacagagtgttttgatggagagagaattgaggagcactccactaccacctcaccagacaactgttgctcctatccgtggtctgtttcactccaatactggatctgttggtcctttgtgctcacctccgtctgtaaggttctcttcgcattcaaatcctgagcaataccccaaccacaattcatacaattctcaagtaccaagcactgcaagttcctcaacgctgaattatgggtcacaatatggaggctttgaaccatccataaccgatttcccaagagacattgaaccaacttggtgccccgatccagttgagagcattcttggatactctggtgatgtccctgctgggaataatttgactgggaccacttctattggagcttcagatgatcttactaagcaaactgaatggtggacagagtttatgaatgaggattggaaggacatggttgataacccgacttcacagaaactcaaccggttgggcaaccctgtgcatcatccaactcagntcaccatcagctacccaacaacagtttcatctcaaatctgtg

SEQ ID NO: 1261 - DNA, 424 bp, Zea mays
  Clone ID: PAT_MRT4577_153096C.1
gcctcagatctgaagcacctgctccgacacttgcatcttgtcgaagggacaagagatgaaattgcggtcgatcgagggcgtactcctgtggatgggcaacaccccttctggacatctccgcctgcgccgatgacgccttcctgacatagtctgacatcaagctgaaccatgctattctcggtggggagaagcacttgcctatgtgtgacgagttgggtagcacgagcattgttgaatatatggccggacgagccacccaaaactctatcatggttgcccaatggatgcttcaaactcctggtgcatcaagttacatgtgatgcattggaaaggacaagtttggtgaggaaatgaagaaaaacgctcaagctgcaggagttactgctcattactaccaggatgagactgctcctactggcacatg

SEQ ID NO: 1262 - DNA, 575 bp, Zea mays
  unsure (1)..(575): unsure at all n locations
  Clone ID: PAT_MRT4577_153097C.1
gcgtccggnaaaggcggcgactgnaggcgtgctcttggggatgggcaaccccctcctcgactctccgccgtcgtcgatgacgccttcctgacaaagtatgacatcaagctgaacaatgctattctcgctgaggagaagcacttgcctatgtatgacgagttggctagcaagagcaatgttgaatatagggccggaggagccacccagaactctatcagggttgcccaatggatgcttcaaactcctggtgcaacaagttacatgggatgcattggaaaggacaagtttggtgaggaaatgaagaaaaacgctcaagctgcaggagttactgctcattactacgaggatgagactgctcctactggcacatgtgctgtatgtgttgttggtggtgaaaggtcattgattgcaaatctgtcagcggcaaactgttacaaatctgagcatntaaagagaccagagaactgggcactagttgaaaaggcaaaatacatntacattgctggatttttccttacagtggtcggctgattttatccaggtagtttggtggagcatgcttgcagaaaataaca

SEQ ID NO: 1263 - DNA, 554 bp, Zea mays
  unsure (1)..(554): unsure at all n locations
  Clone ID: PAT_MRT4577_153098C.1
ttttggggagagncggnaatggcggggagggagggcgtgctcttggggatgggcaaccccctcctcgacatctccgccgtcgtcgatgacgccttcctgacaaagtgtgacatcaagctgaacaatgctattctcgctgaggagaagcacttgcctatgtatgacgagttggctggcgggggcggggttgaatatcttgccggaggagccacccagaactctatcagggttgcccaatggatgcttcaaactcctggtgcnncaagttacatgggatgcattggaaaggacaagtttggtgaggaaatgaagaaaaacgctcaagctgcaggagttactgctcattactacgaggatgagactgctcctactggcacatgtgctgtntgtgttgttggtggtgaaaggtcattgcttgcaaatctgtcngcggctccctgtttcaaatctgagcatctttagagaccagagaactgggcactagttgaaaaggcaaaatacatcttccttgctggatttttcctttccgtgtcgcctgattctatccagctagt

SEQ ID NO: 1264 - DNA, 252 bp, Zea mays
  Clone ID: PAT_MRT4577_153226C.1
acacacaccccgcacaccgcaccagctcagctcagctcagctgaccaagacaatcaatcatggctctgccgcgccagggtcgctgccgctgcccccctcctcctgctgctgctcgtcgccgccgcagcgcagctcgtgtcctccgtgtcgccggcagacagcgacattcgtcacaagtcctgccgcacgacccattacccgcccgcttgcgagcagagcctggcctcgtacaggagctcgtcttccacgcgg

SEQ ID NO: 1265 - DNA, 376 bp, Zea mays
  unsure (1)..(376): unsure at all n locations
  Clone ID: PAT_MRT4577_153353C.1
gtcaaaagagggcggncgggtgctttcttttccgaggagtggcttctcctccccctccggttcgggatcgggttcgtgaggctctccggcctacgggctcgtgggtgagcggatcgagatgagggcgtcggatgctgagtaccgctgcttcgtcggggacctcgcctggaccacgcacgaccactccctccacaacgggttcagcacctacggcgaagtcctcgagaccaggatcatcctccatcgggagacgcaccggtcccacgaatatgacttgtacaccttctcgacttaggaggcgatgaggaacgctatccagggcctgaacggtaagaagctggactgccgatacatcaccatctgcgagggacagcac

SEQ ID NO: 1266 - DNA, 350 bp, Zea mays
  Clone ID: PAT_MRT4577_153561C.1
atttagaccaactagcaacatataaagcacaattgtgttccaactatggcagccaacatgttgtgcctgcttatgctccttggtatttatgcaagtgctgctaccgataccattttcccgcactgctcacaagctcctatagcttaccttcttacaacatacctgtcaccagccgtgtattccgtgtgcgaaaacacaattcttcatccctacaggatccaacaggcaatcgctgctggcatcttacctttatgacccttgtttcttcaacaatcatcagccctattacattcattacctttggtgcattcatcggcacaaaacatcttggctcaacaactacaacaact

SEQ ID NO: 1267 - DNA, 721 bp, Zea mays
  unsure (1)..(721): unsure at all n locations
  Clone ID: PAT_MRT4577_153600C.1
gcacggcaccggaaaccgcggggcggcatgggccagctgggtgagcacggaggcgcntggcatgggtggcgggcagttccagcctgcgagggaggagcacaagacncggcgggcatcctgcatcgctccggcagctccagctccagctcgtcggaaggacgacggcnatgggcggaaggaggaagaagggaatcaaggagaagatcaaggagaagctgcccggaggccacaaggacgaccagcacgccacggcgacgaccggcggcgcctacgggcagcagggacacaccggcagcgcctacgggcagcagggacacaccggcggctcctacgccaccggcaccgagggcaccggcgagaagaaaggcattatggacaagatcaaggagaagctgcccggacagcactgagcggcgcctatacgtggctgtgctgtgctgtgctgtgctggcgcgtcaaagccgtaatgttcagtgttccatagataataagataaacccatgaataagtgtccctacccttgatcatgtgacagggacagggacagtttcctgtacttgtggggtgaatttgtacgtgtgatacggtaactgggtccgtgtactgttcatgctacgttttcctacgtatatagtacagcacttgcgagtggctttacttgtgtgcagacttcctaaaagtgtcgatattacctccatcagtaaatatgacccttgtgatg

SEQ ID NO: 1268 - DNA, 603 bp, Zea mays
  Clone ID: PAT_MRT4577_153667C.1
tttttgttttttttttttttttagaagctagaaaggactttcttatttctgggacgccacaaacatcatccaaaaaacttcattattgagctataactcataagcaatctaaaagggggaccaccaatgagggggttttgggggaacactggggggttttggaaagcaaggtgggtgaatgggagcaattgtggcaggtgtaagagggggccagcgttaggcgtagcgtgcaggtaaaacgggaacaactgtggtggtgtcaagaaggcggcaggggtcacatcagctagctgggtgaatgggagtagttgttgctgctgtaaataagcagcagaggtcaatgctgctaggtgggtgaatggaaaaaattgctggggggaggcagcaactagctggctgaatgggaattgtgtgggcaaataagcagcagagttcaatgcggccagttgggtgaatggaagaaactgaggtggctgagagtatgcagcaagggttgctagcacaaggtgttgtagttgttgtgccctgatgtgttgtgcgcccaaagggccaaagggactgctgtaatagggctgacgggtgttgggaggaacaagggggata

SEQ ID NO: 1269 - DNA, 1554 bp, Zea mays
  Clone ID: PAT_MRT4577_153677C.1
gcttactgggacctcgagccggccgggaacccccggcacctgtccgaattccagccgcccacctcacgcaagcggcaagcccacgggcgctctctctccccctgcgcctcgtcgcctctccaatccctctcgtcctctcgctttctctctccatctcgtttcccccgcctgcgcagccagcgcaaaccctagccaacaagcgccgttctgcgaggctctcggcagcggataacttaacctgtcgcgcaaggatcgggggagagaaaccagcggcaacttacgtggatcggggttgtttggtgctgctgcggcggcgcagggatggaccggaagcgcatcaaggacgcgctcgagaagcacctggagaggtcgtcgccgtctacttccaggggcgtcgtgtccaaggagagggagcgcctcgctgccgggaagctgccgtcatcgcttggcaaggcggaggtgtctgatggtgaggaatttgaaactgacagtgaagattctgatgtgagtggttccgagggagaggacacgtcctggatttcatggttctgtacattgcgaggcaatgaattcttttgtgagatcgatgatgactatatacaggatgattttaacctgtgtggtctgagtaatcaggtgccatattatgattatgcacttgatctcatcttagacattgagtcttctaatgatgacgggtttaccgaggagcaaaatgaattaatcgagtcatctgcagagatgctgtacggtttaattcatgcacgatacattttaaccagcaagggtctagctgcaatgttggagaagttcaagaactattatgactttggtagatgccccagggtgtactgctgtggccagccctgccttccagcagggcaatcagatgttcctagatcgagcactgtgaagatatattgtccgaaatgcgaagaacttaactatccaagatccaagtaccaaggcagtatccttttgatataatctccatacttccatttacatgtactggccgttttatgctatatccttcttaagcgatttatattttgaccaccctttggaactattgatttttttttgcaacatcgttttatgtgttctctggtctccatgccaacaccctggtgaaccacattgaacattccgtcagtcctgcttttctgtcgttgaactcttcctcggtaaataatggatatttgcaagctgccattacatgcccttaactttacccagacatcgatggatcatactttgggacgacattccctcatcttttcctgatgacttactcgcacttgaagccgcagaagccgtcacagcaatacactccaagggttttcggcttcaaacttcacaagccgtcatgacagagttgtagcttccgccagaagcacccctgtcacctaggttttagggagagcatcgtggccttcaaatactgttgtattattgatgtacgaattcgcgagcctgggcctcgctgtaaactattgtgaaattgtatctgttttccgatattattactgttgtgtaaccttggttctctct

SEQ ID NO: 1270 - DNA, 347 bp, Zea mays
  Clone ID: PAT_MRT4577_153694C.1
aagcttcctatagtcttcaccttcttcaccccgtatcctctcatccagcggtgtacttcggtatgtgaaaatcccatattcttcaactcctacaggtatccaacatggcatatcgcatgctggcatacttatcctttatcatcccttgttcctccaacatatcatcgagccctattacaatcagttactcttttggtgcatttaattggcacataaacatcatgggcacatacaactacatacaacttgtgctagcaaacgcttgctgcctactctcatcaacagcagtttcttccattcaaccaactaggttcattgaactctgcttcttatttgcaacaacaaca

SEQ ID NO: 1271 - DNA, 302 bp, Zea mays
  Clone ID: PAT_MRT4577_153777C.1
cctttctacagaatttcctgcttttgctgctggggctttgcagtcttacaaggtgggtgccgaggcaatatctaagattgaatcgctaccaggtgtgaagcatgcaggccttatgcaataccgcggtttaggaagtcttcgaccttacaggttatgactgggttgtggcttacattttccatgaagatgagcatggggggggggggggtgtgatcaccaaacgtggtattgagccctgtctagggctgcactatgcggccactgatatccctcaagctgccaagtttctcttgatgaagaac

SEQ ID NO: 1272 - DNA, 1804 bp, Zea mays
  Clone ID: PAT_MRT4577_153882C.1
caaggtggcggccagagagtagagatagagagagagtgggactatagagacgttaccgttgctgcttgttattattaacgccgccgccgcctcctgcattcgtatggtccgcgtcgtcacggggctcctccgtccgtaaggcaccgccgcagcgtctcggctggatcaacaggccggccgatccgtcttcttcccctcctcctgcgggtcggcgtttggggatcatggcggcgcgggcggctgacgagaacaggagaccggcggcagggaagcccgcgccaggcgtccgagacatggcgagccggcgcgcgctcacggacatcaagaacctcgtcggggctgccccgtacccctacgccgtcgccaagaagcccatgctgcagaagagcaaaagggacgaaaagcagccagcgttggcaagcagccggcccatgacaaggaaattcgccgcctccttggcgagcaagggccaacctgaatgtcagccgatcgtagctgatccagaacccgaagtttgtcaacagaaggaatcagtaggcgatggcaccgttgatattgacgtggaactctacgagctggtcgacggtagtgatagtgacatcgacatgggtgcgacagagaacaaggacattatgaacgaagatgaattgctcatggatattgacagtgcagactcggggaacccgcttgctgcaacagaatatgttaaagagctttacaccttttacagagaaaatgaggctaagagttgtgtaaggcctgattacatgtccagccaacaagacataaactcaaagatgagagcaattctgattgactggctgattgaggttcactacaagtttgaactgatggatgagacgctctttcttacggtaaacgtaatagatagattcttggaaaaggaagtggttccaaggaagaagctacaactggttggagtcacagctctgctgctcgcttgcaaatatgaggaggtatctgttccagttgttgaggaccttgtgctgatatctgaccgtgcctacacaaaagggcaaattttagaaatggaaaagttgattctgaacacgctgcagttcaacatgtctgttccaacaccttatgtcttcatgaagaggtttctgaaagctgcagatgcagataaacagcttgagctagcgtcatttttcatgctggagctctgcttggtagaataccaaatgctgaattatcggccttcgcatctggctgctgctgcggtttatactgcacagtgtgctatcaatcgttgccagcactggacaaaggtctgcgagtctcatagcagatacactagcgaccaactcctggagtgctcgaggatgatggtagattttcaccagaaggctggaaccagtaagctcactggcgtgcacaggaagtacagtacctacaagttcggttgcgtggccaagattttgcctgcgcagttcctgctggagtcgggagggacaccgcctccttcaggtgcaaactagttgaatcgacctattcaactgggtggattttttaaagtttttagaatactccatgaacaagatgcagaaaacatcgtgttgatgttgcccaaaagtgcatcgaatttctttggagagttatgattaacaactttttttttatctatgttgaatgacgagtgacggtcggtcacgttgtgcttgtgcagttatactgcggctaataacaaactgtccagttattctaaaaaacaacgaacgatgttcaggaaaacggtggaacctgcaaagaaaacaagttcttaatcaaaaaaaaaaaaaaaaaa

SEQ ID NO: 1273 - DNA, 683 bp, Zea mays
  Clone ID: PAT_MRT4577_153884C.1
gcagcttcggctcgttgcaagtgctggcgcctgcaggctgcagttccagtgatatacaggactggcatcgtcatttgcagctgcagctcacgtcttggcgagtgtcaaaacccaggagagagagcccaagcaagcgatggcgcgtatcggcgcgagtcatgtactcctcgtcgtcttgctgctctctgcggtcctgagctccggctcggctcgggttcccagagaacgaccggacgcgatgctgccggccggtcagacggcggcaatggccgagatgaccgtgcccggcgaagggcagagcagtgggccggcgtttggagtggcggcgcacgagtccaagcgcctgagccccggaggccccgaccctcaacaccattaggtgatggtagtaaccgtgatgagttattagctcgtcgtctggaagacggtttcttatgtatcgtacgtcgcctcgtcggatgagatagagagttgctgtggagatcatcatcaacaagcatgacatctccctaagcgttctttcagatactatatatccctagctgttcatgtttgttcggttgtaagcgcttcctttgtttttgttgtgcttgtgtgcgttttttcactagacgttgggatcataatttttgtatctattcgatatactgattatgatttaataaaatcttttctttattcag

SEQ ID NO: 1274 - DNA, 456 bp, Zea mays
  Clone ID: PAT_MRT4577_153932C.1
ccaaccgccccaaacaaatttatggataattaatactaaacagggggggcttaaaagcataaaaaatccggggtccagaatgtacccacagatatggcagacccggggcaacacccagggatccctgcatttgggttggacataacaaaagccagttaaggccaaagggatgtctttgtaccaatcctggatccactttttttttcgattaaggttttgagatacggttttccagggcggggaagttacttggggccaacatctttaagggcgcagatttgttcctcccccatagaagactggacagtaacaacaggatcctggccattttaaaacctttctttgatctgggccacaggagtttaatcagtggggagtctaagatcatccttagggttgccatttgaagtaagaaggctcacaaatccatcctttgatatataaatcagctgatac

SEQ ID NO: 1275 - DNA, 202 bp, Zea mays
  Clone ID: PAT_MRT4577_153979C.1
cggagacagcctggaggagttcctgaccaaggcgacgccggacaagaacctcatcaggctgctcatctgcatgggggacgccagggggacgatcgcagtcaaagtccgcgcagcgtcctgcggcgagagcgcctgtgtcaagtccttcggcgacgagcagctggccgtcgacaggcgcgctaacaggctgctctttgaggct

SEQ ID NO: 1276 - DNA, 2104 bp, Zea mays
  Clone ID: PAT_MRT4577_154033C.1
ctttgccgggggaaaagaaaacaaccgccccgcccccgcccccgcccctacgagcacgacggcctccggatgagggtcctgccgcgtcttttaccgtcagctggatgtcaaatcacaacgcgccctgtgacatccccaagccggcctccgtcgacgagttcctcgccaagaatggcaagaagaagaagtccttcatgtcgggcctcttccgcaagaaagggaggggcgcggacaagaagctgctctcgcggcgggacatcgtcttcgatttggaaggcagaagcggcgacaggatggacctcttggagacgtccgccgctgtccgcaagagcttctcagatcggcactgcacgacgcggatcgagaacctgacgctgagctgcctggattctcccaggagacccaatgtcgacacccgggagtaccgggtgtttgtaggcacatggaacgtgggagggaagcctcctgacagcagcgttaacctccaagagtttctgcagatcgaaggcttgcccgatatatatgtcttggggtttcaggagatcgtgcctctgaacgcgggcaacgtgctggtcgtggaggacaacgagccggcgggcaagtggatggacctcatctaccaggccctgaacaggccgccgccccaccaggacggccagtcctccggcgacgagctctcgccgccgccgtccacctcctcctcccactaccccagccggccgcaaggtgccgcccgcgaccccagcaacgccgccgccatccccaagacctccagcggcggcatgctctgcgcgcagaagccgccgccgccgctcaagatggtcagcaagtgctaccgcgtcgacaacgcgctggtgaagacgtgcacctgcatgtccgacccgtccaccatgcagctccgggcgcgtgagatgcgcgagttcctctgccgcgtcgaggccgccgccgcctcgccgggccgcggcgccgacgacgacgcgctggcctccatcgaaggcggcgaccagaggggcggcggcggcggcatgaactactgcctcgtcgcgaggaagcagatggtcgggatcttcctgtcagtgtgggtgcgccgggagctagtgcagtacgtcggccacctccgggtcgactgcatcggccggggcatcatgggccgcctcgggaacaagggatgcatcgccatgagcatgacgctgcaccacacgagcatctgcttcgtgtgctgccacctggcgtccggcgagaaggaaggcgacgaggtgcggaggaactccgacgtcgccgagatcctcaagaacgcgcagttcccgcgcatctgcaaggtgcccggccagcgcgtccccgagaagatcattgaccacgaccggatcatctggcttggggatttgaattaccgagtctcgttgagctacgaggaaactaagacgctcctggaggataatgagtgggacatcttattggagaaagatcagctcgcgatggagagacaagccgggagagtgttcaaagggtggaaggagggcaagatctacttcgcccctacatacaagtacaagcagaactccgactcgtatctatgggagaccgccaaatcgaagaagaaacgacgaacgcccgcatggtgtgaccggatactgtggcacggccaaggcatcgagcagctgcagtacatcaggggcgagttcaggctctccgaccacaggccggtctgcagcgtgttcgtgatcgaagccgatgtagatagcgggagcaagatcaggaagggctactcaacgctggacgctaggatccactgcgagtcccccgagatacccaagagacacagcttctacgatgacttctgaaattttggcccgtgatgctagttttgtctataacatagcagcttacaaagatcaggcacgtttgtagcgaaaaggctcaggtttctcaagcctaacacctgtcttaatttgtaccaagcggtatactaactgaaagtcaatggtggttactgcacagaacacaagtgaacgatggtattatttagggcacccccctacagtaatttcatgtcaaaaaaaaaacaatggtacgatttgacccaaaaaaaaaaaaaaaaaaaaag

SEQ ID NO: 1277 - DNA, 472 bp, Zea mays
  Clone ID: PAT_MRT4577_154109C.1
gagcgatgtcgagaacgcggccctagcttatttctgggcagccacccacatcatccaaaaaacttcattattgtaactataactcatagcaatctataagagggctcctccaatgatgggttgttgctagaacgctgctgtgttatgtcaaagcatgttggctgaatggctgtaatcgatgcagttgtaagagggtgccagcgctaggctcaaagcgcacgtggaacggcaacaactgttgctgtgtcaagaacgctatagggctcacatcagttcactggctgaatggtggtagctgttgctgctgtaaataagcatcagagttcaatgctgtcagttggttgaatggaagaaattgttgggggtaggcaccagctagctgactgaatggtagttgttgttgtacattagcaccacaggtcaatgcagccagttggttgtatggtagaaactgctcttgcttagagtaagc

SEQ ID NO: 1278 - DNA, 430 bp, Zea mays
  Clone ID: PAT_MRT4577_154174C.1
gcacatatatttagaccactagcacatagaaagcacaatagtgtaccaacaatggcagccaaaatattttgcctccttatgctccttggtatttctgcaagcgctgctacggcgaccattttcccgcaatgctcacaagctcctatagctttccttcttcccccgtacctctcaccagcgctgccttcggtatgagaaaacccaagggggggaccctacaggatccaacaggcaaaccaaggtggcatagttacctgtatcacccttggaccttcaacaatcatcagacctattacagcagctaccttcgttgcatttattggaacacaacatgaagggcaaacacctacaacaactagagctatcaaacctgggtaactactctcagaaacaggagtttattagattcaaccaacagaggtgagatgaa

SEQ ID NO: 1279 - DNA, 798 bp, Zea mays
  Clone ID: PAT_MRT4577_154234C.1
cccacgcgtccgcccacgcgtccgcccacgcgtccgtacgtagtagaggcaagcaaaagggcagggatagagcgccgccgagatatctagctagaagagcctagaagccggtgtagaggatcaggaggatgtctgggtcgtccggctccggcgtgtgggtgttcaagaacggcgtgatgcagctggagcagccggccgcggcggcgagccggaaggcgctggtgtacgtgccgacgaacgaggtggtgcggtcggtggaggcgctggagcggcggctgggcacgctgggctgggagcgctactacgagaaccgcagcatcgtgcagctccacaagcgcgacggcggcgccgacctcatcaccatcccgcgcgacttcgccagcctccgctccacccacatgtacgacgtcgtcgtcaagaaccgcgaccacttcaaggtcgtcgacgcttagccgccgcatcccgcataagctacgaccagaccaagcagctagctactagctagctccatcgtcgtcgaccaccgtcgtcgatctcgacatgcatgcgtgtgcactgcacaacggactgctagctgatgccagaaattatagtaagtctagcttatgtacgtatgcattgtgtgtgtgttcgtgcgtgggtacatgcatattgctcggctttggcttggcttaaattagttgcacgtctaattaagacgatcgagtttgtgtgtatgtgtgtgtgagagagaaagtgtgcgtaaaatattgtactcatgctctgctgttttctccattggcttttgggttttcctct

SEQ ID NO: 1280 - DNA, 620 bp, Zea mays
  Clone ID: PAT_MRT4577_154241C.1
cccctctcgagtttttttttttttttttttttttttttttttttttttttttttttttttttttttttttttttgggttttttttttttttggtttttttttgcagcaccaaaaaacacccttttttccttaggattaacttaaaacaaatcctgacgggggtaacagcatccatcgatccacagtccatgctggttgatgcatgggtctgctggaccccaggatgaacccagcactaacaactgacccagagggaccttgcaatcaaaaacccagaggggcaacaccaaacgagacgaacgaaaataaaccctttggactaggggaaacatcacgggagcgaacaggataacttggccgggcgggccccaccggtaaattcctccagttcccggcggagttgccgaaaccccccccacggttgccaccgccgtagccgccaccaccaccaccggagccaccggcgccaccggagccgccggcgccaccgccgaaaccgccgccgccattacggggcccgccaccgccgaaaccgccgcctccacgggcaccaccgtagccgccggcggcggttccaagggcggggggggactgggcctctttgacggggatgttgcggc

SEQ ID NO: 1281 - DNA, 436 bp, Zea mays
  Clone ID: PAT_MRT4577_154243C.1
gggagcaccaaaaagcaccattttttccttaggggtaacttaaaacaaatcctgacagggggaacagcatccatcgatccacaatccatgctgggtgaagcatgggtctgctggagcccaggatgaacacagcactaacaactgacacagagggaccttgcaatcaaaaacacagaggggcaacaacaaacgggacgaacgaagataaaccctttggactaggggaaacatcacgggagcgaacaggataacttgggcgggcgggccccaccggtaaattcctccaattcccggcggagttgccgtaaccccccccacgggtgccacccccgtagcccccaccaccaccaccggagccaccggcggcaccgtagccggcggcgccaccggcgtaaccgccgccgccataacggggcccgccaccgccgaaaccggc

SEQ ID NO: 1282 - DNA, 437 bp, Zea mays
  Clone ID: PAT_MRT4577_154376C.1
cccttaggattaaccttaaaataaagcctgaggggggtaacaacccccattgatccccagtccttgctggttgatccatggttttgctggacccgaggttaaacacagtcttaacaattgacccagagggacttttaataaaaaacacaattggtcaacaccaaacccgaaacgaacgaagataacccctttggactaggttaaacaacacggtagcaaacaggataatttggccgctcggccccaaccgtttatttcctccaattcccgtcggatttgccgtacccccccccacggttgccaccgccgtagccgccgccaccaccaccgtagccgccgccgccaccaccgtaaccggcgccaccgctgtagccgccgccgccataacggggcccgccaccgccgtatcctccttttccacggccaccaccgtaccc

SEQ ID NO: 1283 - DNA, 1472 bp, Zea mays
  Clone ID: PAT_MRT4577_154389C.1
tacctcgaggccggccgggacggcagcccgtttccgtccaccggaagtgccggcctttccccactcgctctcgctcccaacctcctcttcttcttcgtcttcggcgtgctccaggactgagtcccacgcgtcccacggtccgtcgcattccacccgcccccttttcgcgtgaacgcgccggcgccgcggatcctgccgtcacgaatggaggcgtggccggacgatttccgctgccccatcacgctggaggtcatgacggacccggtcatcctcccctccggccacaccttcgagcgccgcagcatccagagctggctcgacggggggcacctcacctgccccgtcaccaacctcccgctgccgccctccccgccgctcatccccaaccacgcgctgcgccgcctcatagccgccgtctcgccttccgcggcggcgtctctcgtccctgcggagggaggggcgcacgcgaggcaagaagcggtgtcggcggcggcggcggcggcggtgccagcccggcccgcgtcgcccgtgccggcgctgctgaggctggccaagtccggcgccgcagggcggaaggaggtgctggagtccggcagcgcggcggtgctgctgcggcacgcggaggccggggacgaggcggcggccagggcgctgctgcacctcagcctggacggcgacgacacgcgcgtgggcctcgtggcggacggcgccgtggacgcgctgtccgccgcggtgtcccgcggcggcgcggcggcggcgtccgcggccacggcgctgaccagcctcgccaccgtggacgtgaacaagtgcaccatcggggcgcacccctcggccatcccggcgctggcggggctcctccgccgcggcgggccgcgggagcgccgcgaggccgccacggcgctctacgagctctgcaagctgccggagaaccggcgccgcgcggtgcgcgagggcgcggcgcccgcgctcgccgacttcgccgccgccggctccgcgcgcgccgtcgaggtgctcggcctccttgcccggtgccgggaggggcggcaggagctgtgcagggtccccggcgtcgtgtccgtgctcacgggcgccgccgggagcggcaacgcgcgcgcaatcgagcaggccctgctcgtcctcaactggatttgctccgagagcaacgagttggcggtggaagcaatcaagctgcaggctttcgacctctgcgaggctctggtgaacgacgacaactgcaagatcgccaagaacgcggtcgacttggcccggacgctcgagaaagcgtagaattggattgggctgtctcccccaaaacatgagatgagattcgccatgggttttgattcaacacctgctcgattggtcgggtgttggcctcattgtacagaggtagcaacagcaaaggtgaaccttttatctttcttctcttactccgtttcatttccaagttgtagctgcgccgaaaggaggac

SEQ ID NO: 1284 - DNA, 253 bp, Zea mays
  unsure (1)..(253): unsure at all n locations
  Clone ID: PAT_MRT4577_15444C.1
tcgccccgcgtccgcgcctctcctgctcctagcggaggtgtccctcagaattagtgttcgcaatggcggccttcaacaagcttggtggccttctaaggcacagtgctctggtgagcggtattactggtggctcttntcctgcagtgtttaatgctgnacggcttatgtttaccaaggtggggagggggggtnttgactggggtgttgatgacttgaaactaaaagaagcttttagtaggtttggagaggttac

SEQ ID NO: 1285 - DNA, 194 bp, Zea mays
  Clone ID: PAT_MRT4577_154488C.1
tcggtcccctagccgccgccgccgctcgtcttcctgagaggtgccgggaccgaggatttggccgagttctaggtagagaatcgggtttacttgtcttagcccggggtctgctgcgtctggtggtggggaaggggagaaaatcgtgagatctttttcttatcatgcgtgcgaacttgggaatcaggggttttaca

SEQ ID NO: 1286 - DNA, 370 bp, Zea mays
  Clone ID: PAT_MRT4577_154566C.1
gggcccaacaagaaccaaaaaacataaaaattcaaaaccaataataatcctcgaagtacatgttcctcaatttcacaaatccaaacatccgggcacactaattgactacaaagtttgcgaaaagcgaaaagttaaacaacgggcgaaatcctttggcagaaaaaaacggggtttttaaaccctttggttaaccacaacattctccaccccaaaagctactttgtcattttggcgaacatgttgctgtaaaaattggcggcctttttggtggaccccttgaacttttccttcaggaacttatattccaacttgacatccctgttggcaggaacgatttccaaggcctttttgatatcggcccctgctaact

SEQ ID NO: 1287 - DNA, 661 bp, Zea mays
  Clone ID: PAT_MRT4577_154720C.1
cgtttctgctcctcgggttcgtcacccacggcaagggggtcctttcgcacgccgtcgccgcgggcatcagcgagctggagggcgtcgtgttcgaggtcgtcatcaccttcgcgctcgtctacaccgtgtacgccaccgccgccgaccccaagaagggctcgctcggcaccatcgcgcccatcgccatcggcttcatcgtcggcgccaacatcctcgccgcggggcccttcagcggcggctccatgaaccccgcccgctccttcggccccgccgtcgccgcgggcaacttcgccggaaactgggtctactgggtcggcccgctcgtcggcggcggcctcgctggcctcgtctacggcgacgtcttcattggcggctcctaccagcaggtcgcggaccaggactacgcctaatttattcaccacaccatcgtctccgctctggatgaatggattcaaacccgtatcatcgtcgtttgcttttgctcctcgcgccacgttcaattaatggttgtgtatgcatgtatgtgccaatatgatgtgccgttgccctggtccattcatttccctttcttttttcggggtgaaatagatgtaaagatctcgtcttgcctgccgtactcgcgctgtgttggaaaaaatttggttttcgtttcaagtttgtt

SEQ ID NO: 1288 - DNA, 944 bp, Zea mays
  Clone ID: PAT_MRT4577_154721C.1
gcttcagccaatcccctcgagctcagatcgagcgcgcgccaagcaagtcttccggccggccgcgaagagcgcaataaagctaagatggtgaagctcgccttcggaagcgtcggcgactccttcagcgccacctccatcaaggcctacgtggccgagttcatcgccaccctcctcttcgtcttcgccggcgtcggttccgccattgcctacgggcaactgacgaatggcggcgcgctggacccggcgggcctggtggcgatcgcgatcgcgcacgcgctggcgctgttcgtgggcgtgtccgtcgcggcgaacatctcgggcggccacctgaacccggccgtgacgttcgggctggccgtgggcggccacatcaccatcctgacgggcgtcttctactgggtggcccagctgctgggcgccaccgtggcgtgcctgctcctcgggttcgtcacccacggcaaggccatcccgacgcacgccgtcgcgggcatcagcgagctggaaggcgtcgtgttcgaggtcgtcatcaccttcgcgctcgtctacaccgtgtacgccaccgccgccgaccccaagaagggctcgctcggcaccatcgcgcccatcgccatcggcttcatcgtcggcgccaacatcctcgccgtcgccgcgggcgacttcgccggaaactgggtctactgggtcggcccgctcgtcggcggcggcctcgctggcctcgtctacggcgacgtcttcattggcggctcctaccagcaggtcgcggaccaggattacgcctaatttattcaccactccatctccgctctggatgaatggattcaaaaccgtcgtcgtttgcttttgctcctcgccacgttcaattaatggttgtgtatgcatgtatgtgccaatatgatgtgcctttgccctggtcaaaaaaaccaaaaaaaaaaaaaaaaaggacg

SEQ ID NO: 1289 - DNA, 2296 bp, Zea mays
  Clone ID: PAT_MRT4577_154722C.1
ccatgcataaacgaagtcgaaacgaaaatcacctgttttttttccactccaaggcgatcgaaaacggcagatcggatgagatctttacatcgattttaccccgaaaaaagaagggaaatgaatacaaggacgacggaacagaccaggacgacacacatcattggcacgttacataacgtgatgaaatgaagagcaaagcaaatgacgacgccgatcgaaacgcgcggctgcgttggatgagctcaatccagacgaacggagcacactacttaggcgtagtcctggtcggcgacctgctggtaggagccgccgatgaagacgtcgccgtagacgaggccagcgaggccgccgccgatgagcgggccgacccagtagacccagttgccggcgaagtcggccgcggcgacggcggggccgaaggagcgggcggggttcatggagccgccgctgaagggccccgcggcgaggatgttggcgccgacgatgaagccgatggcgatgggcgcgatggtgccgagggagcccttcttggggtcggcggcggtggcgtagacggtgtagacgagcgcgaaggtgatgacgatctcgaacaccacgccctccagctcggtggtgccgccggagacgccgtgcgtcgggatggccttgccgtgggtcacgaacctgaggagcaggcacgccacggacgcgcccagcagctgggccacccagtagaagaggccggtgaggacggtgatgtggccgcccacggccaggccgaacgtcacggcggggttcaggtggccgccggaggtgttcgcggccacggagacgcccacgaagagggccagcgcgtgcgccaccgcgatcgccaccagtcccgcagggtccagcgcgccgccattcgtcagttgcccgaaggcgatggcggaacccacgccggcgaagacgaagaggagggtggcgatgaactccgccacgtaggccttgatggaggtgacgctgaaggagtcgccgacgcttccgaatgcgagcttcaccatcttgttgcgttgctcttcgcgaccgcaagacttggctggcgctctgaggctctgagcttgcccacgcgtccgcccacgcgtccgcccacgcgtccgcccacgcgtccgcccacgcgtccgcccacgcgtccggcagcagccaattcgctcgagttcagatcgagcgcgcgccaagcaagtcttccggccggccgcgaagagcgcaatcaagcaagacaagatggtgaagctcgccttcggaagcgtcggcgactccttcagcgccacctccatcaaggcctacgtggccgagttcatcgccaccctcctcttcgtcttcgccggcgtcggttccgccatcgcctacgggcaactgacgaatggcggcgcgctggacccggcgggcctggtggcgatcgcgatcgcgcacgcgctggcgctgttcgtgggcgtgtccgtcgcggcgaacatctcgggcggccacctgaacccggccgtgacgttcgggctggccgtgggcggccacatcaccatcctgacgggcgtcttctactgggtggcccagctgctgggcgccaccgtggcgtgcctgctcctcgggttcgtcacccacggcaagcccatcccgacgcacgccgtcgccgcgggcatcagcgagctggaaggcgtcgtgttcgaggtcgtcatcaccttcgcgctcgtctacaccgtgtacgccaccgccgccgaccccaagaagggctcgctcggcaccatcgcgcccatcgccatcggcttcatcgtcggcgccaacatcctcgccgcggggcccttcagcggcggctccatgaaccccgcccgctccttcggccccgccgtcgccgcgggcaacttcgccggaaactgggtctactgggtcggcccgctcgtcggcggcggcctcgctggcctcgtctacggcgacgtcttcattggcggctcctaccagcaggtcgcggaccaggactacgcctaatttattcaccacaccatcgtctccgctctggatgaatggattcaaacccgtcgtcgtttgcttttgctcctcgcgccacgttcaattaatgcttgtgtatgcatgtatgtgccaatatgatgtgccgttgccctggtccattcatttccctttcttttttcggggtgaaatagatgtaaagatctcgtcttgcctgccgtactcgcgctgtgttgggaaaaattggttttcgttccaagtttgtttacgcaaagaaaaaaaaaaaaaaaaaaaaaaaaaactcgaggaagggcgccggtac

SEQ ID NO: 1290 - DNA, 414 bp, Zea mays
  Clone ID: PAT_MRT4577_154723C.1
cttcctccttcgaggagggaatttagggatatctatgtgatctttgagttgatggagtcggatctccatcaagtaataaaagcaaacgatgatctcacagcagagcatcaccagttcttcttgtaccagctgctccgtgggatgaagtacatccatgcagcaagcgtcttccatcgggatcttaagcccaagaatattctagccaatgctgactgcaagctgaagatttgtgattttggccttgcccgcgtttcattcaatgacactccatcagccatattctggacggattacgtggccactagatggtatcgagctccagaattatgtggctcctttttttcaaagggaagaatgttgtgcatcagttggatcttatgactgatctacttggtacaccttcagcagagtcta

SEQ ID NO: 1291 - DNA, 1047 bp, Zea mays
  Clone ID: PAT_MRT4577_154726C.1
cgaagagcgcaatcatgcaagacatgatggtgaagctcgccttcggaagcgtcggcgactccttcagcgccacctccatcaaggcctacgtggccgagttcatcgccaccctcctcttcgtcttcgccggcgtcggttccgccatcgcctacgggcaactgacgaatggcggcgcgctggacccggtgggcctggtggcgatcgcgatcgcgcacgcgctggcgctgttcgtgggcgtgtccgtcgcggcgaacatctcgggcggccacctgaacccggccgtgacgttcgggctggccgtgggcgggcacatcaccatcctgacgggcgtcttctactgggtggcccagctgctgggcgccaccgtggcgtgcctgctcctcgggtgtcggacccacggcaaggccatcccgacgcacgccgtcgcgggcatcaacgagctggaaggcgtcgtgatcgaggtcgtcatcaccttcgcgctcgtgtacaccgtgtacgccaccgccgccgaccccaagaagggctcgctcggcaccatcgcgcccagcgccatcggcttcatcgtcggcgccaacatcctcgccgcggggcccttcagcggcggctccatgaaccccgcccgctccttcggccccgccgtcgccgcgggcaacttcgccggaaactgggtctactgggtcggcccgctcgtcggcggcggcctcgctggcctcgtctacggcgacgtcttcatcggcggctcctaccagcaggtcgcggaccaggactacgcctaatttattcaccacaccatcgtctccgctttggatgaatggattcaaacccatcgtcgtttgcttttgctcctcgccacgttcaattaatgcttgtgtatgcatgtatgtgccaatatgatgtgccgttgccctggtccattcatttcccttttttttgggggtgaaatagatgtaaagatctcgtcttgcctgccgtactcgcgctgtgttgggaaaaatttggttttcgttccaagtttgttaagtttatgcatggatttcttggctcctt

SEQ ID NO: 1292 - DNA, 2332 bp, Zea mays
  Clone ID: PAT_MRT4577_154729C.1
ggccgctttttttttttttttttttggaacgaaaaccaatttttcccaacacagcgcgagtacggcaggcaagacgagatctttacatctatttcaccccgaaaaaagaaagggaaatgaatggaccagggcaaaggcacatcatattggcacatacatgcatacacaaccattaattgaacgtggcgaggagcaaaagcaaacgacgacggttttgaatccattcatccagagcggagatggagtggtgaataaattaggcgtagtcctggtccgcgacctgctggtaggagccgccaatgaagacgtcgccgtagatgaagccagcgaggccgccgccgacgagcgggccgacccagtagacccagtttccggcgaagttgcccgcggcgacggcggggccgaaggagcgggcggggttcatggagccgccgctgaagggccccgcggcgaggatgttggcgccgacgatgaagccgatggcgatgggcgcgatggtgccgagcgagcccttcttggggtcggcggcggtggcgtacacggtgtagacgagcgcgaaggtgatgacgacctcgaacacgacgccctccagctcgctgatgcccgcggcgacggcgtgcgtggggatggccttgccgtgggtgacgaacccgaggagcaggcacgccacggtggcgcccagcagctgggccacccagtagaagacgcccgtcaggatggtgatgtggccgcccacggccagcccgaacgtcacggccgggttcaggtggccgcccgagatgttcgccgcgacggacacgcccacgaacagcgccagcgcgtgcgcgatcgcgatcgccaccaggcccgccgggtccagcgcgccgccattcgtcagttgcccgtaggcgatggcggaaccgacgccggcgaagacgaagaggagggtggcgatgaactcggccacgtaggccttgatggaggtgacgctgaaggagtcgccgacgcttccgaaggcgagcttcaccatcttgtcttgcttgattgctctcttcgcggccggccggaagacttgcttggcgcgcgctcgatctgaactcgagcgaattggctgctgccggacgcgtgggcggacgcgtgggcggacgcgtgggcggacgcgtggggcagcagccaattcgctcgagttcagatcgagcgcgcgccaagcaagtcttccggccggccgcgaagagcgcaatcaagcaagacaagatggtgaagctcgccttcggaagcgtcggcgactccttcagcgccacctccatcaagggcctagcgctgttcgtgggcgtgtccgtacgtggccgagttcatcgccaccctcctcttcgtcttcgccggcgtcggttccgccatcgcctacgggcaactgacgaatggcggcgcgctggacccggcgggcctggtggcgatcgcgatcgcgcacgcgctggcgctgttcgtgggcgtgtccgtcgcggcgaacatctcgggcggccacctgaacccggccgtgacgttcgggctggccgtgggcggccacatcaccatcctgacgggcgtcttctactgggtggcccagctgctgggcgccaccgtggcgtgcctgctcctcgggttcgtcacccacggcaaggccatccccacgcacgccgtcgccgcgggcatcagcgagctggagggcgtcgtgttcgaggtcgtcatcaccttcgcgctcgtctacaccgtgtacgccaccgccgccgaccccaagaagggctcgctcggcaccatcgcgcccatcgccatcggcttcatcgtcggcgccaacatcctcgccgcggggcccttcagcggcggctccatgaaccccgcccgctccttcggccccgccgtcgccgcgggcaacttcgccggaaactgggtctactgggtcggcccgctcgtcggcggcggcctcgctggcctcgtctacggcgacgtcttcattggcggctcctaccagcaggtcgcggaccaggactacgcctaatttattcaccactccatctccgctctggatgaatggattcaaaaccgtcgtcgtttgcttttgctcctcgccacgttcaattaatggttgtgtatgcatgtatgtgccaatatgatgtgcctttgccctggtccattcatttccctttcttttttcggggtgaaatagatgtaaagatctcgtcttgcctgccgtactcgcgctgtgttgggaaaaattggttttcgttccaagtttgtttacgcatggatttcttggctcctttatggttttgattcacgtctgccccgtaagtctatttctcaacgggaatttcatgcc

SEQ ID NO: 1293 - DNA, 381 bp, Zea mays
  Clone ID: PAT_MRT4577_154853C.1
attcggctcgagctcgagtccattattttcctcgatcgggagacgcaaaggtcccgcggcttcggcttggtcaccttctccacggaggaggcgatgcggaacgccatccagggcatgaacggcaaggagctggacggccaaaacatcaccgttaacgaggcccaatcccgcggtggccgtcgaggcagcggcggcggctacagtggtggccgtggaggcagcggctacagccgtggcgggcgccatgatggctgcagcggctactgcggtggccgacgcagctacggtggctgcggttgctacggtggtggtggtggcggatacagctgtggcaaccggggcggatgctacggatactaccacgggaactggaggaactga

SEQ ID NO: 1294 - DNA, 132 bp, Zea mays
  Clone ID: PAT_MRT4577_154868C.1
gggggaaagcaagtttttcataaacgacaaataacttgggcaaatcgcttcaaatgataatcagatagtgaggcaacaagaaaaactgttttggaacgccattgcctaccccagccgactacaccatttttt

SEQ ID NO: 1295 - DNA, 307 bp, Zea mays
  Clone ID: PAT_MRT4577_154932C.1
ctaccaaagcaggaagaggcttgctgagcagcggcctcgggtccgtggacagtttgtgcgacaatctgggcaagaagatcaagcagcacaaggttcagaaagatgacacggaccttctaatacgtacaacatggcatcttcatcgacagatctgacaattaggtggttcttcccattgcgcatcttcattgacagatctgagaattaagtggttcttcccatcactgatagtaacccattgattcccaacgttggagtactcattaaataagactagttgtcaatttctgtggtcgactcctgatta

SEQ ID NO: 1296 - DNA, 306 bp, Zea mays
  Clone ID: PAT_MRT4577_155037C.1
accacgcgttcgttcacgcgtacgtccacgcgtacggtcgtcgggggctccttgcctgggttacgcgatgggcagctcggtgtcgtcctccgcggcgtgctacagctgtgtgcgctcgctcaacagccgcgcgtcttctactgcggaccgtcatgccacctgcaactgcctcaatagcatgactggccggctcggcggcagcgttagcatggccaactccgccaacatacccggcaagtgctgcgactccgtcggcgtgcccatcagccttaccgtcgactgcaccaagatcaactgatcgttgga

SEQ ID NO: 1297 - DNA, 689 bp, Zea mays
  Clone ID: PAT_MRT4577_155113C.1
ttgggtacctcgaggccggccgggaagctcggtggaggccctcaagtccgacgcgctacgttcccctttccctttccgaagcttctcgaccccccatcccctccctgacatggccgacaacgcgaaggccgcggcggcgcatgcgaggccggagtcgtcgcaggaggaggaggaggactggaaggaggccgagggggacgtcgccgaagtcgaccgcgccgccaccaatggcgccggcgaggggggcgtgcccacagacaggccgatccgggtctacgccgacggcatctacgacctcttccacttcggccatgccaagtcgctggagcaggccaagaagtcgtgagaacaccgcccccaccctcctcctccgcctattgggcctgccgtctccggccgaattgaactgccccacgatctgcccctcgcgctggcgtggggggccgggcgctgttgcgtgctagcgtgcaatggtcgctttagcagcgtttgcggtggcgtctggatcgcgctccatcagacggttcggtgcgagattggcgctgagttgtttctccccacgtcttccctttgtggcatttttgtgatgagttgtcccacgcgtctagcagttcgggaatgtttttctatgagtaaattaccccgtgtgatgatttttgtgcaaaaaaaaaaaaaaaaaatttgcggcc

SEQ ID NO: 1298 - DNA, 857 bp, Zea mays
  Clone ID: PAT_MRT4577_155451C.1
tgcttgcaaatatgaggaggtctcagttccagttgttgaggaccttgtgctcatttccgaccgtgcctacacaaaagggcaaattctagaaatggaaaagttgattctgaacacgctgcaattcaacatgtctgttccaacaccttatgtcttcgtgaagaggtttctgaaagcagcagatgcagataaacagcttgagctagtgtcatttttcatgctggagctctgcttggtagagtaccaaatgctgaattataggccttcacatctggctgccgctgcggtttatactgcacaatgtgctattaaccgttgccagcaatggacaaaggtttgcgagtcacacagcagatacactggcgaccaactcctggagtgctcgaggatgatggtagactttcaccagaaggctggaaccggcaagctcactggcgtgcacaggaagtacagtacctacaagttcgggtgcgcggccaagattttgcctgcgcagttcatgctggagtcaggagggacagcaccgcctccttcaggtgcaatctaattgaatcgccctgttttaacggggtgggttttttttaaaaggttttagcatactctccgtgaacaagatgcagaaaacatcgtgttgatgttgctcaaaagtgcatcgaattttcttggagaattatgattaactgttttttttttctatctgtgtcctgaatgacgagtgacggactgttttgttaaaaaaaaaaaaaaaaagcggcctccctgttcatgaatgttgttggccccttgtaaagaaaaacaagtccctgaatcaaatggtcaaatggcccctttgtccaaaaaaaaaaaaaaaaaaccccagc

SEQ ID NO: 1299 - DNA, 148 bp, Zea mays
  Clone ID: PAT_MRT4577_155761C.1
catcaacacgatgttatctgcatcaagtgcacggagaatccaaaaaacctgaaaaaagccacccagacgaataggacgatacaactagtttggaccggaaggaggcggagtccatcccgactccagcaggaactgagcaggcaaaaac

SEQ ID NO: 1300 - DNA, 237 bp, Zea mays
  Clone ID: PAT_MRT4577_15580C.1
cctatagtgagtcgtattaatggacactactggcgcctctcctatcgtcgatgctgctcgtcgggctcgccgcgggctctgacgacgatgaggacggcggtcgtataaggaagccccatttcaactatggtaagtttaatgcggatccgtggaccgaagggcaggctacttcacaatgcgggcgtcactcgttaacacaacctactgagcgaggctcatggtgtgatgccgaccatc

SEQ ID NO: 1301 - DNA, 949 bp, Zea mays
  Clone ID: PAT_MRT4577_155911C.1
aaaaaatccgggatcattttctttcccttgctgggaggccttagtctcccttctctttctctcccagccgccagccgccgccgcactctcccagccgccagccgccgccgcactctcccagacgccagccgccgccgcaaaaaaccctaacccccaatccactaatggcgtcgagcagccccgaccttgccgacgacggcttcgcggcgccgcgcctcttctcgcagggtgtctcctacacatatgacgacgtcatctttctcccgggctacatcggcttccccgccgacgccgtcgacctctccacccgcctctcccgccgcgtcccgctatccatcccctgcgtcgcgtccccgatggacactgtctccgaggccgctatggccgcggccatggcatcactcggcgccgccgccgtcgtgcactgcaacaccgagccccactcccaggccgccatcgtacgcgctgccaagtcccgccgcctccccttcgtttcctccgtgcccttcttctccccgtcctcctccccgacgctcaacgatttcgctggcagcgagtacgccctcgtcaccgagcgcggagattcgctctccaggctcgtcggcatcgctgtcgcggccgatgctgcctcccgtgaggttcccatctctgtctcggagtacatgcgaccgacgccgcgctcagcctcctctgccttcgacttcgaggaagcagcaaccttccttgccgatgagggtctggattacgctcctctcgtatccgatgatggtgaggttgtcgatctcatcaccgccaaggacgtggagcgcatccggagttatcccaagctgggcaagccgtctctcggagccacgggaagtttgtagttgcggcttccattgggactcgtgagggatgacagggaagactggagcaactagttaaggcgggggcaatgctatcgtgattg

SEQ ID NO: 1302 - DNA, 2156 bp, Zea mays
  Clone ID: PAT_MRT4577_155915C.1
gctggccggggtaacagaccgagagaacccggggctggcgcgattgattctgggagctggccgtgaatctcggaaatccggtcaaaatccatcgctatccgcccacagaactacctccgatgtgcgcgcggatgaatctctagcgcgcgacctgctcctccgtctcccccgcgccgcgtgccctagagccgccgccgcagccaaaaaaaaaacccctaaacccccaatccatggcgtcgagcagcactgaccttgccgacgacggcttcgcggcgccgcgacttttctcgcagggtgtatcctacacatacgacgacgttatcttcctcccgggctacatcggcttccccgccgacgccgtcgacctctccacccgcctctcccgccgcataccgctatccatcccctgcgtcgcgtctccgatggacactgtctccgaggccgctatggccgcggccatggcatcactcggcgccgccgccgtcgtgcactgcaacaccgatccccacgcccaggccgccatcgtccgcgctgccaagtcccgccgccttcccttcgtttcctccgtgccctttttctccccgtcctccgccccgacgctcaacgatttcgctggcagcgagtacgccctcgtcaccgagcgcggagattcgctctccaggctcgtcggggtcgctgtcgcggccgatgctgcctcccgcgaggttcccgtctctgtctcggagtacatgcgaccgacgccgcgctcagcctccgccgcctttcgactttgaggaagcagcaaccttccttggccgatgaagggtctggattacgcccctctcgtatcagatgatggtgaggttgttgatctaatcaccgccaaggacgtggagcgcatccggagctatcccaagctgggcaagccgtctcttggagccaacgggaagtttgtagttgcggcttccattgggactcgtgaagatgacaagggaagactggagcaactagttaaggcgggggcaaatgctatcgtgattgatagttcacaggggaactccatataccagctcgatatgataaagtttgcgaagaagatgtatccggaggtggatttgatcggtggtaatgtggtgacaattgcacaggcccagaatttgattcaagctggtgtggatggattgcgtgttggaatgggatcgggctcaatttgtaccacccaagaggtttgtgctgttggaagaggacaggcaacagcagtgtataaggtttcatcttatgccaaggatcacaatgtaccggttattgctgatggtggaatttcaaactctgggcatattgtgaaagctctgtcgctgggggcatccactgttatgatgggcagctttttagctggtagtcatgaagctcctggtacttatgagtataaggacggccgccgagtcaaaaaatacagaggcatgggctctcttgaagccatgacaaaagggagtgatgcaaggtaccttggtgatacactcaagctcaaagtcgcgcagggcgttgttggagcagtagctgacaaaggttctgtactgaggtttattccttacacaatgcaagcagttaagcaaggattacaagatcttggtgcagattctctccagtcagctcatgatcttttgcggtcagagacactcagattagaggtgagaaccggtgctgcccaggctgaaggaggtatccatggactggtttcatacgagaagaaggcattctaggtccataactaaacaaagaagtattggaacgatagtggttagctgcatgatatggaagggggcgatgctcatttatcctacctggcaaaagctcagcagcttgtcagcaaagcttgtcgagttgggcagcaagtgtaccatctgcttggcgtcatataataataaacctctggcatcggaactgttgtataagctcacagcttgtcatctaaacatttttcccaattttgttaaaagagtaaaacatcaatggttgattgatctaaaaaaaaaaaaaaactttgccccgccatgttttaacctaccccaatgccgtaccttgtattattatgtgttcgaagaatggttgatgatagtggtttgtctctaaagttgacatcctggatagtgcgttactcccaattgaaaggctttcgt

SEQ ID NO: 1303 - DNA, 313 bp, Zea mays
  Clone ID: PAT_MRT4577_155953C.1
aaaaataaaacgacatttattcggggggcatcatatcacagggcattgcccggcaggaacacacagttacagtattattccaagcacactggacaaaaacccaaacagagaccacgggccggggtatcagttggccatggcaaccccaggcagctggaaagggcccccgccccggaagagccgctgctagaacatccacttcttgaagggggggaaaaggacccccctggagcaggggaacgggtgcggcccggggcaaccgaagaacgggccctcccccgccgggcagaagtaaaactggaacatcatgtac

SEQ ID NO: 1304 - DNA, 1784 bp, Zea mays
  Clone ID: PAT_MRT4577_155978C.1
cgtccgcccgacgtccgcgtctctctcctccgctcctcctccatcatagctcctggctcgcggctcagcttgccactaccagcaagcgctcgtcacccgtcggttctccccgagtagctcgtcgcgtcggcaatggagaatctgagatctcaaaactgccaccaaggtgttgccatggagggagtcaagtttgcgccggagaaggccaacaccaaccggagagccctcagcgacatcaagaacataataggaggcccacaccagcacttggcggtcagcaagagggctctgtcagaaaaaccagctgctgctgctgctgcaaatgctaaagatcaagctggctttgttggacaccgtccagtcaccaggaaattcgctgcaacattggcaacccaacctacagttgcccttctggacccaattggaagtgaaagactgaaaagaaacgctgatacggcatttcacacacctgcagatatggaaagcacaaaaatgacagatgacagtcccttgcctatggtgtcggagatggatgaaatgatgagtcctgaactgaaagagatcgagatggaagatattgaggaggcagcacctgatattgacagtggtgatgcaggaaattctctggctgtggctgactatgtagatgaaatttacagattttacaggaaaactgagggtgcaagctgcgtccctacaaattatatgtcaagccaaactgatataaatgagaagatgcgtggcattctaattgactggctcatagaggtacactacaaactagagctgttggaggagacccttttcctaaccgtgaacatcatagacagattcttggcacgtgaaaatgtggtgcggaagaagcttcagttagctggtgtaactgctatgttgctcgcgtgcaagtatgaagaagtgagcgtacctgtggtcgaggatctgatcttgatctgtgatcgtgcatacacaagggctgacattcttgagatggagaggaggatagtgaacacacttaatttcaatatgtcggtgccgactccatactgtttcatgagaaggtttctaaaggcagcacaatcagagaagaagctcgaactcctgtctttcttcatgatcgagttgagtcttgtcgaatatgagatgctccagttctgcccgtctatgctagcagccgctgccatctacaccgctcaatgcaccataaatgggttcaagtcctggaacaaatgctgtgaactgcacacaagatattcagaagaacatctaatggtttgctctaggatgatggttgaactgcaccaaagagcagctcatgggaaacttacaggggtccatagaaagtacaacacttctagatatagctatgctgcgaaatcggaacccgcaactttcttgctggatgcctgaacctaagcttgaactatacacactcttaactacttccatggaaagagtggaagggaggctgcttcgactaaactacagaagtgggatctatctgaatatatgcaacggctgttgcagcaaatatttggtggggctgggttggtgtgttgtttgttagttcaataacttaacattaatgaaacagtgtttgtgttgtttaggttttttttccaattatatcgattggaatttcatttgttgtatcctggccatcattctttactcatgtcatgtgacacctctgcgttttgaaaaataaacattgattatgtggatctgctgaaaaaaaaaaaaaaaaaaaaaaaaaaaaaaaaaaaaaaaaaaactcgaaagagggg

SEQ ID NO: 1305 - DNA, 857 bp, Zea mays
  Clone ID: PAT_MRT4577_156281C.1
ggttgacccacccgtccgcggacgcgtgggcgcgacgactcgtaccagaagtggcggtggcagccggcgggctgcgacctgccgcggttcgacgcgcggctgctgctggagcggctgcggaacaagcggctgatgttcgtgggggactcgctgaaccggaaccagtgggagtcgatggtgtgcctggtgcagtcggtgatccccgacagggggcagaagacgctgaccaagttcgtcaacggcgggtccagcaacgtgttctacgcgcacgagtacaacgcgacggtggagttctactgggcgcccttcctggtggagtccaactccgacaaccccaaggtgcacagcgtccccgaccgggtcatccagtggcacgccatcgccaagcacgcgcgcaactggatcggcgtcgactacctcgtcttcaacacgtacatctggtggctcaacacgctcgacatgaaagtcctgaagcaggggtcgtccttcgacgaccagggcggctccaccgagtacgtggaggtggaccggcccgtggcgtacaaggaggtgctcacgacgtgggcgaaatgggtggaccgcaacatcgaccccaacaggacgaccgtcttcttcatgggcatgtctcccaaccacatcacgcctgaggcttggggcaacaagggcgggatcaagtgcgccatggagacgctgccgatcgcgagcaaccgcagcgcggcgctggacgtgggcacggactggcgcctctacgcgggggcgcgggaggtgctgcccacgctgcgccgggtgcccgtccacttcgtcgacatcaccgcgctgtcggagctgcgcaaggacgcgcacaccctcgtgcacac

SEQ ID NO: 1306 - DNA, 2375 bp, Zea mays
  unsure (1)..(2375): unsure at all n locations
  Clone ID: PAT_MRT4577_156283C.1
atgcagcagcggcgcaagtcggtgttcgcgtccgcgccgttcgcgatgaagcaggcggcgctgggagccggcgtggcggcgcgcaagaacggcgcgccgctgtcgctggccgcggtggtgttcgcgctcttcgtcttcgcgacgttcctctacaacgaggacatcaagtccatcaccgacttccagttcagctccggcgccatccgcgccaagtcccccgacctgcacctcctgcaggaggccgaggccgcggcgcacgccgccgtgaacaccctggccaagcgcggggaggaggtgatcgtgcgcgtcctcgaggtcgaggcgccgcccgtcgtcaacgctagcagcgtgttggcggccgccgcgaaggccaacgccaaggccaaggccaacgcggtggacgtggggcaggagaaggagcgggacgtgacgctcccgacggtgacggggggccgaggcggggccgacgaggcccggcggcgcgctgacgaggaggtcgctgagaaggccgcgtcggcgaaggcggcggcggccaccgccgctctgcgcggcgtggtgagcgtgccgcagacgtgcgacctgtaccggggcagctgggtgtacgacgaggtgagcgcgcctgtgtacaaggagggcgagtgcgagttcctgacggagcaggtgacctgcatgcgcaacgggcggcgcgacgactcgtaccagaagtggcggtggcagccggcgggctgcgacctgccgcggttcgacgcgcggctgctgctggagcggctgcggaacaagcggctgatgttcgtgggggactcgctgaaccggaaccagtgggagtcgatggtgtgcctggtgcagtcggtgatccccgacagggggcagaagacgctgacaaagttcgtcaacggcgggtccagcaacgtgttctacgcgcacgagtacaacgcgacggtggagttctactgggcgcccttcctggtggagtccaactccgacaaccccaaggtgcacagcgtccccgaccggatcatccagtggcacgccatcgccaagcacgcgcgcaactggatcggcgtcgactacctcgtcttcaacacgtacatctggtggctcaacacgctcgacatcaaagtcctgaagcaggggtcgtccttcgacgaccagggaggctccaccgagtacgtggaggtggaccggcccgtggcgtacaaggaggtgctcacgacgtgggcgaaatgggtggaccgcaacatcgaccccaacaggacgaccgtcttcttcatgggcatgtctcccaaccacatcaccagcatggcatctgcgaaaaagactgctgggcgtagggggaaaaagaaaaaacgggtacccgaattccgggtacccgtatccgacccgggattttcgggtactgaccgggtattagtgattccgtatcctacccgtatccgaggttcaatatccgggcctgaggcttggggcaacaagggcgggatcaagtgcgccatggagacgctgccgatcgcgagcaaccgcagcgcggcgctggacgtgggcacggactggcgcctctacgcgggggcgcgggaggtgctgcccacgctgcgccgggtgcccgtccacttcgtcgacatcaccgcgctgtcggagctgcgcaaggacgcgcacacctcggtgcacacgctgcgccaggggaagctgctcaccccggagcagcaggccgaccccaagacctacgccgactgcatccactggtgcctcccgggcctgcccgacacctggaaccagttcctctacgcccgcatcgcatccagcccatggcccaacgacgcccaggcccagcagtagggaccctgcacctgctcctccttctatcttcctcattcgccgcgggccggcgcctcacgacacaaaagggaggcctgggctgcaacggcccgcccatcgacgagagctctggcgtttctgcttcaagctagctgatcagccaaaagggggcgaaagacggcgtttctgctcgccgtctttgttttctttccttttttttaaacgatttttctttctcttttcgttgcataaaaggaaactggtccgtgttgttaaccttcgattctttggtccaaacaaaaatggatggtctggggtaaatgagggtgtgacgagcttagttgctcgctcatttggtttcttctcctaccaacgatgcctagggggaaagcaagagttgagcatgaagatgtgatgggggagaagcaaagctggggggagtacatgtaaagaagaatttttgcgttgtatttttatatgctgctgcagtgcacccaaggttaagagaggtataaagagcatttgttcttcaatcaaaaaaanaaaaaaaaccccnnnnnaaa

SEQ ID NO: 1307 - DNA, 1102 bp, Zea mays
  Clone ID: PAT_MRT4577_156356C.1
gggggaacacccgtccgataggataaagcttccaggaaatgcaatgctaggtgaaggaaaaccagagaaccagaaccatgccataattttcacacgaggaacattatatggaggagactttgaaaatgaggaatttgttgcaagagtttctgaagaaacatgatggtgtgagatatccatcaatacttggtgtaagagaacacatcttcaccggaagcgtgtcttctcttgcatggttcatgtcaaaccaagaaacaagttttgtgaccattggacaacgtgtacttgccaatcctttgagagttcgatttcattatgggcatcctgatatctttgatcgacttttccacctcacacgtggaggtgtaagcaaagcttctaagattatcaatcttagtgaagacatatttgctggatttaattcaacactgcgtgaaggaaatgttacacatcatgaatacatgcaagttggcaagggcagagatgttggtctcaaccagatctcactatttgaagcaaaaatagcaaatggtaatggtgaacagacgctgagccgtgacgtgtaccgtcttggacatcgttttgactttttcagaatgttgtcctgctactatactactattggtttttacttcagcacaatgataacagtttggaccgtttatgtattcctctacgggcgcctgtatcttgtcctaagtggccttgatgaagcattagccactggaaagaggtttatacacaacgagcctctccaggttgctctagcttcacagtcttttgtgcagcttgggttcttgatggcgctgcctatgatgatggaaattggtctagagagaggattcagaactgcattgagtgactttgtacttatgcagctccagttagcatctgtgttcttcacattctctcttgggaccaaaactcactactacggaaccacactgctacatggaggagctgaatatagagctacagggcgtggatttgtggtgttccatgccaagtttgctgagaattatcgattgtattcgcgaagccattttgtgaagggcattgaactgatgattttgcttattgtgtatgaaatatttgggcagtc

SEQ ID NO: 1308 - DNA, 2424 bp, Zea mays
  Clone ID: PAT_MRT4577_156358C.1
cattggtacctcgagccggccgggaaagcttcctggtgatccacatccagaggatattcagccacggatccccacttatccttcacttagggttgcgtacatcgatgaagtcgaagagcctagcaaagacaaaaataagaaaatagagaaggtttactactccgcattggtgaaggcagcagtaacgaagcctgatgatcctggtccagaaacttgatcagggatatatataggataaagcttccaggaaatgcaatgctaggtgaaggaaaaccagagaaccagaaccatgccataattttcacacgaggtgaaggtctccaaaccatcgacatgaatcaggaacattatatggaggagactttgaaaatgaggaatttgttgcaagagtttctgaagaaacatgatggtgtgagatatccatcaatacttggtgtaagagaacacatcttcaccggaagcgtgtcttctcttgcatggttcatgtcaaaccaagaaacaagttttgtgaccattggacaacgtgtacttgccaatcctttgagagttcgatttcattatgggcatcctgatatctttgatcgacttttccacctcacacgtggaggtgtaagcaaagcttctaagattatcaatcttagtgaagacatatttgctggatttaattcaacactgcgtgaaggaaatgttacacatcatgaatacatgcaagttggcaagggcagagatgttggtctcaaccagatctcactatttgaagcaaaaatagcaaatggtaatggtgaacagacgctgagccgtgacgtgtaccgtcttggacatcgttttgactttttcagaatgttgtcctgctactatactactattggtttttacttcagcacaatgataacagtttggaccgtttatgtattcctctacgggcgcctgtatcttgtcctaagtggccttgatgaagcattagccactggaaagaggtttatacacaacgagcctctccaggttgctctagcttcacagtcttttgtgcagcttgggttcttgatggcgctgcctatgatgatggaaattggtctagagagaggattcagaactgcattgagtgactttgtacttatgcagctccagttagcatctgtgttcttcacattctctcttgggaccaaaactcactactacggaaccacactgctacatggaggagctgaatatagagctacagggcgtggatttgtggtgttccatgccaagtttgctgagaattatcgattgtattcgcgaagccattttgtgaagggcattgaactgatgattttgcttattgtgtatgaaatatttgggcagtcataccgaggagctattgcgtacattttcatcacattttccatgtggtttatggttgtcacctggctctttgccccattcctgtttaatccttctgggttcgagtggcagaaaattgtggatgactggactgactggaataagtggatcagtaaccgtggaggtattggggtgccgccagagaaaagttgggagtcatggtgggaaaaagagcaggagcctcttaggcattctggaaagcgtggcactgttcttgaaatagtgctttcgttgcgcttctttatttaccagtatggtcttgtttatcatttgaacatcaccactcacacgaagagcgttctggtttattgcatctcgtgggtcataatctttgtcattttgctcgtgatgaagactgtatcagttggcaggaggaaattcagtgcagagttccagcttgtgttccggctgatcaaggggctgatattcataacgtttatctctattatcataatcttgatagcaatcccacacatgacagttcaggacatctttgtttgcatccttgcgttcatgccaactggatggggtttgcttctgatagcacaaactatgaggtcagctatttcacatatggggctatggggatcggtcaaggcgcttgcccgaggctatgagatcatcatgggcttgctgttgttcaccccgatcgcattcctcgcttggttcccgtttgtttcggagttccagacaaggatgctgttcaaccaggccttcagtagaggtctgcagatttctcgtatcctaggcggacacaagaaagaccgggctgcacggaacaaggagtgagtagccgagcagcgtgagcctggtagtgctgacctacatacaattcaaccatgccccacgtggcattatactttgtactggctattatgccaggttgtatattgcaaggaaaggaattcatctctgctaacgtgccagattgtatgtgtggcagcaggtactcgatcggtgagcactcctataccttttttattattatttatgggtaaagtcaaagaaactaaaaaaaaaaaaaaaaaagcccctagggcc

SEQ ID NO: 1309 - DNA, 2481 bp, Zea mays
  Clone ID: PAT_MRT4577_15635C.1
cattggtcacctcgaggccggcggggctgcttgccgggcgcctgaccttatctcctcctccaccccgagatatttccacgtctcctccgccaccatggagtccggcctcgttgcaagccaccgcctccgcgtcccgcccccctccgcctccgccgggcaccaccacctcatccgccaccgccacgcccacgccccggtggccgctgcgcccctccgcctcagtctcccgcgccacctcccccggtccaccccgctccgcctgcccgccgcgctcccgctccgccactgcctcccgcccctccgcgccgcctccgccgccgccgccgcagtcccagcgcccggggacgacgcgtcgcccaagttcctgggcgtggagacgaagacaatcaagaagatcgtgcccctggggctcatgttcttctgcatcctcttcaactacaccatcctgcgggataccaaggacgtgctcgtcgtcaccgccaagggcagcagcgccgagatcatcccgttcctcaagacctgggtcaacctgcccatggcagtcggcttcatgctcctctacaccaagctcgccgatgtcctctccaaggaggcgctcttctacgccgtcatcttcccgttcatcgccttcttcggcgccttcgcctacgtgctctaccccatgcgcgacgccatccaccccactgcgctcgctgatcgcctcctcgcctcgctcgggcccagcttcctcggacccgttgccatcctccgcgtctggagcttctgcctcttctacgtcatggccgagctctggggcagtgtcgtcatatccgtccttttctgggggtttgcaaatcagattactacagttgaagaggccaaagagttctacccgctgtttggccttggtgccaatgtggccctcatcttctctgggcgcacggtgaaatatttctcaaacatgaggaagaatttgggtcctggagtggatggttgggcaatttcgttgaaggccatgatgagcatagtggttgtactgggtcttgtcatcaccggtatctattggggagtgaacaagtttgttattgataactcatctgtgcccgtggttgagcggaaaaagaaggacaagccaaagctcagcatgggtgagagcatgaaggttctgttgtcatctcggtatgtgagggatcttgctacattggttgttgcttatggaataagcattaaccttgtcgaggtgacatggaaatcaaaactgaaagcacagttcccaagcccgaatgaatattcttcattcatgggcgatttctcaactgccaccggcatagctacatttacaatgatgttgttaggaagagtgatcctcagaaagtttgggtggggagttgcagctacgatcacgcctgcagtgttactcctcacaggagttgggttcttctcactgattttgtttggtgagccattgactcctcttatgaccaagtttgggatgacacctttgcttgcggcagtctatgttggagcaatgcagaacattttcagtaagagtgcaaaatacagtctgtttgatccttgcaaagagatggcatacattcctttggatgaggatatgaaggtgaaaggtaaagcggctattgatgttgtgtgcaaccccttggggaaatctggaggtgctctgatccagcagttcatgatcctgtcattcggttctctcgcgaactcgacaccctaccttggcggaatactcctggtgattgtccttgcatggctgggtgctgtaaggtccctcgacctgcagttctcttccctggcgaagcaagagctcggcagagagaagctgctgaaaacgcaggccgtcgaaacggtcgccgaagtagtcggcactggaaacggttctctccaagaaactctagctagtgagccgtctgcaaatggcgcggccaccaaacagtcgcaagaacctgagagcacagcccctgagaaatcaggccagcagtctcaataagttctccccccaagaaatttagctagcacgagcctttggaggaaccggaagtttcttatctggagctactgaagaaggcaggaatcatgccagaaataagaaggcctgttcttcttctgttgttgtagtgtttttgtttttaaacttcgccgtatctgtagctgtttgtttcattccataggtatgaactgtttatgttcgttattaaaattttgggaggtctgcttcatcgtaatcttcattagcagctggtccttgttgtgaaaaaaaaatattttgcatggttttgatagtcatgggtaccatatatccaatttattcatattcctactaaaaaaaaaaaaaaaaaaacccgccccccccccctttttgttttttaattttgcagaaaaagaaactgtttgttttattccataggtatgaactgtttatgttcgttattaaaattttgggagtcccgcctcaaaaaaaaaaaaaaaaaaaaaaattttttt

SEQ ID NO: 1310 - DNA, 830 bp, Zea mays
  Clone ID: PAT_MRT4577_156363C.1
ggtccaaccctttgttaccaaccgcactgccgccgtccccgtctgcctccggccagcagccatggcgaggggttccatggccgcggtgctcgccgtcctggccgtggcggcgctccggtgcgcgccggccgccgcggagctcccgctggtggagcacccggccaagaacgacgggtcgctcagcctgctcgtcgtcggggactggggccgcaacggcacctacaaccaatccagggtcgcggagcagatggggaaggtcggggagaggctggacatcgacttcgtggtctccaccggcgacaacttttacgagaatggcctcaccggcgtccatgaccagcagtttgaagaatccttcaccaatatctacaccgcccagagcttgcagaagccgtggtacctcgttctcggaaaccatgactaccggggcgatgcgctcgcacagcttgacccggtcatgcgcaagctcgatgagcgattcgtttgcatgagatcatttgttgtcaatgcagagatggtggagttcttcttcatcgacaccactccattccaactcaagtactggactcaccctaaagacagtcactacgactggagaggagtggcgcctcgagaaaactacatagctaatctgctgaaggatttggacgaggcaatgaagaaatcaactgcaaagtggaagattgctgttgggcatcataccatgaggagtgtcagtgaccatggggacaccgaggagctcctgcaattgcttcttccagtcctcgaggttaatggcatcgacttctacatcaatgggcatgaccactgcttcgaacacattaccagca

SEQ ID NO: 1311 - DNA, 1271 bp, Zea mays
  Clone ID: PAT_MRT4577_15637C.1
caccggtatctattggggagtgaacaagtttgttattgataactcatctgtgcccgtggttgagcggaaaaagaaggttggacctggcagattttctattgttcttcttcttgtgtttatggatctctccttaacggttctgcgaacataacctttcaggacaagccaaagctcagcatgggtgagagcatgaaggttctgttgtcatctcggtatgtgagggatcttgctacattggttgttgcttatggaataagcattaaccttgtcgaggtgacatggaaatcaaaactgaaagcacagttcccaagcccgaatgaatattcttcattcatgggcgatttctcaactgccaccggcatagctacatttacaatgatgttgttaggaagagtgatcctcagaaagtttgggtggggagttgcagctacaatcacgcctgcagtgttactcctcacaggagttgggttcttctcactgattttgtttggtgagccattgactcctcttatgaccaagtttgggatgacacctttgcttgcggcagtctatgttggagcaatgcagaacattttcagtaagagtgcaaaatacagtctgtttgatccttgcaaagagatggcatacattcctttggatgaggatatgaaggtgaaaggtaaagcggctattgatgttgtgtgcaaccccttggggaaatctggaggtgctctgatccagcagttcatgatcctgtcattcggatctctcgcgaactcgacaccctaccttggcggaatactcctggtgatcgtccttgcatggctgggtgctgtaaggtccctcgacctgcagttctcttccctggcgaagcaagagctcggcagagagaagctgctgaaaacgcaggccgtcgaaacggtcgccgaagtagtcggcactggaaacggttctctccaagaaactctagctagtgagccgtctgcaaatggcgcggccaccaaacagtcgcaagaacctgagagcacagcccctgagaaatcaggccagcagtctcaataagttctccccccaagaaatttagctagcacgagccttttggaggaaccggaagtttcttatctggagctactgaagaaggcaggaatcatgccagaaataagaagggcctgttcttcttgtgttgttgtagcgtttttgtttttaaacttcgccgtatctgtagctgtttgtttcattccataggtatgaactgtttatgttcgttattaaaattttgggaggtctgcttc

SEQ ID NO: 1312 - DNA, 799 bp, Zea mays
  Clone ID: PAT_MRT4577_156652C.1
aatctcccttctcactctctccctctccatctccctccagatctcgctcgccatggacctcctcgacgcgggccaccgccactcgtcggaacttcccgccgccggcgccgacatggaaggcgcttcagtgcttccgctctccggagctgcctaccagccctacgtctccgagctcctttccttctccatcgagcgcctccacaaggagccggagctgctgcgggtggacggagagcgggtgcggcggcagatgcaggaagtggcggtggagaactacgccgcctttatagccgcctccgaggcgctctccttcgtgcgggcacagctcgaggggttcgacaagcacctcgaggcactggtagaggagatacccaatttaacatctggttgcaccgagtttgttgagtcagcacatcaaattttggaagagaggaagctcaatcagacattactagccaaccacagtaccttgcttgacctgcttgaaatcccgcaacttatggacacatgcatacggaatgggaactatgatgaggcactcgatctagaagcttttgtgagtaaaatttcgaagttgcaccctgatttacctgtcatccaaggattagctgctgaagtcaagaagacgatacaatcactaatttctcagcttctccaaaagcttcgatcaaatattcagttacccgaatgcctccgtattgtcgcacatttgcgccggattggagtgttcagtgaatcagaattatgcctacagttcctgcagggaagcttggctttctgggattcttgatgatctgga

SEQ ID NO: 1313 - DNA, 562 bp, Zea mays
  Clone ID: PAT_MRT4577_15666C.1
tctcggagcatctcaagccaccatcgaccttcaagtctcgctacataacagtgtaataaaaaaaacatgcgcaatggcgagcagcaccatgtgccctgctcctccacggctcttcgccggctaggccgtgaacgtgccgtgcgtcgtccgccttccgctaggcccgcgtgacgatgcgcaagacggcttcgaatgccaaaccagcggaggctttcggtagaccgtggtacggcccctaccgcgtgctgtacctgggcccactgtccggcgagccacctagttacctgactggcgagttcccgggcgactactgatgacacaccgcgcggctgtctgtggacccggagacgttcgccaagaatctggagctggaggtgatccactcccgctgtgacatgctgggcgcgctcggctgcatcttccccgatctgctcgcccgcaacggcgtcaagtttcgcgaggccgtgtgtcctcatgacggctcccagatcttcagcgagggcggactggactacctcgagaacccgagtctcatccacgcgcagagcatccttgctatctg

SEQ ID NO: 1314 - DNA, 193 bp, Zea mays
  Clone ID: PAT_MRT4577_156727C.1
aacacaaatgcttatatctagaaagcagcaccagcggagggcttttaaaaaagacatgggccagatcgccacggctgtggggcatgaacatgaaaggttatagatgttgatgtataaagcgcgagatggaatcagtgtaacattgtggcactgtcataatgttaaggcattaacattgacgacaccatgctcg

SEQ ID NO: 1315 - DNA, 2219 bp, Zea mays
  Clone ID: PAT_MRT4577_156728C.1
ggggattccacatcgtaaccactgaagacgaggcggcggacgagacggagagcagaaccgcgcagcgaagcagcagcggcgacaagccctcgcgtcggtagaggcgccgtccgccgtccgccccctcaactccggtagccgctggccgctgcaggtcgagtcccgtcgagccgactcgcgcttcccgatctgggtggccgcggcgccggcatggcgcggttcgaggtgaacggcaagtcggtgcaaggcgtggacttgctgcggcggcgccactggccgtcgcgcctcgacttctggcccttccttgcactctatgcgctctggctgctgcttgctgtcccggcgctcgacttcactgacgctctcatcatccttgccgcgctctccgctgctcacattctcaccttcctcttcaccgcctggttcgtcgatttccgtgccttcgtcgggtactctaaggtcaaggatatccatgccgctaacacgtgtaaggtgactcctgctaagttctcggggtcaaaggagattgtacctctgcacaaacagaaaaatgtggcctcaacttcagctgcaggtgagacagaggagatttactttgattttcggaagcagaggttcatctactcggctgagaaagataactttttaaaactccggtacccaacgaaggaattgatcggtcattatggcaagggcactggttatggaactgaggccaagattagcaccgcagtggacaagtggggcagaaatgtattcgaatatccacagcccacatttcagaaattaatgaaggagcaaatcatggaaccattttttgttttccaggttttttgtgttgttctttggtgcctggatgcgtattggtactacagtttgtttacacttttcatgcttttcctgtttgagtctactatggcaaagaataggctgaagacattgactgagctaagacgtgtgaaagttgatagccagattgtgttgacctatagatgtggaaaatgggttaaaattcctgggactgaactactaccaggagatattgtgtcaataggccgctcaactagtggtgaagatagatctgtaccagcagatatgctattgttagctgggtctgcaatagtaaatgaagctattcttacaggagaatctactccacagtggaaggtctcaattgctggacgtagtcctgatgatatgctatctataaagcgggataagaaccatatcctttttggtggcactaaagtattgcaacacactgcagataagtctgtaaatcttcgagcacctgatggtggctgtctagcttttgtattgaggactggatttgagactagccaagggaaattgatgaggactatcttattttcaactgagagggttactgcaaataacaaggaaagtggcctgtttatactctttttgctcttctttgcaattattgcgtctggttatgtgcttgtgaagggactagaggacccaacaaggagtagatataaacttttattgagttgttcattgattattacttctgtgatacccccggaattgccaatggaactttccatagcagtcaacacatctttaattgcattggctcggcgtggtattttctgcacagagccattcagaataccgttcgctgggaaggttgacatatgctgctttgataagacagggactctgacatcagatgatatggaattccaaggtattgttacattggaaggtgacactgacttaatatctgatgcaaataagctgcccctccgaactcaagaagtgctttccagttgtcatgcactggtatttgttgacaacaagctggttggcgatcccctagaaaaggctgctataaagggcatagactggatctacacatctgatgagaaggccatgtccaaaaagcctggtggtcaacctgttcaaattgtgcacagataccattttgcttctcacttgaagagaatgtctgttatcgtccgtattcagcagaaattttacgctttcattaagggtgcaccagagaccatccaagagaaattagttgatttacctgctgcatatgtggagacatataagaaatacacacggcaaggttctcgggtcttggctcttgcatataaattgcttcctgagatgcctgtaagtttctgttgatattaatcatgtttgcctatagcctttcttatctagtattctgttattcttttgtc

SEQ ID NO: 1316 - DNA, 327 bp, Zea mays
  Clone ID: PAT_MRT4577_156763C.1
ctggcttctcctccccctcttaccaagtcctcttcgggttagggttacttagggctttgtggaggggcgattgcagccgctgatgtggagtaccgttgcttcgtcggcggacttgcctgggacaccatcaacaagtcgctggagaatgccttcgcctgctaccgcgagatcctcgactccaaggtcatcaccgaccgggatgacggtgaggtctcgcggattcggcttcgctaccttctgctacgagaactccatgctcgactctatcaagaacatgaacggcaaagagctcgacggtcgtaacatcaccgttaaccatgcccagtc

SEQ ID NO: 1317 - DNA, 514 bp, Zea mays
  Clone ID: PAT_MRT4577_156772C.1
gggggggggggggggggtttttttttttttttttgttttttttttttttttgcgaacaaaaaccctgctcattcttctctcggctcgtttcatagcgggggccaacaaaggggaacaacaggggttcccacccccaatccaaaggttgaacgggcactaacacggggaccgaagcgaacgggaaccccatactttagatagataagataacccggccgaagccaggatgggcccacacattagtccctccagccgccgccgccgccgccgtagccgccaccaccaccctcgggccgaccggcgtagccgccaccgcctccgtagccggcgccaccacccttgggccgaccggcgtagccgccaccgccgccataaccgccgtcacggggcccgccaccatagccgccgccgccgggaccgccgccgtagccaccggcggcaccggcaccggcacgggactgggcctggttaacggggatgttacggccgtcgagctccttgccggtcatgttct

SEQ ID NO: 1318 - DNA, 830 bp, Zea mays
  Clone ID: PAT_MRT4577_156775C.1
cagaggtgggctggcttctcctccccctcttatcaagtcctcctcgggttagggttccttagggttttgtggaggggcgatggcggcggctgatgtggagtaccgttgcttcgtcggcggacttgcctgggccaccagcaacgagtcgctggagaatgccttcgcctcctacggcgagatcctcgactccaaggtcatcaccgaccgggagacggggaggtcccgcggcttcggcttcgttaccttctcctccgagaactccatgctcgacgctatcgagaacatgaacggcaaggagctcgacggccgtaacatcaccgttaaccaggcccagtcccgtggcggcggcggcggcggcggcggcggtggctacggcggcggtcgcggcggcggcggctatggtggcgggcgccgtgacggcggttatggcggcggtggcggctacggcggtcggcgcgagggtggtggcggcggctacggaggcggtggcggctacggcggtcggcgcgagggtggtggtggcggctacggcggcggcggcggcggctggagggactgatgtgtggccccatcctggcttcggccgagttatcttatctatctatagtatcgtgttaccgttcgcttctgtcaccgtgttagtgtccgttctacctttggattaggtgttggtaccccttttgttcgctttggttgctcccgctatgaaacgagacgagagaagaatgagcaaggtttttgttcgcatctattgttgtccaatgatattgatatattgttcccctgtcaaaaaaacacacaaaaaaaaaaaaaaaaaaaaaaaaacaacc

SEQ ID NO: 1319 - DNA, 658 bp, Zea mays
  Clone ID: PAT_MRT4577_156792C.1
gaccctcgagttctggccggggtgctctctcagaggtgggctggcttctcctccccctcttaccaagtcctcttcgggttagggttacttagggttttgtggaggggcgatggcggcggctgatgtggagtaccgttgcttcgtcggcgggcttgcctgggccaccagcaacgagtcgctggagaatgccttcgcctcctacggcgagatcctcgactccaaggtcatcaccgaccgggagacggggaggtctcgcggcttcggcttcgttaccttctcctccgagaactccatgctcgacgctatcgagaacatgaacggcaaggagctcgacggacgtagacatcaccgataaccaggcccagtcccgtggcggcggcggtggcggcggtggctacggcggcggtcgcggcggcggcggctatggtggccgtgcgccgagactcatgttatggcggcggtggcggctgcggcggtcggcgcgagggtgggggcggcggctaccgaggcggtggcgggttcggtggtcgacgcgaggcgtggtggaggcggctactgagggggcggaggcggctggagggactgaggtgtggtcccatcctggcttcggccgaggaatcttatgtatctatagcatcgaggtaccgtgcgcttatgt

SEQ ID NO: 1320 - DNA, 1172 bp, Zea mays
  unsure (1)..(1172): unsure at all n locations
  Clone ID: PAT_MRT4577_156793C.1
gggtagggcttcctcactccctcgtgctctctcagaggtgggctggcttctcctccccctcttaccaagtcctcctcgggttagggttccttagggttttgtggaggggcgatggcggcggctgatgtggagtaccgttgcttcgtcggcgggcttgcctgggccaccagcaacgagtcgctggagaatgccttcgcctcctacggcgagatcctcgactccaaggtcatcaccgaccgggagacggggaggtctcgcggcttcggcttcgttaccttctcctccgagaactccatgctcgacgctatcgagaacatgaacggcaaggagctcgacggccgtaacatcaccgttaaccaggcccagtcccgtggcggtggcggtggcggcggtggctacggcggcggtcgcggcggcggcggctatggtggcgggcgccgtgacggcggttatggcggcggtggcggctacggcggtcggcgcgagggtggtggcggcggctacggaggcggtggcggctacggcggtcggcgcgagggtggtggtggcggctacggcggcggcggcggcggcggctggagggacaagcggtcgttgccccgtggacgcgctgaagctgggcgtgtgcgccaacttgctgaacgggctgatcaacgcgaccctggggacgccgcccagnacgccgtgctgcacgctgatccaggggctggcggactggaagggcgcggtgtgcctctgcaccgtcctcagggccaacgtcctgggcatcaacctcaacctgcccatcaacctcagcctcctcgtcaactactgcggcaggcgcgtcccctcgggcttccagtgcttctgatcacgcccatccactcgatcgatccatctgcaggctaaataatttctccaagctgctagtatacgtacgtacgttgatatatatgatgtagtattatatatatgtccatgcatgcaatgcatctcgtcgtccatcgcatgttgtatcgcagcatgttgttgttgatgttgtttttcgatgatcctgtctctgttataaatatcattattattacagtacgtgtgtgacctgaatgtttgtatttggcctgatgcatgcacattcatggttcagatttttagcgacatctcgctgaattaaaaaaaaaaaaaaaaaataaaat

SEQ ID NO: 1321 - DNA, 784 bp, Zea mays
  Clone ID: PAT_MRT4577_156873C.1
ggccgagaagcacgtaaataaatttcatttttccccctgtcgtcctcctctgcttaactcccttcacctccacctccgcctcggcgtcgtcgtgcgcttcgatctctccccccatttccacgcggagaggaggcgtcggcgcaataaaaggcggcgcttttgcatcgcccctccccggcatgcgtagctagcctcgcggctggcccccacgccatgcagaccaccgggcccgcatcgccggataagccgccagttgttgacccggaggccgatgacaaggtggaggaaggggcgcgggcgaaggaggacgatgcggcgaaagtgagcggcgaggatgaggatgaggaagagcaggaggggaggagaggcaggcggcagcggcgccggcgaggcggtgcggcgggggacagctccgtggccatggtgaagcgggagctgctcgcgcgctgcttgacgtgcccgctctgcgaccgcctgctccggaaggccaccaccatctccgagtgcctccatacattttgtagaaattgtatctataataagatcaatgatgaggatctggaccactgtccagtatgtaaaattgatctgggctgcactccagtcgataagcttagagctgatcacaatatacaggatgtgagatcaaaagtttttcccttcaaaaggaagaaggttaatgctgaagaggcagaatctcccattatgctacctgttaaagttaaagagaggtctatctcatcgttggtggtcaatacacctagagtaacccagcagcttcaca

SEQ ID NO: 1322 - DNA, 602 bp, Zea mays
  Clone ID: PAT_MRT4577_156911C.1
ccggccgggatcacttatagtccccattcgcacctctctccatctccctgctcctccgacttattgttgatccagccaagccagggatcgacatgaacgactcggaggagcaccacttcaaattgaaggccgacgccggagcgttcaagacctacccgcagcaggctggcaccgtgcgtaagaacggatctatcgtcatcaagaaccgcccctgcgaggttgaggaggtttctacctcacagactggccagcatggacatgccaaatgccactttgttgccatagatatattgaacgggaaaaagctggaagatattggtgcttcgtcacacaactgggatattccgcatgcgaaccgtactgatgctgatctgatcgatatatcacatgatggattggtgagccttcttacttcagatggcaacactaaggatgatcttatactcccaactgatgagactcttgtggcccagatcaaggaagggtttgaaagtggcgaggctcttgctgcgactgtccagtctgctatggaggaggagcagatctgcgcgctgaaggatgttggtacccagtaactgcgctgccttggaatactgtatctc

SEQ ID NO: 1323 - DNA, 617 bp, Zea mays
  Clone ID: PAT_MRT4577_156944C.1
acctttcttatcttctggggagccacagacattatacaaaaaactttattattgaactatacctcataaaaaatctaaaatagggcaccaacaatgatcaattgtaagaaaaatgctggaggctttgtaaaagcaagctgcttgaaaggaagcaaatgttgcagttgtaagagggatccagcgttaggcgcagcatgctgtctgaacggcaacaactgtgactgaatcaagaaagtagcatgtattacaacagctagctgtctgaatgaaattacttgctgctgctgtaaataaacataatagatcaatgctgccagactgtataatgtaagaaatagctgatgctaggcatcaggtagctggctgaatggtagttgttgttgttgcaaataagaagcagagttcaatgcagctagttggttgaatggaagaaactgctgttgctgagagtaggcagaaaggttcgctagcacaagttagttgtagttgttgtgccctgatgttttgagccaataaatgcaccaaaggtagactgatgtaataaggctgatgatctgttggaggaacaagggtgataaaggtaagatgccagctgtgattgcctgtttggatcctgt

SEQ ID NO: 1324 - DNA, 136 bp, Zea mays
  Clone ID: PAT_MRT4577_157023C.1
cccaaacatctcaatttacatctttacaacattacagggtttcatatgggcaacagaaatgcttacgacatcaaacaaaatcatccagtcaggaaaatcacatacgcatcatcaggcattgactggtttgccctaa

SEQ ID NO: 1325 - DNA, 304 bp, Zea mays
  Clone ID: PAT_MRT4577_157113C.1
cggcttgagtgttgctacctcaaagactggggagcatggtcatgccaaatgccagggggttgccatagacatatacaacgggaaaaagctcgaagatattggtccttcgtcacacaactgggatataccgcatgtgaaccgtactgagtaccaactgattgatatatcagaggatggatttgcgagccttcttacttcagatggcaacactaaggatgatcttagactcccaactgatgagactcttggggcccagatcaagggagggtatgaaagcggcaaggatctatgtgtgactgtccaa

SEQ ID NO: 1326 - DNA, 579 bp, Zea mays
  Clone ID: PAT_MRT4577_157123C.1
cgatccaattgaacttgctctccctccaacaagctaattaaggccggtcatgcctcttctagctcgtttcattatccatggcggaggagaagcaccaccaccaccacctgtgccaccacaagaaggacgaggagcagatcgccgtcggcgggtacggcgagtccgccgtgtacacggaggccacggtgaccgcggtggtgttcacgggcgagaactagttcgactagtacaagaaggaggagaaggagcacaagcacaagcagcacctacgttaggccggcgccatcgacgcctgcaccttaaaactctaccagaagcacgaggcgaagaatgaccctgagcacgctcaccttcacatgatcgaggaagacgtcgctgttgaagatgacgtcggctccggcggcttctccttccacgagcaccacaatgaagaagaaggaccacaaggaggccatagaggtctgctgccagaataagcaccacttattcgtctgattgatcctcccctatcgacatccctccacgtgtgctactcttgcgtgtgagagtgatattaaacgcccaccgtgttgtgcgcgc

SEQ ID NO: 1327 - DNA, 1661 bp, Zea mays
  Clone ID: PAT_MRT4577_157125C.1
tgacggccttcactgcacactacaatcaatcagccggcttttcctctcttcccctcgacagaagcccccaaatccgataccttcccctatccacctcgagtcccttccttccttagcggcggcgcgaaggcggcggagccatgggcggagtcggcgaaggtgacgcgtgggcggatcaggagcagggcaacggcgggggcagccgtggtgttggcggtggcggcggcgaggcgaagcggtcggagatctacacgtacgaggccgcctggcacatctacgcgatgaactggagcgtgcggcgcgataagaaataccgccttgccatcgccagccttctcgagcaggtcaccaaccgcgtcgaggtcgtccagctcgatgaggcctcgggtgacatcgcccccgtcctcaccttcgaccatcagtacccgcccaccaagaccatgttcatgccggacccgcacgcgctccgccccgacctgctcgccacctccgccgaccacctgcgcatctggcgcatcccgtcctccgacgacgccgaggacggcgccgcctccgccaacaacaacaacggctccgtccgctgcaacggcacccagcagccgggcatcgagctacgctccgagctcaacggcaaccgcaacagcgactactgcgggccgctcacctccttcgactggaacgacgccgatccgcgccgcatcggtacctcctccatcgacaccacctgcacaatctgggacgtcgagcgcgaggccgttgacacccagctcatcgcccacgacaaggaggtctacgacatcgcctggggcggcgcgggggtctttgcctccgtctccgccgacggctctgttcgcgtctttgatttacgggacaaggagcactccacaatcatttatgagtctggttcaggtggcagcagcggcggcggttccaactctggcgccggagatggtgggactgcgtccccgacaccactcgtgaggttgggctggaacaagcaggacccaaggtacatggccaccatcatcatggacagccccaaggtggttgtgcttgatatccgctacccaacactgccagtggtagagctacaccgtcaccatgcccctgtcaatgccattgcgtgggcacctcactcttcttgccacatctgcacagctggggatgacatgcaggcactgatatgggatttgtcgtctatgggaactggtagcaatggcagtggcaatgggaatggtaacacagccgctggagcagcagcagagggcggtcttgatcccattttggcatatacagcaggggcagagattgagcagttgcagtggtcggcgacccagcctgactgggttgcaatcgcattcgccaataagcttcagattctcagggtctgatttcctagttccaccctgtttcagtgaggagtaaaaaatgctaaacttggataatgagctgatgcccggaggataatcttgcaattgctttactgttgcttatttatgttgtggacaactgatattcatggcgggttagttctagaaatagaacagaagactttctagttagaagctgaattgtcaatgaatttggtttgtagagtaaggaactgctctggtgttagcgatggtgataatgggaactgaatttagtttgttctaaaaata

SEQ ID NO: 1328 - DNA, 428 bp, Zea mays
  Clone ID: PAT_MRT4577_157295C.1
attcggctcgagctcaacagccacagtattttctgtccgacatgacagcaccatgggtgaggaggtggccaagaaggtggaggcggatgccaccaaggagcccgaggcgtgagcgaaggacgacgtagccagttacaaggccgtcattcacgtgaccgacccgacgccggcctcgccgacggccgacgactccaaggccctggtcatagctgagcaagttgcagcttaacctgctcctgagaagcctgcacctccgacgcaagggggctccactgacagggatctcgctatagcaaggggggaaacagataagaggaactttatgatcaaagcttgggaagagaatgggatgacaaaagctgacaccaaggctgatgacaaagtatccgctattggtttatgtgaaaactcaaacaaagcacccatag

SEQ ID NO: 1329 - DNA, 2516 bp, Zea mays
  Clone ID: PAT_MRT4577_157312C.1
aaactggcatacgatgagcagcccaccagctccggtttcttccgactgcgagcttccaagtggcgactgcccgagtgcgagaagagggagagaagcggttgtcggaatccactccggccaggggtgcggaggtcggaatggggggaggagcggatgaggtggtgaaggtggtggatttggaggacggtgaaggggaggaggaggcagaggccgccgcggcggagggatcgagcatggagatggggatgctgccaaggatgccggtgcgtgtgctgctcgccgaaggcgacgactccacgcgccacgtcatctccgcgctgctccgcaagtgcggctaccgagttgctgcagcctcagatggtgtgaaggcgtgggacctattaaaggaaaaatctttcaaggtagaccttgttttaactgaagttgaactgcctttgatgtctgggttcctcctgttatccacgatcatggaacatgatgcgtccaagaacatccccgttataatgatgtcttcgcatgactcagtaagcatggttttcaaatgcatgctaaagggtgcagcagatttccttgttaagccgataagaaagaatgaattaaggaacttgtggcagcacgtttggagaaaacaactggcaaacggtgggcctaatgttcagcacatacaacgagaagagaatcttgcagaaagaatccaacagaagactggtgtgacaaaagctgataatttggacagagatgtgccctgtaaaaatagagaatgcagtgaacaagaaagtgatgctcaaagttcttgcacaaggtcagagctggaggctgaaagtaagcaaacagacaacattttggagtataagcaatcaactcaaaggcacttgtctattcctagccacaagaatgttgagctaaatggacagaccaaaatacaaagagctaagggtaataacttgatcccagcaagcgaagacgatttatcgccaaagaaaagaacgtgtttgaatgagaataattctgagagagcttcaagagatatggagctagtccacattatggaaaatcagcagaagtataacacacagtgggaggtggatactatgagaacaacatctaggggaaatgatgagaagggctccatcccagcacatcagttggagctttctcttagaagaactgactacggaaaattagagaaccacgagaaaaatgatagaagaacactgaaccattcaacttcctctgcgttttccttgtataattgcagggctgtgccaaccttaggaaatgctggtgatggtcaattatgcagcacctcagaaacactagtggatgttgaaaataaaaatggagattcagcagatccctctcaagacatgactgaaacaaatcgtcctcctattagagttgttcctgtccctgtccaaggtctcacatttgatgggcagccattctggaatggtacaccagtggcatccctattctactcacagtcaactcctcccatttggaatagcaaaacatcaatgtggcaagaatcaaccccacaagcaacttcactgccacaaaaatctccacagaatgaaccaaatgaaatgggggctaaaccagttataaatgcaggggaacaatttgccatgggtcctcccagtgccagtgggaagcagctgcatgttgaaattcttaatgatgatccacggcatatttctcctatgactggtgaaagtggaatcagtaccgtgctagacagcaccagaaatactctgagcagtagtggctgtgatagcatttccaaccagatcactgcccctactgaatcatccaatgtatataaggatgttcctgaaaccccaagcgccgaagggtcacggcatctgagccagcgtgaggctgcactgaacaagttccggctaaagaggaaggataggtgctttgagaagaaggttcgataccagagccggaaattactcgcagagcagcgtccacgggtcaagggccagtttgttcgtcaagatcatagcatccaaggaagctagggtccagttactgagctggaactctattctattatctaaaaaaagtcactgcaagtgactccactgcggtctgcgggtatcctgatgtcagattttgccgaagagttggaagcagtcacactgagttacagtttgctctgtatatttgctgaagtttgtaatatatgtatgtataggctaacgctgttctttcctaggttaggcacaggacctggcacgtttgaaggtttgtcagtaggcgttagaaaatacaggcatactttgtttcaggtcaagatgagatgtgaccttcagtagcgcatgtgtgctttaagtcttgtattacgtaattaagttgtttgatgtttcgggttagatgtacgctccgtggatgaaatgtaaaggatgtccaccaaaacatgcttgtttccgtgcagcttgttgcaatgaacatcgttggcctggtttctgttgatgctctccaaaaaacacccccaaaagaatagatac

SEQ ID NO: 1330 - DNA, 2436 bp, Zea mays
  Clone ID: PAT_MRT4577_157315C.1
cgagaatagggagagatcagacaagctgttgtcggaatccactccggcgaggaggagtgctgaggtcgaaatggggggaggagcggatgaggtggtgaaggtcgtggattcggaggacggcgagggggaggaggaagaggcagaggccgcggcggcggaggggtcgagcaaggagacgccgatgctgccaaggatgccggtgcgcgtgctgctcgccgagggcgacgactccacgcgccacgtcatctccgcgctgctccgcaagtgcggctaccgagttgctgcagcctctgatggtgtgaaggcgtgggacatattaaaggaaaaatctttcaacatagaccttgttttaactgaagttgaactgcctttgatgtctgggttcctcttgttatccacgatcatggagcatgatgcatccaagaacatccctgttataatgatgtcttcacacgactctgtaagcatggttttcaaatgcatgctaaagggtgcagcagatttccttgttaagccgctaagaaagaacgaattaaggaacttgtggcagcacgtttggagaaaacaactggcaaacggcgggcccgatgtgcagcacatacaagaagagaatctcgcagaaagaatggaacagaagactggcgtgacaaaagctgataatttgaacagtgatggtccccataaaaatagagaatgcagtgaacaagaaagtgatgctcaaagttcttgcacaaggtcagagttggaggctgaaagtaagcaaactaacaacattttggagtatatgcaatcaactgaaaggcatttgtttattcgtagccacaaggatttagagctaaatggagagaccaaaacacgaactaagggtaataacttgattccaacaagagaagacgatttattgccaaagaaaagaacatgtttgaatgacaatgattctgagagaacttccagagatatggagctagtccacattatggacaatcagcagaagcatgacacacagagggatgtggatactatgagaacaacatccaggggaaatgatgagaagaactccatcccagcacaccagttggaactttctcttagaagaactgactatggaaaattagagaaccacgagaaaaatgatagaagaacactgaaccattcaacttcatctgcattttacttgtataattgcaggactgcgtccagcttaggaaatgctggtgatggtcaattatgcagcacctcagaaacactagtggatgttgaaaatagaaatggagatttggcagctctgtctgaagacacgactgaaacaaatcgtcctcctatcagagttgtaccatttcctgtccctgttcaatgcttcacatttgatgggcagccgttctggaatggtacaccggtggcatctccattctacccacagtcagctccccccatttggaatagcaaaacaccaacgtggcaagaatcaaccccacaggcaacttcactgccgcaaaaatcgcaacagaatgaaccagttgaaatggatgctaaaccagttgaaaatgcagaggaacaatttgtcgtaggtcctcccagtgccagtgggaagcagctgcatgttgaaattcctaaagatggtctacggcacatttctcctgtgaccggtgaaagtggaatcagtacggtgctagacagcaccagaaatactctgagcagcagtggctgtgatagcacttccaaccggatcaccgcctctactgaaccatcatccaatgtatacaggggcgttcctgaaaccgcaagagccgaaggtttacgacacctgagccagcgtgaggctgcactgaacaagttccggctaaagaggaaggacaggtgctttgagaagaaggttcggtaccagagccggaaattactcgcagagcagcgtccacgggtcaagggccagtttgtccgtcaagatcatagcatccaaggaagctagggtccagttactgagctggaactcttccccattatctacaaaaaaaagtcactgtaagtgactccactgcggggtaccctgatgtcaggtttttttcgaagagttggaagcaatcacaccgagttacggtttgctgtgtatgtttgctaaagcttgtaatataagtatgtataggctgactcttttctttccttaggttaggcacaggacctggcacgttctagacggtttgtcggtagacgttaaaaaatacaggcatacttgtgtcctccagtagcacgtgtgctttaagccttgtattatgtaactagccaagttgtttttgatgtttcggattagatgtacactgtggatgtatggcgtgaaggatgtccaccaaagtatgctcgtttttgtgtagcttgttgcaatgaacattgttggcctggtttttgttaaacaacaaaaaaaaaaaaaaaaaggacgaacgc

SEQ ID NO: 1331 - DNA, 120 bp, Zea mays
  unsure (1)..(120): unsure at all n locations
  Clone ID: PAT_MRT4577_157603C.1
cccacgcgtccgattgaccaaagacccggtagttccctggatggacgccggctagcctgcaagagaaaaaantgttgaaggacccaatggccagagttcagcaggtgcttagcactagtt

SEQ ID NO: 1332 - DNA, 1713 bp, Zea mays
  Clone ID: PAT_MRT4577_157626C.1
attgggtacctcgaggccggccggggaaaaaaaaaaaaaaaaaaaaaaaaaaggagtcttccaaaacgaagcaaaagcaaccgtcgagcttgcaacgccttacgcctccacactcaacagtcatggtcgtcatgggcaaggagcagcaacacgaggaggaggaggtgcaagggaaggtcgtccaagaagaagtgcaagtcgtccaagagacggtggtgccggtgccgtcggaggaggacaaggaggccgaggcggcgctggtgcacaagatctccagcctggccgccgccatcgcgaagctgccatccctgagcccgtcgccggaggtgaacgcgctcttcaccgagctcgtgacggcgtgcatcccgcgcagcagcgtggacgtggagcggctgggcccggagctgcaggagatgcgcggcgggctgatccgcctctgcgccgacgcggaggcgctgctggaggcgcactactccgacctgctggcctccttcgacaacccgctggagcacctgtcgctcttcccctacatcaacaactacatcctgctgagccagctggagcacggcctgctggcgcggcacgtgccgggcccagcgccggcgcgcgtggccttcgtcggctccggcccgctcccgctgagctccctggtgctcgcggcgcgccaccttccgggcgcctccttcgacaactacgacatctgcggggaggccaacgaccgggcgcggcggctggtgcgcggcgacggcgcgctccaggcgcgcatggcgttccgcacctcggacgtggcggacgtgacccgggagctggcgtcgtacgacgccgtgttcctggcggcgctggtgggcatggcggccgaggagaaggcccgcgtggtggcgcacctcgggaggcacatggcccccggcgccgcgctggtggtgcggagcgcgcacggcgcgcgcgggttcctgtaccccgtggtggaccccggggagatccggcgcggcggattcgacgtgctcgccgtgcaccacccggagggggaggtgatcaactccgtgatcatcgcgcgcaagcccgttgccgtcgacgcgcacgccaccggcggggtggggcacgcgcacgcgcacgcgcacggcgccgtgctcaaccggccctgcctctgctgcgagatggaggcccgggcgcaccagaagatggaggaggtggccgtcgagcagctgccgtcctaggcaggcgcacaccggcgtcctcgctttcttgtccgtccggccgcccatttgattttcggagttgcatctatctcatctaatatggatccatccatccatccatctatagcagtattatgtatgcatccacatggtaataatctggctgaccgcatccgcatatggtcgtctcatcgtccatctataccttgaaagctactaattaattactgagttattattactactgtttttactactactacgtactattaatattactacaactacctcatctagctggtgtattaattgattttgtctgttactgctgtactactgttgttgtggagatgaaccatgcatggagtggttagtcactctttagtactttcatgacgttgttttcaacggtcatatcatcatcattgttgtttctgctgctgctagctcatctagctgctgtattgtctatatactgatgcatgtgtggagatgaatcatggagcggttattgtcc

SEQ ID NO: 1333 - DNA, 389 bp, Zea mays
  Clone ID: PAT_MRT4577_157778C.1
aaaacgaaggctttaaaaaaaaattaacccaaacaggtttgccaatgggggaaaacccagctgaccacctaaagctagggggatacagatggaccaaacagggggcaacgaaggaacacatgttaaaagacaacattcttcgaacaaaaagccgggctggggggctaaccaaacgacacccacgagatcgcaacgatttaaaaagaaaaaaactcaaaagcaaatggaccccaaaaacccgtttaactaaaaaagcactccatccttttcctggatagcatccaacttcctccaagcaaacaaaataagccagcttgcagtccttcgaaaaaggggctgaattctccccataaaagcagcaaaaaacggattggggcaagctaaaaacg

SEQ ID NO: 1334 - DNA, 2383 bp, Zea mays
  Clone ID: PAT_MRT4577_15782C.1
accaagcgtgcaaccccgcgaccgggagctagctagccagcaacgcgtagcaagcagcgcaagcaaagctccgagcgcccggccggctcgcttcgccatgaacatgggtggaaggtccccggcggcgacgacgatccggtgcaagtactgcagcgcgagcctgaccgtgtgcgccggcgagcgcgccatccagtgcgggcaatgctgcggcgtgactggcatccggcggtcgctgtcctcgcggctcccgctgccggcgctgacgaggcccggctcgcgtcgcgcgcttcccgccgtgcggcggccgcggcaagaagcgcgccgtcctgatcggcatcacgtacggcggcgcgcgccggggctgcggcgagctgcggggccccatcaacgacgtcaagtgcatgaggcagctcctctgccagcgcttcgccttccccagcgacggcatcatcatgctcactgacgaccagaaggacccgttccgggtgcccaccaaggacaacatccggatggcgatgcagtggctggtgcaggggtgcagcagcggcgactccctggtgttccacttctctgggctgggcgcgcaggtcgccgacgcggactgcgacgagcaggacgggtacgacgaggccatctgcccggtggactcgttccagaagggccccatcctggacgacgagatcaacgagaccatcgtccggccgctggtgcccggcgccaagctccacgccgtcgtcgacgcgtgccacagcgattccgtcctcgacctccccttcctctgcaacatgtccaggaccgggaactggcagtgggaggatcaccgtccaccgtcgggcgtctgcaagggcacgagcggcggccaggcggtgcttatcagcggctacagcgacggcaaaagcaagttcagcatgacgccggaggcctgcgcggcggtgggggccatgacccacagcttcatcaaggcggtggaatgcgagccccagggggtcacctacggccgcctgctcacctccatgaaagccatcatgaccaacgccggcggctgcaaccagcagctgcagggcgcctgcgcacccgcccgcaaggtcgtcaacttcagcggcgtgcaggaacctaacctgtcttgctcggagatgttcgacgtctaccgcaagccctttgcgctgtgaacctcctctgcattgccattgcctttgcagactaccacagattcccgtctggactctatatataaattaccgtgacggaataataaaccagacggatttatattatatatgatgatatgaggcctgcttgctcataatgtgtgccttaattgtcttggtgccaataatgtgtgttcatgtgtcgatcggttaccggccctgagccaagcttatagcctgtggaccgacgactttgatgaccatttataaatacaatgttgataatgtttataccttgaaagtttataaagagggggaagaaataaaataaaaaaaaaaaaaaaaaacccacgggttggcccggtcctcctctggtttggcatctcggtacccctcgtctttgttgggagttatcttgggttcaagaaacctgccatggaacctccagtcaagacaagcaagattccacggcagatccccgagcaggcttggtacatgaatccgcttttcactattctgattggtggcgtccttccatttggagcagttttcattgagcttttcttcatcctcacctccatctggctgcaccagttctactacatcttcggcttcctcttcctcgtgtttgtgatccttgtcatcacctgcgccgagatcgcagtggtgctctgctatttccagctctgcagcgaggactacatgtggtggtggaggtcctaccttacctcaggatcctccgcgctgtacctcttcctgtacgctgctttctacttcttcacgaaactgcagatcactaagctggtgtctggcatcttgtacttcggctacatgtttctcgcctcctatgccttctttgtgctgactggcacaacgcctcatatgccttcttcgtgctgaatggaaaaattggtttctgcgcctgattttggttcactaggttgatttactcttcagtgaagatcgattaggtgccaagatgacagaacaacacatgtttcaatgatggagtcaagataattgtatgattaatgtggattggggaattacccccctcctttttttgaaggttttaaggaaaaatttactgtttaggatttagtttacggatggtttatgttttgttattgtcaggttatacactttagtgatctggaactgaaaaaatataagggtaaacatattatgatgaggctgtaccttgtgacaatttttttttgtggggctctatataa

SEQ ID NO: 1335 - DNA, 187 bp, Zea mays
  Clone ID: PAT_MRT4577_1578C.1
tgcaaataacaacattggtgttgtcattgcgctttgggctcctattattcttgtctatttcatggatactcaaatttggtatgcaattttctcaacgctaattggtggtgtctatggggcttgtcgccgtcttggtgagataaggacattggggatgttgagatctcggttcgaatccctgcctaag

SEQ ID NO: 1336 - DNA, 330 bp, Zea mays
  Clone ID: PAT_MRT4577_157903C.1
acgcgtccggcaacgtgtgtacagttgacgtcttatggtattgagttgctgaaacttgtaaggttcatcacttgtgtgtcggactctacttgtatatatatgcgaagaactcttgagatacacattgactacaatgtcttttgatgaataagaccagacagtgccataccgaacttgtccttcacacggttgatttgccatcttgggggatttggggaggtggtggtggtcgtgctctctattggtgtgaggctgatggcgtggctgtcattaatacaatccttaattcgtgttttgatgagcttttacaaaataatttaataaataaag

SEQ ID NO: 1337 - DNA, 355 bp, Zea mays
  Clone ID: PAT_MRT4577_157931C.1
attcggctcgaggtgagttcgacctatttttcccggacgtcgacgcagaccgtactggcgacccttttgaaggaccccatcgagctctcggcgtacagggaccgccggttcaaggggacacaagaagagaatgaggcggggctgcttgcgtggacaacactgtacatcggtaatatgtccttctacaccacagaggaacaggcctacgaactcttatacctcgccggcaagatcaagaagatcatgatagggctcgagcagaactccaagatcccatgctgattctgatttgtactgtactactctagggaggatgctgaaaatgctgtcaaatacatgagtggaaccatgcttg

SEQ ID NO: 1338 - DNA, 196 bp, Zea mays
  Clone ID: PAT_MRT4577_157970C.1
ctcttttacctcgattggtaattacgaatatatagatggcaacatgggggttacgtaattcatggaagggcttacattttggaactgttgaggtcagatatgaatgaatgctacaccccctaacgagcatgttgccggacccccttctatcttcttcctcttccctgtcacgctccatgctgctctcatacacatg

SEQ ID NO: 1339 - DNA, 2916 bp, Zea mays
  Clone ID: PAT_MRT4577_158122C.1
gaggcggtatgctttttgctttggaatcggtatgggatagtgaattgtgaacagggatcaactattgcccaggtaagaggcaatgtgtgctgattgcgcctagatgtacattttattaaagttttatatttattgtattttttatgtttttttttttttttttttttttttttttagattgcaaggtaactgcaaaccactaattaattagactgaatcactgaactaaagcttgtagagtaggtacaaagacaggcaaaaatcccgtatcacgttgcatgggaaaaaaatgggcgtctctcaagaaccatcacgtgacttgaaccaggcagtcaccgatatcatttcacattcctagtaaagcgggagctagctagacttgaaaacaaatccgaaagcctaaagctcgtccttgtcgtaggacgacggctccggctccggctccttctcctccacctccggctgctcctcggcctcgtcctcctccacggtcgcgtcggggctcaggtccaggcccttctgcaccgacttgtagatgctggacgcgaactccttggggtcggggaggttgaacccgctctccatcagggccgtctggtacaccagcctcgccgtgtgcttcagctcctcgctctcgttgtcctgggcgaccttgtcgcggagctccttgatgatggggtgcctggggttgatctcgagcaccctcttgccgcgcatgtacgcctgcttgctcgagtccgacagggtctgcgcctgcatgatcttctccatgttggcgctccacccgtacttggaggtgaccacgacgcagggggtgtcgtgcagccggttgctgatcttcaccgagtccacgttctcgctctccagggccttcttccaccagtcagtcagctccttgaacgactccttgagctccttgagcttcgagtccttgcccagcttcagtccctccttggacacgttctggaacttcttgtcctcgtagtccatcaggtactgcatcaggtactcgtccacggggtcggtgaagaagatgacctcgtagttcttcttggttagcctctcgaggaatggagacttctccagctgctctttgctgcttcccgtgatgtagaagatgtctttctgccctgacttcatccgtgagatgtactcgtcaagggaggcaagtttgccatccgacttggtactctcaaatctaagaagcttcgcaaggcggtttctgttagtcgcgtcttcgatgatacccagcttgattgatttgccaaactcattccagaacttggcgtactggcccttcttctcctccatctcgcttttctcttcatctgtcttatccttgttgctgtactcatcagggtcttcttcagcaagtttcctgatcatgtcaagggctttgcggatcagcttcttcttgatggtcttgagactgctatgttgttgaagcatttctcgtgacacgttcaggggcagcgtgtccgagtcaacaatacccttcaaaaagctcaggtacttgggaagaagatcatcaaattcgtcagagatgaaaactctcctaacatacaacttgaggtttgacttgttactgttgtagtaactctcatagagatcatgtggagccttcgggggaataaagagcaaagctttgaactcaacatctccttcggcagtgaagtggctccaacccataggcttgtcatcaccgaagtccttggctagtgagtggtaaaacttcgagtattcttcatcggtaacctcctttgggctgcgaagccatacagccttcacatcattcagaagttcccactcagaagtagtctcctttattgtcttggtcttgggctttttctctttctcttcgtcttcgtcttcttctgtctcttcctctgtagtttctggagttgaatcctcttcttcacttgtctcatcctcatcagttggcacttcaacatcaacctccttggtcgaccacaaatagatagggaagttgatgaactcagagtacttcttcaccaaatcctttagcttatcctcttccaagtactccttggcctcatctcgcagatgcaatcttatctcagttccacggccaaggggctcattccatgtatcctcagagatggcaaatgatccatcagcttttgattcccacacatactgtttatcatcattgtgcttgctgaccacttcaacatagtcagcaaccaagtacacagagtagaagccaacaccaaactgtccaataagattgaggtcacctccagactgcatcttttccacaaaagctgaagtgccagatttagcaatcgttccaaggttcttaataagatcttccttggtcataccaatacccctatcccgaatggagaggattttcttctctttgtccaacttaatctgaatctcaagctttgcagtgtccccttcacccagaacttccttatcagtaagggaaaggaacctaatcttatccaacgcatcagaggcattagatatgagctccctcaggaagatatccttgttgctgtagagtgagttgatgatgatgtccatgagtctggaaacctcagcttggaactcaaacttctcggctgagctcctgagagtcttcctagagatagactcggcttccctctgggcaacctcagagtcggtggacaggccatgagggacagcaccaagcttctcctctaccttgggtgggttagccaagtcatagctgctctcctcggcattcacttgtagcttcttagctgggtcggggagtgtggtgaggagaaagaggaggaggagcgcggaggagagcgcccacttgcgcatcgtcgcctctcctggctatcgcttcactctgtggagcaccacggacaccaccagtgcagtgatgagttcgtcgccccggccggcctcgaggtaccc

SEQ ID NO: 1340 - DNA, 555 bp, Zea mays
  Clone ID: PAT_MRT4577_158138C.1
gaccgattgacgcaggccaaaccttacctgagcgacggcgtggtgcaagggctcgtggacccgcggctcggcgacggctacgactgcgggcagctgaggcggctcatgttcgtcgcgtccctctgcgtcagggccgccgccgtgtggcgcccgaccatgacacaggtggtggagctactggagtccggcgagatttctcaagagcagtggcagatgcccgagaaggaggagcaggacgagctgtgggacttcgacgatctcgacgacttcgacgaggacgactacgacgacgagtccgattccccctcgatctcctcgtcggcatgcagcatccaccccgatgattagccccaaaatacttgcgcgtgtcagtagattattatcgttgttattattcaacctgctgatacggtccttgattgtatcggtgtgtacatacaccatccatccctagtagagaatagtaatatgaaaatccgggagaaaatcgagagaagaggatagaggcccgtggctttctccaggcccgtgcccttcagttttggtgtcgccaaa

SEQ ID NO: 1341 - DNA, 208 bp, Zea mays
  Clone ID: PAT_MRT4577_158232C.1
gcccgaacagtaggccaccgagggatgcgaataaggtggcaaatataagggactccaccgtcatgagcttgatctggatgttgagggacgggcccaaggtgttcttcagggggtcaccaatggcgctacctattacattacccttgtgacagccagattccttggggccgaaggtcctaggtctgctcgctggcaccagcactcatgt

SEQ ID NO: 1342 - DNA, 419 bp, Zea mays
  unsure (1)..(419): unsure at all n locations
  Clone ID: PAT_MRT4577_158338C.1
tcggtaagagacgggtgctgtgaagtagtgtgaacctgaaccttgtctgaggtcactgagtgagctagctagctagctaagctccgatcgatcctagctagcatacaataccactagtcttcttnacaagtgtaagagacgacagcaacacgagatggtcgntgctagccttctcaagtcctgcttgcttcccaagaagtccgaatggggcgccacccggtaagccgtcgncttcccccggccggccaccgtgtccgtggtcgtccgtgcctgcgnctacgccgatgagctggtgaagaccgncaaaacgatcggctgggtcggtgcggcgncgtgtnacaggacaatgggctggtgccgatggtggagttggagatgctgctggacggtgaggtcgggatcgagcggtcgttcggggt

SEQ ID NO: 1343 - DNA, 379 bp, Zea mays
  Clone ID: PAT_MRT4577_158355C.1
cccactctttcggccgccgccgccatcgggcgcaactcggccgtcgtgttcgcctggaagggggagacccttgaggagcactggtggtgcaccgagcgctggctcaactggcgcgagggggtcgggcaccacctaattgttgacgacggcggtgtccccactctgttcatccacaagggtgtcaaggcctgtggatgcgtacgagatgaccggtaacattcaggaaccgggctccaccgacagcgctgagatcaagaacgtgctcaccatcatacgcgaccggctcaaggttgaccccatgaagtaccgcaagatgaacgagtggcttgtcggcctctctgaggagaccaccaccggtgtcaagaggctctaccagatg

SEQ ID NO: 1344 - DNA, 304 bp, Zea mays
  Clone ID: PAT_MRT4577_158398C.1
accaattaaattctcggtatcattgagctacttacccgagccacttaaaaataatatttggtattgaacaaaggatgtctctgtatttgtggaaagcaaatgcgagcgtattgctcatccctcttttgcattagatgcctgtgtggacagtgtggtggactggtggtactgcatcggtagcattctagtttttgcttaattgaatggtagttattttggtttacaaggtatagcttaagaaagtctggttcactatttttcattttggttggtatattcacacatcacactattcagctagtcc

SEQ ID NO: 1345 - DNA, 817 bp, Zea mays
  unsure (1)..(817): unsure at all n locations
  Clone ID: PAT_MRT4577_15848C.1
gatcccgacagcccatgccctgcagcgccgtcgctgttccaccccgctccctagcgccggtcgccccggtgaggatcacgagcccccgacgactccctgcccgtagattttgctccaattccaaatcccagcccgcagaaggccctccagatgtctgattcctcggagccctcgaaagaaggttcttcagccaatggttccagtgctctccaaaaaactggagcctggagtagcatattgagcactcttgtccagcaagcttcagtgtatggcttggctgctggctattgcctgtcagcatctttgctctccattatcaacaaatgggcaatcatgaaatttccgtaccctggggcactgacagctctacagtacttgaccagtgttgttggagttctcctatgtggacaagcaaagcttattgagcatgatggccttaatttcgcaaccatgtggaagttcttacctgctgctgtgatgttctacatctccatcttcacaaacagcgaactcttgctgcatgccaatgtggacactttcattgtgtttcgctctgctgtgccaatatttgtggccatcggagagacgttgtaccttcaccaaccatggccgtcattcaagacatggctttcactatccaccatacttggtggaagtgtgatctacgttttcacagacaaccagttcactgtgactgcttatagctgggcagtggcctacctagcgagtatgtccattgatttcgtatacatcaagcacgttgtcatgaccattggnctgaatacatggggccttgtgctttacaaaatcttgaggc

SEQ ID NO: 1346 - DNA, 1852 bp, Zea mays
  Clone ID: PAT_MRT4577_158569C.1
aattcggcacgagggctagctagggttctgtaaccaatctcacccatcttttctttccttcgtcggagaaggggagaaaagcgtacctgaaacgattccctgcattccattccgctgcatacttgcattgcatctcatccctcctgctcctgcgtcctcctcctctatttctctcctgctgcttgctactacctcatcgatccattccatccatcgccgaggggggagggccgccgcccgcccgggtcgcatcgcatcgcccggtcggccggggactcggggcaggcgagcgacactagctataaaagacctcccgccgcctgcgactgggccgtgtgcaagcaaagcgcaaggccgatctgagggttggagggccggccatggtgatgatgatgcggtcgtgcctcggcggcggcctgctaccggtggcggtcatgctctgcctcaacgtggtggcggcggtcatggtgtcgctcgtcaaggtggccatggacggcggcatgaaaccgctcgtgatcgtcaccctgcagcagctcaccgccgccgtcttcctcgcgccaatcgcattcttcaaggagaggaagtcgaggccaaagctgacgctggagatcttcgcctacatcttcgtcagtgcggcgctcggggcagctcttcgtcagtacatgatcttcgtggccctgcgctacaccacggccaccttcgtgaccgccttctccaacatcgcccccgtgctcaccttcctcctggccgtcgctacgcggtccgaagcgctggacctcaagagcaggacggggttggcgaagctgctgggcacgctggtgtcgctggccggcgccatggtgctcaccctctacaagggcgtggcgctcacccacgcggcggcagcctcgcaggaccaccagcagcactcccacggccggttgccgccgagcgccgccgacagccgcggcaagtggacgctgggcaccgtggccatcctgggcaactgcgtctgcctctcctgctggttcctgctccacggccgcctcgccaagaagtacccgcacgtctactcctgcaacgcgctcatgtccttgctcagcttcctccaggtcgccgtcgtcggcctctgcacccagcgcagcatctccccctggatcgtcaccagcaagttcaacatcctcaccgtcctatacgccggcatcgtcggctgcggcgtctcgttcgtgctggtgacatggtgcatcgagaagagaggagccgtgttcgtggccgccttcataccggtggtgcagatcatcgtctccgtcatcgacttctccatcctgcacgagcagctctacctcggaagcgtgctgggatcagtgctagtgataggtggcctttaccttctgctgtggggcaagaggcaggaggccctgcactgtcctcctcctcctccaaaggttgccgaagaagaccctgctgacaaagagcagcagcaagtgcagcacaactgaagacggacagcatcctctgactgtttggtcgtttggttgtaacagtgccagcaataagatctctctgcctccttttcttttcttttggtgtctcaggggggtgggcaatgttccttccttctcagatcgatcaccaacaaagtgtttagattctaatccaaaacagtagaatggtcttaaatacagtactcctgcttactgatgatagcaacaccactaccaactaggcctctggagaaatacagagtagagtgtgtgtgcgcgcaatactggagagcagaatattcctgcaaatatagtacgcagttgctgtccgcctttttcttatgaggacatatctggtgctagagaaaaaaaagaaaaaaaaagcgtac

SEQ ID NO: 1347 - DNA, 384 bp, Zea mays
  Clone ID: PAT_MRT4577_158709C.1
ctatagtgagtcgtattaaatcgctagcagcagctgcatgctggcaatgtgcagtggtcaacctaagatgtcacagagcgttctaatcgccttcaggaatgtaggagacgacgctacgggagccgcattggccatcgacgcgttctttccctttgcctgtactgatgccatctaggaggcgtgctacaacagtatcggtatcatcgcccagccagtacgcagtaacaacgacgaagacgccgtcgcgtgctgcatcaagtatggtgtgtctctcgtcctcaccgatgtcaggcacttcaagctttacccgtcatgctccatggcaggtcatcttagcgtacggagttacggactttacaccaaccttcgacagctgctccttgt

SEQ ID NO: 1348 - DNA, 259 bp, Zea mays
  Clone ID: PAT_MRT4577_15871C.1
tacagcacgaatctcgtttaggagaagcggagcgcccaatcggtgcaagcatcatggagtacggtcagcaggggcagcgcggccacggcgccactggccatgtcgaccagtacggcaacccagtcggcggcgtcaagcacggcaccggcggaatgaggcacggcacgggaaccggcggcggcatgggccaaatgggtgagcacggcggagctggcatgggtggaaggcagatacagcctgcgagggaggagtacaagac

SEQ ID NO: 1349 - DNA, 614 bp, Zea mays
  unsure (1)..(614): unsure at all n locations
  Clone ID: PAT_MRT4577_158906C.1
cccgggcgatccaattgtcacttgctgctcccttccaacaagctgaattagagggcgggtggtgggggtgggtnctanactcgttgtcattagtgcatggcgggagggagaagcaccaccaccaccacctgttccaccacaagagggacgaggagcagctcgccgccggcgggtacggggagtccgccgagtacacggaggccaccgtgacggggggggggggcactnnctagaactagtaccacgagtacaagaaggaggagaaggagcacaagcacaagcagcacctcggcgagggcggggccatcgccgncggggccttcgcactctacgagaagcacgaggcgaagaaggacccggagcacgcgcaccggcacaagagcgaggaggaggtctcggcggcggggggcgtgtggtccggcgggttcgccttccacgagccccacgagaagaagaaggaccacaaggaggcctaggaggccggcggcgagaagaagcaccacttnttcgggtgagtgagcctcccgtatggggggccctccccgtgtgctacgcgtgcgtgtgagagggatatttagcgccccccgtgttgtggcgcgcgtacctatgtatgc

SEQ ID NO: 1350 - DNA, 304 bp, Zea mays
  Clone ID: PAT_MRT4577_158952C.1
gctggcttctcctccacctcatatcaagtcctcctcgggttagggttccttagggatttgtggaggggcgatggcggcggctgatgtggagtaccggtgcttcgtcggcagacttgcctgggccagcagcaacgagtagctggagaatgccatcgacacctacgtcgaggtcctcgattccaaggtcatcaccgaccggtagactgggatgtcacgcggcgtcggcaacggtaccttcacatccgagaactgcatgctcgacgctatcgaccacatgaaccgcaaggagatccacggacgtaac

SEQ ID NO: 1351 - DNA, 372 bp, Zea mays
  Clone ID: PAT_MRT4577_159050C.1
cagctagcatcatataaagcacaatcttgtaccaacaatggctgccaaaatattttgcctccttatgctccttggtatttctgcaagtgctgctacggcgaccattttcccgcaatgctcacaagctcctatagcttctcttcttaccccgtacctatcaccagcagtgtgttcagcatgctaaaacccaattcgttaaccatacaggatccaacatgcaatcgcacctggcatactacctttatcaccctagttcctgcaacaatcatcagcccttatacagcagttcacctatggtgcatttattgtcacaatacatcatggcacaacaactacaacaacttgtgctagcaaacctagctgtctactctc

SEQ ID NO: 1352 - DNA, 2197 bp, Zea mays
  Clone ID: PAT_MRT4577_159255C.1
tttccaactggtgtccaagttatatgaagtggtccctccgatcctccttgagttaggaaaggccgggcgcccctcctctcgccgccccacccactccactcctttcctttatgccctacgttataaaattggcaaactcgaggccggccgggggaggacgacgaccggtcccattccccccgccccaacttgtcaggactcaagaggctcccctcctccctcgccgcggaacacgcgcgccgtcgtcgccagcccgggttcatttctccgttccttggtgcggtggtagccgagcgctccggccatggcgttctatcggggcctcaccgcagtctcgagactgcgatcacgcatggcgcaggaggccaccacgctggggggtgtgaggtggctgcagatgcagagcgcgtccgatctcgatcttaagtcccagttgcaggaattgattccggaacaacaggatcgcttaaagaagctcaagtcagagcatggaaagacccagcttggaaacataactgtggatatggtccttggtggaatgagagggatgactggaatgctttgggaaacatccctacttgatccagaggagggtattcgttttaggggcctctcaattccagaatgccaaaaagtgctgccaacagcagttaagggcggtgaacctttgcctgagggtctcctttggcttcttttgacggggaaggtcccaaccaaagagcaagttgatgcactatcaaaggaattgcttgcgcgctcaactgttccagctcatgtctataagacaatagatgctctcccagtagatgcacatcctatgacacagtttaccacgggagtaatggctcttcaggttgagagtgaatttcaaaaggcttatgacaatggattgccaaagtcaaagttttgggagcctacttatgaagactgcttaaatttgattgctcggcttccaccagtggcttcttatgtttaccggagaattttcaagagtgggaaatcaatagaagccgataattctttggactatgcggcaaatttctcacacatgcttggttttgacgacccaaaaatgctggagctgatgcggctctatgtaacaattcacactgatcatgaaggcgggaatgtcagtgctcatactggtcatctggttgggagtgctctgtcagatccttatctttctttcgcagcggctctaaatgggctagctgggccactgcatggccttgcaaatcaggaagtgcttttatggatcaaatctgtaattgaggaaactgggagtggtgttaccacagatcaactcaaagactatgtctggaagacactaaagagtggaaaggttgttcctgggtttggtcatggagttctgcgtaagaccgacccacggtattcatgtcaaagggagtttgccctgaagcatttgcccaaggatccacttttccaattggtgtccaagttgtatgaagttgtacctcctatcctcactgagctgggcaaggtcaagaacccatggccaaatgttgatgctcacagtggagttttgctgaaccactttggactatctgaagcacggtattacactgtcttgttcggtgtttcaagaagcatggggataggatctcagctcatctgggaccgtgcccttggcctgccacttgagaggccgaagagtgttaccatggagtggctggagaactactgcaagaacaaggctgcttgaagcttttcacaaatgctgctttttcccaaccttggctgttaataatttaaacgcgagttatagaaatagtcattttccctttggccgttgaataacgcaagagcaatatgctcaggcggaagaattttgtatcttccgtaacttggtgaacatccagatacttgatctgcggcaacaatgggcagaagagattaggacatgctgattgatctttatacgccaacacttgtttttctttaacattacttgttcgctgcagctttaagccagctgtttgtaactgcaatttatagcaatttatagagatttgggctatgacatgtaaaatcatgtatgccagttaaaaaaaaaaaaaaaaaaaaaaaaaaaaaaaaaaaaaaaaaaaaaaaaaactcggggattatttttgcagagttaattggtaattccaaaaaaaaaaaaaaaaaaaaaaaaaaaaaaaaaaacccccaaacc

SEQ ID NO: 1353 - DNA, 887 bp, Zea mays
  Clone ID: PAT_MRT4577_159256C.1
atctggacccgtatatattcatgtcccgacaagttgggccgggctcttcctccctcgccgcggaacacgcgccccgtcctcgcccgcccgtgttcatctctccattccataccctgaagtgcaggtgcggtggtagccgagtgctccggccatggcgttcttccggggcctcaccgcggtctcgaggctgcgatcccgcatggcgcaggaggccaccacgctgggtggtgtgagatggctgcagatgcagagcgcgtccgatctcgatcttaagtcccagttgcaggaattgattccggaacagcaggatcgcctaaagaagcttaaatcagagcatgggaaggttcagcttggaaacataactgtggatatggtccttggtggaatgagagggatgattggaatgctttgggaaacatccctacttgacccagaggagggtattcgttttaggggtctctcgattccagagtgccaaaaagtgctgccaacagcagttaagggtggtgaacctttgcctgagggtctcctttggcttcttttgacggggaaggtcccaaccaaagagcaagttgatgctctatcaaaggaattgcttgagcgctcaactgtcccagctcatgtctataaggcaatagatgctctcccagtaactgcacatcctatgacacagtttaccacgggagtaatggctcttcaggttgagagcgaatttcaaaaagcttatgacaatggattaccaaaatcaaagttttgggagcctacttatgaagactgcttaaacttgattgctcggcttccaccagtggcttcttatgtttaccggagaattttcaagggtgggaaatcaatagaaactgacaattctctggattatgcggcaattt

SEQ ID NO: 1354 - DNA, 305 bp, Zea mays
  Clone ID: PAT_MRT4577_15928C.1
actagttaacgaaagccttttatccaagctcattgaacggaagctcacattttgggtggggccaatctttgatggggggggagctatgtcttttcttcagcatcattctactagttaccactccggcgagaccaatgcccgtgcctaggataacacgggtcaagtgatgggggcgacgcatgagaaagggagggaggccaagcacaaggcgtccgacgcctccgaccgcgccatgggaatgggccacgactccatggaggcgaccatggataaggctcgcgcctgctcggaccaaaccatggtga

SEQ ID NO: 1355 - DNA, 1447 bp, Zea mays
  Clone ID: PAT_MRT4577_15942C.1
ttgggtacctcgaggccggccgggaaacccggtccatgcaaatttattcccggtcagcatctctgtctttttcttacctccaggttccagcgtgcgcgctctcttcccctctccgtcggcgacgactacgccgggtcttcttcggacccaggtcgttgccgcctacgccaggtgcccaaatcttcttagggcccttcgccggcgacgagcacacaagcttggttgacccccaacaaattgcaaaatgtcagccaatgtcggtgaatcaaccagcggtggcagcagcaacgatgcagctggggggagctttgaatgtaacatatgctttgagctgcctcaagagccaatagtgactctttgtggccacctcttctgctggccatgcctttaccggtggctgcacatccatgcacattcgccagagtgcccagtgtgcaaggctcttgtggaggaagacaagcttgttcccctttatggacgcggcaaggatcgtgttgacccaaggtcaaagaacatgcccgagggtgagattcctcaccgcccaactggtcagaggcctgccccagccccccaggccgatgctaacaacaactttgccaatgccaatccaaatgcgaatccatggttcatgggcacaggagtccctttggctaatgcgcgctgggggaactacgcattctcagctgctttcgggggactattccctatgcttagcttccaagttcatgggtttccagatgctgctgcttatgcgcagcctgctgggttccactatgggtatggccatgggcatggattccatggcggccatatgggacacgcccatggcgtccaccgacaagcaccattggggcaacagcagcaggcagatatctacttgaaggccctgctcttcatgattggaattctagtgattgcaagcctcattgcgttttaaaatttgttggcaacgtctaccaggaggcctgctcgtcacggctgggacgtggaattctgggaatgcaatcctcctgacatgtcagagtccgttgatagcttgacatttgtgatggcatattggcccatgaaccgccagaatttcagtgtgtttgtactatagcttggcgctgaatgttgcataagttattattctgtttgcatgaagtgttcatagaatatgtattaatgtctagataagtacctacgtttcgtaacaccttatatagagtactaggaggaacatggtgaaattattactgtctagtcttgatttttttaaaaacattttggagatgaatgtgatgtgcacttaaaaaggtaagagtgacaaatgatcgtgccgtagagctttgcaataaaaaaaaaaaaaaaagcggcctttgtcagtgcctagctttgcacaaacaatggttctagtgttgtgatgggttttcgattttcatattaatatttaagattttcatatatt

SEQ ID NO: 1356 - DNA, 457 bp, Zea mays
  unsure (1)..(457): unsure at all n locations
  Clone ID: PAT_MRT4577_159546C.1
gaccaactagcagcataggaagcacacgtagcgtcccaacaatcggcagccaaaatatataagcctgcttatggctacttggtgtttctgaaagtgctgctactggaaccatttgaccacaaggctcacaagctgctataggttcccttcttcccccatacctctcaccagcagcgtgttcagtatgtgaaaacccaatgcttgcaccctataggatccaacaggctatctcagctggcatacttacctttatacacccttgctgctccaacaatcatcagtcctattacagcagatacactttggtgcattgattggcacaaaacatcagggcacaacaactacaanaacttgtgctagcaaaccttgctgcctactctcagcaacaacagtgtcttacatgcaaccaactagctgcattagactctgcttcttatttgctacaacaacaactacc

SEQ ID NO: 1357 - DNA, 276 bp, Zea mays
  Clone ID: PAT_MRT4577_159559C.1
tgaagctatatctaagatgcacaatatgagcgctgctgacttcacatcagcgcgtacattgattgacgagtatgacctgtatggtctagtggcatactccaagcatcatatacactcagaagttcctgacatttatcgtttagctgcaagacactcaaggggcgtttgtacatgtagctcacttcgaacaatttggagttactctgacagaggctgctatgaatggttagcatataatcgcgacaataaatggaacccctgctgaaattaatcagg

SEQ ID NO: 1358 - DNA, 180 bp, Zea mays
  Clone ID: PAT_MRT4577_159638C.1
ttgatagttcatgatcctcccaactggtgcctcgtcgttcaaggaggccatgagcgtgggaatttaggtttaccacaacctgaagagcataatcaagataaattactgtcaggatgctacaaatgttgtggatgaatgtgtgcttgctctctaacattaaggaaaacaaataaggtcttt

SEQ ID NO: 1359 - DNA, 1342 bp, Zea mays
  Clone ID: PAT_MRT4577_159688C.1
cgcagccgcagcacaatcgcctcgccttccctttcccaccagcccccgtctctctctctcttctctctgactctctctcgtagccgcgtccacctcgcagcagcaagcaagcgcgaccaaatggcgcctctaggagacggcggagctgctgccgcggcggcgtccaacaacctggtggtgtcgttcggcgagatgctgatcgacttcgtccccgacgtggccgggctgtcgctggccgagtcgggcggcttcgtcaaggcccccggcggcgcgcccgccaacgtcgcctgcgccatcgccaagctcggcggagctggacctgggcctggtgcggccgccagggtgttccactacggctccatctcgctcatctccgagccgtgccgctcggcgcacatggccgccatgcgcgcagccaaggccgcgggcgtgctctgctcctacgaccccaacgtgcgcctcccgctctggccgtcgcccgacgccgcacgcgagggcatcctcagcatctggaaggaggccgacttcatcaaggtcagcgacgacgaggtggccttcctcacgcgcggggacgccaacgatgagaagaacgtgctgtccctgtggtttgacgggctcaagctgctcgtcgtcaccgacggggacaagggatgcaggtacttcaccaaggacttcaagggcagcgtgcccggcttcaaggtcgacaccgtcgacaccaccggcgccggcgacgccttcgtcggctccctcctcgtcaacgtcgccaaggacgactccatcttccacaacgaggagaagctccgcgaggctctcaagttctccaacgcctgggggggcatctgcaccaccaagaagggcgccatcccggcgctgcccacggtcgccaccgcccaggacctcatcgccgttccaccacgtcactgtcccccgccgccccgcccctcgtcgtcgacgtcctcggtttcggttcattaggtagatcgagtcttagcgtccgtctctgcgcctctacgctgagacggtttgtttgggttaattaagttagctttcgtggagatttcgccccggggcatcaataaaatgttggcatgcgtggtgggatgctatcctttttttttattttattttattttatttttagcttggatcagttggggttttgaacattgctagtgtcgtgtgattgggaaggctaatgtgatgccttcgatgcagagttttcaatgaatgccttggtgcaaacgtacgattgtgtaataaaaaaaaaaaaaaaaaaaaaaaaaaaaaaaaaaaaaaaaaaaaaaaaaaaaaaaaaaagaaaaaaaaaaaaaaaaaagcggcc

SEQ ID NO: 1360 - DNA, 2220 bp, Zea mays
  unsure (1)..(2220): unsure at all n locations
  Clone ID: PAT_MRT4577_159689C.1
acgaatgactcgtattcccaaatcccaaaaggccaaaaaccatacgccgcccaaatgcaaaagctgaagagggcgggggggcgtccaggttcaatgcatgtacacgaccccccttccgtcttgatctgacctgtgggctgtggcctgtcgctgctacatgcaactgcaatgagacagacggacgcgtggggcaggtcatctctttcaaaccccacacggccacacggcatgtttcaaaggcaggtccagattccagcagctctgagctatagaaaaaacggcttgggggcgaggcggagagaggggtatttgcagtataagtacctttggatcgaagagcatcactcgaagatgcatcgaggactgttcttcttcttcctcaagctgtagcctgtgggaggagaggccggagaggcctcccatggagttcccccactcatcacttcttgttggtcccctgctagctgttcgttccctcagcaggtagctagagatgatcttgctttaattttgtgctgatctcttactcgtcgtgtacgctcatatgcatggggcgacggatttgtctctgatcgttcccatgccgcctcttgtatcttgacttggatctatatatcaatgcaaataaatcatcgatgggtgacaatcgaaaaaaaaaaaaaaaaaaaaaaaagcggccaaaaaaaaaaaaaaaataaccgcagccgcagcacaatcgcctcgcctccccttccccaccagcccgtctctctctctctctcgtagccgcgtccacctcgcagcagcaagcaagcgcgaccaaatggcgcctctaggagacggcggagctgctgccgcggcggcgtccaacaacctggtggtgtcgttcggcgagatgctgatcgacttcgtccccgacgtggccgggctgtcgctggccgagtcgggcggcttcgtcaaggcccccggcggcgcgcccgccaacgtcgcctgcgccatcgccaagctcggcggctcctccgccttcgtcggcaagttcggcgacgacgagttcgggcacatgttggtgaacatcctgaagcagaacaacgtgaactcggaggggtgcctgttcgacaagcacgcgcggacggcgctggccttcgtgacgctcaagcacgacggggagcgcgagttcatgttctacaggaacccgagcgcggacatgctgctgacggaggcggagctggacctgggcctggtgcggcgcgccagggtgttccactacggctccatctcgctcatctccgagccgtgccgctcggcgcacatggccgccatgcgcgcagccaaggccgcgggcgtgctctgctcctacgaccccaacgtgcgcctcccgctctggccgtcgcccgacgccgcacgcgagggcatcctcagcatctggaaggaggccgacttcatcaaggtcagcgacgacgaggtggccttcctcacgcgcggggacgccaacgacgagaagaacgtgctgtccctgtggtttgacgggctcaagctgctcgtcgtcaccgacggggacaagggatgcaggtacttcaccaaggacttcaagggcagcgtgcccggcttcaaggtcgacaccgtcgacaccaccggcgccggcgacgccttcgtcggctccctcctcgtcaacgtcgccaaggacgactccatcttccacaacgaggagaagctccgcgangctctcaagttctccaacgcttgcggcgccatctgcacaacaagaagggcgccatcccggcgctgcccacggtcgccaccgcccaggacctcatcgccaaggccaactagatggccgcacgccccgccgttccaccacgtcactgtcccccgccgccccgcccctcgtcgtcgacgtcctcggtttcggttcattaggtagatcgagtcttagcgtccgtctctgcgcctctacgctgagacggtttgtttgggttaattaagttagctttcgtggagatttcgccccggggcatcaataaaatgttggcatgcgtggtgggatgctatccttttttttattttattttattttatttttagcttggatcagttggggttttgaacattgctagtgtcgtgtgattgggaaggctaatgtgatgccttcgatgcagagttttcaatgaatgccttggtgcaaacgtacgattgtgtaataaaaaaaaaaaaaaggaaaaaaaaaaaaaaaaaaggccccta

SEQ ID NO: 1361 - DNA, 1749 bp, Zea mays
  Clone ID: PAT_MRT4577_159691C.1
atattgtgtagtggtcacctgtccagtttatggcctcaagactagtctaccctgtttgtcacaacatctgccctgaaaaatcatactgcagctgtactggagtggtccgtcccagctgtgatcttcctaaaaaaaaaaaaaaaaaaaaaaaaaaaaaaaaaaaaaaaccgcagccgcagcacaatcgcctcgccttcccttccccaccagcccgtctctctctcttctctctgactctctctctcgtagccgcgtccacctcgcagcagcaagcaagcgcgaccaaatggcgcctctaggagacggcggagctgctgccgcggcggcgtccaacaacctggtggtgtcgttcggcgagatgctgatcgacttcgtccccgacgtggccgggctgtcgctggccgagtcgggcggcttcgtcaaggcccccggcggcgcgcccgccaacgtcgcctgcgccatcgccaagctcggcggatcctccgccttcgtcggcaagttcggcgacgacgagttcgggcacatgttggtgaacatcctgaagcagaacaacgtgaactcggaggggtgcctgttcgacaagcacgcgcggacggcgctggccttcgtgacgctcaagcacgacggggagcgcgagttcatgttctacaggaacccgagcgcggacatgctgctgacggaggcggagctggacctgggcctggtgcggcgcgccagggtgttccactacggctccatctcgctcatctccgagccgtgccgctcggcgcacatggccgccatgcgcgcagccaaggcggcgggcgtgctctgctcctacgaccccaacgtgcgcctcccgctctggccgtcgcccgacgccgcacgcgagggcatcctcagcatctggaaggaggccgacttcatcaaggtcagcgacgacgaggtggccttcctcacgcgcggggacgccaacgacgagaagaacgtgctgtccctgtggtttgacgggctcaagctgctcgtcgtcaccgacggggacaagggatgcaggtacttcaccaaggacttcaagggcagcgtgcccggcttcaaggtcgacaccgtcgacaccaccggcgccggcgacgccttcgtcggctccctcctcgtcaacgtcgccaaggacgactccatcttccacaacgaggagaagctccgcgaggctctcaagttctccaacgcctgcggcgccatctgcaccaccaagaagggcgccatcccggcgctgcccacggtcgccaccgcccaggacctcatcgccaaggccaactagatggccgcacgccccgccgttccaccacgtcactgtcccccgccgccccgcccctcgtcgtcgacgtcctcggtttcggttcattaggtagatcgagtcttagcgtccgtctctgcgcctctacgctgagacggtttgtttgggttaattaagttagctttcgtggagatttcgccccggggcatcaataaaatgttggcatgcgtggtgggatgctatccttttttttattttattttattttatttttagcttggatcagttggggttttgaacattgctagtgtcgtgtgattgggaaggctaatgtgatgccttcgatgcagagttttcaatgaatgccttggtgcaaacgtacgattgtgtaataatgccttctattgatcagcgactccaaaaaaaaaaaaaaaaaaaaaaaaaaaaaaaaaaaagtactctgcgttgttaccactgct

SEQ ID NO: 1362 - DNA, 1610 bp, Zea mays
  Clone ID: PAT_MRT4577_159693C.1
gggtacctcgaggccggccgggatacagagtaaatagcatggccccaccaccgcagccgcagcacaatcgcctcgccttcccttccccaccagcccccgtctctctctctcttctctctgactctctctctcgtagccgcgtccacctcgcagcagcaagcaagcgcgaccaaatggcgcctctaggagacggcggagctgctgccgcggcggcgtccaacaacctggtggtgtcgttcggcgagatgctgatcgacttcgtccccgacgtggccgggctgtcgctggccgagtcgggcggcttcgtcaaggcccccggcggcgcgcccgccaacgtcgcctgcgccatcgccaagctcggcggctcctccgccttcgtcggcaagttcggcgacgacgagttcgggcacatgttggtgaacatcctgaagcagaacaacgtgaactcggaggggtgcctgttcgacaagcacgcgcggacggcgctggccttcgtgacgctcaagcacgacggggagcgcgagttcatgttctacaggaacccgagcgcggacatgctgctgacggaggcggagctggacctgggcctggtgcggcgcgccagggtgttccactacggctccatctcgctcatctccgagccgtgccgctcggcgcacatggccgccatgcgcgcagccaaggccgcgggcgtgctctgctcctacgaccccaacgtgcgcctcccgctctggccgtcgcccgacgccgcacgcgagggcatcctcagcatctggaaggaggccgacttcatcaaggtcagcgacgacgaggtggccttcctcacgcgcggggacgccaacgacgagaagaacgtgctgtcgctgtggtttgacgggctcaagctgctcgtcgtcaccgacggggacaagggatgcaggtacttcaccaaggacttcaagggcagcgtgcccggcttcaaggtcgacaccgtcgacaccaccggcgccggcgacgccttcgtcggctccctcctcgtcaacgtcgccaaggacgactccatcttccacaacgaggagaagctccgcgaggctctcaagttctccaacgcctgcggcgccatctgcaccaccaagaagggcgccatcccggcgctgcccacggtcgccaccgcccaggacctcatcgccaaggccaactagatggccgcacgcccgccgttccaccacgtcactgtccccctcgtcgtcgacgtcctcggtttcggttcattaggtagatcgagtcttagcgtccgtctctgcgcctctacgctgagacggtttgtttgggttaattaagttagctttcgtggagatttcgccccggggcatcaaataaaatgttggcatgcgtggtgggatgctatcctttatttttattttattttattttttagcttggatcagttggggttttgaacattgctagtgtcgtgtgattgggaaggctaatgtgatgccttccatgcagagttttcaatgaatgccttggtgcaaacgtacgattgtgtaataatgccttctattgatcagcgactccaaaaaaaaaaaaaaaaaaaaaaaaaagtactctgcgttgttaccactgct

SEQ ID NO: 1363 - DNA, 334 bp, Zea mays
  Clone ID: PAT_MRT4577_159754C.1
gagttgacttctcctccccctccggttcgttttccggttcgagaggttctccgggggtcggtttcatagataagcggagccagatggcggcctccgatgttcagtaccgctccttcgccggccgcctctcctggaccactgacgaccactcactacacaacgccttcagcacctacagcgaggtactcgagtccaagattatcctccatcgggagacgcagaggttccgccgcttccgcttcgtcaccttatgcacagaagaggcgatgcggaacgccatcgagggcatgaacagcaaggtgctggacgggcgtaacatcaacgacaactaggc

SEQ ID NO: 1364 - DNA, 220 bp, Zea mays
  Clone ID: PAT_MRT4577_159790C.1
gcgtccgattcatccagctagctgctgtgagcccgctgccttctgacacacaacattagtgccgttctactgcacactgcgcctaacgttggcccctcttacaactgcacaattgctgcattcgaccaacttgctttgcaaacccacagtgttctaccaacaacccatattggtgggccctctttagattgctatgagttataggcaataataagttttt

SEQ ID NO: 1365 - DNA, 580 bp, Zea mays
  unsure (1)..(580): unsure at all n locations
  Clone ID: PAT_MRT4577_159876C.1
atgggtnaccctcgggccggccgggatggaaaccacacggccagtccagcactgaacacttgattgattcactgggtagatagctagctgaatcacaatggatcctaccaagttccgaccgtccagtagccacgacacgacaggtgacgacgacgaacgctggagctcctgtggggaacgacaacgaggcgctgactgtggggcctcgcggtgccatcctgctggaggactaccacctgatcgagaaggtggcgcactttgcgcgcgagcgcatgccgcagcgcgtggggcacgcgcgcggcgcctacgacaagggcttgtatgagtgcacccacgatgagacggcgctgacgtgcgccgacttactgcgcgcgctcggagtgcggacgcaccgtgatcgtgcgcttgtcgacggcgatccacgagcgggggtgcccggagacgatccgggacccgcgcgggttccccgtgaggttgtacacccgcgaggacaactgggacctggtgggcaacaacttccccgtcttcttcatccgcgacggcattaagttccccgacgtgatccacgcggtcaagccca

SEQ ID NO: 1366 - DNA, 2067 bp, Zea mays
  Clone ID: PAT_MRT4577_159877C.1
ggagcccccacccccaccgtataccgccggctccagacaaccgattccgttccatcccccctcccccctcgctcgagcgcgaggcttctctcccctcccctcccttctcctccccccccggcgcggattcctacagccagctccctcgccgatcgcggtcccgtcccgagggagaggtgatgataaaggatatctgctgaccaaacttgcagtagttcttcttaaggaaatagaaattggcgtcatgacacatagaaatatgctctggacacatcagtctgttaatcctgaatgggagcaaagacatgtccaagttcaaccaggaagttcctattatgcaggcactgcaagtgatccatccaacctgggtgtgcaagttgctgtgggagttccaggaaatactgctaatgttggtatatgtgatttgcggaatcatgagtgcccgcatgttcataattcatacccacatgccggtgttacatcaagatttgtcttcccaactactatgtacagccctagcatgtcagcagcagctgtcaacatatatattcctcagactcaaagctttggactgggcagtgtgctaccaccatctttacataatcaagtttccacaggaattattgatgagagtagcagcagtgtcaattttggtgatagtgctattggattcatgaaaaggaaaaatgcagtagttgctggaagccataattttcttcatggatttgctgggtcaagttcatctgtccatgtgcctcagaatcctgtgcatggggcatggaatccttcatctcaatcaaattgtttacccagttctgcagcttcaaacctaccagaataccacaatagtaatgggtggccatacttagaagaatcttctgcagatgcttcaaacagtttcagttctgtggctgcttgcccggagctggcacctcatggtaactatttatatccagcttgtcacataagccagtccaatacatgggttccacagcctgcaggttacggagtaccacagtggggatatagtaatgcagtggtcaatcctccagacatgtcaaatgggccactgcctcatttctgccagaatagtatgcaggcacctcaaatacaagtgccccatcaacagtccatcggtaacaatgtggtgcatggtttaaatccttctgccacaggtcttcctttacatccaagaatgctggctctcccattcaatgctgagcacacttttgggcatcaagtgcatccacctctgataaaccaagccaacaatggggctttaagaattctgccatatcagaatgctacagtgatggatcattcaaggatttatgaagcaggacatgttatcgatgaacatagcgatatgcgtttagatgtggataacatgacttatgaggaacttgtagcattgcaagagcagataggcgatgtcaatactggtttgacagaaagctatatccaggaaaacttgaggtccagttttcatgttccaggagcagctagcatgtctgatcagttttctgagctttctttggagaatgatgcttgcataatatgccaggaggagtataaagctaaagaacttataggaacccttgaatgcggtcacaagtaccatgtgaactgcataaagcaatggttgatgatgaaaaacctgtgccccatatgcaagacgacagctttgtcatcagatagaaggaacggatgaccgtcgccaataatgttgttggttgtttaccgcgtggcaaattagcgtggattttgtatatagacatggttgcctttatttgcccgtcccctttgctgtggacataaactgagcttcgaaacactgtacagatattttgtaggatgttttagacgttaaatggcaccatggtgtgtaaagctcccatgactgccttggtagatgccctcttcctttacattgtacattgtatttatctttactcttcaaaaaaagaagcttgaaaaccgtaaaaaaaaaaaaaaaaaaaaaaaaaaaaaaaaaaaaaaaaaaaaaaaaaaaaaaaaaaaaaaaaaaaaaaaaaaaaaaaaaaaaaa

SEQ ID NO: 1367 - DNA, 1979 bp, Zea mays
  Clone ID: PAT_MRT4577_159882C.1
gccggccgggttgggaaaccacactccactccagcactgaacacttgattgattcagtgggtagctagctagctgaatcacaatggatcctaccaaggtgagctcagtatactctgcttcttcttcttccgtcatatcgatctttgatttgagattcgtagctcagtacctgttttgtgttgtttacttgtgttgattttgcttgcagttccgtccgtccagcagccacgacacgacggtgacgacgacgaacgcgggcgctcctgtgtggaacgacaacgaggcgctgactgtggggcctcgcggtcccatcctgctggaggactaccacctgatcgagaaggtggcgcacttcgcgcgcgagcgcatcccggagcgcgtggtgcacgcgcgcggggcctccgccaagggcttcttcgagtgcacccacgacgtgacgtcgctgacgtgcgccgacttcctgcgcgcgcccggcgtgcggacgcccgtgatcgtgcgcttctcgacggtgatccacgagcgggggtccccggagacgatccgcgacccgcgcgggttcgccgtgaagttctacacccgcgagggcaactgggacctgctgggcaacaacttccccgtcttcttcatccgcgacggcatcaagttccccgacgtgatccacgcgttcaagcccaacccgcggtcgcacgtgcaggagtactggcgggtgttcgacttcctgtcgcacctccccgagagcctgcacaccttcttcttcctcttcgacgacgtgggcgtgccgtccgactaccgccacatggaagggttcggcgtgaacacgtacacgttcgtgagcgcggcggggaaggcgcagtacgtcaagttccactggaagccgacgtgcggcgtgcggtgcatcctgacggacgaggaggcggcgctggtcgggggacggaaccacagccacgcgacgcaggacctgtacgactccatcgcggcggggagcttcccggagtggacgctgtacgtgcaggtgatggagccggacacggaggagcagtacgacttcgacccgctggacgacaccaagacgtggccggaggacctgctgccgctccgccccgtggggaggctggtgctggacaggaacgtggacaacttcttcaacgagaacgagcagctggcgttcggcccggggctggtggtgccagggatctactactcggacgacaagatgctgcagtgccgggtgttcgcctacgccgacacgcagcgctacaggctgggtcccaactacctgatgctgcccgtcaacgcgccgcgctgcgcgcaccacaacaaccactacgacggcgccatgaacttcatgcaccgggacgaggaggtggactactacccgtccaggcacgcgccgctgcggcaggcggcgccgcccacgccactgccgcccaggccggtcgcggggaggagggagaaggcaaccatacgcaagcccaacgacttcaagcagccaggggagaggtaccgctcctgggacgccgaccgacaggaccgattcgtgaggcgattcgccgactcgctcggacacccaaaggtcagccaggagctcaggtccatctggatagacctcctcgccaagtgcgacgcgtcgctggggatgaagattgccacccggctcaacatgaaggcaaacatgtgatgcttctgctgaatagaataataatgaagacgcatgcatgtcgtcgccaggaacaagagaaataatacaagaccaccacgcatgggcatactccatatatatatgtatagcccgtgcccgtgtccgcctttgtaccaatacaagccaagactagtggatgtattattattattattattgcgctatcacatacatgtacccctgctacctgaagatggatgtgtatcgagttatcaaattaagacacctgcagcaaaaaactatatatgttgcataaaaaaaaaaaaaaaaaaaaaaaaaa

SEQ ID NO: 1368 - DNA, 2248 bp, Zea mays
  Clone ID: PAT_MRT4577_159884C.1
agcataaaaagaagtacatgtaaaccacacttccactccagcactgaacacttgattgattcagtaggtagctcagctagcctgaatcacaatggatcctaccaagttccgtccgtccagtagccacgacacgacggtgacgacgacgaacgctggcgctcctgtgtggaacgacaacgaggcgctgactgtggggcctcgcggtcccatcctgctggaggactaccacctgatcgagaaggtggcgcacttcgcgcgcgagcgcatcccggagcgcgtggtgcacgcgcgcggggcctccgccaagggcttcttcgagtgcacccacgacgtgacgtcgctgacgtgcgccgacttcctgcgcgcgcccggcgtgcggacgcccgtgatcgtgcgcttctcgacggtgatccacgagcgggggtccccggagacgatccgcgacccgcgcgggttcgccgtgaagttctacacccgcgagggcaactgggacctgctgggcaacaacttccccgtcttcttcatccgcgacggcatcaagttccccgacgtgatccacgcgttcaagcccaacccgcggtcgcacgtgcaggagtactggcgcgtgttcgacttcctgtcgcacctccccgagagcctgcacaccttcttcttcctcttcgacgacgtgggcgtgccgtccgactaccgccacatggaagggttcggcgtgaacacgtacacgttcgtgagcgcggcggggaaggcgcagtacgtgaagttccactggaagccgacgtgcggcgtgcggtgcatcctgacggacgaggaggcggcgctggtcgggggacggaaccacagccacgcgacgcaggacctgtacgactccatcgcggcggggagcttcccggagtggacgctgtacgtgcaggtgatggacccggacacggaggagcagtacgacttcgacccgctggacgacaccaagacgtggccggaggacctgctgccgctcaggcccgtggggaggctggtgctggacaggaacgtggacaacttcttcaacgagaacgagcagctggcgttcgggccggggctggtggtgccagggatctactactcggacgacaagatgctgcagtgccgggtgttcgcctacgccgacacgcagcgctacaggctgggaccaaactacctgatgctgcccgtcaacgcgccgcgctgcgcgcaccacaacaaccactacgacggcgccatgaacttcatgcaccgcgacgaggaggtggactactacccgtccaggcacgcgccgctgcggcaggcggcgccgcccacgccactgccgcccaggccagtcgccgggaggagggagaaggccaccatacgcaagcccaacgacttcaagcagccaggggagaggtaccgctcctgggacgccgaccgacaggaccgattcgtgaggcgattcgccgactcgctcggacacccaaaggtcagccaggagctcaggtccatctggatagacctcctcgccaagtgcgacgcgtcgctggggatgaagattgccacccggctcaacatgaagccaaacatgtgatgcttctgctgaataataatgaagacacgcatgcatgtcgtcgtcaggaacaagagaaataatacaagaccagcacgcatgggcatactctatattatagatggccaaaaagcacgaggcccgtgagcccggcacgaagcccgctttttgggcccggtccgagcacggcacggtagaataagcgggcgggcttgaacaggaaactaggcacggcgggctagcccggcacggcctgtttacctctaagcccgttaaacccgtttttttttacactaaaacgtgcttaccggcccgtttagcccgcttttcggcccgttatttcgtgctaaacgggccggcccggcccgtttaggcccgctgcgggccgggcttggacagaaacttaagcccgctggctcagcaggcccggcccggttttggccgggcttcaccgggcccgggccgggccgggccggcccggcccgtttggccatctctactctatatatatgtatagcccgtgcccgtgtccgcatttgtaccaatacaagccaagcctagtcaagtggatgtgtattattgttgcgctatcacatacatgtacccctgctacctgaagatggatgtgtatcgagttatcaaattaaggcaccagcagcaaacgctatatatatattgcataaaaaaaaaaaa

SEQ ID NO: 1369 - DNA, 2220 bp, Zea mays
  Clone ID: PAT_MRT4577_159885C.1
cctcgaggccggccggggatgtaaatcacactccactccagcactgaacacttgattgattcagtaggtagctagctagctgaatcacaatggatcctaccaaggtgagctcagtataatcttcttcttcctcctccgtcatatcgatctttgatttgagattcgtagctcagtacctgtgttgattttgctttgcgttgcagttccgtccgtccagtagccacgacacgacggtgacgacgacgaacgctggcgctcctgtgtggaacgacaacgaggcgctgactgtggggcctcgcggtcccatcctgctggaggactaccacctgatcgagaaggtggcgcacttcgcgcgggagcgcatcccggagcgcgtggtgcacgcgcgcggggcctccgccaagggcttcttcgagtgcacccacgacgtgacgtcgctgacgtgcgccgacttcctgcgcgcgcccggcgtgcggacgcccgtgatcgtgcgcttctcgacggtgatccacgagcgggggtccccggagacgatccgcgacccgcgcgggttcgccgtgaagttctacacccgcgagggcaactgggacctgctgggcaacaacttccccgtcttcttcatccgcgacggcatcaagttccccgacgtgatccacgcgttcaagcccaacccgcggtcgcacgtgcaggagtactggcgcgtgttcgacttcctgtcgcacctccccgagagcctgcacaccttcttcttcctcttcgacgacgtgggcgtgccgtccgactaccgccacatggaagggttcggcgtgaacacgtacacgttcgtgagcgcggcggggaaggcgcagtacgtcaagttccactggaagccgacgtgcggcgtgcggtgcatcctgacggacgaggaggcggcgctggtcgggggacggaaccacagccacgcgacgcaggacctgtacgactccatcgcggcggggagcttcccggagtggacgctgtacgtgcaggtgatggacccggacacggaggagcagtacgacttcgacccgctggacgacaccaagacgtggccggaggacctgctgccgctccgccccgtggggaggcttgtgctggacaggaacgtggacaacttcttcaacgagaacgagcagctggcgttcgggccggggctggtggtgccagggatctactactcggacgacaagatgctgcagtgccgggtgttcgcctacgccgacacgcagcgctacaggctgggaccaaactacctgatgctgcccgtcaacgcgccgcgctgcgcgcaccacaacaaccactacgacggcgccatgaacttcatgcaccgcgacgaggaggtggactactacccgtccaggcacgcgccgctgcggcaggcggcgcccgcccacgccactgccgcccaggccagtcgccgggaggagggagaaggccaccatacgcaagcccaacgacttcaagcagccaggggagaggtaccgctcctgggacgccgaccgacaggaccgattcgtgaggcgattcgccgactcgctcggacacccaaaggtcagccaggagctcaggtccatctggatagacctcctcgccaagtgcgacgcgtcgctggggatgaagattgccacccggctcaacatgaagccaaacatgtgatgcatcatgcttgtgctgaataataatgaagacgcatgcatgtcgtcgccaggaacaaagatcgagaaataatacaagaccagcacgcatgcatgggcatactctatatatatatatgtatagcccgtgcccgtgcccgcctttgtaccaatacaagccaaaccaagtggatgtgtattattattattattgcgctatcacatacatgtacccctgcctgctacctgaagatggatgtgtatcgagttatcaaattaaggcacagcagcagaaactatatgtattgcataagaatactcgtctcgatatggacatgattccctcagctgctaatttgaagctatatgcttcggaatatctcgtgtatcctcgttgtcttcttctgaatacaactgtgggcaagaagttgattaccatgtcatttttcactggtcgatatttctatggctgcatatatataaaataaaagcgactttgacgtttcgattgtacacgttaccttttattcatttcaatataagtgccagtggtttgcattatttattt

SEQ ID NO: 1370 - DNA, 2062 bp, Zea mays
  Clone ID: PAT_MRT4577_159887C.1
cattgggtacctcgagggccggccggatgtaaaccacactccactccagcactgaacacttgattgattcagtaggtagctagctagctgaatcacaatggatcctaccaagttccgtccgtccagcagccacgacacgacggtgacgacgacgaacgcgggcgctcctgtgtggaacgacaacgaggcgctgactgtggggcctcgcggtcccatcctgctggaggactaccacctgatcgagaaggtggcgcacttcgcgcgcgagcgcatcccggagcgcgtggtgcacgcgcgcggggcctccgccaagggcttcttcgagtgcacccacgacgtgacgtcgctgacgtgcgccgacttcctgcgcgcgccccggcgtgcggacgcccgtgatcgtgcgcttctcgacggtgatccacgagcgggggtccccggagacgatccgcgacccgcgcgggttcgccgtgaagttctacacccgcgagggcaactgggacctgctgggcaacaacttccccgtcttcttcatccgcgacggcatcaagttccccgacgtgatccacgcgttcaagcccaacccgcggtcgcacgtgcaggagtactggcgggtgttcgacttcctgtcgcacctccccgagagcctgcacaccttcttcttcctcttcgacgacgtgggcgtgccgtccgactaccgccacatggaagggttcggcgtgaacacgtacacgttcgtgagcgcggcggggaaggcgcagtacgtcaagttccactggaagccgacgtgcggcgtgcggtgcatcctgacggacgaggaggcggcgctggtcgggggacggaaccacagccacgcgacgcaggacctgtacgactccatcgcggcggggagcttcccggagtggacgctgtacgtgcaggtgatggacccggacacggaggagcagtacgacttcgacccgctggacgacaccaagacgtggccggaggacctgctgccgctccgccccgtggggaggctggtgctggacaggaacgtggacaacttcttcaacgagaacgagcagctggcgttcggcccggggctggtggtgccagggatctactactcggacgacaagatgctgcagtgccgggtgttcgcctacgccgacacgcagcgctacaggctggggcccaactacctgatgctgcccgtcaacgcgccgcgctgcgcgcaccacaacaaccactacgacggcgccatgaacttcatgcaccgcgacgaggaggtggactactacccgtccaggcacgcgccgctgcggcaggcggcgccgcccacgccactgccgcccaggccggtcgcggggaggagggagaaggcaaccatacgcaagcccaacgacttcaagcagccaggggagaggtaccgctcctgggacgccgaccgacaggaccgattcgtgaggcgattcgccgactcgctcggacacccaaaggtcagccaggagctcaggtccatctggatagacctcctcgccaagtgcgacgcgtcgctggggatgaagattgccacccggctcaacatgaagccaaacatgtgatgcatcatgcttgtgctcaataataatgaagacgcatgcatgtcgtcgccaggaacaaagatcgagaaataatacaagaccagcacgcatgcatgggcatactctatatatatgtatagcccgtgcccgtgtccgcctttgtaccaatacaagccaaaccaagtggatgtgtattattattattattattgcgttatcacatacatgtacccctgctacctgaagatggatgtgtatcgagttatcaaattaaggcaccagcagcaaaaactatatatgttgcataagaatactcgtctcgatatggacatgattcactcagctaatataaccctccaacaaattctataagatcctctcgctcctcagtctatggttgaatactcttatattcatcccaatcaacggattaaattggattgaggtgtaatttagggggtgtttggttcgtaaagattaattttagtccgtctcttttt

SEQ ID NO: 1371 - DNA, 365 bp, Zea mays
  Clone ID: PAT_MRT4577_160252C.1
ttatactcctatacctttctgcgaccggctttacaggaaccatgtccccgcaatgctcgcaagctactatagcttcccttcttcccccctacctctcaccacctgagtcttcggtatgttaaaacccaattcttcaaccctacaagatccaacaggcaatcacagctggcatcttacctttatcaccctttatccctacaacaatcatcaaccctattacatcacttaccttctatgcattaattgtcacaaaacattagcccacaacaactacaacaactttgtctaacataccttgctacctactctcagcaacaacactttctttcattcaaccaactagcttcatttaactctgcttctta

SEQ ID NO: 1372 - DNA, 397 bp, Zea mays
  Clone ID: PAT_MRT4577_160263C.1
cttaagattaacttagaataaagcctgacgggggtcacagcatgcatggatccggagtccatgctgttggatgcacgggtctgctggagccgaggatgaacacaggactaacatctgacacagagcgaccttgcaatcaaaaacacagatgggcaacaacaaacacgagacgaacgaagataaaccctctggactagggtaaacatcacggcagtgaacaggataactgggccgggcgggccccaccgctcagttgctccagttaccgtgggagttgcggtagccgtcgtcacggttgccacctgcgaagccggcgtcaccaccaccgtagccgtcgccgtcaccgtagtcgtcgacaccgccgtagccgtcgtcgacatcacggtgcccggcaccg

SEQ ID NO: 1373 - DNA, 365 bp, Zea mays
  Clone ID: PAT_MRT4577_160335C.1
gtgcaccacctagatgcaccactttttttccttaggatcgaacttataataaagcctgacgggggtaacaagccccatcgatccgcagtccatgctgaccgatgcgtgggtctgctggtaaccgtaggatgaacacattactaacaactgacacagggcgaccttgaattaaaaacacagatgggcaacaacaaacacgataccaacgaccataaacactctgtactatggtaaacaacacggaagccacacaggataactttgtcgaccgggccccaccggtcattttctccagtgcccgtctgagttgccgtatccgtcgacacagtagccaccgccgtagccgccggaccaccatcttattc

SEQ ID NO: 1374 - DNA, 1079 bp, Zea mays
  Clone ID: PAT_MRT4577_160418C.1
ccgggtatgaccgccccttctattcccttcctgctgtgaacaccctccacgcgtccgagtttttttgtcgtctggtcgtaaaaaagttgttgtgcttctcgtttcaccgtgcgccacaagcacacaactagggcgaccgccgccgacctacggccagctgtgcccatgtcttcgtcgggccctttgctggcgacgggaacccaccacaccggccgccaacctgaggttttgtgggctcagcgctccgagaagattttcttgactatctcattgccagatgcgaaagatgttgtgttaaagaccgatcctaagggcctctttaacttctctgctgttgtccatggggaaccttttagcttcactttggagctttttgattcaatactgtcagagggaagtaaaacgaagacaaagatgggcctgcgaaacataatctgctcaatccagaaagaaaagaaaggttggtggaagcgcttgctaaagtcagaggaaaagcatccatacatcaaagttgactggaacaaatggtgcgatgaggatgaagagtctgagttctctggggattcagatggtggctttgatgaggcaaatgaaggagatgaaagtgatgatgatgatgggatgctttatctccccgaccttgaaaagctaaggggcaagtgatctggctgcttcggtgaagggagtagggttgatgtaacaagttaccgttgacgtgacagagtaggcttatcatcgacgtagttggggtcttacttgctgagcatctgcgacggcttgagacttttaggcatgtcttctatctccgaagcactctttcggtctttcctgatcagtgagctagcgctctgaaaacgtagcgatgagctgtcccattttcgactaactatttagtgccagtgaatggcctaattctacaactatcacgatgtgcctatatgttaggggattatggattctgtggtccgtctttgtggtatgggatttccgttggcaggcaggccagtgtgatatgcagttcacttcgtttaaaaaaaaaagcggccaaaaaaaaaaaaaaactgagactagtctcgtgc

SEQ ID NO: 1375 - DNA, 1844 bp, Zea mays
  unsure (1)..(1844): unsure at all n locations
  Clone ID: PAT_MRT4577_160568C.1
ccggccgggccggggttcacacaccgtcgcgagctagctagccacaccacaccttcctcctcactcccaattccatatagttcctctgcccacgcgcgcacaaaggccatggcgacgacgcggcctcgcggtgggggtggggcggcgagcggcgcgctggtcatggcgatcgtcgtgctgctgctactgccgccatatggagccggcgcggaggagtgcgaggacggcggcatcagcagccgggcgcgcgcgggcgaccgcgtggaggcgctgccggggcagccggcggtggcgttcgcgcagtactccgggtacgtggcggtggaccgggaccgcggccgcgcgctcttctactggctcaccgaggccgtcggcgacgacgcggccgccaagcccctcgtgctctggctcaacggaggtcctggatgctcgtcggtggcgtatggagcgtcggaggagatcggcccgttccggatcaaaccaaacgggacaggcctgttcctcaacaagtactcatggaacagagaggcaaaccttctgttcctcgagtcgcccgcgggagtcggcttctcctacgccaacaccacctcggacctcaagacgtcgggcgacgagaggaccgctcaagacgcgctgcagttcctggtcagctggatgtcacggttcccgcagtaccggcaccgagatttctacatcgccggagaaagctacgcgggccactacgtcccccagttggcaaggaagatcgtcgagtacaacgaggcctcgcctcaccccttcatcaacctcaagggaatccttgtgggcaacgcggagaccggcaactactacgacaacatcggcacggtcacctactggtggacgcacgccatgatctccgaccgcacctacaaggccatcctcaggtggtgcaacttcagcagcagcagcatctcccgcccctgcaaccgcgccatgagctacgccatgaaccacgaattcggggacatcgaccagtacagcatctacacgccgtcgtgcgccgccgcnnnggccagggccaacgccaccgtgctcaggttcaagaacaccctcgtccgccgccgccgctcctccggctacgacccctgcacggagacctacgccgagaggtactacaacaggatggacgtgcagagggcgatgcacgccaacaccacggggatcccctacagatggactgcctgcagtgatgtgctgatcaagacatggcaagattcagagttctccatgctgccgacgtacaagaagctgatgaaagcaggactgaggatatgggtgttcagcggcgacacagattcagtcgtcccggtgaccgcgacgaggttcgccatcagtcatcttggtctgaagatcaagacccgctggtatccatggtactcagctggacaggtaggaggatggtctgaggtgtacgaagggctcacgtttgcgtcggtgagaggcgcagggcatgaggtgccgttgttccagcccaggagggcgttcaggatgttccggtcgttcttggccggggagccattgcccaagtcctgaaggttcctgacatgtgactgaggcnnnnnnnnnnnnnnnnnnnnnntctagctacggtcctcacggaaatgtagaagacgggtgagaaggtgccgttccccaggtagagaatgacttgttgataggcgcgcagttcatagctgaggagtgattgattggtctcgggagaaggatgtagagaataataaggatggctatgttatgccatggaaacccatgagccattgcaaaatgattnaagcgaataatttcagtgtctcctctcaagtgcttatgttatgttatgttat

SEQ ID NO: 1376 - DNA, 1383 bp, Zea mays
  Clone ID: PAT_MRT4577_160779C.1
tcaacaagggcggccgggatcaccacattcggcataaccgcacgccttcccgttgtccatttgctccacgggccagcctgccggcgccgccactgcaaagtccgtacacacagacacacaacgcacgtcaccgccatgtctgccgccactgcttgcatgcccctggtccttgatccgtctcctctccatggatcggcggcaatggcagatgccgttgagaggcggcagcccggtggcatggagaccaccaagaccggttccgagggaacgctcggccgcgtcgtcaggagccaagtgtttggcaacgaggacgacgaccgtgctgggcacggcgacggcgacgaggtgagcaagccgcgggcggtggtccacacactgacgtgcgagcgcaagccattgttcgagggcttcgcgctctggcggagcatcggcaggcctgagcttcccgaactggatccaatcttatcgttcgacgaattcgagttttctgctccagctggcttccttgaccatcctcacaggggatttgagaacgttacctatatgctcgaggctgcttcaggcggcatcagttaccacgacttttcaggccacaagggaaccatcaacccaggagacgttcagtggctgacggcggggcgcggcgtcgtgcacgcggagatgcccgccgccggccagggagtacagaggggcatcaacatctggatcaacctctctgccgccgacaagatggtggagccgaggtaccaggacctggcgagccacgacatccccgccgccgcggcggacgccgctggcggcgtctccgtcaaggtcatcgcgggcgagtgcctcggcgcgcgctccccgctccggccccgcaccccggcgctgtgcctcgacgtcgccctgcggcccggcgcgcgcctgcgccagcctgtcccgcgcgggtggagcgcctgcgcgtacgtcatccacggcgaggccgccttcggcactgcctccggcgagggtaacggcgcctccacggctaccgcgcgcacgctcgtcgtgttcggtggcgacggcgacggcgtggagctgcggggcgatgcagcgggccagggcgcgagggtcatgctggtcgcagctcggtcgcacggcgaggcggtggcgcgggacggccccttcgtcatgaatacccgggaggaggtggaccaggcgcgggaggactaccgccaccgccgcaacggcttcgagatggccgacggctggacctccgatcacgcctccgcagctgaaaagcattcataggatacacctaccttaggctagtcgcgcgcggatgcaactgtgtaaggctttatatgtagtttgatttccatcaataatccacaagttttatttccaaaaaaaaccccaaaa

SEQ ID NO: 1377 - DNA, 1547 bp, Zea mays
  Clone ID: PAT_MRT4577_160794C.1
ctcgaggccggccggggcagcttcagccaccaagagaccagggctgaactgctgaagctgagataggattgagaatcgctgccagtggaaagcggcactagcagcagggcagaagcaagaaccagcaagaaaggggagagagaaagcggaaggactttttctcggattggatccttcgcttttgggggaaggagaaggcccctctctgtcctctctccatccttgcggagggcgctagcaggagcagcggaaggaggaagagatgttcccgcctggcctgatccaccaccgccctgacgcccccgttcccggcgatggggcgacacgctccggccccggcgggccgagccttgtactgacggcggaccccaagcccaggctgcggtggacggccgacctccacgagcgtttcgtcgacgccgtggcccagctcggcggacccgagaaagcaacaccaaaaactatcttaaggacaatgggcgtcaagggtcttactctttttcacttgaagagccatcttcagaaatacagattagggaaacaatctggtaaggagggatcagagcaatctaaagatgcatcctatcttctagatgctcaaagtggaatgagcgtgtcccctagagttcctgcccaggatatgaaagaaagccaagaagttaaagaagcactgagagcgcagatggaagtccaaagaagactgcatgaacaagtggaggtccaaaagcgcgtgcagatcagaatggaagcgtttcagaagtacatcgacagtatcctggagagcgcgtgcaagatggtcaccgaacagttcgcttcaagtggcttcagcatctctgaccctgatctcccggagatatcccctggaggggtggtcatgtgtggcggccccacggacacgttgagctcgtcggtgttcaaccagctttccgtcagctccatcggctcgcacagtccaggaggcaaaccttccccttccccatcaggcatggaatgtccgccgctgctcctccacaagtcgcatgagctcaagcggaggtcctcttgaactgacaaatcggcgaagcctgagggcgcggtgatggctgtctttgctagtgttgtcggatatggtggtactggtggtgacaagggaaattggtggtccagtcttgtggtagctgactttctccaggtagcaagatattgctgtgtttgtttgatcagtcaaagcatcaaacagacagacctacgttcatgtgaactgcctcatgcatgtgctagattgaaaaaaaaagttatcatattttgtcatgagattatgattctactagctagcatccttagcacacttgagatgttgttgactcgtgtcctagtgtcctctgtgttgatccatgtatgcacagcgattcatgttgggagttgggactgggacatgttaacaccagatgtttcaagcttcgtacttaaaaaaaaaagatgtggacatgcatgcagcaggcatcccagtactacacctgctgttgaacttgaacactactgtattcagcctatgaatgattcatgct

SEQ ID NO: 1378 - DNA, 1986 bp, Zea mays
  unsure (1)..(1986): unsure at all n locations
  Clone ID: PAT_MRT4577_160925C.1
gacaacaccaaaaggacaagcctcgcccctccctccctccctccctccctttccaatcctcagaaccaataaaccgtagacgagagaagttacgagcttctccttgtcccgtgtcttttcaaggatagcccgggcgcagccgcagcatttcttggcgtcggtgtccgcgggttggcgactaagcaatggcgacgaggaaccaccgcgccgctgccgctccgcagccggcgaacagaggtgccgcgagggtcgccgggaaacagaaagccgccgccgccgggacacgccgagccctcggtgacattggcaacgtcgtctccgatgccctcgacagggcgatcaagctgccggaggggatccatcgccccatcaccaggagcttcggcgcccagctcatgaaggccgctttggcgaacaagaacgccgacgccgccgtagctcctgctcagcctgtagcggcgcgcgccgttacgaaaccagctaggaaagtgactacgaagaacgtccctcgtcctggcgctgggcaggctcccaaggagaacaagaagccatcagcagagggtgccgccgccggcagcggccgctctgtgcagaagaacaggaggaagaagcccgcgtgcacgctttcgaccgtcctttctgcgcgttctaaggctgcctgtggccttaccgagaagccaaaggagcccatcgaggacattgacaagttcgacggcgacaaccagcttgctttggtggactacgttgaggacatctacacattctacaagaccgcccagcatgagagccgccccattgactacatgggcaaccagcccgagctcagccccagaatgcgctccatcctcgcggactggctcatcgagtctcaccgaagattccagctcatgccggaaacgctctacctcacaatatacatcgtggaccggtacctgtcgctgcagcccacgccgaggagggagctccagctcgtcggcgtggcagcgttgctgatcgcctgcaaatacgaggagatctgggcaccggaggtaaatgacttaatccatatagccgatggcgcgtttaaccggagccagattcttgccgccgagaaggctattctgaacagcatggagtggaaccttacggtccccaccccgtaccacttcctgctgcggttcgcgaaggctgccggtagtgctgatgaacagcttcagcatacgataaacttctttggagagctcgcgctgatggactacggtatggtgatgaccaatccttcgacggcggctgcttgcgctgtgtacgctgctcgcctcacgttggggaggagtcctctctggacagagaccttgaagcaccacactggcctcaacgagcagcagatcatggaaggcgccaagacactggtcggatctcatgctgctagtgctagccctgatggcgaggctgaaggccgtctaccagaagtacgccacggagcagtttgggcgtgtggctctgcacccaccggcaccgactgctcttcccgaccttgtctagagtttttacttgacaagctgagggatttggttgagttcgctttgattgacaagttcgagagttgtttcgtatactctattctcgcgagtgtattagacactagtagtaacaactattcataactatatgaataaccacaatgaaaatttatgattggctgaacttctttcgaaagactgtgaggtatttccacagttttgtaagactgtcagaatgaaacggtcttgattaaaaagagctgtctgccaactgcatgaagaagctccgtcttcgacgtgaaataagtaggacggcgcggctgcttcggtgagccgtgccacgggatcgggagctccaaaaaaaaaaaaaaaaaaaaaaaaaaaaaaaaaaaaaaaaaaaaaaaaaaaaaaaaannnnnnnnnnnnnnnnnnnnnnnnnnnnnnnnnnnnnnnnnnnnnnnnnnnnnnnnnnnnnnnnnnnnnnnnn

SEQ ID NO: 1379 - DNA, 386 bp, Zea mays
  Clone ID: PAT_MRT4577_160953C.1
atctacgggcacagcacatcagggcacaacatctacaacaacttgtgctagcaaacctgtgctgggtactctcagcatcagcgggttgttacattcaaccaactaggaccatggaactatgcttctaatgcgcaacttcttcaactacaattcagacaactacctgctgcataccgtgagcaatttcttgcattcaaccacctaacagcattgaactctgctgcttacatacagcaactacaactactaccattcaaacagctagctggcgtaagccctgctaccttcttgacacatccacagtcgctgccgatctaccatcacgttgtagcctaacgctggcacgctattacaagtgcaacaatcgctgccattcaaccaacttg

SEQ ID NO: 1380 - DNA, 291 bp, Zea mays
  unsure (1)..(291): unsure at all n locations
  Clone ID: PAT_MRT4577_160962C.1
cgnctccacagcaacccgtatcgtcttctccgtcttgtccggttcgggtggtccgcggtcggggtcagtgagtgagcaggtttgcttctccatctccccgttcccttccctccgcagcgccccggcccggcggcggtgcgtgaccctgacgccgcagcgctacctatctcgccggaatcgcacgtggcggcgcgcgagctgagagcacaggagcacctgaccggctcgggcaggcgaccgccacaaaagaccgcgggagagcagctgtggagactgcggcggcggcggcac

SEQ ID NO: 1381 - DNA, 369 bp, Zea mays
  Clone ID: PAT_MRT4577_160976C.1
cgtccgtagacacacacaaacagagcgggaagagtaaataccacactcctaccgtcctacgtagagtaggaaggactcgagatggacaccgtcatggtgcccgtggtggccgatgcaaatggtatcttaaaggtgcagcgcacggtgcctgtatagctactgggaggagcactccaagtgcctgactgacgattacatgatgctcgactccctagccgccgacctcaacacggaagagcgaccctacattctgtctttggttccctcttacaaagggacatcaagtctaaaacttggtgctgttataggaccctctactggacatctggcaaaagaagctggagacgttgtgtcactagactttattga

SEQ ID NO: 1382 - DNA, 328 bp, Zea mays
  Clone ID: PAT_MRT4577_161126C.1
cgatcctctgcgggtcattcttactggggaccggattcgttgctttcttgcttccatctcatgttggaggactgagagagggagttgtaatttcaaataccagctagaggactgtcactcagctgttaagctggtatataatgggtggctgctgccgctgttggtgcataacatctgaagcagttagagcacgagcacgagcagatatatatgatcaacaatatgttgacgagcaggaatcatgggcttcaatttttgatggatcatattcagcctctgcaattgttgcattatacacaaatatggatactttcacacctgacacata

SEQ ID NO: 1383 - DNA, 2550 bp, Zea mays
  Clone ID: PAT_MRT4577_161280C.1
gggcgagagagcggaagcgacccagcagcgaagcgacgactagctctgcggcctctgcctgccccaagcgccgacgatgggtgccggtgctactgccagggacgaggaggctgctaccggccgccaccatgggaggaagccgcatggcgcggcggcggagtacgcgcaggacgggtccgtggacctgcgcggcaaccccgtgctccgctcccagcgcggcggctggaccgcctgctccttcatcgtcggtacgtagcgcgtgcgggcggtgtgccggtgtgtgtgtcgactgtcgactagctacttcctgtttcactcttgctcttgtcgttgcccgcccctcctcggtagagatggatgaaccgcgcgaatggacgatacggccgggcgcctgatgcggtgtgtggtgcatgcatgcagtgtacgagctgttcgagcggatggcctactacgggatctcgtccaacctcatcatctacctgacggacaagctccaccagggcaccgtcgaggcctccaacaacgtcaccaactggtccggcaccgtcttcctcacgccgctgctcggcgcctacgtcgccgacgcctacctcggccgctactggaccttcgtcgtcggctccgccatttacctgctggggatggtgctgctggtgctgtccgtctcggtgccggcgctgaagccgccgccgtgcggcgccggcggcgtgtgcccgcaggcgtcggcgctgcagctcggggcgtacttcggcgggctctacatcgtggccctgggcaacggcggcaccaagcccaacatctccaccatcggggcggaccagttcgacgagttcgacccgcgggagcggacgcacaagctgtccttcttcaactggtggatgttcaccatcttcctgggcatcctcttctcctccaccgtcctcgtgtacctgcaggacaacgtgagctggtccgtgggctacggcatccccacgctgggcctcatggtctccatctccgtcttcctcgccggcaccaggctgtaccgccacagggtgccgcagggcagcccgttcacgagcatgggcagggtcctggccgccgcgctctggaagtggagcgtcccggtcccggccgacgccaaggagctgcacgagctggacgtcgaggagtacgccaggaagcgtaggttcaggatggactccaccgacgccatggccttcctcaacaaggccgccgccgtggccgtgcccagcggcgggccggcgtcgacgccggcgtggagcctctgcacggtgacccaggtggaggagacgaagcagatcctgaggctggtgcccctcctggtggccatgatcgtgccctgcacgctcatcgcgcagaccaacacgctgttcgtgaagcagggcacgacgatggaccggcacatgggcccgcgcttcgagatcccggcggcgagcctgggcgcgttcgtgacgctgaccatgctggtggctgtggtggtgtacgaccgggtgttcgtgagggccgtgcggcggtacaccaaggacccgcgcgggatcacgatcctgaggcggatgggcacgggcatgctgctgcaggtggcgaccatggcggtggcgtcggcgatcgagagccggaggctggcctacgcgcggagccacggcctggacgccacggggggccagctggggctcaccatcttcgcgctgctcccgcagttcgtgctgatgggcctggccgacgcgttcctggtggtgggcaagatcgagttcttctacgaccaggcgccggagagcatgaagagcctgggcaccgccatgtccctcaccgcgtacggcatcggcaacttcctcagcagcttcctgctgtccacggtcacgcgcgtcacgcgggaccgcggccacgcctgggtcaccaacaacctcaacgcctccaacctcgactactactacgccttcctcaccgcgctcggcgccgtcaacttcgtcgccttcctcgcgctcagcgccaggtacaggtacaaggcccagtccaccgacacgatcgacgctgccgtcggcctggggaccgagaaagccaagcttcaggcggagccactgggctgacgtcgacgacgacgacggggtgcgtctgcctctgctgttaaaagcggagaagatcagccatgaatgcgtatcgtccaaggcgacgtgtgtatggtagcatcaactcacttgtaaaaaaaaagcacaggatttccacccgaaaccaaaagcagtgtctgcagtatcaactcccttgtaaaaaaaagacagtccatgatctttcatttcattcacacgcaaaaaaaaagagtatagatcgatccaaaaaaaaaaaaaaaaaaagcctctacatgcacggtttttagctcgtagtatgtagtacgtactgtgattgtgaccatcaactgaactctccacgcatgcagctagacggagcaagtactgttcttcagacagattcgcatggtgcatctgtagcatgcagtgactggcattcaaaaatacagtagtttcatcgtgacgatcggtagcattcaaaacaccc

SEQ ID NO: 1384 - DNA, 757 bp, Zea mays
  Clone ID: PAT_MRT4577_16136C.1
ggatctagactactacacgaatcacgaacgcgtccacctgcgcgcatcgccacgcaggttctctccaccaaaccttaacctccccttccagaaaccctccaagaggcagctcaaaggaatagtgagccgccccgccgctcctcagccatcctctccatctcggtgtcacacactccgcatacgcacctacgagagtcgagtgacagcgagcgagcgagcgagcgaagccatggctctccgcaccctggcatcgaagaacgccctatccttcgcgctcggcggcgcggcccggccgtcggcggcgtccgcgaggggggtgacgacggtcgcgctccccgacctctcctacgacttcggcgcgctggagccggccatctcgggggagatcatgcgcctgcaccaccagaagcaccacgccacctacgtcgccaactacaacaaggcgctggagcagctcgacgctgccgtcgccaagggcgacgcctccgctgtcgtccagctccagggcgccatcaagttcaacggcggcggtcatgtgaaccattcaatcttttggaagaacctcaagcctattagcgaaggtggtggggagccgccacatgggaaacttggctgggccatcgatgaggattttggttcatttgaggcacttgtaaagaggatgaatgcagaaggcgctgctttacaaggatctggatgggtgtggttagctttggataagaggcaaaaaactttcagttgaaactacagctaatca

SEQ ID NO: 1385 - DNA, 303 bp, Zea mays
  Clone ID: PAT_MRT4577_161386C.1
ccggccgggccggggctgccttctccctcatctcccgttccatttccccatctccacagatccgattcgcgagtgctccctcctctgccggcatggaggtctctgtgtgagaagacctcctgtggacgggagtacaatgtcaaggatctctcacaagaggacttccgccgcctccagattgagctcggtcgaggtcgaaatgcccggcctcatggcgtgccgcgtcaagatcggaccgtccaagaccttcatcgacgataggatctcaatgtctctccacatgaccatccacaccagcgacct

SEQ ID NO: 1386 - DNA, 269 bp, Zea mays
  Clone ID: PAT_MRT4577_161406C.1
ctggctaatcttgactgctcggaggaagttggatgctatcgaggagaaggatcgagggctcgatgagtaagacgggtttctggtgtcgatctgcttctgagtttttttttctttacatatcactgcgaactcgtagttgtcctttggttatcagccaaaccaccctattagctccaataatgccttctctcaacatgtgatgctacaattccacatgctttgtacatctgtatacagctagctctaagtgggcagccgctttataccca

SEQ ID NO: 1387 - DNA, 282 bp, Zea mays
  Clone ID: PAT_MRT4577_161669C.1
catttctcagatccaattcgccagttctgcgtcgtgtgcggtcatggtgctctctattgaaaacacctgggctggacgggagtacaaggtcaaggatctgtcccaggcggacttacgccgcctcgagattgagctggccgaggtcgaaatgcccagccttatggcgtgccgcacctagttcagcccgaccaagcccttcgccagcgctaggatctccgggtctatccacatgaccatccagaccggcgtgctcatcgagaccctcagcaggctcggcgccta

SEQ ID NO: 1388 - DNA, 1547 bp, Zea mays
  Clone ID: PAT_MRT4577_161720C.1
ctcgaggccggccgggggcccgcgcctcgctctctcttgtctcgcccgctagctcccatcccagcctcccaccgcgcccgcctgccccaacatcccccctccccgctccgctccttggcagaaaatggcgatgatggtggatccccccaatggcatggcaagtcaaggaaagcattactatactatgtggcagacactgtttgagatcgacaccaagtacgtgccgatcaagcccatcggaagaggagcttacggaatcgtttgctcatctgttaaccgcgagaccaatgaaaaagtcgcgataaaaaagataaacaacgtctttgacaaccgtgtggatgcgctaaggacgctgagagagctgaaactccttcggcacctgaggcacgagaatgttattgctctcaaggacataatgatgcctgcgcatagaaggagcttcaaggacgtttacttggtttatgagctcatggacactgatctgcatcaaataattaagtcatctcaaccactatccaatgaccactgccagtatttcctttttcagctgctccgaggcccgaagtacctccattcagccgggatactccacagagacctaaagccggggaacctcctggtcaacgcaaactgtgacctgaagatatgcgacttcgggctcgcccgcacgaacaacaccaagggccagttcatgacggagtacgtggtgacccgctggtacagggcacccgagctgctgctctgctgcgacaactacggcacgtccattgacgtctggtctgtggggtgcatattcgcggagctgcttggccgcaagccgatcttcccaggaaccgagtgcctgaaccagctcaagctcatcgtcaacgtcctcggcaccatgggcgaggccgacctcgcgttcatcgacaacccgaaggcccgcaagtacatcaagtcccttccgtacgccccgggcgcccccttcaccggcatgtaccctcaggcgcaccctctcgccatcgacctgctgcagaagatgctcgtgttcgacccgtccaagaggatcagcgtcaccgaggcgctggagcacccgtacatgtctccgctctatgacccgagcgcgaaccctcccgcgcaggtgccgatcgacctcgacatcgacgagaacctcggcgtcgacatgatcagggagatgatgtggcaggagatgatccactaccaccccgaggtcctcacgagaatcagcatgtgagtatgtgatgtgaccagacaggcagcaatgaaacatgtggacagaggtctgctgcgccaggatcatcacatgttcgcccttcttacgagcttaactgcgattacggcaccgagtcgaggtatcactacatgtatcggaaccgtcgggcggtctcttgtgtaaatatgcgctgaataagatgtgtggcaatctcttgttttttggttgtacatggacctcgctgttgtacgagtctgtgaagtggaaccctggtactaagacctgtaatttcagaccctaatctgttgtatggaaatctgaaggccttgactcg

SEQ ID NO: 1389 - DNA, 1797 bp, Zea mays
  Clone ID: PAT_MRT4577_161721C.1
cattgggtacctcgagggcggccgggtgggcggctcccggcccgcgcctcgctctctcttgtctcgcccgctagctcccatcccagcctcccaccgcgcccgcctgccccaacatcccccctccccgctccgctccacgcacggctccagatctgctacggcggcggccggtggacgccgcgccgcgcgtgccggaggcggtgacgtgagcggcggatcctgcccggccgtgccatcctggcgacgatgacagcgtaagcgggcggcggacgaccgcgcccccccggcccctactcccgaggtcattggcgtgtgctccttggcagaaaatggcgatgatggtggatccccccaatggcatggcaagtcaaggaaagcattactatactatgtggcagacactgtttgagatcgacaccaagtacgtgccgatcaagcccatcggaagaggagcttacggaatcgtttgctcatctgttaaccgcgagaccaatgaaaaagtcgcgataaaaaagataaacaacgtctttgacaaccgtgtggatgcgctaaggacgctgagagagctgaaactccttcggcacctgaggcacgagaatgttattgctctcaaggacataatgatgcctgcgcatagaaggagcttcaaggacgtttacttggtttatgagctcatggacactgatctgcatcaaataattaagtcatctcaaccactatccaatgaccactgccagtatttcctttttcagctgctccgaggcctgaagtacctccattcagccgggatactccacagagacctaaagccagggaacctcctggtcaacgcaaactgtgacctgaagatatgcgacttcgggctcgcccgcacgaacaacaccaagggccagttcatgacggagtacgtggtgacccgctggtacagggcacccgagctgctgctctgctgcgacaactacggcacgtccattgacgtctggtctgtggggtgcatattcgcggagctgcttggccgcaagccgatcttcccaggaaccgagtgcctgaaccagctcaagctcatcgtcaacgtcctcggcaccatgggcgaggccgacctcgcgttcatcgacaacccgaaggcccgcaagtacatcaagtcccttccgtacgccccgggcgcccccttcaccggcatgtaccctcaggcgcaccctctcgccatcgacctgctgcagaagatgctcgtgttcgacccgtccaagaggatcagcgtcaccgaggcgctggagcacccgtacatgtctccgctctatgacccgagcgcgaaccctcccgcgcaggtgccgatcgacctcgacatcgacgagaacctcggcgtcgacatgatcagggagatgatgtggcaggagatgatccactaccaccccgaggtcctcacgagaatcagcatgtgagtatgtgatgtgaccagacaggcagcaatgaaacatgtggacagaggtctgctgcgccaggatcatcacatgttcgcccttcttacgagcttaactgcgattacggcaccgagtcgaggtatcactacatgtatcggaaccgtcaggcggtctcttgtgtaaatatgcgctgaataagatgtgtggcaatctcttgttttttggttgtacatggacctcgctgttgtacgagtctgtgaagtggaaccctggtactaagacctgtaatttcagaccctaatctgttgtatggaaatctgaaggccttgactcccaaaaaaaaaaaaaaaaaaaaaccgatcgcgatctagagcgggct

SEQ ID NO: 1390 - DNA, 335 bp, Zea mays
  Clone ID: PAT_MRT4577_16178C.1
aaaaaaaaaaaataaaaaaaaaaaattaaataaaaaaaaaaaaaaaaaaaaaaaaaggaagggtaaaaaaaaaaaaaaaaaaaaaaaaaaaaaaaaaaaaaaaaaaaaaaaaaaaaaaaaaaaaaaaaaaaaaaaaaaaaggggcgccccttttaaagaacccaactttacttccccttcatttcaaaataaaagcttttttaaagggcccccaaatttaaattaattgccctttttttaaaaacttcgaaattggaaaaaccttggttttccccaatttaatccctttggaaaaaatcccccttttccaaattggcttaattacaaaaagcccc

SEQ ID NO: 1391 - DNA, 2375 bp, Zea mays
  Clone ID: PAT_MRT4577_161959C.1
ttgggggtaaccccgggccgtagttgtaggccttccacttcgcctcctcttctctctctcccccgtctcctgtctccacctgttccatcgcattctcctcccaccaccaccacaccaggcctcgcttatccccccccccccgagacccgacccctgctcgacgacgtgctggcaaaacctcctcctagtcctctcgcagaaggaggctgtgttcttttcttcatcggcgcggcaacagcgaaagcttctcggtctctcccaccgctgctccgccgtttgggtggttccgcgccttggccgcgcgggttggatccgagctccgtgcagcagctccgccgcgatacgtatcgcataggattccactggattcagctgctgagcagggtactggaaggtggatttgatactagctctgaacagccagtagaatttctcaaatactgtccaggatcatggcttctctctgtgatttctgtgggaaacaaaggtcaatgatctactgcagatcagatgcggcatcattgtgcttatcatgcgaccgtaatgttcattcagctaatgcactgtctcgacgtcatacaaggacccttctttgtgatcgttgtggttcacagcctgcatcagtccgatgtcttgaggacaacgcatcactttgccaaaactgtgactggaatgggcatgatgcagaatcaggggcttctgggcataaaaggcaagccataaactgctactcagggtgcccatcatctgcagagctttcgagaatctggtcatttattactgatatcccgactgtagcagctgagcccaactgtgaggatgggctaagcatgatgacaattgatgacagtgatgtgactaatcatcacggtgcttcagatgataaacgattgttggaaatagctaacacagcactcatgagtgatccaccttcacccgacaagcttaaatctccgacaggctcttcttctggagatgggtttgatgttatgactctagccacagatcagcctgctggaccagtttcagcaacgcctaaggtacctaatgccagagatgatgataagttcaatgatggcatgtacgaagacttgtgtgtagatgatgctgaccttacattcgaggattatgaagagctatttggtacctctcacattcgaacagaggaactctttgatgacgctggaattgacggttacttcgaattgaaagagacaccacctttttatttcaacgagcagcccaaagctatgcagatagaatgtggcaacgtggtatcagctgattgtgcgatgtcaaacccaggggcaagggctgattccagcctttgtattcccgtcaggcaggtcagatctagtatatcccactccttatctggtctgactggtgagagcagcgctggagatcaccacgactgtggggtgtcaccaatgctcctcatgggtgagccaccctggcattctcctggtggtccagaaggctcagtcgctggaggcagcagagatagcgctctcacacggtacaaggagaagaagaagaggagaaagtttgacaagaagatcagatatgcttctcgcaaggctagggcggacgtgaggaagcgggtcaagggacggttcataaaggccggtgaagcgtacgactatgatccgctaagccagactagaagctactgagccttgggagtgtgactgttgttgtcgtccagtgtcagcctcgcaatctccagccgctcgtcggttgcaggctgcgctacaggcaagatcactggagagcacaacgatcgcattgcatcagagcctgcatctgaaaaaacgttaagaagagataccaagtgttgggatgaatgaaaaaaaaaagacaaaaaagaaagatgcagacttgccggactcatatccattattcagtttctctgcggatgagtggcttggatcgcactgtgccatctgcgcgtcgaacagatgcagtgatggatgggcgctcgtcgtcctccagctgtaccgctgtgcgctaggacctgcgtcggctatatacggctgttcggcagtgagctgccaggttgtacagtctgggtaacagcctaacagggtatgcttatacctctcggttttcgttctgtaatacgtacgtattgtttgcgcttgccaggagactgttcttcggccgtgtgtatgtttgtagatggttgcaacattggtaaaaaaaaaagtagccgtcgtgaatgtaaatttgtattcttgttaggtcgcatatagcgttggcgatgagcaggagaatcacacgtatctggacactgaacgacccttgtaactatttttgcgccagaataaccttcttgtgccttgtcgtttaaaaaaaaaaaaaaaaaagcggcc

SEQ ID NO: 1392 - DNA, 1623 bp, Zea mays
  Clone ID: PAT_MRT4577_161960C.1
cctcgaggccggccgggaaaaaaaaaaaaaaaaaaaaaaaaaaaaaaaacgtcctcttccagtctccactctccacgtgttccatcccattctcctccccgcgccccgtccccctcgcctcgcttatcccccggacccggccgacccctgctctgctcgacgtgttggcaaaacctcctcctagtcctctcgcagaaggagcttgttttctttaccggcgcggcaacagcaacagcgaaagcttctcgatctctctccccgctgctccgccgctgggtacggtggttccgcgcctcggacgcgcccgtgcgggttggttggatccgagctctgtgcagaagcgccgccgcgacacggtcgaattccactggatccagctgctgaacggggtaccagaaggtggatttggtagtagcactgaacagcgagtggaatttctctaatactgtccaggatcatggttcctctctgtggtttctgtgggaaacaaaggtcaatgatctactgcagatcggatgcggcatcattgtgcttatcatgcgaccgtagcgttcattcagctaatgcactgtctcggcgtcatagaaggacccttctttgtgatcgttgtggtttacagcctgcatcagtccgatgtcttgaggacaacacatcactttgccaaaactgtgattggaatgggcatgatgcagcatcaggggcttctgggcataaaaggcaggccataaactgttactcagggtgcccatcatcagcagagctttcgagaatctggtcatttattatcgatatcccgactgtagctgctgagcccaactgtgaggatgggctaagcatgatgacaattgatgacagtgatgtgactaatcatcacggtgcttcagatgataaacgattgttggaaatagctaacacagcactcatgagtgatccaccttcacctgacaagcttaaacctctgataggctcttcttctggagatgggtttgatgttctgcctctagccacagatcagcctgctggaccagtttcagcgacacctaaggtaccttatgccagagatgacaataagttcaatgatggcatgtatgaagacttatgtgtggatgatgctgacctgacattcgagaattatgaagagctattcggtacctctcacattcgaatagaggaactctttgatgacgccggaattgacagttactttgaaatgaaggaaacaccgccttttgatttcaatgagcagcccaaaattgtgcagctacaatgtagcgatgtggtaccagctgattgtgcgatgtcaaacccaggggaaagggctgattccagcctttgtattcctgttaggcaggtcagatctagtatatcccatcccttatctggtttgactggtgagagcagcgctggagatcaccaagactgtggggtgtcaccaattctcctcatgggcgagccaccctggcattctcctggtccagaaggctcattagctggaggaagcagagatagcgctctcacacgatacaaggagaagaagaagagaagaatgtaagcacgtttaaatgtctgcttgaggttgttctgcgcttaacattcatagatcgtggctatctttttaaggca

SEQ ID NO: 1393 - DNA, 326 bp, Zea mays
  Clone ID: PAT_MRT4577_162088C.1
taaaagcaacacaagacgaaaacagagagccagcaaagcaamcccarggmcwttgrggkgctgctctgctagsgtagtacgtgctamagcatgtcacgtacgaggtacacgasgacgacgacgacgaacggrgggacactaracgaataatcactagtgggtscatraycwacttctttattatktcccaccctgatgacacacacgtagcwaggacaycyctscaacgacgacgactgcatgcggckgagggccacgtacgcggccayccaacgagcgascaaccyccactatggttccatcgatcagttgatcttggtgcagtc

SEQ ID NO: 1394 - DNA, 545 bp, Zea mays
  unsure (1)..(545): unsure at all n locations
  Clone ID: PAT_MRT4577_162166C.1
ccgggncgacccagcgnccggcagccctcccccacaccaagccggggggggggctccctcaagaccggnncgggnggnccgcggncggggngagngagngagcagcnnngcnncnccaacnccccgnncccnncccnccccagccccccggcccggcggcggnacgngacccngacgccgcagcgcnagcnagcgggggggaacggcaggnggcggcgcgcgaccngagagcacagcagcaccggaccggcncaggcaggcgaccggcagaaaagaaggcgggagcagcagcngnggagacggcggcggcggcggcagcggccaacggaaaagcgngcngccacgccgccaaggggcccgggnacgccacgccgcnggaggccanggagaagggccccagggagaagcncgncnacgncaccngcgncaacaacggcacnggaannaacaagccggannaccnngcgacggnggannnggancccagcncnccaacanacncccaggnganccacaggcncccggncacccacancggcgacgag

SEQ ID NO: 1395 - DNA, 1801 bp, Zea mays
  Clone ID: PAT_MRT4577_16218C.1
cgtgggtagctagctaggtgaatgacaatggatcctaccaagttccgtccgtccagcagccacgacacgacggtgacgacgacgaacgctggcgctcctgtgtggaacgacaacgaggcgctgactgtggggcctcgcggtcccatcctgctggaggactaccacctgatcgagaaggtggcgcacttcgaccgcgagcgcatcccggagagggtggtgcacgcgcgtggcgcgtccgccaagggcttcttcgagtcgacccacgacgtgacgtcgctgacgtgcgccgacttcctgcgcgcgcccggcgtgcggacgcccgtgatcgtgcgcttctcgcaggtgatcccagagccggggtccggacggacgatccgagacgcgcgcgggttcgccgtgaagttctacacccgcgagggcaactgggacctgctgggcaacaacttccccgtcttcttcatccgcgacggcatcaagttccccgacgtgatccacgcgttcaagcccaacccgcggtcgcacgtgcaggagtactggcgggtgttcgacttcctgtcgcacctccccgagagcctgcacaccttcttcttcctcttcgaccacgtgggcgtgccgtccgactaccgccacatggaagggttcggcgtgaacacgtacacgttcgtgagcgcggcggggaaggcgcagtacgtgaagttccactggaagccgacgtgcggcgagcggtccatcctgacggacgaggaggcgcgcgtcgggggacggaaccacagccacacgcaggacctgtacgactccatcgcggcggaggggagcttcccggagtggacgctgtacgtgcaggtgatggacccggcacagcaggagcagtacgacttcgacccgctggacgacaccaagacgtggccggaggacctgttgccgctccgccccgtggggaggctggtgctggacaggaacgtggacaacttcttgaacgagaacgagcagctggcgttcgggccggggctggtggtgccagggatctactactcggacgacaagatgctgcagtgccgggtgttcgcctacgccgacacgcagcgctacaggctgggtcccaactacctgatgctgcccgtcaacgcgccgcgctgcggcacccacaacaaccactacgacggcgccatgaacttgatgcaccgcgacgaggaggtggactactacccgtccaggcacgcgcgccgctgcggcagggcggcgcccacgccactgccgcccaggccggtcgcggggaggagggagaaggcaaccatacgcaagcccaacgacttcaagcagccaggggagaggtaccgctcctgggacgccgaccgacaggaccgattcgtgaaggcgattcgccgactcgctcggacacccaaacgtcagccagagctcaggtccatctggatagacctcctcgccaaggtcgacgcgtcgctggggatgaagattgccacccggctcaacatgaaggcaaacatgtgatgcttgtgctgaatagaataataatgaagacgcatgcatgtcgtcgccaggaacaagagaaataataacaagaccaccacgcatgggcatactccatatatatatgtatagcccgtgcccgtgtccgcctttgtaccaatacaagccaagactagtggatgtattattattattattattgcgctatcacatacatgtacccctgctacctgaagatggatattgtatccagttatcaaattaagacacctgcagcaaaaaaactatatatgttgcataagaaaaaaaaaaa

SEQ ID NO: 1396 - DNA, 806 bp, Zea mays
  Clone ID: PAT_MRT4577_162288C.1
tgggacctcgagcggcggggccggtgcacaggaaatctctatccacagacacacaagcagccagtgcagtagtagcccggtatatagagagtgtagcacgattatacaatatatcacagagctagctagttagtatatacgtactatatatatagtctattgctcgctagcttgctgaatcaagctgaactatatagtaagagactaattaaagagctattagccacagcgcgtgatccacgattaatggaggacgacaagaaggagggcaagtaccgcggcgtgcggaagcggccgtggggcaagttcgccgcggagatccgggacccggagcgcggcggctcccgcgtctggctcggcaccttcgacaccgccgaggaggccgccagggcctacgaccgcgccgcattcaccatgaagggcgccacggccgtgctcaacttccccaccagcggaggatcagctgccgcggctcccggcggccggaccagcggcggcggctcctcctcgtccaccacgtcgtcggctccggccagcagggggagggcccgtgttcccgactcggagaaggtggagctggagtgcctcgacgacagggtcttggaggagctgctcgcggaggacaagtacaacaagaactaatgaaacgctagctgatgcacaacatacatatgttggtagtagccttattagccgccgcaacgcgctgctagctagagctagctcttcgctgccgcttccagtaaattatatttaagggagacagaactatattaactttaatatactatactcactacccaatt

SEQ ID NO: 1397 - DNA, 3239 bp, Zea mays
  unsure (1)..(3239): unsure at all n locations
  Clone ID: PAT_MRT4577_162559C.1
gttcttcctcccgttcttcccttgcttccccgtcgcgctgttcaacgttcaaacccttacacctcctcctcccttggccgcgcagtcgccattgacgacccgaccccctctcactctcccctcccttaaatccctcctctccccgcgtccttctccccatcaacgcttcattcgctccagtctcatcgaatccaattcacagccagccagacagggcgggagatctccaagaagctatcttggaatccgagaacaccttgcattcgcggtcagtcaaggattcgaattctgacggacgagctctccggccaaaaaagtcagataattttcgggatagctcgggtggcgtctcggcaaccggaggagaccccggggggattaaggaaggggcaagatggtgaggctgccttacacaacggcgctgaccacgctgttcagctacgggctgctcttcgccttcggccagctcagggatttcttccgcaagttcgtcgactggttcaaggccaagaacgcaaggtacgcagggcggccggccggccggccgaattccgcctccccgcacccggatccgggagattccgtcccaatttttcttggtatttctgattcagcgtttggcttcatacagggctacgcgccgatctgcctggngcctggaggatttctatgtgcgagcgagttatctccggctcgaacccgtactcctcaagcaaaaccactggaggagcaccaagagttatctccggctcgaacccgagccaggtcctgactcctgatccgcaccgcacacggcaagggggcatagccgacgggccgtcagcggcgagacccaagccaacacagcccagcgatgtcggcgcgtgaccgcgagacggccgaggcgctggtgcgcctcgccgcctcgctggacggggcggtgctcggcctcggcacggctgccgtcgccgtcgcgtcgtgggtcaagtacctcgccgtctcggggcagctacgcctcgtcgcctccgcgacgacggcctccatcgccgacgcccactccctcctctcaggcgacggcgccgagccgcggatcgccgcggtgcggggctacgtgcgggcccatgacaagttcttccgggccccgttctcaggcgaggcgggcgtcgtcacgaagcacacccagatgtgtttgttcacagaatggagaggcatctttggatggacctttgatctgcatgctcttcttttcagatcatggaaagagcaaattgtgacgtcttttagatcggttccatttgttctggttagtactgaattaggaaatcctacgggagtggtacatataaatgtggataaggcggatcaaccgttgcctcttactacagtgtttcataaacttatcccacttgagacgactccttacacattgtttcaaactattattggcaacggctatccgattgcgttgttggatgaagaaaaaatactaccgattggtaagaaaattacagcaataggactatgtcaagcaaaggatgcagaaagtgttgagataacatcgtgcccagagtccccttttttcttatctgaactaaccaaggatgagatgcaagctcagctggcttcacgtgctaggatactcttctggggtagtattgttttgggaaccttgtcggtttgcctagtgggccatgccatttacaggggctggacgagaatcaaactacgaagagaggctaggcatgcacgacagatgtttgaggaggctgaagatgctattcacagggatgactctagtgatgatgatgaaataggagacgggcaactatgtgttgtgtgcttaaggaagagaaggagggcagcttttattccatgtgggcatcttgtctgctgttccgaatgcgcattaacaatagagcgtacacctcatccattgtgccctatgtgtcgtcaagacatcagatacatgatgagggtttatgactcttgaggtatgctgctgataagatctacacgcttccttgctgacccatgcaaacctgaggagcacaactgttcgtcctgctgggcgttttcctagtcaaggtggcctaccctggatttgtgaatataatgtcttgaccctccaaattatgctcttgattgcctgggacaaatagcttagctgaagtcatgaactaacgtagagttattttttgtttgctttgcgcatatgtctatccatcatgtaaagcacagggtttactgcaaataggttaaagatttggacattttctgccatctgatcgtcacctctagtgctgtggaagaggttgcaaaaaaaaaaaaaaaaatgctgctcgtcgtgatgaacgcaatgctgttcctgctctacggtaacctggcaccagataacagcggtgtcggagccttatgcttgccagcggataacatcgccgaagcgtgaagtcttgttctgatgctggctgcgtggtgtttggtttgctagaacagtggtgtccactctacgccgaatcattgagaaactttcgtgttagcaaactgtaattttagaacaggcgtagagtggagtttttaaaactctaaactggctgcctggtgaatgctgttctagcaattctatggttttactaacgtagagttattttttgtttgctttctacatatctctgtccatcatgtaaagctcagggtttactgcaaatagtttaaagattaaaacattttctgcgttagttcatgacttcagctaagctatttgtcccaggcaatcaagagcataatttggagggtcaagacattatattcacaaatctagggtaggccacctagactaggaaaacgcccagcaggacgaacagttgtgctcctcaggtttgcatgggtcagcaaggaagcgtgtagatcttatcagcagcgtacctcaagagtcataaaccctcatcatgtatctgatgtcttgacgacacatagttgcccgtctcctatttcatcatcatcactagagtcatccctgtgaatagcatcttcagcctcctcaaacatctgtcgtgcatgcctagcctctcttcgtagtttgattctcgtccagcccctgtaaatggcatggcccactaggcaaaccgacaaggttcccaaaacaatactaccccagaagagtatcctagcacgtgaagccagctgagcttgcatctcatccttggttagttcagataagaaaaaggggatctctgggcacgattttttttttcnccggccgg

SEQ ID NO: 1398 - DNA, 283 bp, Zea mays
  Clone ID: PAT_MRT4577_162639C.1
agaagaaggatttgctcacgggcacctacatgccttccacctccctcaccggcatctaccgcgtcatcacgtacctggacccctccgagcacatacacactaaggcgaagcagctgcacttcaccctcatgcgctcccgcaatgacgacgttatccctaccttccgctccaacttcttctcgctcttcgccaccgcggatgctgagcatgccaagggtggcaaggccgagttcaacaagctcaacgacgttacttccttcgacttcatcggcgatgcctactt

SEQ ID NO: 1399 - DNA, 1698 bp, Zea mays
  Clone ID: PAT_MRT4577_162655C.1
cccgttcctctctatctcacacacaggcacaccgagtagaaggcggcagttgccagccagcacaagcagagcgcaacccgtgggcggcagcggcacgcaatggtgtcggagaggcagcaggcggcggggaaggtggccgccttcaacctcacggaggccgggttcggcgacgggtcggacctgctggacgacgacgggcgcgagaggcgcacggggaccctggtgacggcgagcgcgcacatcatcacggcggtgatcgggtcgggcgtgctgtcgctggcgtgggcgatcgcgcagctggggtgggtgatcggccccgtggtgctgctggccttctccgccatcacctggttctgctccagcctactcgccgactgctaccgcgcgccgccgggccccggccagggcaagcggaactacacctacggacaggccgtcaggtcatacctgggggagtccaagtaccggctgtgctcgctggcgcagtacgtcaacctggtgggcgtcaccatcggctacaccatcaccacggccatcagcatgggggcgatcaagcgttccaactgcttccacagcaggggccacggcgccgactgcgaggcgtccaacaccaccaacatgatcatcttcgcgggcatccagatcctgctgtcgcagctccccaacttccacaagctctggtggctctccatcgtcgccgccgtcatgtccctcgcctactcctccatcggactcggcctctccatcgcaaagatcgcaggcaagctcatgcatggcagctactgtacgtacgttctatctctcattctgagtcgagacttttaattgactgcaggtggggtgcacgttaagacgtcgctgactggtgccgccgtgggggtggacgtcaccgcggccgagaaggtctggaagacgttccagtcgctgggggacatcgccttcgcctacacctactccaacgtgctgatcgagatccaggacacgctgcggtcgagcccgccggagaacgtggtgatgaagaaggcgtccttcatcggcgtgtccaccaccaccgcgttctacatgctgtgcggcgtgctgggctacgcggcgttcggcagcgacgcgccgggcaacttcctcacgggcttcggcttctacgaccccttctggctcatcgacgtcggcaacgtctgcatcgccgtgcacctggtcggcgcctaccaggtcttctgccagcccatctaccagttcgtggaggcctgggcgcggggccgctggcccgactgcgccttcctccacgccgagctcgccgtcgtcgccggctcctccttcacggccagcccgttccgcctcgtgtggcgcaccgcctacgtcgtgctcaccgcgctcgtcgccacggtcttcccattcttcaacgacttcctggggctcatcggcgccgtctccttctggccgctcaccgtctacttccccatccagatgtacatggcgcaggccaagacgcgccgcttctcgccggcgtggacgtggatgaacgtgctcagctacgcttgcctcttcgtctcgctgctcgccgccgcgggctcagtgcaggggctcgtcaaggatctcaagggatacaagccattgttcaaggtctcctaaataagggactgctgcatggcatgtgtgcgatgatcgattggaacactgttagttatacattagctagctgca

SEQ ID NO: 1400 - DNA, 267 bp, Zea mays
  Clone ID: PAT_MRT4577_162693C.1
cgatgaccaactagcaacatagaaagcacaatagtgtaccaacaatggcagccaaaataatttggcttcctaatgctccttggtcttcctgcaattgctgctacggcgaccattttcccgcaatggctcgcaagctccctatagtttcccttcttccccggtacttctaaccaggggtggtcttccggtaatgtgaaaacccaattcttcaaccctacaggatccaccaggcattcgaagttggaatcttacctttataacccttgt

SEQ ID NO: 1401 - DNA, 253 bp, Zea mays
  Clone ID: PAT_MRT4577_162739C.1
aggccacagagacatcacatgccctatttctttttctttcgcaggaaatccatagttgttgccattagcaaaacgtgtgtttcaccttgggaccaggcggacgaactcacgtatttctaattaaacattgaatttgggcactcctcttgtacaggtaaaacctcgaagagggtaatttttggggtgcattaccgtgctgctattcaggtaacatgctaattactactgttcctgggagcaaaaataaactgcc

SEQ ID NO: 1402 - DNA, 1922 bp, Zea mays
  Clone ID: PAT_MRT4577_162877C.1
cggacgcgtgggcgagttgtccgccccgcccctcgctttcgtccccgttttccggtgccttgcttccccctcctcactcaaatgcctcacaggccgaggctccgaggccgcggggaggaggaggagcggcagccagcaggggaggaggacacgaatcgtagtcggcctcccgcccgccccggcaattgttgttgctgctgcgcgcagggcggttctggattgcggtctgccccacccacgaacaatccatggctccatctccgcctcggcgtgctgcgctcctcctcgccacggtgcttctgctggcggcggccgggtccacccccggcgccacggctgctggcatcttccaggtgcgccgcaagttcaccgccggggtgggagggggtgctggcgccaacatcagcgcccttcgcgcccacgatggcacccgtcacggccgcctcctcgcagccgccgacctccctcttggcggcctcggcctccccactgacactggcctctattacacggagatcaagctcgggacgccacccaagcactactacgtccaggtcgacaccggcagcgacatcctctgggtcaactgcatcacctgcgagcaatgcccccacaagagcgggctcgggttagacttgacgctttacgaccccaaggcatcctcgaccgggagcatggtgatgtgcgatcaggcattctgtgcagccacctttggcggaaagctgccgaagtgcggcgccaatgtgccctgcgaatatagtgtcacctacggtgatggtagctcgacgataggttcctttgtcaccgatgcgctgcagtttgatcaggtgactagggatgggcagacacagccggctaatgccagcgtcattttcgggtgtggtgctcaacaaggtggggatttgggaagttcaaaccaagcccttgatggaattcttggttttggtgaggcaaatacatcaatgctatcacaactaactaccgctggtaaagtgaagaagatatttgcccattgtttggataccataaaaggaggtggaattttttctattggggatgtggtgcagccaaaagtaaaaacaacgccattggtagccgacaagccacactacaatgtgaaccttaagacaatcgatgttggtggcactactctacaactcccagctcatatttttgaaccaggagaaaaaaagggtaccataatcgacagtggtaccaccttgacataccttccagaattggttttcaaagaagtaatgctcgcggtatttaacaagcatcaggatataaccttccatgatgttcaaggttttttgtgtttccaatatcctggaagtgtagatgatggattcccaaccatcacattccattttgaggatgatcttgcactacatgtgtatccccatgagtactttttcgcaaatgggaatgacgtatactgcgtgggattccaaaatggtgcatcacagtcaaaggatggaaaggacattgtgcttatgggagatcttgtcctttccaacaagttggttatctatgacttggaaaatcgagtcattgggtggactgactacaactgttcgtcgagcattaaaattaaggacgacaaaacgggcgcaacatctactgttaattcacatgacttgtcctcaggatggaagttccactggcacatgtccccggttctattgttggtaacaacggtgtgcagttatttaatatgctaactccactgtacaggaaatccatctggttcgtatatcctttccacgaaaaggatcggagagatgtagggctatctttaggttgtgttctcccaccacggaaaacaatggaaatagaaaaacactgtaatgctttactgagccattgtttaactaggtaatgctgaggtgaggtaatgttctgtcatttctttgggaaaa

SEQ ID NO: 1403 - DNA, 1444 bp, Zea mays
  Clone ID: PAT_MRT4577_163021C.1
cagacgcattgggtacctcgaggccggccgggactcaaacaaactcaagcctgccctgccctgccttgttaagcaaagcaacccagctgcgagacacgagagctagctagagagagatggcggccacggtttcctccttcccggtggtgaacatggagaagctggagacagaggagagggccacggccatggaggtcatccgcgacggctgcgagaactggggcttcttcgagctgctgaaccacggcatctcgcacgagctgatggacgaggtggagcggctgaccaaggcgcactacgccaccttccgggaggccaagttccaggagttcgcggcccggacgctggaggccggcgagaagggcgccgacgtcaaggacgtggactgggagagcaccttcttcgtccgccacctcccggcctccaacctcgccgacctccccgacgtcgacgaccgctacaggcaggtgatggagcagttcgcatcggagatccggaagctgtcggagaggctgctggacctgctgtgcgagaacctgggcctggagcccgggtacctgaaggcggccttcgcggggtcggacggcccgacgttcggcaccaaggtgagcgcgtacccgccgtgcccgcgcccggacctcgtcgacggcctccgcgcgcacaccgacgccggcggcatcgtgctgctgttccaggacgaccaggtgagcggcctgcagctgctcaggggcggggaagggggggacgtgccggccatccgccacgccatagtcgccaacgtcggcgccgggctgggtgtgatcaccaccgggccgtgcacgggcgtcatgcaccccgtgctcacgcgccccgatggccaccgcatgtccggcccgtcctgccccaacccgcgcgccggagccctggtacgccggggccccgcgctcgtcggcgccgcccaggagcggcgcggcgaggccccgcacccgcgcttcgtgctcgaggactacatgaacctgtacgtgcgccacaagttcgaggccaaggagcccaggttcgaggccatgaagtcggccatcgccaccgcgtgagagaagactgccttccgctgcgggcttccttcgtggcgtcaagccttgaggcttgaacgaacaacgtacgtccatgtgcttatagtggcacagttatgtgtgtaactaccgatcgtggaacggcctaatgtatttcggttgcctcagatcgatctatatgtgcgtatacattatgtactgaaaagtgtgtagcgtctggttaatgtatgagcagtgtgtatgtgaccgggacccggtgtgtagttgctattactaccatatccggtgaatgatcaaaccttttggtgtattaaaaactagatgttcatccaaaaaaaaaaaaaaaaaaaaacaataaaaacaaaaaaaaaaaaaaaaaaagggggactctttgc

SEQ ID NO: 1404 - DNA, 1368 bp, Zea mays
  Clone ID: PAT_MRT4577_163023C.1
tgcctgcatcactgactgtcaagctgcaacccactgcgagctagtgagtgtgagagacgagagttagagagcgagatggcagccacggtttcgttcccggtggtgaacatggagaagatggagaccgaggagaaggccacggccatggaggtcatccgcgacgcctgcgagaactggggcttcttcgagctgctgaaccatggcatctctcacgagctgatggacgaggtggagcggctgaccaaggcgcactacgccaacttccgggaggccaagttccaggagttcgcggcgcggacgctggaggccggcgacaagggtgccgacgtcaaggacgtggactgggagagcaccttcttcgtccgccacctcccggcctccaacctcgccgacctccccgacgtcgacgaccactacaggcaagtgatgaagcaattcgcatcggagatccagaagctgtcggagaagctgctggacctgctgtgcgagaacctgggcctggagcccggctacctcaagtccgccttcgctggctccaacggccccacgttcggcaccaaggtgagcgcgtacccgccgtgcccgcgcccggacctcgtcgacggcctccgcgcgcacaccgacgccggcggcatcatcctgctgttccaggacgaccaggtcagcggcctgcagctgctcaaggacggcgagtgggtggacgtgccgcccatgcgccacgccatcgtcgtcaacatcggcgaccagctggaggtgatcaccaacggccgctacaagagcgtcatgcaccgcgtgctcacccgccccgacggcaaccgcatgtccatcgcctccttctacaacccgggcgccgacgccgtcatcttcccggcgccagcgctcgtcggcgccgccggcgccgaggaggagcgcgccggccaggccaggtacccgaggttcgtgttcgaggactacatgaacctgtacgtgcgccacaagttcgaggccaaggagccacggttcgaggccatgaagtcggccatcgccaccgcgtgatgaacaaacacactgctgccttcaattctgctccttgtcccttcgtgtcctgcattatgctttgagcttgaagccttgatgaggctgcaatgaacagtgtccatgtgcttatatgtagtttggcacggtggttatgcgtgtatcgtggaacggcgtaatgtattttggttgtctcggatctatatgtatgtacgtatatattgagtactgtatgtaaagtgtgtgtagcatctgatccaatgtatgagcagtgtgtacgtgaccaggacctgatgtgctgctattactaccacctcaagtggagggaacatgaattattagtagttctcatac

SEQ ID NO: 1405 - DNA, 1316 bp, Zea mays
  Clone ID: PAT_MRT4577_163024C.1
gccggccgggtctcgacaaaagcttggcctgcctgttaagcaacccggcgagcgaggtggtgagagaacgagcgagagggagatggcagccacggtgtccttcccggtggtgaacatggagaagctggagaccgaggagagggacacggccatggcggtcatccgcgacgcctgcgagaactggggcttcttcgagctgctgaaccatggcatctcgcacgagctgatggacgaggtggagcggctgaccaaggcgcactacgccaccttccgggaggccaagttccaggagttcgcggcgcggacgctggccgcggccggcgacgagggcgccgacgtcagcgacgtggactgggagagcaccttcttcgtccgccacctcccggcctccaacctcgccgacctccccgacgtcgacgaccactaccggcaagtgatgaagcagttcgcatcggaggtgcagaagctgtcggagaaggtgctggacctgctgtgcgagaacctgggcctggagcccgggtacctgaaggcggccttcgcggggtcggacggcggcccgacgttcggcaccaaggtgagcgcgtacccgccgtgcccgcgcccggacctggtggccggcctgcgcgcgcacaccgacgccggcggcctcatcctgctgctccaggacgaccaggtgagcgggctgcagctgctcaggggcggcgacggcggggagtgggtggacgtgccgccgctgcgccacgccatcgtcgccaacgtcggcgaccagctggaggtggtcaccaacgggcggtacaagagcgcggtgcaccgcgtgctcgcccgccccgacggcaaccgcatgtccgtcgcgtccttctacaacccgggcgccgacgccgtcatcttcccggcccccgcgctcgtcggcgaggaggagcgagccgagaagaaggccaccacgtacccgaggttcgtgttcgaggactacatgaacctgtacgcgcgccacaagttcgaggccaaggagccccggttcgaggccatgaagtcgtcggccatcgccaccgcgtgagcacataatactgccgtgttctcccttcgtggggtgcatatgcttgagcttgaagagccatgtgcttgtatgtagtggcacgtacggtggttatgcgtgtatcgtggaatggcgcggcgtgatgtattttggttgtctcagatctaagtgtgtgcgtatatattgtgtactgtaaagtttgcagcgtctgattaatgtacgagcagtgtgtgtacctaaccagaaaaaaaaaagtagctggctgtgtgctgatattactacc

SEQ ID NO: 1406 - DNA, 1398 bp, Zea mays
  Clone ID: PAT_MRT4577_163025C.1
tcgaggactggatagggggattggactcctcgaggccggccgggactcaaacaaactcaagcctgccctgtcctgccttgttaagcaacacagcgagacatcacgagagctagagagagatggcggccacggtttcctccttcccggtggtgaacatggagaagctggagacagaggagagggccacggccatggaggtcatccgcgacggctgcgagaactggggcttcttcgagctgctgaaccacggcatctcgcacgagctgatggacgaggtggagcggctgaccaaggcgcactacgccaccttccgggaggccaagttccaggagttcgcggcccggacgctggaggccggcgagaagggcgccgacgtcaaggacgtggactgggagagcaccttcttcgtccgccacctcccggcctccaacctcgccgacctccccgacgtcgacgaccgctacaggcaggtgatggagcagttcgcatcggagatccggaagctgtcggagaggctgctggacctgctgtgcgagaacctgggcctggagcccgggtacctgaaggcggccttcgccggggtcggacggcccgacgttcggcaccaaggtgagcgcgtacccgccgtgcccgcgcccggacctcgtcgacggcctccgcgcgcacaccgacgccggcggcatcgtgctgctgttccaggacgaccaggtgagcggcctgcagctgctcaggggcggggagtgggtggacgtgccgcccatgcgccacgccatcgtcgccaacgtcggcgaccagctggaggtcatcaccaacgggcggtacaagagcgtcatgcaccgcgtgctcacgcgccccgacggcaaccgcatgtccgtcgcgtccttctacaacccgggcgccgacgccgtcatcttcccggcccccgcgctcgtcggcgccgccgaggaggaccgcgccgaggccgcgtacccgagcttcgtgttcgaggactacatgaacctgtacgtgcgccacaagttcgaggccaaggagcccaggttcgaggccatgaagtcggccatcgccaccgcgtgagcaaagactgacttccgctcccggcttccttcgtggcgtcaagccttgaggcttgaacgaacaacgtacgtccatgtgcttatagtggcacagttatcgcgtggaacggcctaatgtatttcggttgcctcagatcgatctatatgtgcgtatacattatgtactgaaaagtgtgtagcgtctggttaatgtacgagcagtgtgtatgtgaccaggacccggtgtgtagttgctactactaccatatccggtgaatgatcaaaccttttggtgtattaagggggtgtttggtttctagggactaatttttagtccctacatttt

SEQ ID NO: 1407 - DNA, 1304 bp, Zea mays
  Clone ID: PAT_MRT4577_163140C.1
attcggctcgagcacaccagaccagctcatcatcacattcgcatacatctcttctagcacgcaaagatcgagctatagctagctctgcaaccagagagaaggaggactacccttcgccggccggcctaaggaggagtacgtacagaacttgggacatggaaaccgtcgtgggcgacctcatggcgaccgagctgaggcttggcctgccgggcaccgtcgacgactgcagccagccccaactggtgaaggccacgccgccgtcgacgccaaggggcaagaggcgcgccaccgccgatgccgtggaggaagccgccggcgccgaggaggcaagcaagcgtgacgccgagacggcgcccccggcagccaaggcgcccgtggtgggttggccgccggtgaggtcgtaccggaagagctgcttccagcaggccagcagcaagcaggcggcggcggccaaacaggaggcggcggcggcggcgcccggctgcacggcatcgtcagcagccgccacaaacaccaccagcagcagcagcgccgccgtcgtcgtcggctccttcgtcaaagtgagcatggacggcgccccgtacctgaggaaggtggacctgaggatgtacaggggctacagggagctccgggaggccctggaggccatgttcgtctcctccagcagcgccaacaacctgtcggagttcgccgtcacctacgaggacaaggacggcgacctcatgctcgtcggagacgtgccgttcgagatgttcgctagcacctgcaagaagctgaggatcatgaagagatctgaagccacaggcctggggtcgtcgtcagcgaggcaacaatgaagatgacccatctgattcgagaggacctgcatgcccggcaacgttaacatgtcgatcgatcgtcatggccttattaattgtttctttcttttcttttcttttctgtttaattatttttgttgttctggttggcgccgccgtggatcggagggatccccaagccgaaggatgagcttggctggcgcatcgaagcgcatgcaacggatgtgtgcggctttggttctgtaataagacaaccaggggtccttttttcgatctgttattagcggcacaaaaggagctagatgcatgctgaggttgtttcagttcactctccatgtgtgtctgtacaaacgaaacaatacagttatattttgatcgttgatcccttaataaaaaaaaaaaaaaaaaaaggccgatcgcctaaaaaataaggaaggaagaactaaagaataggaaagagcaaagaaaaaaagggggggccgcccc

SEQ ID NO: 1408 - DNA, 567 bp, Zea mays
  Clone ID: PAT_MRT4577_163214C.1
ggccgggaaaaaaaaaaaaaaaaaaaaaaaaaaaaaaaaaaaaaaaaaaaaaaaaaaaaaaaaaaaaaaaaaaaaaaaaaaaaaaaaaccgggggaaaatttccaaacgcagaaaagcccctcgcgccgccggccttttaagccttgcagaacaccgccgccagcccgagggaccgttgaagcctaggtttccggccccgatggcggttaagggaggaaagggtttgttggcggccaaaacaacgggggccaaaagcaccgacagggacaaggacaggaaaaaggcccccgtgtcgcgcttttcccgggccggcctcaagttccgggggggtcgaatccaccgccagttaaagtcgggtgcctttgcccacggccgggtgggcgccaccgccgccgtttattccgccgccatcctggagtacctaaccgccgaggtcctcgagctggccggaaacgccagcagggacctaaaggtaaagcgcataaccccgcgccacctgaagttggccatccggggggacgaggagctcgacaccctaataaagggcaccatcgccgggggcgggg

SEQ ID NO: 1409 - DNA, 163 bp, Zea mays
  Clone ID: PAT_MRT4577_163449C.1
gcgccagcctcgccaccgtggacgtgaacaagtgcaccatcggggcgcacccctcggtcatcccggcgctcgcggggctcctccggcggggaggactcagggagcgcatataggccgcaacattgctttacgagctatgcaagctgacgcgagaaccggagcc

SEQ ID NO: 1410 - DNA, 758 bp, Zea mays
  Clone ID: PAT_MRT4577_163452C.1
tttcctcgttcccaatcatcttgccgcgcgccgcacgtagctagggtttcgtcctgtcgttgcacccgcattactagcattcaatccacgccaatggctgagaagaagatggttacgctcaggagctccgaccacgaggagttcgaggttgaggaggcggtggcgatgaagtcagagatcatccgtctcttgatcgaggacgactgcgccgacaacgccatcccgcttcccaacgtggattccaagactctcgccctggtcatcgagtactgcaacaagcacgttcacgccgtcgccgccgacgactccgccgccgcggagaccagcaacgcctcatcagctgcgggcggcggcgacgtcgacctcaagaagtgggacgcggagttcgtcaaggtcgagcaggcgacgctcttcgacctcatcctggctgccaactatctcgacatcaaggggttgctggacctgacctgccagacggtggccgacatgatgaagggcaagtcaccggaggagatccgcaggacattcaacatcaagaacgacttcaccgaagaggaggaggaggagatccgcagggagaactcctgggccttcgactgatgtagtctccccgtccgcggacctagctcggtggttattactgttagattcgatctctagtgctagtttgttcgtctgcacttatcttctgatctgaaacattaataagtagttcgtttgtctacagttaccagttgatattaccaaaaaccaaaagg

SEQ ID NO: 1411 - DNA, 570 bp, Zea mays
  Clone ID: PAT_MRT4577_163642C.1
cactttcttatttgtgggaagccacacacatcacacaaaaaactttattagtgaactatcactcataagaaatctaagagagggcaccaccagtgatggggtggtggtagaacgctggtgggtttgacaaagcaagttgggtgagtggcaacaagtggtgcaggtgtaagagggtgccagcgataggcgcagcgcgctggtagaacggccacaactgtgggtgtgtcaagaaggtaacagggctcacaccatctagctgtctgagtggtaataggtggtgctgctgtaaataagcaagagagctcagtgctgacaggtgggtgaatggaagaaattgctgggggtaggcaacagatagctgtctgaatggtaggtggtggtggtgcatataagaagcagagctcagtgcatctagttgggtgaatggaagacactgctgttgctgagagtacgcaacaaggtttgctagcacaaggtggtgtatgtggtgcgccctgatgttgtgcgccaataagcgcaccagaggtaactgctgtaatagggctgaagattgttggaggaacaagggtg

SEQ ID NO: 1412 - DNA, 344 bp, Zea mays
  unsure (1)..(344): unsure at all n locations
  Clone ID: PAT_MRT4577_163700C.1
gccggccggagctcggatcggcctcagtcgcacatatctactatactatactctaggaagcnaagacaccaccgccatcggcaggccangatgctctgcattgttcgntctcccaggtntttgtgcaagcgccactagtggcgaccatattccaggggcacttgccaccagttatgntattgggtaccctgtaaccatggctgcagtactgaatgatgcaacaagagcttggcagcttgatggcgtgtccgtgcctgatgctgcagcaactgtctggcttacccgcttcagtcgatggcagtagatgatgccacagatgatgacgccctaaatgatgtcaccat

SEQ ID NO: 1413 - DNA, 562 bp, Zea mays
  Clone ID: PAT_MRT4577_163757C.1
gaccctcgaggcctgccgggatctccctgttaataatccttaagcgcaaagtacgtaagctcggaattcggctcgagagaagggatggcggcccgtggcaaggctatcggcgctggcgccgcgaagaaggcatcgttgaggagctccaaggccggactccagttccccgtcgggaggattgccagggtcctcaaggcgggcaagtacgcggagcgcgtctgcgccggcgcccccgcgtacctcgccgccgttctcgagtacctagcggctgaggttctcagaacttgccgggaacgccgcgagggacaccaagaagacccgaattgtgccgagccacatccagcttgctgtgcgcaacaaccaggagctgaccaaactgctgtgtggcgccaccatcacgagcggaggtgttatgcctaacatccatcaacatctgcttcccaagaaggctgcctactccaaggccactgtcctctacgtccacaactgacactgcttcctgcaaatgtgatccgaccactgacttgttttgtaagaataggatgatgccaacttcggtgag

SEQ ID NO: 1414 - DNA, 1193 bp, Zea mays
  unsure (1)..(1193): unsure at all n locations
  Clone ID: PAT_MRT4577_163759C.1
ggtgcggagctcgaggcgcacgccgcctcctcctcgtcgtcccattgggtacctcgaggccggccgggccgggatctccctgtttaatcaatccttcaagcgcaagctgcctcctcctcgtcgtccggtcgtgagaagggatggcgggccgtggcaaggctatcggcgctggcgccgcgaagaaggcaacgtcgaggagctccaaggccggactccagttccccgtcggcaggattgccaggttcctcaaggcgggcaagtacgcggagcgcgtcggcgccggcgcccccgtgtacctcgccgccgtcctcgagtacctcgcggctgaggttctcgaacttgccgggaacgccgcgagggacaacaagaagacccgcattgtgccgcgccacatccagcttgctgtgcgcaacgacgaggagctgaccaaactgttgggtggtgccaccatcgcgagcggaggtgttatgcctaacatccatcagcatctgctccccaagaaggctgcctcctccaaggccagtgtcgacgacgacgacaactgagactgcttcctgcagaaatgatccgaccaccgccttgttttgtaggaataggatgatgttgtcttcgatcggggaggagtcgggtatgctgggaaggagaattagattagtatctgtttttttgaatgggatgtgaacgtggctgtgaatctcaggattgtatgctcgttgagaaagaaatggaaggacttcgtgatgcacgatgttgatgccgcatcatattcagcgtaaaaatgcatttcttctgagtggcaatggtgtcaccgaaaaatgaaagtatttggctggtgtcgccaatctgcctaacatccatcagcatctgctccccaagaaggctgcctcctccaaggccagtgtcgacgacgacgacaactgagactgcttcctgcagaaatgatccgaccaccgccttgttttgtaggaataggatgatgttgtcttcgatcggggaggagtcgggtatgctgggaaggagaattagattagtatctgtttttttgaatgggatgtgaacgtggctgtgaatctcaggattgtatgctcgttagaaagaaatggaaggacttcgtgatgcaaaaaaaaaaaaaaagaaaaaaaaaaaaaaaaaaaaatagtaaagtatttggctggtgtncnngccaatnnctg

SEQ ID NO: 1415 - DNA, 2533 bp, Zea mays
  Clone ID: PAT_MRT4577_163763C.1
cggacctggctacgaagcgcaggcagtacagacagcaccgcctggtttgagcggctgccgccgctgcatatactccctccctgccttccagtgccaggggtgaccggcgtgcgtgccattccacgctctcgcggctcgtgtgccagcggtgaccagcgctcgtgctcgtccagtccaccaggcgctgctgttccggcaagccagccagcagcagccgccgccgccgccgtctcggagctcgagctcctagtcccccggggccgaggcgccggcgccatggaccagctccggcccgagccggccgcgggcgcgcacgagatcgagaagacggcggcgccggacgtggagtcggagcccgcggcggcggtgccggagccggagcgcgtgccgccgtggcgcgagcaggtcaccgcgcgcgggatggtggcggcgctgctcatcggcttcgtctacacggtgatcgtcatgaagctgagcctcaccacggggctcacccccaccatgaacgtctccgccgcgctgctcgccttcctggcgctccgcggctggacgcgcgccctcggccgcctaggcattgcctgccgccccttcacccgccaggagaacaccgtcgtgcagacctgcgtcgtcgcctgctacaccatagggttcggcggtgggttcgggtcgttcctgctgggcctggacaagaagacgtacgagctctccggggtgagcacgccgggcaacgtgccggggagctacagggagcctgccatcggctggatgaccggattcctcctcgccgtcagcttcgtggggctcctcaccttgcttccactcagaaaggtgctcgtcatcgactacaaactcacttatccaagtgggacagccaccgcggttctcataaacgggttccacacacctcaaggagataagaatgcaaaaattcaggtccgtggattcctcaagtacttcgggatcagcttcctgtggagcttcttccagtggttctacaccgccggcgaccactgcggattcgcccagttccctactttcgggctccaggcttttaaccagacgttttccttcgacttcagcctgacgtacgttggtgctgggatgatctgctcgcacctcgtcaacctctcgttgctgttcggtgccgtcgtttcctggggcgtcatgtggccactcatcggcaagcagaagggcaactggtatccggcagatgcatctcagaatagcatgacaggcatctacgggtacaaggccttcctttgcattgcccttctcgtgggagacggtctctacaacttcgtcaaagtcatagctatcactgtcaagaacatacgcgagagatcacgtcgcaagaacctgaacagagtggcggacgcggacacgatggcgctggacgacatgcagcgcgacgaggtgttcaacagggacaacatcccgacgtggctgtcctacgcggggtacgcggcgctgagcctgatcgcggtgatcgccatcccgatcatgttccgggaggtgaggtggtactacgtggtggtggcgtacgcgctggcgccggcgctggggttctgcaacgcgtacgggaccgggctgacggacatgaacatggggtacaactacgggaagatcgcgctgttcgtgctggcggcgtgggcggggaaggacagcggcgtggtggccgggctggtggggtgcgggctggtgaagcagctggtgctcgtgtcggccgacctgatgcacgacttcaagacggggcacctgacgctgacgtcgccgcggtcgatgctggtggggcaggccgtgggcacgctgatggggtgcgtcctggcgccgctcaccttcatgctcttctacagggcgttcgacgtgggcgagccggacgggtactggaaggccccctacgcgctcatctaccgcaacatggccatcctcggcgtggagggcttctcggcgctgcccaggcactgcctgcagctgtgcgcggggttcttcgcgttcgcggtgctggcgaacctggcgcgggacctgctgccgcgccggctcgcgcggctcgtgccgctgcccatggccatggccgtgccgttcctcgtgggcgccagcttcgccgtcgacatgtgcgtggggagcctcgtggtgttcgcgtggcacaagctcgacggcaagaaggccgcgctgctggtgccggccgtcgcctcggggctcatctgcggcgacgggatctggacgttcccgtcgtcgctgctcgcgctggccaaggtcaagccgcccatctgcatgaagttcacgccagggagctagagggcgcgctgacgatgcgtacagaacagagggcatcgttcgtcgtttgtggggtggaatccgtgtagtagaattacataccaatcaggcctgttctaatgtccatatgagcttaatgtacggtgtatatatgtaaaacggaaatctgaaggatgacaggatgaattgcctgttgtctagtagcacgcatattattattattatagcagagcactaataaaactctttatcttacacc

SEQ ID NO: 1416 - DNA, 255 bp, Zea mays
  Clone ID: PAT_MRT4577_164044C.1
gcggtctcttccccctcttaccagggtcacctcggtttagggatccttagggttctgtggaggggcaatggggggctgctgatgtggagtaccgatgcttcgtcggcgggcttgcctgggccaccatcatcgagtcgctggagaatgccttcgcctcctacggcaagattctggacttcaaggtttataccgaccggcagacgggggggtctcggggcttgggctacggtacctttttctacgtgaactccatgc

SEQ ID NO: 1417 - DNA, 438 bp, Zea mays
  Clone ID: PAT_MRT4577_164214C.1
gggagcaccaaaaagcaccattttttccttgagggataacttaaaacaaaacctgacaggggtaacaggatccatggatccaaagtccatgcggggggaagcaggggtctgggggagccggggatgaacacagcactaacaactgacacagagggaccttgcaatcaaaaacacagaggggcaacaacaaacgagacgaacgaagataaaccctttggactaggggaaaaataacgggagcgaaaaggaaaacttggccgggcgggccccaccggtaaattcctccagttcccggggggagttgccgaaacccccgccacgggtgccaccgccgaaaccgccaccaccaccaccggagccaccggcgccaccgaagccgccgccgccaccggcgaaaccgccgccgccataaaggggcccgccaccgccgaaaccgcc

SEQ ID NO: 1418 - DNA, 226 bp, Zea mays
  unsure (1)..(226): unsure at all n locations
  Clone ID: PAT_MRT4577_164249C.1
ctatagtgagtcgtattaaacnntgggagttacccgcttgacgggcgtaattgtacagagtttacagagcgacaaggaagtatttttacatgagcgtgtaagtaacgcgagtggtgcaggggagatgctgggattcggcagcgtgagtggtgcttcagtgttggatgatgggggtgagttggtgatagtgagtgaaccggacctagaggcggggacaatcactatt

SEQ ID NO: 1419 - DNA, 914 bp, Zea mays
  Clone ID: PAT_MRT4577_164254C.1
tttttttttttttttgaagacagatacaggagtttccactaaacatcaggtttcagaaatgtccacactccacaatccagttgaacacgcctaggctgcacttcactctgcagtagctgaatcagttcagtttcaggccggcgcagtgacagtggcagacggccgcacggggggatacatgctagctgatgaggtgagcaatgagctagctagtcgatgaggattgggctggacgaggtgtacccgccggcccgctcccggatctccgcggggatgtcggcgcggagcacctgcaccctgaacaccacgcgctccgccctgccgtccaccagctcgaagacgcacccgtcgccgagcttgagtccgttgtccagcgcgaagccccgccacccggcctccaggcgctggatctgccgcccccccgtgaaccgcatctcccaggaccgcccgtgccacgtcaccgtcgccggcaccgtcgtccccgggaggaacggcgccagcgacttggggaccaccacttggaacggctggttgacatgagacttgcagaggatgcatgtgaagtatggcttcccgaggagagggaggaccccgggctgcacggaacacggcgtctccgacatcggccgccgcgggtcaggtccgtctgctgctgggctctcgccgccgactggtttgcatctgctcatggaaactctgcggttggtagccacgcccacgctggtaagtattgctctgaggaaggtgtccctgaatcggtcagagaatcaaatgctgcgaggacttggggtttggtcttttggtggaacctttgctcggcgacggaggatttcgagctagtctgaggtgaggacgggagggtaggaggaaggaagaaacgcacagtcacacaggttagctcacgagatcacagt

SEQ ID NO: 1420 - DNA, 1755 bp, Zea mays
  Clone ID: PAT_MRT4577_164353C.1
ccggccgggcgccagcgaggccgcgtccacacccgcacacggcacaccccaccatcttcctcgcctacgccttcgccttcgtctccacggtccactatataacccgccgcctcgccacatcaccagaaatttccccacacgcgcccacctcctccggtcctcccctctagtcctctctcccgaccccacctctgccgtccgtgcgtccgtccggcaaccgcgacgcaacaatggcggccgggcgagagctggtggtgagtttcggcgagatgctgatagacttcgtgccgaccgtggcgggggtctcgctggccgaggcgccggccttcctcaaggcggccgggggcgcgcccgccaacgtcgccatcgcggtctcgcgcctcggtggcggggccgccttcgttggcaagctcggcgacgacgagttcggccgcatgctcgccgccatcctccgcgacaacggcgtcgacggcggcggcgtcgtcttcgacgcgggcgcgcgcaccgcgcttgccttcgtcaccctgcgcgccgacggcgagcgcgagttcatgttctaccgcaaccccagcgccgacatgctcctcactgccgacgagctcaacgtcgggctcatccggagggctgcggtctttcactacggatcaataagcttgattgctgagccttgccggacagcacatctccgtgccatggaaattgccaaagaggctggtgcactgctctcttacgacccaaacctgagggaggcactttggccatcccgtgaggaggcccgcacccagatcttgagcatctgggaccaggcagatatcgtcaaggtcagcgaagtcgagcttgagttcttgacaggcatcaactcagtggaggacgatgttgtcatgaagctgtggcgacctaccatgaagctgctcctggtgactcttggagatcaaggatgcaagtactataccagggatttccatggagctgtcccttccttcaaagtacaacaagtcgatacgactggcgcaggcgatgcgtttgttggtgcgctgctccgaaggatcgttaaagatccatcctcgctacaagacgagaagaagcttgtagagtctattaaattcgctaatgcgtgtggagcaatcaccgccacgaagaagggtgcgatcccgtctttgcccactgaaactgaggtcttgcagctaatagagaaggcatagatagatcactgtaattgctttggttttcactagcttccacttctgcaaattgcaaaatgtattgtattctgatctggaacagaagaagtgggtgctccatcttacctgccattttttgcttgccctagttcctaagggtgttttgttttagaactctacttgcaataagtagagcccttttatatttatgtatatcagcatgcgctcatttgataaaaaaaaaaaaaaaaaaaaaaaaaaaaaaaaaaaaaaactatctgggtttcatggacatgctcttggagacaccaccaatggatgcagtgacagctggaccacactacaatcactgcgagcaaggagcatggggcaccagaagatgagaaccgccatgctggtgatcttggaaacgtgacatctggagcagatggcgttgctaatatcaatgtcactgacagccagatcccactgactgggccaaactcaatcattggcagagctgttgttgttcacgctgatcctgatgatcttgtaaagggtgggcacgagctcatcaagatcactggaaacgccg

SEQ ID NO: 1421 - DNA, 449 bp, Zea mays
  Clone ID: PAT_MRT4577_16442C.1
cgactcggtccaattttaatattataaaagtaaatattcagaactccagctccaaactaacagaaacaactttgttcgaatggacaaacttaaacaaaaatgcatgttgcgcgactacaggtagcgataaatgccatagcacaaatactgatcgccgcataagatagcactacttggatgggacgaaactttactcgtcatcctcggcgtcgatatctgcgccgcccgaagaggtgagttggttgagcctttcaatgagaatggccttactctgctcgtatgtcaatttcttggggatgtaccttttgtgctactttgggggctgcttggttgacttgaccacagaaaggtcatcccgggtggcagcttggacctctttgtacagagcttccatgtgggcagcctcaatttccttgttaatggactcactggagtgagactgggacttc

SEQ ID NO: 1422 - DNA, 813 bp, Zea mays
  unsure (1)..(813): unsure at all n locations
  Clone ID: PAT_MRT4577_164467C.1
ttgggtccctcgaggccggccgggccggngattcccccatgcgcacctctctccatctctctgctcctccgactccttcttgatccagccaagacagtgatcgccatgtcggactcggaggagcaccacttcgaatcgaaggccgacgccgtagcgtccaagacctacccgcagcaggatggcaccgcccgtaagaacggcttcatcggcatcaggaaccgcccctgcaagggtgcggaggtttcgacctcgaggagtggtaagcatggccatgccaaatgccactttgctgccatatacatattcaacggcagaaagcttgaaccatattgttccttcatcacacaactgagatattccgcatgtgaaccgtactgagcaccagagtgattgatatatcataggatggatttgtgagccttcttacttcagatggcaacactaaggatgatcgtacactcccaactgatgatactcttgtggcccagatcaaggaagggtttgacagcggcaaggatcttgttgagactgtacagtctgctatgggggaggagcagatctgcgcgctgaatgatgctgcccccaaataacttacctgccttggaatactgtatctcagaacctaaatcgaaaggagaaatgtatcaaggattgctacagagacatccatctggcttgaactgtgtactgctatgccacacaccagagcatgtatcgctgcgtgttgcaccgtgactgcattagctgcgaatacattctggaccctgtattttctatggatgtatgccccctactgcttactattaatcatca

SEQ ID NO: 1423 - DNA, 641 bp, Zea mays
  Clone ID: PAT_MRT4577_164472C.1
tctctgcgcgctactttcttctctctctgctcctccggctccgcctgatccatcctagacagggatcgccatgtcggactcggaggagcaccacttcgaatcgaaggccgacgctggggcgcccaagacctacccgcataaggctggcaccgtccggaagaacggcttcatcgtcatcatgaaccgcccctgccacgatgtggaggcctctacctccaagactgctaagcatggccacgccaaatgccacttctgtcgccatagacatattcaatgggaatgagcttgaacagattgttccttcatcacacaactgggacattccgcatgtgaaccgtactgagtatcaactgattgatatttctgaggatggatttgcgagccttcttacttcctggcagcactaaggatgatcttagactcccaactgatgagactcttgtggcccagattagggaagggttccaaagcgttgaaggatcttgtcgagactgtccagactgcgatgggggaggagcatatctgcgcgatgaaggatgttggccccaagtaacttccttggatttggagacggaaccctactgtatctcaacttaaatcggaaaagaactgcatcaccggaggattgctaccgagacatt

SEQ ID NO: 1424 - DNA, 669 bp, Zea mays
  unsure (1)..(669): unsure at all n locations
  Clone ID: PAT_MRT4577_164476C.1
ctgtgcggcgctcgaggcggtctcaatccnacatcgccatccgacctctcttttctccctgctcctccgcctccttcttgatccagccaacgcagggatcgccatgtcgagactcggaggagcaccacttcgaatcgaaggccgacgccggagcgtccaagacctacccgcagcaggctggctgcgcccgtaggaacggcttcatcgccatcaagaaccgcccctgcaaggcagtggaggcttctacctcatagactggtaagcatggccatgccaaatgccactttgttgccatagacatattcaacgggaaaaagcttgaagatatcgtgccttcatcacacgactgtgatattacgcatgtgaaccgtactgactaccacctgattgatatatcagaggatgaatttgtgagccttcttacttcccatggctacactaacgatgatgttatactcccatctgatgagactcttgtgcgccagatccaggaaaggcttgaaagcgaaaaggatcttgttgtgactgatcagtctgctatgggggaggtgcatatctgcgcgctgaacgacgttggtcccaaataactgacctgccttgcaatactgtatctcgaaacctaaatccatcatactgcgtatctaggattgctacagagacatccatctg

SEQ ID NO: 1425 - DNA, 755 bp, Zea mays
  Clone ID: PAT_MRT4577_164477C.1
cctcgaggcggccgggaataacataacataaaaatcacttatcatccccatccgcacctctctcaatctccctgctcctccgcctgctttttgatccagtcgagtcagggatcgccatgtctgactcttaggatgaccacttctaatcgaaggccgacgtcggatcgctcaagacctacccgtattaggttggaaccgtccgcaagaacggcttcatcatcatcaataaccgcccctgtgaggttgtggaggtttctacctcaaagactggaaagcatggccatgccaaatgccactttgttgccatagacatattcaacggaaaaaagctcgaagatattgttccttcgtcacacaactgcgatattccgcatgagagccgtactgactaccatgtgattgatatatcaaaggatggattggtgatccttcttacttctcatggcaacactaaggatgatcttagactcccaagtgatcgacactcttgtggtccagatctaggaagggtttgaaagcggcaaggatcttgatgtgactgtcgcagtttgctatgggggaggagcaaatctgcgcgctgaatgatgatgcccccaagtaactgtcctgccttggaatactgtatctcaaaacctagatcgaaaacatgagtgtatcaaggattgctacagatacatccctctggcttgagctggcttttgctatggcaaacacaagtgcagggatcgctgggtgttgcaccgtgtctgcattat

SEQ ID NO: 1426 - DNA, 709 bp, Zea mays
  Clone ID: PAT_MRT4577_164479C.1
ttgggtacctcgaggccggccggggagtttattacttatcatccccatccgcacctctctccatctccctgctcctccgccttcttcgtgaccagacaagccagggatcgccgtgtctgactcggaggagcaccacttcaaatcgaaggccgacgccggatcgtccaagacctacccgcaacaggatggcaccgtccgaaaaaacggcttcatcgacatcaagaaccgcccctgcaaggttgtggaggtttctacctcaaagactggtaatcatggtcatgccaaatgccactttgttgacatagatatattcgacgggaaaaagctccaagatattgttccttcatcacgcgactgtgatattccgcatgagaaccgtactgagtatcagctgattgatatatcataggatggatttgagagccttcttacttcagatggcaagcactaacgatgatcttagactcccaactgatgagactcttgaggcccagatcaaggaaggcgttgaaagtgccaaggatcttgttgtgactgtccagtctgctattgcggaggagcatatctgcgcgctgaatgatgttgcccccaaggaacttccctgccttgcaatactgctatctcgaaacctatatcggatcaagaagcgtatcaaggattgctacagagacatccatctggcttgagctggctcttgctatgtcaaaca

SEQ ID NO: 1427 - DNA, 729 bp, Zea mays
  Clone ID: PAT_MRT4577_164482C.1
atacttatctctcctccgacctctcttctctccctgctcctgcgtctccttcttgatgcagccaatgcagagatcgccatgtcggactctgaggagaaccacttcaaatcgaaggccgacgccggagacgtgcaagacctacccggagcacgatggcaccgtccgcaataacggcttcatcagcatcgagaaccgcccctgcaaggatggggaggtttctacctcaagactggtaagcatggccatgccgaatgccactttgttgccatagacatattgcacgggaaaaagctcgaagatattggtccttcggcacacaactgtgatattccgcatgtgaaccgtactgagcaccagctgattgatatatcagaggatggatttgtgagccttcttacttcagatgggaacactaacgatgatcttacactcccaactgatgagactcttgtggtccagatcaaggaagggttcgaaagcggcaaggatcttgttgtgactgtccagtctgctatgggggaggagcatatctgcgcgctgaaggatgttggccccaagtaacttccctgccttggaatactgtatctcaaaacctaaatcgaataaagaagtgtatcaaggattgctacagagacatccatctgggttgagctggcttttgctatggcaacacaagtgcagggatcgctgggtgttgcaccgtgtctgcattatccgtggttacattct

SEQ ID NO: 1428 - DNA, 652 bp, Zea mays
  Clone ID: PAT_MRT4577_164510C.1
cctctctccatctccctgctcctccgcctgcttcttgagccagccaagacagagcatcgccatgtgcggagctcggaggagcaccgcttcgaatcgaaggccgacgccggagcgtccaagacctacccgcagcagggtggcaccggccgtaagaacggcttcatcgtcatcaagaaccgcccctgcaaggttgtggaggtttctacctcaaagactggtaagcatggtcatgccaaatgccactttgtgtgccatagatatattcaacgggaaaaggctcgaagatattgttccttcgtcacacaactgtgatattccgcatgcgaaccgcactgagtatcagctgattgatatatcagaggatggatttgtgagccttcttacttcacatggtgacactagggatgatcttacactcccaactgatgagactcttgtggaccagatcgaggaagggtttgaaagtggtaaggatcttgctgagactgtccagtctgctatgggggaggagcatatctgcgcgctgaaggatgttgggccccagtaacttccctgacttggaatactgtatctcagaacctacatcgaaaaaagaagtgtatccaggattgctacagagacatccatctgggttgagctggcttttgctatg

SEQ ID NO: 1429 - DNA, 788 bp, Zea mays
  Clone ID: PAT_MRT4577_164511C.1
ccggccgggcacccaaactccgctctcatcccaccccccctccactccactaccacggcggcacggcctgcctctgcagctctgccctgctccgcacccctcgctctccaaccccaacgcgcggcgttgctaaaattcaccgcagcgcttactccagtttggccacctcaccacccgccgccgctgtttaagaaggccccgcgcccgatcggggatcacgaaccttggccgccgctgccggagtgggggtaagcgagagccctcctgcttggggtgcgttcttcgtaggctgcttggttctcttcgagcccgatttgctctttgtagcctggctctttccgagcgcagtctgttcttcgtctcgtctcctctgctggaggtttgcaggatctggtatgatatggtgatgtatgatgaactgacgacgcacgctgctgtcgcgtgcgtggtgtgtgtctgtgcaggcgtagatttccggcggccatggggggcgccgtgatggtcgccatcgcggcctctatcggcaacttgctgcagggctgggacaatgcgacaattgctggagccgtcctgtacataaagaaggaattcaacctgcagagcgagcctctgatcgagggcctcatcgtcgccatgtccctcattggggcaacagtcatcacgacgttctccggggcagcggccgactgcgttggtaggaggcccatgctggtcgcctcggctgtcctctacttcgtcagtgggctggtgatgctttgggcgccaagtgtgtacatcttgctcctcgc

SEQ ID NO: 1430 - DNA, 694 bp, Zea mays
  Clone ID: PAT_MRT4577_164518C.1
gatacttacccctcatcatccccatccgcacttctctccatctccctgctcctccgcctccttcttgatccagacaagccagggatcgccatgtcagactcggaggaggaccacttctaatcgaaggccgacgccggagcgtccaagacctacccgcagcaggctgccaccgaccgcaagaacggcttcatcgtcatcaagaaccgcctcctgcgaggtctgtggaggcttctacctcagagactggtaagcatgtgcatgccaaatgccactttgttgccataaacatattccacgggaaaaagcttgaggagattgttccttcatcacacaacgtgtgatattccggatgtgaagcgcactgagtaccagctgattgagatatcagaggatggatttgagagccttcttacttcagatggcaacactaaggatgatcttatactcccaactgatgagactcttgtggcccacatcaaggaagggtttgaaggcggcaaggatcttgttgagactgtccagtctgctatgggggaggagcagatatgcgcgctgaaggagttggcccaagtacttacctgccttggaatactgtatctcaaaacctaaatcgaaaaaagaagtgtatcaaggattgctacagagacatccatctggcttgagctggcttttgctatggcaaacaccagtgcag

SEQ ID NO: 1431 - DNA, 679 bp, Zea mays
  Clone ID: PAT_MRT4577_164521C.1
atgtgcagcgctcgagcggcgacttcctcctatctctgcgctctactttcttctctctctgctcctccggctccgcctgatccatcctagacagggatcgccatgtcggactcggaggagcacgacttcgaatcgaaggccgacgctggggcgtccaggacctacccgcagcagggtgctaccgtccgtaagaacggcttcatcgtcatcaagaaccgtccctgcaaggatgcggaggattctacctccaagactggtaagcatggtcaccccaaatgccactttgtcaccatagacctatgcactgggaaaaagcttgaagatattgttccttcctcgcacaactgcgacattccgcatgtgaaccgcactgagcatcagctgattgatatttctgaggatggatttgtgagccttcttacttccgatggcaacactaacgatgagcttaaagtcccaactgatgagactcttgtggcccagattaaggaaggattctagagcgatcaaggatcttgttgtgactgtccagtctgcgatgggggaggaccagatctgcgcgatgaaggatgttgatcccaagtaacttccttgcctttggagacggaaccctactgtatctcaacttggatcccaaaagaagaggatcaccaaaggattgctaccgagacgttccctg

SEQ ID NO: 1432 - DNA, 587 bp, Zea mays
  unsure (1)..(587): unsure at all n locations
  Clone ID: PAT_MRT4577_164523C.1
cccatccgcacctctctgctctccctgctgctccgcctccttcttggagcagccaagccagggatcgccatgtgggactcggaggagcaccacttcgaatcgagagcggacgccggagcgtgcaagacctacccgcagcaggcggggaccgtgcgtgagaacggggtcatcgtgatcaaaaaccgcccctgcggggggggggaggtttctacctcaaagactgggaagcatgggcatgccaaatgccactttgtggccatagacatattcaacggggaaaaagctcgaagatattgtgccttcgtcacacaactgtgatattccgcatgtgaaccgtactgagtaccagctgattgagatatcagaggagggatttgtgagccttcttacttcagagggcaacactaaggaggagcttagactcccaactgatgagactcttgtgggccagatcaaggaagggggtngaaagcggcaaggatcttgttgtgactgtgcagtctgctatgggggaggagcanatctgcgcgctgaaggatgttggccccaagtaaccttcctggcttggaatactgggtctcaaaacc

SEQ ID NO: 1433 - DNA, 705 bp, Zea mays
  Clone ID: PAT_MRT4577_164524C.1
ccggccgagatacttatcatccggatggcgtacctctttccatctccctgctcctccgtcttcttcttgatccagccaagccagggatcgccatgtcggactcggaggagcaccacttggaatcgaaggccgacgccggagcgtccaagacctacccgcagcaggctggcaccgtgcgtaagaactggctccatcggcatcaagaaccgaccgtgcaaggctgcggagggacctacctgaaagactggttagcatggtcatgccaaatgccactttgctgccatagatatatctaacgggaaaaagctcgaagatattgttccttcgcgacacaactgcgatattccgcatgagaaccgtactgagtatcaggtgattgatatatcagaggatggatgtgtgagccttcttacttgagatggcaacactaaggatgatcttagactcccaactgaggagactcttgtggcccagatcaaggaagggattgaaagtggcaaggatcctgttgggactgtccagtctgctatgggggaggagcagatctgcgcgctgaaggatgatggccccaagtaactgccctgccttggaatactgtatctcaaaacctaaatcgataaaagaagtgtatcaaggattgctacagagacattcatctggcttgagctggctgttgctatgtcaaacacaagtgcagggatcgct

SEQ ID NO: 1434 - DNA, 664 bp, Zea mays
  Clone ID: PAT_MRT4577_164528C.1
tgcggcgttctcatccttatctctgcgctctacatttcttctctctctgttcctccgcctccgcctgatccatcctagacaggaatcgccatgtctggactcggtaggagcaccacttcgaatcgaaggccgacgctggggcgtccaatacctacccgcagcatgctgccaccggccgtaagaacggcttcatcgtcatcaagaaccgtccctgcaaggttgtgcaggtttctacctccaagactggtaagcatggacacgccaaatgccactttgtcgccataaacatattcagtgtgaaaaagcttggagatattgttccttcatcacacaactgtgacattccgtatgtgaaccggactgagtatcagctgattgatatttctgaggatgtatttgtgagccttcttacttcatatggcaacactaaggatgatcttagactcccaactgatgacactcttgtggtccagattaacgaatcgttctaaagcgggaaggatcttgttgtgactgtccagtctgcgatggggtaggagcagatctgcgcgttgaacgatgttgcgcccaagtaacttccttggctttgaagacggaaccctactgtatctcaacttaaatcggaagagaagtgtatcaccaaaggattgctaccgagaattca

SEQ ID NO: 1435 - DNA, 438 bp, Zea mays
  unsure (1)..(438): unsure at all n locations
  Clone ID: PAT_MRT4577_164542C.1
ccccattcccacctcnctcttctctctgctccnccgcctccttcttgaggcagccgagccatagatcgccgtgtccgactcnnaagaacaccacttcnaatctaaggccgactccggagcgtccaagacctaccctcatcaggctggcaccgtccgtaataactgcttcatcgtcatcaagaaccgcccctgcaaggttgtggaggtttctacctcaaatactgttaatcatggccatgccaaatgccactttgttgccatagacatattcaactgtaaaaagctctaagatattgttccttcgtcacacaactgtgatattccacatttgaaccgtactgagtaccatctgattgatatatcataggatggatttgtgagccttcttacttcagatggcaacactaatgatcatcttatactcccaactgatgaaac

SEQ ID NO: 1436 - DNA, 853 bp, Zea mays
  Clone ID: PAT_MRT4577_164545C.1
attgcttatcatctgcgcctctaatttcttctctctctgctcctccgcctccgcctgatccatccaagacagggatcgccatgtacggactcggaggagcaccacttcgaatcgaaggccgacgctggggcgtccaagacctacccgcagcaggctggcaccgtccgtaagaacggcttcatcgtcatcaagaaccgtccctgcaaagttgtggaggattctacctcctacactgtaaagcatgaacacgacgaatgccactttgtcgccatacacatattccatgcgaaaaagattgaagatattgtgccttcatcacacaactgtgacattccgcatgtgaaccgtactgagtatcagctgattgatatttctgaggatggatttgtgagacttcttacttcagatggcaacactaatgatgatcttagactcccaactgatgagactcttgtggcccatattaaggaagggttcgaaagtggcaaggatcttgttgtgactgtccagtctgctatgggggaggagcagatctgcgcgctgaaggatgttggccccaagtaacttccctgccttggaatactgtatctcaaaacctaaatcgaaaaaagaagtgtatcaaggattgctacagagacatccatctggacttgagctgccttttgctatggcaacacaagtgcagggatcgctgggtgttttaccgtgactgcattatgtggatacattctgaaccctggattgtctatgcttttatgcccctactgtttagcattaattatcaataaatctgtttggcacctgtgaaaataacgaaaaggaccgcagcgatctcccttccaaaaggccccta

SEQ ID NO: 1437 - DNA, 826 bp, Zea mays
  Clone ID: PAT_MRT4577_164549C.1
agccatatccgaacttatgtccatcttcctgctcatccgccttcttatggagccggccaagccagggatcgccatgtcggactcggaggagcaccacttcgaatcgaaggccgactccagagcgtccaagacctaccctcagaaggctgtcaccgtccgtaagaacggcttcatcgtcatcaagaaccgcccctgcaaggatgtggaggtttctacctcagatactgttaagcatggtcatgccacatgccactttgttgccatagatatattcaacgggaaaaagctcgaagatatggatccttcgtcacacacctgtgatattccgcatgtgaaccgtactgagtatcatctgattgatatatcatacgatggatttgggagccttcttacatcagatggcaacactaaagatgatcttaaactcccaactgatgagactcttgtgggccagatcaaggaagggtttgaaagtggcaaggatcttgttgtgactgtccagtctgatatggtggaggagcatatctgcgcgctgaaggatgttggtcccaagtaacttccctgagcttggaatactgtatattaaaacctaaatctaaaaaagaagtgtatcaaggattgctacagagacattcatctggcttgagctggcttttgctatgtcaaacacaagtgcatggatcgttgggtgttgcaccgtgtctgcattatctgtggttacattctggaccctgttatttttatgctattatggccctactgattagtattaataatcaataaatttgattgggcacgcctaaaaaaaaaaaagaagggtagccag

SEQ ID NO: 1438 - DNA, 731 bp, Zea mays
  Clone ID: PAT_MRT4577_164554C.1
attcgcttcagccttcaggccctcgaggcgggggccgcttatccaatcaataatacacgacgctccctccttcctcgagagcgtgtatgcgcacctgcagctccgcaaggcagatgttgctgactcgtctgtccagcgtttcttgctcgtcaacagcgcagcagttgcatgcgggcgcgtccaagacctacccgcagcaggctggcacacgtccgtaagaacggcttcatcgtcatcaagaaccgtccctgcaaggttgtggaggtttctacctccaagactggtaagcatggccacgccaaatgccactttgtcgccatagacatattcaatgggaaaaagcttgaagatattgttccttcatcacacaactgtgacattccgcatgtgaaccgtactgagtatcagctgattgatatttctgaggatggatttgtgagccttcttacttcagatggcaacactaaggatgatcttagactcccaactgatgagactcttgtggcccagattaaggaagggttcgaaagcgggaaggatcttgttgtgactgtccagtctgcgatgggggaggagcagatctgcgcgctgaaggatgttggccccaagtaacttccttggatttgaagacggaaccctactctatctcaacttaaatcggaaaagaagtgtatccccaaaacgattgctaccgagacattcacctgggcctgagctggattttgctataa

SEQ ID NO: 1439 - DNA, 259 bp, Zea mays
  unsure (1)..(259): unsure at all n locations
  Clone ID: PAT_MRT4577_164571C.1
ggcgaacttatctatttaaaacattctacatttgtagtttaataacaaatgttattgctgtacattttcaggaatctgagtactcccattcacaacaatgtgaacaattaatacatggatcgccantgtctatcacttttttatatacaatattgatctgaacgtntgtcaaattatataaccatcaggcttctccantctcgctcactgtctttgtcatctgttggcagataatgctgtcgtcttgcagatggggcac

SEQ ID NO: 1440 - DNA, 1196 bp, Zea mays
  Clone ID: PAT_MRT4577_164577C.1
agtcccagcgcaagctttgctccaagtgagaacatagagattgaaatctcgatagcatgtgagtaatgttgctatatatgtgtcaatgaatgaaatttgtacatatgcatggggcaacattcacaggttcagctggtcatttgtttgtggagccatgaactattatgaagttgtcctgttattctgaaagtaaaagagtgcagagatcatatgtaatgtgacagatatttagtatcaaaaaaaaaaaaaaaaaaaagaagcttatcgcttatcatccgcgcctctacatttcttctctctctgctcctccgcctccgcctccgcctgatccatccaagacagggatcgccatgtcggactcggaggagcaccacttcgaatcgaaggccgacgctggggcgtccaagacctacccgcagcaggctggcaccgtccgtaagaacggcttcatcgtcatcaagaaccgtccctgcaaggttgtggaggtttctacctccaagactggtaagcatggccacgccaaatgccactttgtcgccatagacatattcaatgggaaaaagcttgaagatattgttccttcatcacacaactgtgacattccgcatgtgaaccgtactgagtatcagctgattgatatttctgaggatggatttgtgagccttcttacttcagatggcaacactaaggatgatcttagactcccaactgatgagactcttgtggcccagattaaggaagggttcgaaagcgggaaggatcttgttgtgactgtccagtctgcgatgggggaggagcagatctgcgcgctgaaggatgttggccccaagtaacttccttggctttggagacggaaccctactctatctcaacttaaatcggaaaagaagtgtatcaccaaaggattgctaccgagacattcacctggcttgagctggcttttgctatagcgtgcaaggggttgctgggtgtcgtacctacctgacttatcattatctgtggttacattctggaccctgtattttctatgctttcatgtctctctactttctagtattaattatcaataagttggtttggaatggttgaattgcatccaatgcatgaagtttctttggttaccaaaaaaaaaaaaaaaaaaaaaaaaaaaaaaaaaaaaaaaaaaaaaaaaactcgagaagggggcccggtacccc

SEQ ID NO: 1441 - DNA, 1366 bp, Zea mays
  Clone ID: PAT_MRT4577_164581C.1
tgggaccctcgaggcccggccggggagcttatcacttatcatccccatccgcacctctctccatctccctgctcctccgcctccttcttgatccagccaagccagggatcgccatgtcggactcggaggagcaccacttcgaatcgaaggccgacgccggagcgtccaagacctacccgcagcaggctggcaccgtccgtaagaacggcttcatcgtcatcaagaaccgcccctgcaaggttgtggaggtttctacctcaaagactggtaagcatggccatgccaaatgccactttgttgccatagacatattcaacgggaaaaagctcgaagatattgttccttcgtcacacaactgtgatattccgcatgtgaaccgtactgagtaccagctgattgatatatcagaggatggatttgtgagccttcttacttcagatggcaacactaaggatgatcttagactcccaactgatgagactcttgtggcccagatcaaggaagggtttgaaagcggcaaggatcttgttgtgactgtccagtctgctatgggggaggagcagatctgcgcgctgaaggatgttggccccaagtaacttccctgccttggaatactgtatctcaaaacctaaatcgaaaaaagaagtgtatcaaggattgctacagagacatccatctggcttgagctggcttttgctatggcaaacacaagtgcagggatcgctgggtgttgcaccgtgtctgcattatctgtggttacattctggaccctgtattttctatgcttttatgccccctactgtttagtattaattatcaataaatttgtttgggacggttgaattgcatgcattgcatgaggtttcttgttcgttatttgttttctcttgccatgcttccagtattggtgatggcagtttactcgtaattttttttgtacttgtttcgaaaactggtgggcagtttacccgcgcttgtgctccatccattgttctagtgttatccattcctcttttttcccccttcaaaatataaactataaagaagaaaatattatgacttacataaagaatcgttttagagaagcggtaccaaacatgactcgacggaaaattgctccaaaccaactattaactcgatgtttgtattttttttcttctctgccaaaacctgtcaacccgctttatggtaactttgtggtatatgttctcgaaagaaaactggtgtatagagctactcccctaatttcaagttgtaagacattttgcccatttgatatatgtaggtagaaaagatgtcttgtaatctaaaacagagggagtatttatgtagcttttttgagataaaatgtcttatttaaaacaga

SEQ ID NO: 1442 - DNA, 2392 bp, Zea mays
  Clone ID: PAT_MRT4577_164582C.1
aaagacgccctccgtttggtattcaggagctatgtagccatatgtcccaacaactcgccgagtgttcgccttctgctggttgtcgccgaagatctgtgccatgccgaagtccgctatcttaggcctcatctcggcgtccagcaggacgttgctcgctttgaggtccctgtgtatcaccgtcagccttgagtcttgatggagatacaggaggcccctagccacccccttgattatccccagcctcgccggtatcttcctcttgggcggcaaggagaaattcggtggttatctgtgccgcgaaggcgagaggcttaggcagcaggacagagccacgatgggccgaagctaagcgttagcttctttggtatctcaagggagcaatagcccttggaaatttcacaagattcctgcgtccctaccagaacaagtccctatctaggatggaatccatccttctgcaggctttcactttcctgataataacagtaacaataaattgacaatggtttgtgttcttctgcaacctttttggctccctggtttcgcaagggttccgtgctttgtttgaagtcatcacttgcatgcgttggtataaaaaggttgctgttgcatttaaaaaaaaaaaaaaaaaagatgaggtcgaggactatgatgagaagcttatcgcttatcatccgcgcctctacatttcttctctctctgctcctccgcctccgcctgatccatccaagacagggatcgccatgtcggactcggaggagcaccacttcgaatcgaaggccgacgctggggcgtccaagacctacccgcagcaggctggcaccgtccgtaagaacggcttcatcgtcatcaagaaccgtccctgcaaggttgtggaggtttctacctccaagactggtaagcatggccacgccaaatgccactttgtcgccatagacatattcaatgggaaaaagcttgaagatattgttccttcatcacacaactgtgacattccgcatgtgaaccgtactgagtatcagctgattgatatttctgaggatggatttgtgagccttcttacttcagatggcaacactaaggatgatcttagactcccaactgatgagactcttgtggcccagattaaggaagggttcgaaagcgggaaggatcttgttgtgactgtccagtctgcgatgggggaggagcagatctgcgcgctgaaggatgttggccccaagtaacttccttggctttggagacggaaccctactgtatctcaacttaaatcggaaaagaagtgtatcaccaaaggattgctaccgagacattcacctggcttgagctggcttttgctatagcgtgcaaggggttgctgggtgtcgtacctacctgacttatcattatctgtggttacattctggaccctgtattttctatgctttcatgtctctctactttctagtattaattatcaataagttggtttggaaaaaaaaaaaaaaagtcagagtcctcccaccgcacgcaacaagtacgcaggcagcgcagcctcgagccgtcgccatggcgagcaagcacctcgtcctcgccgcatgcctcctcctcctgcccaccgcctcggtcgccaccgacgtcgactactgcagtaagaaggactacccggtgaaggtgagcggggtgcagatcgtgcccgatccggtcgaacccggcaagcccgccactttcaagatctccgcttctactgataaaaccatcgagaaggggaagctggttatcgacgtcaagtatttcttcttctacgtgcactcggagacccgcgacatctgcggagagacttcctgcccagcgaccggcgacttcgtgctgtcccaccagcagacgctgccaggcttcactccgccggtgagatttctccgcacagccagcaatcacacgtctgggccctgtttggcagcattgttttctaatcctgattgtcagactcggattggtgtcagccaaacgctgttcatgcacactgatgcgttctgaggctctttccactccgtcgcagggctcctacacgatctacatgaagattgtcggggacgacaacgaggagctgagctgcatctcgttcgggttcagcatcggcttcgtcgcgtccagctgaacgcgtccgagcctgggcacgagaggcagccagcccatggatgtaaattacgtggagcacactctgtatcctatgactttcaagtatctaggtccatgtaagctttttgtgggtgtctgtgttcaactgagacgtttttatccggagttgaacatcacaataaagcaaagtcactgataccatgtaatggaactctgagcgcttgatgggacaaaaaaaatttagactcacaataaagacggtttgtgtttgtgc

SEQ ID NO: 1443 - DNA, 317 bp, Zea mays
  Clone ID: PAT_MRT4577_164782C.1
tctcactaccccctccggtccgggtccgggtccgtaaggtcctccggggttcggtttcctgggtaaccggatcaaaatggcggcttcggatgttgattaccgcggcttcatcggcggcctcccctgggccacggacgaccactccctcaacaacgccttcagcacctacggcaaggtcctcgagtccaagatcatcctcaatcgggagacgcagaggtcccacggcttcagcttcgtcaccttctccacggaagaggcgatgcggaacgccatcgacggcatgaacggcaatgagctggacggacgcaacatcaccg

SEQ ID NO: 1444 - DNA, 545 bp, Zea mays
  unsure (1)..(545): unsure at all n locations
  Clone ID: PAT_MRT4577_164831C.1
tggagctcgagggccgtttttttttttttttttttgggggggcaccgaggggggnaggaaatttttgaattggatagattagggagggtgcacattcatcacccatgttttatttgccgacagtcaaatcccaacgagcatagctccgaccgaacggacacatcgcatgcttattgtgtgcatccctctctaggagggggggggccgctctacatctagaaaaacccaccccaactacaaatgcgaccgaccgagagttgccagttgacccattattattcctccgtctgatcgacataacacactggtttgcttcattcatctgtccgttcttttttttaggcctgtccctcaagcaggatcgtgttcgaagggccacacccagtgcccagttgccgactctccttagctggcgcggccgacttggagatcttgtttgtggcttgcattctgctcgttggggaagtaactctctatgaaggctgtcaggtgcgggtcgttgaaccttggtgccgcaccatgcaggtttgtgcaggttgttattg

SEQ ID NO: 1445 - DNA, 1464 bp, Zea mays
  Clone ID: PAT_MRT4577_165073C.1
gactcctacctgcgattgggccgggcggggccgattcgcgaaggcccatttcgtcgtctctcgctccctcggtccttccttcacccatctcacccgcgacccgcccctttcccctaagccatctccttcctcctcacctcgccatggcgttcttctctcatcaccatctccagcagccacacgcgcagcagccagtgctcccttccttcaggaacgcgctaccggtgcctgtggatggccagatcccagcgcccctcaccttcttcaacccgccgcctgccttcccggagcaacccgcgcaggcacctctggtggatgcggtgggcttgacggcagctgcggggcttgggtggaggcagccgagggagcaggaactgcttggggaaaactcccagatgtcgtccattgattttctgcagacgggctcggcagtgtcgacggggttggcgctgtctctggaggaccggcgccacggcggcggcggggctgggaactcctctggcgattcaccgctgctcctgctgcccatgctggacgatgacatctcacgcgaggtccagcggcttgacgctgatatggaccgctttattaaagctcagagtgaacggctgaggcaatctatactggaaaaagttcaggcaaagcaatttgaggcactggcctcagttgaggacaagatactcagaaaaataagggacaaagaggcggaagtggagaccataaacaaaaggaactctgaactagaggaccagattaagcatttgggagtggaagttggtgcttggcagcatagggccaagtacaatgaaagcatgatcaatgcactcaagtacaacttggaacaagtatgtgctcaccagagcaaggatttcaaggaaggctgcggcgatagcgaggtagatgacacggcgtcctgtcgcgatggtggtgctatcaattttcaactgactccgaaggagaacagacaaccgaaggatttaacggcttgcagggtctgtaaatcaagtgaggcatccatgctcttgctgccgtgtcggcatctttgtctatgcaaggagtgcgagagcaagctgagcatctgccacatgtgccagtcctccaagatacttggcatggagatatattatgcgtagaatagaatttatgtatcacatgagtatcgtacgagatactgctatgttaatacgattaatctattgccaaactttagaacctatgtaccagtaccctatgacttgccactggatcaaaagacactgccgtttatggtagatttaacgcagcaaatttctttgcgaagcttattgttggtttgtgcccctagtagacttggcagagtttgtcttgtgcgactgattgttaccgtctatgtatttccattagcagaccctttcaggcagtgtttggaactcaggaaatttcaccagtgctgtgttttcgctgctaaattgaattgatttatgt

SEQ ID NO: 1446 - DNA, 1547 bp, Zea mays
  Clone ID: PAT_MRT4577_165077C.1
aataagttatgttctgtattcctagttatcattttgccatttgccacccccaactcccgagggcccatttcgccgtctttcactccatcaccccctctcccccgtccctttcccctcagccctttcccctcagccatctccttccccctcacctcgccatggcgttcttctctcaccaccatctccagcagccacacccgcagcaggcaccgcccccgaatcagcagcagccggtgcttccttccttcaggaacgcgctaccggtgcctgtggatggccagatcccagcgcccctcaccttcttcaacccgccgcctgccttcccggagcagcccgcgcagacaacgctggtggatgcggtggggctgacggcagctgctgggcttgggtggaggcagccgagggagcaggaactgcttggagaaaactcccagatgtcgtccatcgattttctgcagacgggctcggcggtatcgacggggctggcgctgtctctggaggaccggcgccacggcggcggcggggctgggaactcctccggcgattcaccgctgctcctgctgcccatgctggacgatgacatttcacgcgaggtccagcggcttgacgctgatatggaccgcttcattaaagctcagagtgaacggctgaggcaatctatactggagaaagttcaggcaaagcaatttgaggcactggcctcagttgaggacaagatattcagaaaaatacgggataaagaggcggaagtggaaaccatcaacaaaaggaactctgaactagaggaccagattaagcatttgggagtggaagttggtgcttggcagcaaagggccaagtacaatgagagcctgatcaatgcactcaagtacaacttggaacaagtatgtgctcaccagagcaaggacttcaaggaaggctgcggtgatagcgaggtagatgacacggcgtcctgtccctatggtggtgctgtcaatttgcaactgatgccaaaggagaacagacaaccgaagaatttaacggcttgcagggtctgtaaatcaagtgaggcatgcatgctcttgctgccgtgtcggcatctttgtctatgcaaggagtgcgagagcaagctgagcatctgccccctgtgccagtcctccaagatacttggcatggagatatattatgcatagaatataatttatgtatcacattagtatcgtacgagatactgctatgttaatacgtcaatctattgccgaagttcagaacctatgtaccactattgacttgccactggatcaaaaaaagactgccgtttatggtagatttaacgcagcaaatttctttgcgaagcttaaaaaaaaaaaaacggaaccatcgttgatttgtgctcctggtaaacttcttggcggagtttgtcttgtgcgactgattgttaccgtccgtctgtatttccatcatctgaacttctcaggccgtgtttggaactcagaaaatttccccggcccctgtgctttgactgctacattgacttggcaatttggtaaatttttatgtgtatatat

SEQ ID NO: 1447 - DNA, 392 bp, Zea mays
  Clone ID: PAT_MRT4577_165108C.1
ttcttactcgtccgaggacgcgggggggcgtttgtttggttctggagaagccaccggtgacggcgttcgctcacaagacgctgctggagggccactacgaggcggaggccaaggcgccagcctcgttcgggcccgtgggcgccgtgctgctggagaacgagcaccacaaggagatcttcatcaaggagatcaaggtcgtcaccggcagtgacagcagcaccagtcgtcaccttcggctgcaactcctgggtgcactccaagatggacaaccccgagaagcgcatgtccttgaccctcaagtcctacctggcgtgcgacacgcccaagggcctggaggacctgatgaagaaagacctgcatgcgcttaggggcgaccggcacagtgagcgcaa

SEQ ID NO: 1448 - DNA, 1998 bp, Zea mays
  Clone ID: PAT_MRT4577_165280C.1
acgtacacaccagatgcaagatggactgcatttcttttcctacacggctactacacctacattacactagcattagtcaaagcgtccagtagatcagtttttacgcgtagctacagatggatgtgttttttttttcattttcatgtcgccgcgggctgccgacgcgactgctgttaattaggttcccccgttctcctagctggctgccacggacggttgcgaacgcgtgggccggccgggctcggcgcacccaccgggcacaggaacaggaagccggaggcgaagatgtcgtcggtgttcaccacggcccccttcttggcttcctcgcctcgtcttctcctacggtcccctgattaagtgcattttaaatcccaagacgtctctcactcttcagccgctttacaactccccaccccatcccatccacacacacttcacccagcgcggcggccgccggccgccggcaatggaggccgtggcgcgcagcggcgactacctttggcggttcgtggcggagacagagtggtacaacgaggttgtcctcagcgccgtggcgccaggcgactggtggcgcggcctgccgcacccggtgcagtcatggatgcgcaactgcgtcggcggttacctcctctatttcatctctggtttcctctggtgcttcgtcatctactactggaagcgccacgcctacatccccaaagatgccatccccacaaatgaagctatgaagaagcaaatagttgtagcatcgaaggctatgcctttttactgcgctcttccaactttatctgaatatatgattgagagcggatggactcggtgctacttcaatatcagcgaaattggtttttctatgtacctctgttatatggctatgtatctcatctttgtggagtttggaatttactggatgcacagagagttgcatgacataaaaccattatacaaatatctgcatgcaacccaccatatttacaacaaggagaataccttgtctccatttgctggacttgcatttcatccactggatggtattctgcaagcaataccgcatgtgttcgcgctcttcctctttccaacgcacttcaggacacatattgcactcttgttcctagaggctgtgtggacaacaaacatccacgactgcattcatggcaagatatggccagtcatgggcgctgggtatcacaccattcaccatacgacttaccgccacaactatggccactacaccatctggatggactggatgtttggtacgctcaatgagccagatgatatcctcaagaaggcttgagtttctcgtagctgtggttttcctacggtgctggatgtgcttggtctgttctgtccccagtgcctctaatccgctgagcctgttcagcactgtctgtttatgtaggcatcagtgtgttaattagtttgctaggttcatatggctttgtgcttattctgtaatttagtgatgtttgtctcatgacgcaacggagttcaggacgaataaaactttgctagacacattctggattccagctgcttgtacaatgttgcaactcaactgtcaatataggatgtaaaacggattccttctagtcttgtacctggtgagttatttgtggtttctgtgcatgcattgctcagcctatgaatgttgcttatgttttgtggtcaagccaaatgaaggtcacatttgaaatccaggtgtcaggatgcattgtcaaatcaccccaactgacaattgggtatccgtttccaaatgctgctgtactgaaggtggttaagttggcccgaagacatgcttgttcattgcttgctcttgttaagatagtggatacccttctttgtgaaccacatatcacttatgaaaataaaatgtatagcttcctcataaatctgtctttctccttgaaactgatatccggctagttcagacatctgtagtgtctgatgtagttccgaaacagagaaacttttcgatcgaccaaaaatacccttctc

SEQ ID NO: 1449 - DNA, 743 bp, Zea mays
  Clone ID: PAT_MRT4577_165318C.1
cgcgacccaggtcatgagaccattagcctcatactaaggccacttttgtagcggcaatggcggccacaagatgttgccttcttatgctccttggcctttgtgaaagtgctgttacgtcaaccattcacaccacattgctacaagctgctatagcttcccttcttcccccgtacctctaaccagcggagtcatatggaatggcgaaaacccaaactttcaaccctataggatccaacacggaatcgcagctggcatcttacctttatcacccttgctcctacaacaattatgagccctattacagtcagtcaccttcgttgcatttattggcacaaaacatcagggcacaacagctacaacaacttgagctagcataccttgctgcctactgtcatcaacaacagtatgttacattcaaccaactaactggattgaactatgcttcttattggcacaacaacaactacgatccagtcagctatgtgctgcctaccctcagcactttcttccattcatccaactgacagctttgaactctcctgcttatttacaggaccaacatctactaccattcagccagtctagctggtagggagccctgctacctttttgacacaaccacaatttgttgtcggtctaccagcacgctgtgcctaacgctggcaccctcttaccactgcaacaattgctgccattcaaccaacttgctttgaaaaacccaacaggtttcttaccaacaaccc

SEQ ID NO: 1450 - DNA, 376 bp, Zea mays
  Clone ID: PAT_MRT4577_1653C.1
ttctgttggcttctactccccctccggttcgggggcaggttaatgaggttctgcggggttcgggttcgagggtgagccggatcgagatggcgtctatggatgttgatcaccgctgctttctcggcggccttagctgggccacggacgaccactccctccacaacgccttcagcacctacggtgaggtcctcgagttcaagatcattctcgatcgggagacgcataggtcccgcggcttcggtttcgtcaccttctccacggaggaagctatgctgaactgccatcgagggcatgaaactgcaaggagctggacggccccaacattaccgtcaacgaggtccacttcccctgcggccttggaggctgtcgccgcccg

SEQ ID NO: 1451 - DNA, 3477 bp, Zea mays
  unsure (1)..(3477): unsure at all n locations
  Clone ID: PAT_MRT4577_165462C.1
gattaactcagtctcaacgatattggtgcagtaggtatctcatgggaagtcatatctgcagttctctagtgctactggtgatttgtctgcaacagagaacagcctccctcaacaaaatgatggttctctggagggcagccattggctatccatttttgaagacacagtcatccaatctatctgatatcctaaaagacagctttaagaaaactgacagttttacaagatggatgagcaaagagcttcctgaagtggaagattctcaaattcattctagttctggggcgttctggagcactgaagaagcaaataatatcatcgaagcatcaaaccatgaggcactggatcagttcactgtttccccgatgctctcgcaggaccagctctttagtatagttgacttttctccaaactggacatatgtaggttcaaagactaagattttagttgctggtaacatcctgaatgacagtcaaatcaccgagagatccaagtggtcatgtatgtttggagaagttgaagttccagcaaatattttagcagatggtactctcatctgttactcaccgcagcataaacccggtcgagttcctttttatattacctgctccaacaggttggcctgcagtgaagtgcgagagtttgaatttcgaccaactgtctcccaatacatggatgctcctagtccacatggtgaaacaaacaaagtttatttccagatacgccttgacaagttgttatcccttggaccggatgagtaccaggcaactgtatctaatcctactctggagatggttgacttaagcaggaagataagttcactgatggcgagcaacgatgagtggtccaacttgctaaagttggctgttgataatgagccttctactgctgatcagcaggatcagtttgctgaaaacttgataaagggaaaattgcatatctggcttctaaataaagttggtatgggtggcaagggacccagtgtgttagatgatgaagggcagggcgtgcttcacttagcagctgcacttggatatgattgggctataaggccaacacttgctgctggcgtgaatattaatttcagagatattcatggctggactgcactccattgggctgccttttgtggccgagagagtactgtagttgcgcttattgcactgggagcagctcctggagctttgacagacccaactcccgatttccctggaagtacaccagcagatcttgcatcttctaatggtncaaagggaatatctggtttcttggcagagtgttctctgaccagtcatcttcaggtccttaatctgaaaggagctaatatggctcanatatctggtctacctggtattggagatgntaccgagagagattcactgcagcctcccagtggagattcattgtaggagacctgactgactacgcgcgtccacagagctgtctactcctttggtccacgcttttttcgctgatgatcccaccgtgaccgcgggccggaaaaaaaaaaaaacaacaacagtccctcccctcccctcccctccctgctcctctaccccttcctctcccggcgaccagctggcctctcctttgttgaggcgagagacccccacccgatccggcgatggacgccgcgtccaggccgcctccgccccacggaacaggggtccgcgtccgcgccccgctggtggagtctgtctcctgctactgcagattagatacaggccttaaaactgttgttgaggccaggaagtttgttcctggcgcgaaaatgtgcatgcaacctgaagtcaaacaaaacaagcgcaagtcaaggggctcaaaaaaggaaaggtgcaggactcaagcaccacttttacctggccttcctgatgatcttgctattgcctgccttatacgagttcctcgacttgaacagcccaaactcaggatggtttgcaaaagatggaaccgtcttttgtctgggaattacttttactccttgcgtaagaaaattggagtggcagaagaatgggtgtatgtctttaaaagggaccgtgaagggaagatatcctggtatgcctttgatccactccaccagctatggaagtcactcccaccagttccacaagagtattcagaagcattgggctttgggtgtgccgttctgagtggttgctatctgtacttgtttggcgggaaagatcctttgaggggttctatgaggcgtgttgtattctacaatgctcgtacaaacaaatggcaccgggctccggatatgatgaggaaacgtcacttttttggttcttgtgtaataaacaattgtctctatgttgctggaggagagtgtgaaggaatacagagaacgctgcagtctgcggaagtttatgatccaaataggaacagatgggcctgtgttactgaaatgaacaatgggatggtgcctttcattggagttgtatatgatggcaagtggttcttaaaggggctagattcccatcgccaagtaactagtgaggtctacttaccatcatccaatacatggtcagcaattgatgatgagatggtcacaggctggcggaacccaagtatttctttcaatggccgtctctattcagctgactgccgggatggctgcaagcttagagtctatgatgagaacacaggaacatggacaaggttcatggacagcaagcaccacttgggcagctcacgtgcctttgaagctgcagctttggtgtcactaaatgggaaactctgtgtcatcaggaacaacatgagcataactcttgttgatgtctccaacccaacaatgagtgttgagacagatagtgcgcgcatgtgggaaactgttgttcggaagggccagcacaggtcgtttgtggcgaacttatggtcgagcattgcaggacggaacttaaagagtcacattatccattgccatgtgctgcaagtttgagggcaggttttgttagtgggaacatgatcaagttttttaagaagcaaaaggttcagatcagtgacagaaccctccatttcgaaggtagtaaggtttcattgcagaatcgcggggaaaaaggtcattggcgtgccactgctgcccccaaagtcccaaatagttatttgctctcttccagaactgaaaattccaattactttctggcaacatttgaagactcttatcattcatggataaggtttttcagattttgagtgcaaaccagaaagtgagtaggaacttccctagtgtaatgacattttccccttgctggcaggctgggaaatgtgtttggtggatatattggtctcttatcatatttatctatctttgcatcgtgtaatatgtggcatcttactgtgtaatgttggtgtatattgtagtggcggactagctagactccaggattagagtagtcaggattatgcctattatgcttcaattttttgttggaatgttcataaatatatgacgccattgacgttttttcattgacgttt

SEQ ID NO: 1452 - DNA, 637 bp, Zea mays
  Clone ID: PAT_MRT4577_165711C.1
cgggcccctctcaccaacggtgttttcggtgtgagaaaacccaattgttcaaccctacaggacccaacaggcaatcacaggtggcctctgacctatatcacccttgtctctccaacaatcatcagccctatcaccagagatacctttggtgcatgtagtggcacaacattttttgtcacaacatctacaaccacttgcgctagcaaaccttgctgtatactctgagcaacagcagtttcttacattcaaacaactggctgtagtgaactgtgctttatatgcgcaacaacaacaagtaccatacagacagatctgtggtgtctacccacaggatttttttacatacaaccaactgacagtattgaactcttctgcttattcacagcagtcacatcttctaccattcagccagctagctggtgtgagccgtgataccttgttgacacaaacacaggtgttgccgttataccagcacgctgcgcctaacgctggcactctcttacaactacaacaattggtgccattaaaccaacttgctgtgacagacccagcagcattctaccaacaacccatgatgtggtggcgccctcttttagatgtcttatgagttatagctcaattataaagttttatgtct

SEQ ID NO: 1453 - DNA, 380 bp, Zea mays
  Clone ID: PAT_MRT4577_165843C.1
tttccacgagggctcaaaggccgacttggaggactttggagtccactccggtgatatggaatcggagcctcggggaatgggctgacgactacggcatgtagatcaagcccttggccgacaagagcacttatttcagagatggcttacgcaccatgactactgctggttatgatgccactgcacatagggtggccaaagggaagaggtagaatcaatacaggggtatacgccagcgcccttggggtaagcgggctgctgtgatcagtgattcgcacaagggcgctcgcgaatggcttggtactttgaatagtccggacgtagacgaaagagcttatgatgctgatgcgcgctagattcatggcaagaaggtcaaggttcac

SEQ ID NO: 1454 - DNA, 315 bp, Zea mays
  Clone ID: PAT_MRT4577_165929C.1
acatctagagggtaatgggtattgggaggggatacatcatccaacaaattgcaggggggctaagcttgaaaccctgaactaacagctggttctcccttacaccatcggatgcatgaatgtacttcgtttctacacacactactacagccttgaatggggtttccattccatccaacctcccgaccatgaaacgaactaaacgccccagtaagctcattcacaacagtcttcagggcggttgtttaaccgggcttcctacaaataaaccaaaggacttgtttgcaaaccgactttgcaatggaaccggatcatcca

SEQ ID NO: 1455 - DNA, 478 bp, Zea mays
  Clone ID: PAT_MRT4577_166188C.1
actgataccaactaccaacatacaaagcacagttttttaccaacaacggcatccaaaatattatgcgtccttatgctccttggtctttgtgcaattgctgctactgcgaccattttaccgcattgctctcaagctcctataacttctcttattgccccgtacctctcaccagcactgtcatcggtatgtgaaaacctcaattcttaaccctacacgatccaacaggcaatcgcagctggcatgttacatttatcatacttcgttccttcaacaaacatcagtcctattacaacaatcacttttggagcatttattgacacaaaacattatgatcacatcaactacaacaacttgtgctaacaaaccttgctgcctacttttagcaacatgcagtttcttccattcaaccaactaggctaattgaactctgtttcttatttgcaacaacaacaactaccaatgagtcaaaatacctttt

SEQ ID NO: 1456 - DNA, 454 bp, Zea mays
  Clone ID: PAT_MRT4577_166208C.1
tcttcctaccaactagcaccatacaaagcacaatagggtaccaacaaaggcagggaaagtattttacctccttatcctccttgctcttttttcaagtgcttctactgctaccattttcccacaatcctcacaacctcctatacctttccttattcccccgtacctatcaccagcgtattcttctttatgttaaaacccaattcttcaaccctatatgatccaacaagcaatcccagttggcatcttacctttatcacccttgttcctccaacaatcattatccctattacaacatttaccatttgtgcatttatttgcacaaaacattatggcacaacaacttcaacaacttgtgctatcaaaccctttcttccttacttttactatcaacatttttttcaattcaaccaactagcttcattgaactcttctttttatttgcaacaacaacaac

SEQ ID NO: 1457 - DNA, 1440 bp, Zea mays
  Clone ID: PAT_MRT4577_166288C.1
ctttcccactgccgtgacgattttcacagcgaattctccggccggcgccgccccgtccgtccgtccgttcttccgataccgaactcgccagtcgccacagcgatctctctcgctcgctccgccgacgcagcgctcggcttcagctcgagaggaggaaatggccagcagcggctacgaagggatcctcctggggatggggaaccccctcctcgacatctccgctgtcgtcgacgagggcttcctcgccaagtatgatgtgaaaccgggcaatgtcattcttgctgaggacaagcatttgccaatgtatgacgaattggctagcaagagcaatgttgaatacattgctggaggagccactcaaaactctatcagggttgcccaatggatgcttcaaattcctggtgcatcaagttacataggttgcatcgggaaggataagtttggtgaggagatgaaaaaaaatgcacaagctgctggtattaatgcccattatcatgaggatgataatgctccaacgggcacatgtgctgtttgtgttgttggtggagaaaggtcacttattgctaacttgtctgcggcaaactgctataagtctgaacatctgaagaaacctgagaattgggcacttgttgagaaggcaaaatatatttacattgctggatttttccttacggtatccccggattctattcaacttgttgctgagcatgccgctgcaactaacaaggtgtttatgatgaacctttccgctccctttatctgcgaggttttccgtgatgcccaagagaaagctcttccgtacgtggattacatctttggaaatgaaactgaggcgaggacctttgctaaagttcgaggttgggagattgagaatgttgaggagatcgctttgaagatctcccaattaccgaaggcttcaggaacacacaagaggattactgttatcactcaaggttgcgatccggtagttgtggctgatgatggaaaggtgaaaactttccctgtgatcctcttgcctaaggagaagcttgttgacaccaatggtgcaggtgatgcgttcgttggaggcttcctgtcccagttggtacaagagaagagcatcgatgagtgtgtcagagctgcctgttacgccgccaatgttgtcatccaacgttctggctgcacttaccctgagaagcctgacttcaactagagccatttcagaatttagagtcttatggcatctggtctgtataattagtcgggttcgccttggtctgtttacggcacattctagtgtcaccgtacaggtcaaatgttcatgcgtgtaaggcgtgtcatactgtcatggcactctacaagtgcatgtgccagaaacgtgcatgcgtctctcggttacggactctttacagttgcatctaaaacaattcaaagcaccttgcggtgcatccttgaaaagtt

SEQ ID NO: 1458 - DNA, 1709 bp, Zea mays
  Clone ID: PAT_MRT4577_166289C.1
cctcgagccggccgggccgagcccacttgggtgggcggtggcacgtgaggctgccgctaggaaactccggcctccgggttctctgttctccctttccttccgactttcccactgccgtgacgattttcacagcgaattctccggccggcgccgccccgtccgtccgtccgttcttccgataccgaactcgccagtcgccacagcgatctctctcgctcgctccgccgacgcagcgctcggcttcagctcgagaggaggaaatggccagcagcggctacgaagggatcctcctggggatggggaaccccctcctcgacatctccgctgtcgtcgacgagggcttcctcgccaagtatgatgtgaaaccgggcaatgtcattcttgctgaggacaagcatttgccaatgtaagtctcgttgcccctttagctccccttgcagtttgaaatgttggtcatcgatactagcttgtcctgaacggagaatgggaaacaaattcttgatgttgtcacattaagcacccatgagacggggagaaacatagtggactcgtaatttttatggccaggtatgacgaattggctagcaagagcaatgttgaatacattgctggaggagccactcaaaactctatcagggttgcccaatggatgcttcaaattcctggtgcatcaagttacataggttgcatcgggaaggataagtttggtgaggagatgaaaaaaaatgcacaagctgctggtattaatgcccattatcatgaggatgataatgctccaacgggcacatgtgctgtttgtgttgttggtggagaaaggtcacttattgctaacttgtctgcggcaaactgctataagtctgaacatctgaagaaacctgagaattgggcacttgttgagaaggcaaaatatatttacattgctggatttttccttacggtatccccggattctattcaacttgttgctgagcatgccgctgcaactaacaaggtgtttatgatgaacctttccgctccctttatctgcgaggttttccgtgatgcccaagagaaagctcttccgtacgtggattacatctttggaaatgaaactgaggcgaggacctttgctaaagttcgaggttgggagactgagaatgttgaggagatcgctttgaagatctcccaattaccgaaggcttcaggaacacacaagaggattactgttatcactcaaggttgcgatccggtagttgtggctgatgatggaaaggtgaaaactttccctgtgatcctcttgcctaaggagaagcttgttgacaccaatggtgcaggtgatgcgttcgttggaggcttcctgtcccagttggtacaagagaagagcatcgatgagtgtgtcagagctgcctgttacgccgccaatgttgtcatccaacgttctggctgcacttaccctgagaagcctgacttcaactagagccatttcagaatttagagtcttatggcatctggtctgtataattagtcgggttcgccttggtctgtttacggcacattctagtgtcaccgtacaggtcaaatgttcatgcgtgtaaggcgtgtcatactgtcatggcactctacaagtgcatgtgccagaaacgtgcatgcgtctctcggttacggactctttacagttgcatctaaaacaattcaaagcaccttgcggtgcatccttgaaaagttggggc

SEQ ID NO: 1459 - DNA, 348 bp, Zea mays
  Clone ID: PAT_MRT4577_166427C.1
gagctccccttcttcccccatacctgtcaccagagctgtcttcggtatgccaaaacccaagtcttcaaccccacaggattccaacaggcaatcgcaactggcatgttaccttcataaccctgggtcctccaacaatcatcagcgccgaggagagggggtacccttggtgcatttatgggcacaaaacatcagggcccaacatctacaacaacgtgtgctaccaaaccttgctgtctactgctcagcaacatgagggtgcttccagtcaaccaactagctgcattgaactctgcttcctatttgccacagcaacaagtgccattcaaccagcttgctgctggctacccc

SEQ ID NO: 1460 - DNA, 230 bp, Zea mays
  Clone ID: PAT_MRT4577_166466C.1
tctcgtgtctgggattcgccatgcagatctgtacgagaactgatgctctggatgttgcacgacataccactgctgctgttgctaagggttttgccattggctctgcagccttggtttcccttgcactagggggtgcgtttgtaagtcagtctgctagctcctactgtttatgttctgagtcttaaagttttcatcgggcttatagtcggtgttatgctcctgttctggtt

SEQ ID NO: 1461 - DNA, 256 bp, Zea mays
  Clone ID: PAT_MRT4577_166560C.1
ggcgacagagagcatcggaactggcgccggagatggtcactcagaccaagaggtggagctctgaacagtgaggtgggaattgggatgactcactgacggagatggctctgcgcgtgtgcgtagctttactagatcaagtgttttcgttgttttttcttgggacggcgtatatgcacttgtgtggcgtggtcgtgtgccttgttctactggggaacgggtccctgcggtactggtgtgctgccccgctccgttccgt

SEQ ID NO: 1462 - DNA, 324 bp, Zea mays
  Clone ID: PAT_MRT4577_166647C.1
gttggcttctactccccctccggttcgggttcgggttcgtgaggttctacggggttcggtttcgtgggtgagggatcgagatggcggcgtaggatgttgagtaccgctgcttcgtcgagcggactaacctgggccacggacgaccactccctacacaacgccttcagcacctacggcgaggtcctagagtacaagatcatactcgatcggaagacgcataggtcccgcggcttcggcttcaataccttctccaccaacgatgctatacttaacgccatggagggcatgaactgcaaggagctggacatgtccaacatcacagag

SEQ ID NO: 1463 - DNA, 282 bp, Zea mays
  unsure (1)..(282): unsure at all n locations
  Clone ID: PAT_MRT4577_166663C.1
tgctaaggcactcgnangtaatcacgtaattctactcgatgcaaggctcaacagccgacgcagagagatccgctggtggaggctgcagaccattatgtacaactgtctcctcatctccgtcgcattcatcatcgtatccgagcacaacatcgtgcacaacctcaaggccgccgctccattcaacactgtagacttagtaataaacatacagtaactagtatatatactgatcggtttggacgagtgatgggttaatcagtttcttaattaactatagctact

SEQ ID NO: 1464 - DNA, 222 bp, Zea mays
  Clone ID: PAT_MRT4577_166819C.1
aaagcaccatttttttcttaggattaacttaaaacaaatcctgacaggagtaacagcattcatagatccacagtccatgctggttgatgcatgggtctgctggagcccacgatgaacacagcactaacaactgacacagagccaccttgcaatcaaaaacactagatgggctataacaaacgaaacgaacgaaaataaaatctttggacttagggaaaaata

SEQ ID NO: 1465 - DNA, 544 bp, Zea mays
  Clone ID: PAT_MRT4577_166846C.1
gtacaagctttttttttttttttttttttttttttttttttttttttttttttttttttttttttttttttaaaacaaaaaagggactttcttatttctgggaagccacaaacatcaaacaaaaaactttattattgaactataacccaaaaaaaatctaaaagagggcccccccaatgatggggtggggggaaaacactgctagggttggcaaaacaaggtgggtgaatggcagcaattgttgcagttgtaaaagggggccagcgttaggcccaacgggctggtaaaacggcaacaactgggggtgggtcaaaaagggagcagggctcacaccaactaactggctgaatgggaaaagttggtgctgctggaaataaacaggaaagttcaatgctgccagttggttgaatggaaaaaattgctggggggaggcaacagggacctggctgaatgggaattgttgttgttgcaaataaaaagcaaagttcaatgcagctagttggttgaaaggaaaaaactgctgttgctgaaagtaagcaacaag

SEQ ID NO: 1466 - DNA, 474 bp, Zea mays
  Clone ID: PAT_MRT4577_166849C.1
aaaaaggactttcttatttcggggaagccacaaacctcagacaaaaaactttattattgaactataacccaaaaaaaatctaaaagagggcccccccaatgagggggtggggggaaaacaccgctaggtttgtcaaaacaaggtggttgaatggcaacaattggtgcagttgtaaaagggggccagcgttaggcccaacgggctggtaaaacggcaacaactggggttgggtcaaaaagggagcagggctcacaccaactagctggctgaatgggagaagttgttgctgctgtaaaaaaacaggaaagttcaatgctgccagttggttgaaaggaaaaaaatgttggggggaggcaacagggagctggctgaatgggagttgttggtgttgcaaataaaaagcagagttcaatgcacctagttggttgaatggaaaaaaccgctgttgctgaaaataggcaacaaggtttgcta

SEQ ID NO: 1467 - DNA, 300 bp, Zea mays
  Clone ID: PAT_MRT4577_166859C.1
gcgtgcttgcctgtgccaccatcatcgtgtcgctttagaatgccttctcctcctaccacgagagtctgggctccaaggtcatcaccgaccgggagactgtgaggtcccgcggcttcagcttcgttaccttctccttcgagaactccatgctcgacgctatcgagaacatgaacggcaaggagctcgactgtcgtaacatcaccgttaaccatacccatttcccgttgcagaagctgtggcggcggtggctacgtcggctgtcgcagcggcttgccgcggttatcgtggcgggcgccgtga

SEQ ID NO: 1468 - DNA, 646 bp, Zea mays
  Clone ID: PAT_MRT4577_166961C.1
cctgcacagcaggtgcatttttcagaggatgaagaactacacgatctatgcagtttccatcaccatccgtattgtgcttggctttatgcttattgccctgatctggaaatttgatttcgctcccttcatggtccttatcattgccattctcaatgatggtactatcatgacaatatccaaggacagagttaagccatctcccttgcccgacagctggaagctcaatgaaatcttcgccactggtgttgtgctgggaacctaccttgctctggtgactgtcgtcttcttctggctcatccacaagacagacttcttcaccaacaaattcggtgtcgagtcaatcaggaacaccgaatttaaggagatgtctgcactgtacctccaagtcagtattgtgagccaggctcttatctttgtgactcgttcccgtagctggtcctttgttgagcgcccaggtttcctcttggttaccgccttcctcctcgcacaattggttgcaacactcatcgctgtctatgccaactgggacttcgcaaggatcaagggaatcgggtggggctgggctggtgttatctggctgttcagcattgtgttctacttcccactcgacattttcaagttcttcatccgatttgtgctgagtgga

SEQ ID NO: 1469 - DNA, 1381 bp, Zea mays
  Clone ID: PAT_MRT4577_167145C.1
gacacacaccgctgcttcaagaaaccaccgagagcccaaccgcacaggcaggagagagagcagggagccagggacagtagcgtggggccggggagcaaagatggaggggaaggaggaggacgtgcgcctgggcgccaacaagttctcggagcggcagcccatcggcacggcggcgcagggcgccggggccggggacgacgacaaggactacaaggagcccccgccggcgccgctgttcgagcccggggagctcaagtcctggtccttctaccgcgcgggcatcgccgagttcgtcgccaccttcctcttcctctacatcaccgtcctcaccgtcatgggcgtctccaagtccacctccaagtgcgccaccgtcggcatccagggcatcgcctggtccttcggagggatgatcttcgcgctcgtctactgcaccgccggcatctccggaggacacatcaacccagctgtgaccttcgggctgttcttggccaggaagctgtccctgactagggccatcttctacattatcatgcaatgcctgggtgccatctgtggagctggagtggtgaagggcttccagcaggggctttacatgggcaacggcggtggcgccaatgttgtcgcccctggatacaccaagggggacggccttggcgcagagatcgttggcaccttcatcctagtctacaccgtcttctcggccaccgatgccaagaggaacgccagggactcccatgtccccatccttgccccactgccaattgggttcgcggtgttcctggtccaccttgccaccatccccatcaccggcaccggcatcaacccggctaggagccttggcgccgccatcatctacaaccgggatcatgcgtggagcgaccattggatcttctgggtcggccccttcatcggcgccgccctggctgccatctaccaccaggtgatcatcagggccatcccgttcaagagcaggtcttaagctgccgcgggtgtgctgagacatgtggggaatgtattgtctgcccacgcctagtttctctgctgaatcttccatctctcttcccttcaagactgctcactgctgcactgctctgttatctgaacccagaacttcgtgtactcctgtaccgagctgtgtgtatgtttttttttcttccatcgtgtttgttgcaagggttcccgtctccttttatgcgttgggatcgtggcaagaaagggcagatatcatgtggaaacgtgggtttataactatcagctggatttttcatccaagtggaatcgattcagaattttcttttaaaaaaaaaaaaaaaaaaaaaaaaaaaaaaaaaaaaaaaaaaaaaaaaaaaaaaaaaaaaaaaaacacctcgaggaggggccg

SEQ ID NO: 1470 - DNA, 1436 bp, Zea mays
  Clone ID: PAT_MRT4577_167152C.1
cattgggtacctcgaggccggccgggaaaaaaaaaaacagtcacagacacacaccgctgcttcaagaaaccaccgagagcccaaccgcacaggcaggagagagagcagggagccagggacagtagcgtggggccggggagcaacgatggaggggaaggaggaggacgtgcgcctgggcgccaacaagttctcggagcgtcagcccatcggcacggcggcgcagggcgccggcgccggggacgacgacaaggactacaaggagcccccgccggcgccgctgttcgagcccggggagctcaagtcctggtccttctaccgcgcgggcatcgccgagttcgtcgccaccttcctcttcctctacatcaccgtcctcaccgtcatgggcgtctccaagtccacctccaagtgcgccaccgtcggcatccagggcatcgcctggtccttcggagggatgatcttcgcgctcgtctactgcaccgccggcatctccggaggacacatcaacccagctgtgaccttcgggctgttcttggccaggaagctgtccctgactagggccatcttctacattatcatgcaatgcctgggtgccatctgtggagctggagtggtgaagggcttccagcaggggctttacatgggcaacggcggtggcgccaatgttgtcgcccccgggtacaccaagggggatggccttggcgctgagattgttggcaccttcatcctggtgtacaccgtcttctcggccaccgatgccaagaggaacgccagggactcccatgtccccatccttgccccactgccaattgggttcgcggtgttcctggtccaccttgccaccatccccatcaccggcaccggcatcaacccagctagaagccttggcgccgccatcatctacaaccgggatcatgcgtggagcgaccattggatcttctgggtcggccccttcatcggcgccgccctggctgccatctaccaccaggtgatcatcagggccatcccgttcaagagcaggtcttaagctgccgcgggtgtgctgagacatgcatgccagttcggaaggacgagcgtcttcctgtggggagtgtcttgtctgcccacgcctagtttctctgctgaatctccatctctcttcccttcaagactgctcactgctgcactgctctgttatctgaacccagaactttgtgtactcctgtaccgagctgtgtgtatgtttttttttttcttccatcgtgtttgttgcaagggttcccgtatccttttatgcgttgggatcgtggcaagaaagggcagatatcatgtggaaacgtgggtttatctatcagctggatttttcatccaagtggaaccgattcagaatttttttccaaaaaaaaaaaaaaaaaaaaaaaaaaaaaaaaaaaaaaaaaaaaaaaaactcgaggaggggc

SEQ ID NO: 1471 - DNA, 4104 bp, Zea mays
  Clone ID: PAT_MRT4577_167226C.1
taacgctcaagtccttctcctaagcaaagccccctcgcttttggcgtatgcccccgctggcgcgcccatgattcccgccgattcctccgcccgttcagtccagcaacccttgctgctgcagtgctgcggctagttcggtggcggggaaggaggaggaggcgagatcttggagtggggcgaagcggagatgtcgttgccgtcgaacaaccggaggacgtgctcccggagcagctctgcgcggtccaagcacagcgcgcgggtggtggcacagacgcccgtggacgcgcagctgcacgccgagttcgagggctcccagcgccacttcgactactcctcgtcggtgggcgccgccaaccgcccgtcggcaagcaccagcaccgtctccacctacctccagaacatgcagcggggccgctacatccagcccttcggctgcctgctcgccgtccacccggacaccttcgcgctgctcgcctacagcgagaacgcgccagagatgctcgacctcacgccacacgccgtccccaccatcgaccagcgggatgcgctcggcatcggcgtcgatgtgcgcacgctcttccgctcgcagagctccgtcgcgcttcacaaggccgccaccttcggggaggtcaacctactcaaccccatcctcgtgcacgccaggacgtcggggaagcccttctacgccatattgcaccggatcgacgtcggccttgtcatcgaccttgagccggtcaacccagccgacgtgccagtcaccgccgcgggcgcgctcaagtcgtacaagctcgctgccaaggccatctccaggctgcagtcgctgcccagcgggaacctgtcgttgctgtgcgatgtgcttgtccgtgaggtgagcgaactcacgggctatgaccgggtcatggcctacaagttccatgaggatgagcatggcgaggtcatttccgaatgcaggaggtccgatctggagccgtatcttggactgcactacccagccaccgacatcccgcaggcgtccaggttcctgtttatgaagaacaaagtgcggatgatatgtgattgctgtgccactccagtgaaggtcattcaggatgatagcctagcacaacctctcagcctctgtggttccacactcagggcttcccatggttgccatgcacagtacatggcaaacatgggttctgttgcatcacttgcgatgtcagtcactataaacgaggatgaggaggaagatggggataccgggagtgaccaacaaccgaaaggcaggaagctgtgggggcttgtcgtctgccatcatacaagcccgaggttcgtccctttcccactaaggtatgcttgcgagtttctcttgcaagtatttggcatacagctcaacaaggaggtggaattggctgctcaggcaaaggagaggcacatcctcagaacgcaaacccttctttgtgatatgctcctgcgggatgctcctgttgggatatttactcggtcacctaatgtgatggatctagtaaagtgcgatggagctgcattgtattaccagaaccagcttttggtgcttggatcaacaccctctgagtcagagataaagagcattgcaacatggctgcaggataatcatgatggttcaactgggctgagtactgacagcttagtggaagcgggttatcctggtgctgttgcacttcgtgaagttgtgtgtggcatggcggccataaagatctcttccaaagattttatcttctggttccgatcgcacacaacaaaggagatcaagtggggtggggctaagcatgaaccggttgatgcagatgacgatggcaggaggatgcatccacgatcttcattcaaggccttcttggaggtggttaaatggagaagtgttccctgggaagatgttgaaatggatgctatccattctttgcagttaatattacgtggctccctgccagatgaagatgccaacagaaacaatgtaaggtccattgtaaaagctccatctgatgatatgaagaagatacaggggctacttgaactgagaacagttacaaatgagatggtccgcttaattgagacagcaactgcccctgtcttggctgtcgacattgccggtaacataaatggatggaacaataaagctgcagaactaacaggtttacctgtaatggaagccatagggaggcccctgatagatcttgttgttactgattctatagaagtggttaagcagattttggactcagctttacaaggaattgaagagcaaaatatggaaatcaagcttaaaacattccatgaacatgaatgcaatggtccagtaatcttgaaggttaactcctgctgtagtcgggacctttcagagaaagtcattggagtttgctttgtagcacaagatttgaccaggcagaagatgattatggataagtatactaggatacaaggagactatgttgccatagtaaagaaccccactgagctcatccctcccatatttatgatcaatgatcttggttcctgcttagagtggaataaagctatgcagaagattaccggtataaagagggaagatgcgataaacaaattgttaattggggaggtcttcacgcttcatgattatggctgtagggtgaaagatcatgcaactctaacgaaacttagcatactgatgaatgcagtgatttctggtcaggatcctgagaagctcttttttggtttcttcgacacagatgggaagtatattgaatccttgctgacagtgaacaagaggacagatgctgagggtaagatcactggtgctctttgctttctgcatgtggccagtccagagcttcagcatgctctccaggtgcagaaaatgtcggaacaagctgcgacaaacagctttaaggaattaacttacattcgtcaagaattaaggaacccactcaatggtatgcaatttacttgtaacttattgaagccttctgaattgacagaggaacagcggcaacttctttcatctaatgttctctgtcaggaccagctgaaaaagattttacatgacactgatcttgaaagcattgaacagtgctatatggagatgaacacagtagagttcaaccttgagcaagctctgaatacggttctgatgcaaggcattcctttgggcaaggaaaaacagatttcaattgaacgtaattggcctgtggaagtatcatgcatgtacctttatggggacaatttaaggcttcagcagatcctagcagactatctagcatgcgcccttcaattcacacaaactgctgaaggacctatcgtgctccaggtcatgtctaagaaggaaaacattggatctggcatgcagattgctcatttggagttcaggattgtccatccagctccaggcgttccagaggccctgatacaggagatgttccagcacaacccaggggtgtccagggagggcctcggcctgtacataagccagaagctggtgaaaacgatgagcggcacggtacagtaccttcgagaagccgacacctcgtcgttcatcatcctgatggagttcccggtcgcccagctcagcagcaagcggtccaagccttcgacgagtaaattctgaccctcatgctgctggaactgcagcgagtgttctgccgtgtcgaagtctcggttgtagctagccaagtggctgctactgaaacatcggttggtcggttctggtatctagcacggcctgtgtagtgcggatagatttggttgtttggctttggagagataagctagctggctaggtgtaacgtaacgtcgaccgataactgtatgtgaatgatgatgagctgtgaggacgaataaaggcttcacttgtgttctctattgctcttcttagagtatgatggccaacagctgtacaggaaagcatccacctaaatctgggctcgctgaatgacggctaaaagttgtttggtggctttaaactcttttatgctttgtaatcccttacagtcggatgttggtctttaaactgtcagttaaatgctggtacggcggtaggtctgttttcttgatctctctgttgagcaaggccccccttttgttcggttagattacatgtaaccgttcagtttcttc

SEQ ID NO: 1472 - DNA, 351 bp, Zea mays
  Clone ID: PAT_MRT4577_167251C.1
gcagcaactgttggccttaccgagtttagattatgccagtgatgatgccacagatgatgaggcctaacatgatgtcaccattgatgataccacgcatgatttcactaatggtctttccgagcattatttaacaaatgatgatgccacaatgtcactgcgacgcctattcgcatataatgctgtatcaacagtaaccattcatgaacaacccaatggccatgacgaattcacctatgttcttacaacaactcattttttgagctacattctaaatataaatatgaaatttgtaccaaacaatgatttgacatgccatctttattaactcatgattattaactattactatta

SEQ ID NO: 1473 - DNA, 1477 bp, Zea mays
  Clone ID: PAT_MRT4577_167305C.1
aggtatactgaggcgaaggcaagctatctttgcgcttggggcaatgacgcagctcatgaggttataccgaggcgcgtcaattgctggttgaaaactatttccaaaccccctctgcggcccgcaagggccacagagaatttctggaagggctccctctaaccagggtaaagcccacactcatccattccatcatcccccttgcaagtatagtctcggcggctctagaagacgatgggcaaggacgacgtgatcgagagcggcgctggcggcggcgagttcgctgccaaggactacacggaccctcccccggcgccgctgatcgacgcggctgagctggggtcctggtcgctgtaccgcgccgtgatcgccgagttcatcgccacgctgctgttcctgtacatcacggtggccaccgtgatcgggtacaagcaccagacggacgcgtcggcgtcgggcgccgacgcggcgtgcggcggcgtcggggtgctgggcatcgcctgggctttcggcggcatgatcttcgtcctcgtctactgcaccgccggcatctcggggggccacatcaaccccgccgtcaccttcggcctcttcctggcgcgcaaggtctccctggtgcgcgcgctgctctacatcgtggcgcagtgcctcggcgccatctgcggcgtcggcctcgtcaaggcgttccagagcgcctacttcgacaggtacggcggcggcgccaactcgctcgcctccggctactcccgcggcaccggcctcggcgccgagatcatcggcaccttcgtgctcgtctacaccgtcttctccgccaccgaccccaagcgcaacgcccgcgactcccacgtcccggttctggctcccctccccatcggcttcgccgtgttcatggtgcacctggccaccatccccgtcaccggcaccggcatcaacccggccaggagcctgggcgccgccgtcatctacaacaaggacaagccctgggacgaccactggatcttctgggtgggccctctcgtgggcgctgccatcgcggccttctaccaccagtacatcctccgggctggcgccatcaaggccctcggctccttcaggagcaacgcgtgatgagcggggcttggctgtggagcaatggcgggcgacctacgggcgggggaagtcgtgagcgaggagaatgacatcatcgatcgacttgggtgccggtggttggttcgggtcgccttttttgtttcagcagctgctgcgttgcgcgcgtgcgtgagatttggtttggtttcgttcccctgcaatgtaatcatgtcgtgactctcaagggattattccgctctgctcttatggtctctgttttctatttaatgattgttattaccatgtagcagtaaccatcgtcatcagtgagaaccttgttgcttctgtctaaatcaaccgagacgtgtggagtggatgtggatcgagcaaaaaaaaaaaaaaaaaagcggcc

SEQ ID NO: 1474 - DNA, 1822 bp, Zea mays
  Clone ID: PAT_MRT4577_167306C.1
ctcgaggccggccgggccgggatccattccatcatcccctttgcaagtatagtctctctgctaagcgaagcgaagcttcaagctagtctcggcggctctagaagacgatgggcaaggacgacgtgatcgagagcggcgctggcggcggcgagttcgctgccaaggactacacggaccctcccccggcgccgctgatcgacgcggcggagctggggtcctggtcgctgtaccgcgccgtgatcgccgagttcatcgccacgctgctgttcctgtacatcacggtggccaccgtgatcgggtacaagcaccagacggacgcgtcggcgtcgggcgccgacgcggcgtgcggcggcgtgggcgtgctgggcatcgcctgggccttcggcggcatgatcttcgtcctcgtctactgcaccgccggcatctcggggggccacatcaaccccgccgtcaccttcggcctcttcctggcgcgcaaggtctccctggtgcgcgcgctgctctacatcgtggcgcagtgcctcggcgccatctgcggcgtcggcctcgtcaaggcgttccagagcgcctacttcgacaggtacggcggcggcgccaactcgctcgcctccggctactcccgcggcaccggcctcggcgccgagatcatcggcaccttcgtgctcgtctacaccgtcttctccgccaccgaccccaagcgcaacgcccgcgactcccacgtcccggttctggctcccctccccatcggcttcgccgtgttcatggtgcacctggccaccatccccgtcaccggcaccggcatcaacccggccaggagcctgggcgccgccgtcatctacaacaaggacaagccctgggacgaccactggatcttctgggtgggccctctcgtgggcgctgccatcgcggccttctaccaccagtacatcctccgggctggcgccatcaaggccctcggctccttcaggagcaacgcgtgatgagcggggcttggctgtggagcaatggcgggcgacctacgggcgggggggccgtgagcgaggagaatgccatcattcatcgatcgacttgggtgccggtggttggttcgggtcgccttttttttgtttcagcagctgctgcgttgcgcgcgtgcgtgagatttggtttggtttcgttcccctgcaatgtaatcatgtcgtgactctcaagggattattccgctctgctcttatggtctctgttttctattttaatgattgttattaccatgtagcagtaaccatcgtcatcagtgagaatcttgtagcttctgtctaaaaaaaaaaaaaaaaaaaaaaaaaaaaaaaaaaaaaaaaaaaaaaaaaaaaaaaaaaaaaaaaaaaaaaaaaaaaaaaaaaaaaaaaaaaaaaaaaaaaaaaaaaaaaccccctttcaaaattaaaggtttttgttgttccccaacccaaattccaaaaggccaaaaaataagggcccccccccccccggggaaacaaaaagggccttccaaaaaaaggaaacctttaataacccaatttaaaatttctaattctcgggaaaggggaaaatggaaaaaaaaaattttgaaaaaaggattcccctggaaaattttaaaaaaaaaaataacccaccattggggggaaaattcaacccgtggaattcccccaaaaatggggaaaaaaaaaggttcaacggtggaaaaccccaaggaaaaaaaaattttggggcccccgggaaggaaaaaaaaaccctggccaagggggaaacattaaggtttaaggaaccccaagggttaattaaaaaaaaggtcccaacgggaaaa

SEQ ID NO: 1475 - DNA, 243 bp, Zea mays
  Clone ID: PAT_MRT4577_167427C.1
agctgcgaacaaaaaccttgctcattcttctttcgtctcgtttcatagcgggagcaaccaaagggaacaacaggggtaccaacacctaatgcacaggtagaacggacactaacactgtgacagaggcgaacggcaacacgatactattgatagattacataactcggacacagacatgatgggcccacacatcatgccctccaaccaccgacgtctacgacgttgtcgacacacaacacacct

SEQ ID NO: 1476 - DNA, 1200 bp, Zea mays
  Clone ID: PAT_MRT4577_16750C.1
ccgcacacacacgcaatctccctcccaacaccgctgcctgagtggcgtccccatcccggggcgcagatccgcccgcctgatgggctccccatccatgtcgacggcgcccacgcgacaatccagcagagctcgaaaaaagggtacgaatacgaaccccaatccagggccggaggagggcgagcgaactcaaaagcaagccgttccagtccaatccgcctcagtccaaatctaatcgccgggtttaggcagaaggggcgggacgcggcgaggtttaggcggggtttgttttgtcccttccgtgcgattctgctctccgcgcgggaggcaagtactgacggaagcgaaggcgaaggcggaggagggggtccccggcggtggaagtggaacgcgccgatgcgcaagtttcaggactccatcaaggccctccaggccgacatcgatcacgccaatgcgatggcgtcggaattcctgagggactacgacggctcggtcatccagatgcgggtggcgtacagcgccgtcgcgcatttcctcctgcagtggaccgactgcaagctcgccggcgcgctcggcctcctcaaggttatgctatacaaggtgtgcgcggacggctcgtcggcgcttcctgattgggagatggaggccagcatcagggagttctacggcgtcattttcccgtcgctgctgcagcttccgagtggcatcaccgagctggacgacaggaagcagaggaagctctgcctgaagaaattcaggagcagggatgagcagctctcggaggtggacacggagagggagctcgagtgcgggatctgcctcgagggcccaacgtgctgccgacgtgcccacatgctctgcatgcgctgctttgaggattggaacgagaaatcgaagtcctgccccttctgtcgcgcctgcctggaggaggtgaagccgggcagcctgtggatatacaccgacgacagcgacgtggtggacatggataccttgactagggagaacatcaggcggctgttcatgtacataaataagctgccacttgtagtcctacatgtagttgaccttgacgtttacaagtaccgcatcaagtaaaatgcaactgacccttctggtgcaaaaaaaaaaaaaaagacgaacggtcgtaccgctttagagcatacgagcgcgcgcacgcgcgcacatagactgttatagagtgtc

SEQ ID NO: 1477 - DNA, 263 bp, Zea mays
  Clone ID: PAT_MRT4577_167607C.1
cggtggagagccttcctctgcggccttcttcgcgaaggctgggctggattacgattcttgctccacctttcagggttccgattgctaggctagctgcagctcaggtgcttgtctgagggtgcctccacattgaaccaccggattgcctgctgatggtggatgtggtgatccacagtatgatcgcagagccatgctatgtgaacattaactagtagcagtgctcataaaagctacaatcccatgtcctttttttccccagtcag

SEQ ID NO: 1478 - DNA, 2732 bp, Zea mays
  Clone ID: PAT_MRT4577_167692C.1
ttgggtacctcgaggccggccgggaggtgtattcataccagcactaatgcaccggatcccatcagaactccgcagttatgcgtgcctgggcgaccggaacccaatccacccctcgcccaatgcgtagttgtatctgcatctccaacaccaccagcagaggttccagttagtttttttttagattagaaaaatcgagtccaacagactcgccgcactgcgcgggatcgacctcgtcgcaactcccgtgtgcgccgccaataatggagacccgggacacggatgcgacgccgctcccctactcgtacacgccgctgccggccgccgacgccgcgtcggccgaggtctccggcaccggcaggacgcggagcaggcggcggcccctctgcgcggcggcgctcgtgctctccgccgcgctgctcctagccgtggccgcgctcgtcggcgtcggtagccggcccggcgcggtggggatgacagagtcggcggcctcgtcgccgacgccgagcaggagcaggggccccgaggccggcgtgtccgagaagacgtccggcgcgtctgacgacggcggcaggctccgtggagccggcgggaacgccttcccgtggagcaatgcgatgctgcagtggcagcgcacgggattccacttccagccgcagaagaactggatgaacgaccccaatggccccgtgtactacaagggctggtaccacctcttctaccagtacaaccctgacggcgccatctggggcaacaagatcgcgtggggccacgccgtgtcccgcgacctgatccactggcgccacctcccgctggccatggtgcccgaccagtggtacgacaccaacggcgtgtggacggggtccgccaccacgctccccgacggccgcctcgccatgctctacacgggctccaccaacgcctccgtccaggtgcagtgcctggccgtgcccgccgacgacgccgacccgctgctcaccaactggaccaagtacgagggcaacccggtgctgtacccgcccccgggcatcgggcccaaggacttccgcgaccccaccacggcctggatcgacccctcggacggcgcatggcgcgtcgtcatcggctccaaggacgacgacggccacgcgggcatcgccgtcgtctaccgcaccacggacctggtgcacttcgagctcctcccgggcctgctccaccgcgtcgacggcaccggcatgtgggagtgcatcgacttctaccccgtcgccacacgaggcagggcgtcggccaacggcgtcgacatgtccgacgccatcgccagcaacggcgccgtcgccggggacgtcctgcacgtcatgaaggccagcatggacgacgaccgccacgactactacgcgctggggaggtacgacgcggccgccaacgcctggacgccgatcgacgccggcagggacgtcggcatcggcctgcgctacgactggggcaagttctacgcgtccaagacgttctacgacccggccaagcgccgccgcgtgctgtggggatgggtcggcgagacagactcggagcgcgcggacgtgtccaagggatgggcgtcgctgcagggtatcccccggacggtgctcctggacaccaagacgggtagcaacctgctgcagtggcccgtggaggaggtggagacgctgcgcaccaactccaccgacctcagcggcatcaccatcgactacggctccgtgttcccgctcaacctccgccgcgccacccagctggacatcgaggcggagttccagctggaccgccgcgccgtcatgtcgctcaacgaggcggacgtgggctacaactgcagcaccagcgggggcgccgccggccgcggcgcgctggggcccttcggcctgctcgtcctcgccgaccgccgcctccgccgcgagcagacggccgtctacttctacgtggccaagggcctggacggctccctcgccacgcacttgctgccaggacgagtcccgctcctccagcgccaccgacatcgtcaagcgcgtcgtcggcagcgccgtccccgtgctggaggacgaggccacgctctcgctccgggtgctcgtcgaccactccatcgtcgagagcttcgcgcagggcgggaggtccaccgccacatcgcgcgtctaccccaccgaggccatctacgccaacgccggcgtcttcctcttcaacaacgccaccgccgcgcgggtcacggccacgaagctcgtcgtccacgagatggactcgtcatacaaccacgactacatggcgccggtggcagacatctgatcgatgcaatgcaaccacgccactctgcaccgcaacaaattttccaacacacataaatataccaagcaattcccatctgtcaaattttcttatttccctgccatgattttggtctctatttttcctgctggctacttcttatcttccagcactagtaatgtacgtactggctagtaactagggtatccagtgggaagacgtgtgtagcctctagttgtacatgcatgtatgatgctgtgtagcaccgcatcatgcacaccacaccaatgcaaatgagttataaatgtttttaagctccaaattaaattttcggtgcctgaagagtcaagttattggagaatgatgaatggatcagataataacgcagacttgcagagactaaaaaaaaaaaaaaaaaagcggccaaaagaggaaaaagaaagggcggccgctcgcgatctagaacaagt

SEQ ID NO: 1479 - DNA, 998 bp, Zea mays
  Clone ID: PAT_MRT4577_167838C.1
ccggccgggatcctctcctggctaccccacactcgccgctctggctcttcgaggaccgccacctgctcccgctcgacgcgcccgccgtcttcgaggaggtccagcggccacgctccgggaattctcacacttcaagcaagccagctgaacagatcaggcacagatggcagtttcatctgtccctggacgaagatggcacagacaactccagcttgttcaaggagaagctgacacacgctcttcgctacttcaaggagtccaccgatcaacatctgctggtccaagtctgggcaccagtcaagaatggagaccgctatgtgctcactacttcaggacagcctttcgtgcttgaccaccagagcattggcctacttcagtacagggctgtatccatgacctacatgttttcagttgatgcggaaaatgttggagacctgggcctacctgggcgtgtctataagcaaaaggtgcccgagtggacaccgaatgtgcagtactatagcagtggtgagtaccaacgacttaaccatgcgatcagctacaacgtccatggtacagtcgctctgcctgtttttgatccttccgctcactcgtgtatcgctgttgttgaacttataatgacatcaaagaagataaactatgcctgcgaggtcgataaagtctgcaaagcacttgaggcggtaaatcttaaaagcactgaaatacatgaccatccaaatgtccagatatgcaatgaaggccgtcaagctgcgctggtcgaaatactggagatcttgaccgtagtatgtgaagagcacaagcttcctttggcacagacctgggttccttgcaagtatagaagtgtcttggcgcatggtggtggtttaaaaaagagctgcttaagttttgatggaagttgcatgggggaggtctgcatgtcaactagtgatgtggcgtttcatgtgattgatgctcatatgtgggggtttagagatgcctgtgtcgagcatcacctacag

SEQ ID NO: 1480 - DNA, 209 bp, Zea mays
  Clone ID: PAT_MRT4577_167956C.1
aggccggcagcgagaagaagcaccacttcttgggctgattcgatgctaccgcatcgtcagtccctccccgtgtgctacgcgtgcagtgagatgagtgatatcgagcgcccgacgtgttgtgcgcgcgtacgtatgtatgcgctcgagtgatgcacgaataagcgtggctacgtaatctatggtatgtatacaggtgtagtatgcatgtg

SEQ ID NO: 1481 - DNA, 384 bp, Zea mays
  unsure (1)..(384): unsure at all n locations
  Clone ID: PAT_MRT4577_168108C.1
ctgtctgctcctccccctcttaccaagacctattcgggttagggttacttagggttttgtggaggggcgatggccgccgctgatgtgcagcaccggtgcttccacggcgggcttgcctgggccagcaactacgagtgcgtggagaatgccttcgcctactacggtgagatcctagactacaaggtcatcaccgaccgggagacggggaggattagcggcttcagcttcggtaccttctgctgcgagaactacatgctcgacgctatcgagaacatgaacggcaaggagctcgacggccgtaacatcanccgtaaccaggcccagtcccgtggcggtggcggcggcagcggtggctacggccgcggccgcagcggcggcggctat

SEQ ID NO: 1482 - DNA, 339 bp, Zea mays
  Clone ID: PAT_MRT4577_168134C.1
atcaatgctgtgctcaaaaaagtgggagcctaatgctcacaagataatggaacatcggatgaagtattacaggttgagaaaagagatggatgaaaacatatcccatcgtgatccgcttcgtcaacgttcacatgcgcaggctgcttacgacaaggccaatacgaatgaacaatcgtcaagtcgctcatcaggaggtgcatcttccataagctttcctggacggatgcctcctggcggttttcctagaaggattcccagttgaggtttcccctggggttgcatgccttgaggtttccctggtggtgttcccggtaatgttcatatgagtaaaatgctgaa

SEQ ID NO: 1483 - DNA, 746 bp, Zea mays
  Clone ID: PAT_MRT4577_168216C.1
gccggccgggttggagcatcgatccctaccgaataatattctgcagtagtttcttgagctcctgtaggtagaaagaaacgatgtcgggagtgtgggtgttcgaggacgggatcgtgcggcgtgcggacagcgagccgcccagcggcgccggcgccggcgggtcgcggccgaacaaggtgctggtgcacgtgccgagcggggaggtggtgacgtcgtacgaagtgctggagcggcggctccgcgagctcggctgggagcgctacctctacgacccctgcctgctgcagttccaccagcgctccaccgtgcacctcatcaccgtaccccgtgacttctcccgcctcaagctcgtccacatgtacgacgtcgtcgtcaagacccgaaacgtcttcgaggtccgtgacgccgcccctgcctgatggtcttcgtggcgacgcaagctgctgctgtgtgcctattagcttcgtgcaagctcgtcggaccggctgcgcgttcgtgtggctgcttcttgcatgctgtcctactttgtctgccgccgaataaatgtacgcgagagcgccgccgccgtcgccgtcgccgtatgcttcttatatatccggatttgagggtgcgttctttgactctttagtattagtcactttctagaataccaaatgggttgaggatttctaggaactaatatttagttcctagagtttagacacgggtgactaaagaaatcaaacgttccatattgcttctctcta

SEQ ID NO: 1484 - DNA, 964 bp, Zea mays
  Clone ID: PAT_MRT4577_168274C.1
aattcggcacgaggggcgggttcgcatccggcgagccgatactgtgccagtgcggccgcgcggcggcggagcaaccacgcgcgcagaccgccgtcgccacctcctccctccctccgctccccggcgtgcgtccgatccaccaggaatcgaaggctcccacacgccccaacgcgatgctgcgcaacttcccgcaggcccggaggctcctcaggcggatggggttcgagaaggaggacgcctacttctggaagcagatgggcaaggccatgctctgcacgtacacgctcttcggcgtcgtctggctctggaacgagacgtcgccgctcgggtggtggacgctcaagccgcgccccaaggaagaaagagagatggcacacctctatgagcgcaggaagttcccgtaccctggcgatgatgaggcggtcgaggagtttgtaaagagcggaggtgctcttggaaccacaattggacccaggggattcgctgacgccaatatggattctgaaaacatgcagaagcagctgcagtctaagaagttcgagcaggaagcacagaaactgtggattcggatgaggaatgaggtcgtacaggagctccaggagaaggggtttgatatcgagtgaatttgaaacctgcagtatggtcggcgctgaggatgttaaaacttaaaaccacttgccatctaaattggagaactgtataacttaggaataaaagagtttgtagctatctttttaactaactatctggtgctgcattcttggtgctgctagattgtaccgaaaataaattttgatgtcttgtggagaaccgaggatctcatttgaatatttgatcctcttttaatgtttcttattgcctgatcatcaaattactcatgttttgatgttggtgcatgcaacctatatgtgcagcattgaggatgcgttggtacttggcatatatgctagtccatgattatttc

SEQ ID NO: 1485 - DNA, 387 bp, Zea mays
  Clone ID: PAT_MRT4577_168364C.1
gcacgattctactcctccgtccgcgtaacttttggtttcggctatgtcggggcgcggcaagggcggcaaggggctgggcaagggcggcgccaagcgccaccacaaggtgctgcgcgacaacatccagggcatcacgaagcctgcgatccgtaggctggccatgacgggcggcgtcaagcagcatatctgggctcatctacaaggagacccgcggcgtgctcaagatcttcctcgagaacgatattcgcgacaccgtcacctacaccgagcacgcccgccgcaagaccgtgaccgtcatggatgtctgttacacgctcaagcgccaaggccgcacgctctacagctttagcggctacgcccccttcccttatgatgctttgatgtgac

SEQ ID NO: 1486 - DNA, 600 bp, Zea mays
  unsure (1)..(600): unsure at all n locations
  Clone ID: PAT_MRT4577_168366C.1
gccggccgggccgggtcacacacaggctcaccccaccaacagcaagcgaaaatctcccgatcccctctagtctccgcggcgaagatgtcggggcgcggcaagggcgggaagggcctgggcaagggcggagcgaagcgccaccggaaggtgctccgcgacaacatccaggggatcacgaagccggcgatccggcggctggcgcgcaggggcggcgtgaagcgcatctccgggctcatctacgaggagacccgcggcgtcctcaagatcttcctggagaacgtgatccgcgacgccgtcacctacaccgagcacgcgcgccgcaagaccgtcacagccatggacgtcgtctacgcgctcaagcgccagggccgcaccctctatggcttcggcggctaggctaggccggccgcgcctcgctgtcgtcgctgcggttctattgtttttgcaattcgcaagctgtggctgggtggcgaaaatgctggttactgtagcactagatcaagcatgttgtgcgtgtctgaagaaatgccaattgtgacttgctgtttgttcaaacatgctccatttcatcactaaaaaaanaaaaaaaaaaggccccta

SEQ ID NO: 1487 - DNA, 791 bp, Zea mays
  Clone ID: PAT_MRT4577_168368C.1
ggcgattgggttcctcgaggccggccggggtctcatctcttccatacgaccataccctacctccaaattcccaattctcaacctctcctccgagttcgagtgaccatgtcggggcgcggaaagggcgggaaggggctgggcaagggcggcgcgaagcgtcaccgcaaggtcctccgcgacaacatccagggcattacgaagccggcgatccggaggctggcgagaaggggtggcgtgaagcgcatctcggggctcatctacgaggagacccgcggcgtgctcaagatcttcctcgagaacgtcattcgcgacgctgtcacctacacggagcacgcccgccgcaagaccgtcaccgccatggacgtcgtctacgcgctcaagcggcagggccgcaccctctacggatttggcggctgaggggtcaggggtgtcccccagctgctgctggtcgttgcagaagtcttgggtcgcggtcacgaaatggagtgaggcgagagtattcttgcccatgtgcttagtttcgtaggcttatcactctagactctagtgccttggtccagtagtagcatacgacttgtactgcatttccttgttctgaacctctaaatatgatgagatgtggattcacttgatctcacaaacaaccagttaattcggatcaaatttgtactgactttctcgatcatcccagtttttcatctaaaagagcatttgccaaaaaaaaaaaaaaaaaatttgcggccgcaaattttttttttttttttttgaacactaaacgaactgtcacaccc

SEQ ID NO: 1488 - DNA, 565 bp, Zea mays
  Clone ID: PAT_MRT4577_168369C.1
atctcgccacaccgccgccacaaccaccaccagcaacacacacacagcagcccagccaatctcgccggagaaagaagagtcgacgatgtcgggccgcggcaagggagggaaggggctgggcaagggaggcgccaagcgccaccggaaggtgctgcgcgacaacatccagggcatcaccaagccggccatccgccgtctggctcgccggggcggcgtgaagcgcatctcggggctcgtctacgaggagacccgcggcgtgctcaagatcttcctcgagaacgtcatccgcgacgccgtcacctacaccgagcacgcccgctgcaagaccgtcaccgccatggatgtcgtctacgccctcaagcgccagggccgcaccctctacggattcggcggctaggtcacgccggtcctgtcgaatccacctcgagccgccagattcgtagctagctagccatggtttgttcagtgttcatggtcttcggtgtaatggaatggccgcatctcgctgctgtctgttgtttcggtgtatcgctagcgtggaatggaaatctcagcattttatctg

SEQ ID NO: 1489 - DNA, 615 bp, Zea mays
  Clone ID: PAT_MRT4577_168371C.1
aattcctccatcagtacccaaccttcccctacaccagaaaaatccccagttctttggtccgcgtcagagaggcggcggcgatgtctgggcgcggcaagggcggcaagggtctgggcaagggcggcgcgaagcgccaccggaaggtgctccgcgacaacatccagggcatcaccaagccggcgatccggaggctggctaggaggggtggcgtgaagcgcatctcggggctcatctacgaggagacccgcggcgtgctcaagatctttctcgagaacgtcatccgcgacgccgtcacctacaccgagcacgcgcgccgcaagaccgtcaccgccatggacgtcgtctacgcccttaagcgccagggccgcaccctctatggcttcggcggctaggtctgccgcggccgcgcctcgcctcgccgttggtgcggttctggtgttgctgcagttcgcaagttgtttgtggggggtgaaaaaatgctagctactgtagaactgcagtgccgtacgcagcacatggtgtgtttgtctgaagaattgttgtcaatgctggcttgctctggactcaaacatgctccattttgtgttgcaaaaaaaaaaaaaaaaaaggccccta

SEQ ID NO: 1490 - DNA, 696 bp, Zea mays
  unsure (1)..(696): unsure at all n locations
  Clone ID: PAT_MRT4577_168372C.1
ccgggagtcgcccacaaaaacccagtaactcgcatcttcctccgtgatccaagttctagcagcgcagcgctcggtttcggcaatgtcggggcgcggcaaaggcggcaagggtctgggcaagggcggcgccaagcgccaccgcaaggtcctgcgcgacaacatccagggcatcaccaagccggcgatccggaggctggctaggaggggcggcgtcaagcgcatctccgggctcatctacgaggagacccgcggtgtgctcaagatctttctggagaacgtcattcgtgacgccgtcacctacaccgagcacgcccgtcgcaagaccgtcaccgccatggatgtcgtctacgcgctcaagcgccagggccgcaccctctacggcttcggcggctaggtcgcttcctcatctggtggcgaactgcatgtggtgtcggcgattatcgtgttgtgtgcctaatctagtgtagtccgttctctctatcgtcgcgtgttctgtggtgtcttgtagtccatttcctgcaataccaacttgccattatcaatggaaaaccctcgttttcatcctcaacgtgtctagttctgattntgttttgttctggtttagggttcgtatgagatgtacatagggctgctgttgctttggtgtttgattgccatttttatattgccagagagctgcagttctctgtattatgc

SEQ ID NO: 1491 - DNA, 633 bp, Zea mays
  Clone ID: PAT_MRT4577_168374C.1
gccggccgtcccggggcacaaatcctcttcctcgagttctcctcaaccaaattcaaggtcacagcggcgaacctctcggctatcatgtctggccgcggcaagggcgggaagggtctgggcaagggcggcgccaagcgccaccgcaaggtgctgcgcgacaacatccagggcatcaccaagccggcgattcgcaggttggcgaggaggggcggcgtcaagcgcatctccgggctcatctacgaggagacccgcggcgtgctcaagatcttcctcgagaacgtcatccgcgacgccgtcacctacaccgagcacgcccgccgcaagactgtcaccgccatggacgttgtctacgcgctcaagcgtcagggccgcaccctctacggtttcggcggctaggtcgccctctctcccggtggcgaattacgtggtggcgatggcggtcgtgttgtgttcttggtctagtgttgtctgtgttgtctttatcggtgctgttttctgtggtggttgtgctgcatcgttctagtttctagttcatgtgctgtaatatctcgctgctgtaatcaatggaatggcctcgtttccaggctcaagatatatcgtccttttgaaaaaaaaaaaaaaaaaaggccccta

SEQ ID NO: 1492 - DNA, 617 bp, Zea mays
  Clone ID: PAT_MRT4577_168375C.1
taccctcgaggccggccggggatagcacaaatccacttcctcgagttctcctcaaccaaattcaaagtcacagcggcgaaactctcggcgatgtctggccgcggcaagggcgggaagggtctgggcaagggcggcgccaagcgccaccgcaaggtgctgcgtgacaacatccagggcatcaccaagccggcgatccgcaggttggcgaggaggggcggcgtcaagcgcatctccgggctcatctacgaggagacccgcggcgtgctcaagatcttcctcgagaacgtcatccgcgacgccgtcacctacaccgagcacgcccgccgcaagactgtgaccgccatggacgttgtctacgcgctcaagcgtcagggccgcaccctctacggtttcggcggctaggtcgccctctctcccggtggcgaattacgtggtggcgatggcggtcgtgttgtgttcttggtctagtgttgtctgtgttgtctttatcggtgctgttttctgtggtggttgtgctgcatcgttctagtttctagttcatgtgctgtaatatctcgctgctgtaatcaatggaatggcctcgtttccaggctaaaaaaaaaaaaaaaaaagcggcc

SEQ ID NO: 1493 - DNA, 621 bp, Zea mays
  Clone ID: PAT_MRT4577_168378C.1
cctgccggatcgcacaaatcctcttcctcgagttgtcctaaccaattaaagttacagagcgaaactctcggcgatcatgtctggccgcggcaagggcgggaagggtctgggcaagggcggcgccaagcgccaccgcaaggtgctgcgcgacaacatccagggcatcaccaagccggcgatccgcaggttggcgaggaggggcggcgtcaagcgcatctccgggctcatctacgaggagacccgcggcgtgctcaagatcttccttgagaacgtcatccgcgacgccgtcacctacaccgagcacgcccgccgcaagactgtcaccgccatggacgttgtttacgcgctcaagcgccagggccgcaccctctacggtttcggcggttaggtcgccccctctcccggtggcgaattacgtggtggcggtggcggtcgtgttgtgttcttggtctagtgtagtctgtgttgtctttatcggtgctgttttctgtggtggttgtactgcatcgttctagtttctagtccatgtgctgtaatatctcgctgctgtaatcaatggaatgtcctcgtttcaagcctcatgacatatcgctcttctgtaaatctgcaagaattccgtgc

SEQ ID NO: 1494 - DNA, 644 bp, Zea mays
  Clone ID: PAT_MRT4577_168396C.1
ccggccgggaaaaaaaaaaaaatcctcttctcccccagctccccagcaccagtccccaattatttggcctccgtcagagaggggagaaagacccgttcgaggcggcggcgatgtcggggcgcggcaagggcggcaagggtctgggcaagggtggagccaagcgccaccggaaggtgctccgcgacaacatccagggcatcaccaagccggcgatccggaggctggctcggaggggcggcgtgaagcgcatctcggggctcatctacgaggagacccgcggcgtgctcaagatcttcctcgagaacgtcatacgcgacgccgtcacctacaccgagcacgcgcgccgcaagaccgtcaccgccatggatgtcgtctacgcgctcaagcgccagggccgcaccctctacggcttcggaggctaggcgcctcttcgtagctggggaatgcttagggtgatacgtctctgtcgctgtgggtcgtagtgttgctgcgttcctggatgtaatccatttttttttctgcaatgaagagatgctggcaagcatactacctgcatatgttgcgcctgggtgattgttctccttagaaatggtagtaacagtgaatcttgttcacgaactaaaaaaaaaaaaaaaaaagcggcc

SEQ ID NO: 1495 - DNA, 630 bp, Zea mays
  Clone ID: PAT_MRT4577_168398C.1
gccggccgggttccggaccgccgccgacttctgattctaccaccacccgcctcctctcgagttcgatctgtttgctcccccagacatgtcgggccgcggcaagggaggcaagggcctgggtaagggcggcgcgaaacgacaccgcaaggtgctccgcgacaacatccagggcatcacgaagccggccatccggaggctggcgcgcaggggcggcgtgaagcgcatctccgggctcatctacgaggagacccgcggcgtgctcaagatctttctcgagaacgtcatccgcgacgccgtcacctacacggagcacgcccggcgcaagaccgtcacagccatggacgtcgtctacgcgctcaagcgccagggccgcaccctttacggcttcggcggctagggcgataggctaggccatgctcgacccgcccccactctctccctctggcgtcgtcactggttccttgacccctgtgcgggtcggtcggtggtgctagggtcaacagttgtctggtgtctgtggcttctccggctatccgttctttggtgtgaaatggaattccaagcgtgtgaatgggaatggatcttaattttgcactgatggcacaaaaaaaaaaaaaaaaaaggccccta

SEQ ID NO: 1496 - DNA, 541 bp, Zea mays
  Clone ID: PAT_MRT4577_168399C.1
actatctcttcacccaccaaaccccgctccaaaatccccaaatcccctctcttccgaagctactcagccatgtcggggcgcggcaagggcggcaaggggctcggcaagggcggcgccaagcgccaccgcaaggtcctgcgcgacaacatccagggcatcaccaagccggcgatccggaggctggcccggaggggcggcgtgaagcgcatctcggggctcatctacgaggagacccgcggcgtgctcaagatcttcctcgagaacgtcatccgcgacgccgtcacctacaccgagcacgcccgccggaagaccgtcaccgccatggacgtcgtctacgcgctcaagcgccagggacgcaccctgtacggattcggcggctgaggagccgcggcgcttgctggccggccgtggcgcacaagccctggctcgcggtcaagaaagtggaggagaggagaaagctgtagttgatctgggttccatgccttctatgattagtagtaatatctgtagtagcagtagctggttgttcaatggttgcttc

SEQ ID NO: 1497 - DNA, 603 bp, Zea mays
  Clone ID: PAT_MRT4577_168402C.1
gccggccgggccgggatccaactcaccacaggctcaccccaccaacagcaagcgaaaatctcccgatcccctctggtctccgcggcgaagatgtcggggcgcggcaagggcgggaagggcctgggcaagggcggcgcgaagcgccaccggaaggtgctccgcgataacatccaggggatcacgaagccggcgatccggcggctggcgcgcaggggcggcgtgaagcgcatctccgggctcatctacgaggagagccgcggcgtcctcaagatcttcctggagaacgtgatccgcgacgccgtcacttacaccgagcacgcgcgccgcaagaccgtcacagccatggacgtcgtctacgcgctcaagcgccagggccgcaccctctatggcttcggcggctaggctaggccggccgcgcctcgctgtcgtcgctgcggttctattgtttttgcaattcgcaagtagtggctcggtggcgaaaatgctggttactgtggcactagatcaagcatgttgtgcgtgtctgaagaaatgccaattgtgacttgctgtttgttcaaacatgctccacatttcaacaaaaaaaaaaaaaaaaaagcggcc

SEQ ID NO: 1498 - DNA, 611 bp, Zea mays
  Clone ID: PAT_MRT4577_168403C.1
ctaaagtctaccaccacccgcctcctctcgagttcgatctgtttgctcccccagacatgtcgggccgcggcaagggaggcaagggcctgggtaagggcggcgcgaaacgccaccgcaaggtgctccgcgacaacatccagggcatcacgaagccggccatccggaggctggcgcgcaggggcggcgtgaagcgcatctccgggctcatctacgaggagacccgcggcgtgctcaagatctttctcgagaacgtcatccgcgacgccgtcacctacacggagcacgcccggcgcaagaccgtcacagccatggacgtcgtctacgcgctcaagcgccagggccgcaccctttacggcttcggcggctagggcgctaggctaggccatgctcgacccgccccccactctccgctctggcgtcgtcactggttccttgacccctgtgcgggtcggtcggtggtgctagggtcagcagttgtctggtgtctgtagcctctctggctatccgttctttggtgtgaaatggaattccaaatcgtgtgaatgggaatggatctctgttggattgttcaattaaaaaaaaaaaaaaaaaaaactcgaggagtcttctag

SEQ ID NO: 1499 - DNA, 1440 bp, Zea mays
  Clone ID: PAT_MRT4577_168407C.1
ggccgcttttttttttttttttttacaagcagattctccacaaaatccaaccatatgtgtgctttggcataatttaatatcatcgacatgtttttaacaaaatcctctccaagatccataccaagcacgaagccttcatggaaatagcaaaacagagataccttaaagggtttcaggtacaagaaattgacaactagatcagacactatgagggacgcccgacgtctagaagcggagtttggtaaagaaccacctgttcttgccggtcttgaacctctcctcgaggcgcgccttggcggccttgcaggcttcgaccttcttgtcccgggtggagagcgcgtcgggcccgcccgatgcgacgtccttaaagtcgacgtcgagggtgtagcgggtgggcatgaggtgcgtgaagttgacgagcttgatgaagcacttgacgcgggacttcttggccgtcttcttggcggagtccttgcggatcaccttcttggggtacttggcgaggcccgcgacgaggcagtgcccgtagggacgatcacgggtgccctcctcgaaaacgcgcacgatcacggccttccggccggcgaaccggccctggaggaggataacggccttgccgggcttgaggaacttcaccatctttgctctttggacggtggtagcgatgctgcgccgccggcccacgcgtccgcccacgcgtccgcccacgcgtccgacccaatctcccctacaccagaaaaattcccagttctttggtccgcgtcagagaggcggcggcgatgtctgggcgcggcaagggcggcaagggtctgggcaagggcggcgcgaagcgccaccggaaggtgctccgcgacaacatccagggcatcaccaagccggcgatccggaggctggctaggaggggtggcgtgaagcgcatctcggggctcatctacgaggagacccgcggcgtgctcaagatctttctcgagaacgtcatccgcgacgccgtcacctacaccgagcacgcgcgccgcaagaccgtgaccgccatggacgtcgtctacgcgctcaagcgccagggacgcaccctctacggcttcggaggctaggctaggcgcctcttcatagtcggggactggttaggggacatgtctctgtgtgatgctttctgtggtattattgctgcaatagccgtgtaatccatcgcttctgcaatgaagcgctcggaagcatgctacgtatgttgtgtctgtgggtgattgtatttctggtagtaacagtgattgttcctgaattttggataatacaagctcattcgcagtagtttctgttgtaatcctgtcttatcgtttgagaggagtattgctttgggcagcctttgctgtgcatttttatgcattaggataaaaaaatttggtcgacttacgaaaaatttgcgcagcagacatgcgctagatc

SEQ ID NO: 1500 - DNA, 605 bp, Zea mays
  Clone ID: PAT_MRT4577_168408C.1
cattgggaccctcgaggccggccgggaccgccgccgacttctgattctaccaccacccgcctcctctcgagttcgatctgtttgctcccccagacatgtcgggccgcggcaagggaggcaagggcctgggtaagggcggcgcgaaacgacaccgcaaggtgctccgcgacaacatccagggcatcacgaagccggccatccggaggctggcgcgcaggggcggcgtgaagcgcatctccgggctcatctacgaggagacccgcggcgtgctcaagatctttctcgagaacgtcatccgcgacgccgtcacctacacggagcacgcacggcgcaagaccgtcacagccatggacgtcgtctacgcgctcaagcgccagggccgcaccctttacggcttcggcggctagggcgctaggctaggccatgctcgacccgccccccactctccgctctggcgtcgtcactggttccttgacccctgtgcgggtcggtcggtggtgctagggtcagcagttgtctggtgtctgtagcctctctggctatccgttctttggtgtgaaatggaattccaatcgtgtgagaaaaaaaaaaaaaaaaaagcggcc

SEQ ID NO: 1501 - DNA, 691 bp, Zea mays
  Clone ID: PAT_MRT4577_168409C.1
gcccacgcgtccgcccacgcgtccgcacaaatccagtaactcgcatcttcctgcgtcatccaagttctagcagcgcagcgctcggtttcgacaatgtcggggcgcggcaagggcggcaagggtctgggcaagggcggcgccaagcgccaccgcaaggtcctgcgcgacaacatccagggcatcaccaagccggcgatccggaggctggctaggaggggcggcgtcaagcgcatctccgggctcatctacgaggagacccgcggtgtgctcaagatctttctggagaacgtcattcgtgacgccgtcacctacactgagcacgcccgccgcaagaccgtcaccgccatggatgtcgtctacgcgctcaagcgacagggccgcaccctctacggcttcggcggctaggtcgcttcctcatctggtggcgaactgcatgtgtgtcggtggtggtcgtgttgtgtgtctaatctagtgtagtccgttctctctgttgtcgctgtgttgtgtggtgtcttgtagttcatttcctgcaataccaacttgccattatcaatggaaaaccctcgttttcatcctcaacgtgtcaagttctgattttgttttgttctggtttagggttcgtatgagatctacatagggcttctgttgctttggtatttgattgcaaattttattttgcccggagagctgc

SEQ ID NO: 1502 - DNA, 786 bp, Zea mays
  Clone ID: PAT_MRT4577_168430C.1
ctcgagccggccgggatacttacctggacggggtcgacgtgggatcaagaagccccgtggcctagatcagtggcctgcattgcacttggctggtgcgctggtctaccatctccccaagtgggagagtggacgtcataatttgtggcagagggggtacgcgttcgcgcggcccctgctcaacagcaacccgcacaagccctcttcctcgattttcctcctccgtccgcgtagttctcggtttcggcgatgtcggggcgcggcaagggcggcaaggggctgggcaagggcggcgccaagcgccaccgcaaggtgctgcgcgacaacatccagggcatcacgaagccggcgatccgtaggctggccaggaggggcggcgtcaagcgcatttctgggctcatctacgaggaaacccgcggcgtgctcaagatcttcctcgagaacgtcatccgcgacgccgtcacctacaccgagcacgcccgccgcaagactgtcaccgccatggatgtcgtctacgcgctcaagcgccagggccggacgctctacggcttcgggcggctaggccgcctccccttctgatgctttgatatgacggccgtggtcggttgtgtgtctagttggccggtctactgtagtttgttctgtatcttcgtttcgaaggtgttccagtttctagcccatttggtgtaatattttcacagctattatcaatggaaagccctcggttctatcctcattgttctggatcaagataatccgtttgataaaaaaaaaaaaaaaaaagcggcc

SEQ ID NO: 1503 - DNA, 875 bp, Zea mays
  Clone ID: PAT_MRT4577_168431C.1
ccccgcgtccgcccacgcgtccgcccacgcgtccgcccacgcgtccgggctcaccccaccaacagcaagcgaaaatctcccgatcccctctagtctccgcggcgaagatgtcggggcgcggcaagggcgggaagggcctgggcaagggcggagcgaagcgccaccggaaggtgctccgcgacaacatccaggggatcacgaagccggcgatccggcggctggcgcgcaggggcggcgtgaagcgcatctccgggctcatctacgaggagacccgcggcgtcctcaagatcttcctggagaacgtgatccgcgacgccgtcacctacaccgagcacgcgcgccgcaagaccgtcacagccatggacgtcgtctacgcgctcaagcgccagggccgcaccctctacggcttcggcggctaggctatgccggtcgcgctcgcgcctcgctgtcgtcgctgcggttcttgtttctgcaattcgcaaggtgtggcttgacggggaaaatgctggttaatgtagcactagatcaagcatgttgtgcgtgtctgaagaaatgccaattgtgacttgctgtttgttcaaacatgttccgtttcttcacatatcaacacccgtcgtccctgcgtgtgttacaaatgtagttaacttagtcatgatgtgtcttgcgcgcattccatctctgtccaatatgcttaatgtatttctgtactaggtaatccattacctctgtttcattttatttcaatgacgaactagcttattggatttcgtatgtccaaagtaaaatttcgcttacagggcctcattggagcacgtgaacggtatcccccccaccactgtttgtacactttcttgtggaattaaactgtttctgtg

SEQ ID NO: 1504 - DNA, 720 bp, Zea mays
  unsure (1)..(720): unsure at all n locations
  Clone ID: PAT_MRT4577_168432C.1
ttgggtccctcgaggccggccggggtcagtcaccccacacaaatccagtaactcgcatcttcctgcgtcatccaagttctagcagcgcagcgctcggtttcggcaatgtcggggcgcggcaagggcggcaagggtctgggcaagggcggcgccaagcgccaccgcaaggtcctgcgcgacaacatccagggcatcaccaagccggcgatccggaggttggctaggaggggcggcgtcaagcgcatctccgggctcatctacgaggagacccgcggtgtgctcaagatctttctggagaacgtcattcgtgacgccgtcacctacaccgagcacgcccgccgcaagaccgtcaccgccatggatgtcgtctacgcgctcaaacgacagggccgcaccctctacggcttcggcggctaggtcgcttcctcatctggtggcgaactgcatgtgttgtcgccggtggttgtgttgtgtgcctaatttagtctagtccgttctctctatcgtcgctgtgttctgtggtgtcttgtagtccatttcctgcaataccaacttgccattatcaatgaaaaaccctcgttttcatcctcaacgtgtctagttctgattttgttttggtctggtttagggttcgactgagatgtacctagggctgctngctgtttttggtgtttgattgcaatttttattttgccgaaaaaaaaaaaaaaaaaagcggcc

SEQ ID NO: 1505 - DNA, 649 bp, Zea mays
  unsure (1)..(649): unsure at all n locations
  Clone ID: PAT_MRT4577_168433C.1
gactagttctagatcgcacaaatcctcttnctcgagttctcctcaaccaaattcaaggtcacagcggcgaacctctcggcgatcatgtctggccgcggcaagggcgggaagggtctgggcaagggcggcgccaagcgccaccgcaaggtgctgcgcgacaacatccagggcatcaccaagccggcgattcgcaggttggcgaggaggggcggcgtcaagcgcatctccgggctcatctacgaggagacccgcggcgtgctcaagatcttcctcgagaacgtcatccgcgacgccgtcacctacaccgagcacgcccgccgcaagactgtcaccgccatggacgtcgtctacgcgctcaagcgccagggccgcaccctctacggtttcggcggctaggtcggcccctctctccgtggtgaattacgtggttgcggtggacggtggtggtcgtgttgtgtgcttggtctagtatgtgctgtctttatcggtgctgctttctgtggtagttgtgctgcatcgttccagtttctagtccatgtgctgtaatatctcgctgctgtaatcaatggaatggcttcgtttccagcctcatgatatatcgcccttttgtatcctgctgaggaacctgcaagaagtctgtgcactacgc

SEQ ID NO: 1506 - DNA, 732 bp, Zea mays
  Clone ID: PAT_MRT4577_168436C.1
cattgggtacctcgaggccggccgggatccaattcacaggctcaccacaccaaccagcaagcaaaaattccccaatcctctcgtctccgcggcgaagatgtcggggcgcggcaagggcggcaagggcctgggcaagggcggcgcgaagcgtcaccggaaggtgctgcgcgacaacatccaggggatcacgaagccggcgatccggaggctggcgcggcggggcggcgtgaagcgcatctcggggctcatctacgaggagacccgcggcgtgctcaagatcttcctggagaacgtcatccgcgacgccgtcacctacactgagcacgctcgccgtaagaccgtcaccgccatggacgtcgtctacgcgcttaagcgccagggccgtaccctctacggcttcggcggctaggcctgccgccccgcgcctcgccgtcgctgcggttctggtgttgctgcagttcgcaagttgtttgtgtgggggaaatttgctagatactgtagaactgcagtgcggtatgctgcacatggtgtgtttgtctgaagaaatgttgtcattgctggcttgctctggactcaaacatgctccattttgtgttcactgtgctttcgtttggacaaagcgatccatttcactcttttttgctgaattcagttcagttaaaaactagtcatgatatgcactacgcacattgcatcaaaaaaaaaaaaaaaaaaactcgagggggggggccg

SEQ ID NO: 1507 - DNA, 501 bp, Zea mays
  Clone ID: PAT_MRT4577_168438C.1
aagagatcgtcagccatgtctggccgcggcaagggaggcaaggggctcggcaagggcggcgccaagcgccaccggaaggtgctgcgcgacaacatccagggcatcaccaagccggccatccgccgtctggctcggaggggcggcgtgaagcgcatctcggggctcatctacgaggagacccgcggcgtgctcaagatcttcctcgagaacgtcatccgcgacgccgtcacctacaccgagcacgcccgccgcaagaccgtcaccgccatggacgtcgtctacgcgctcaagcgccagggccgcaccctctacggcttcggcggctaggccgagggcccagccagctcgcgacgccgccgtccggcagagtagtggtatctatctagttgctgtctagggttcgtggttctccttgtatgtcgctggtgtttgtctgctcccgtcttgtgagctgatgttgtactggaagaaatttggaatggaaattgcagtagcttaccc

SEQ ID NO: 1508 - DNA, 890 bp, Zea mays
  Clone ID: PAT_MRT4577_168439C.1
cgattcattaatgcagctggcacgacaggtttcccgactggaaagcgggcagtgagcgcaacgcaattaatgtgagttagctcactcattaggcaccccaggctttacactttatgcttccggctcgtatgttgtgtggcaaaaacccagtaactcgcatcttcctccgtgatccaagttctagcagcgcagcgctcggtttcggcaatgtcggggcgcggcaagggcggcaagggtctgggcaagggcggcgccaagcgccaccgcaaggtcctgcgcgacaacatccagggcatcaccaagccggcgatccggaggctggctaggaggggcggcgtcaagcgcatctccgggctcatctacgaggagacccgcggtgtgctcaagatctttctggagaacgtcatccgtgacgccgtcacctacaccgagcacgcccgccgcaagaccgtcaccgccatggatgtcgtctacgcgctcaagcgacagggccgcaccctctacggcttcggcggctaggtcgcttcctcatctggtggcgaactgcatctgtgtcggcggtggtcgtgttgtgtgcctaatctagtgtagtccgttctctatatcgtcgctgtgttctgtggtgtcttgtatcccatttcctgcaataccaacttgccattatcaatggaaaaccctcgttttcatcctcgacgtgtctagttctgattttgttttgttctcgtttattgttcgtatgagatgtacatagggctgctgttgctttggtgtttgattgcaatttttattttgcccagagagctgcagttctctgtgttatggaaaaaagttctgtgattggttggaaaaaaaaaaaaaaaaaaaaaaaaaaaaaaaaaaaaaaaaaaaaa

SEQ ID NO: 1509 - DNA, 828 bp, Zea mays
  Clone ID: PAT_MRT4577_168441C.1
cctcgagggcctggcccgggaaaaaaaaaaaaaaaaaaaaaaaaaaaaaaaaaaaaaaaaatccaattcacaggctcaccacaccaaccagcaagcaaaaattccccaatcctctcgtctccgcggcgaagatgtcggggcgcggcaagggcggcaagggcctgggcaagggcggcgcgaagcgtcaccggaaggtgctgcgcgacaacatccaggggatcacgaagccggcgatccggaggctggcgcggcggggcggcgtgaagcgcatctcggggctcatctacgaggagacccgcggcgtgctcaagatcttcctggagaacgtcatccgcgacgccgtcacctacaccgagcacgcgcgccgtaagaccgtcaccgccatggacgtcgtctacgcccttaagcgccagggccgcaccctctatggcttcggcggctaggcctgccgcggccgcgcctcgcctcgccgtcgctgcggttctggtgttgctgcagttcgcaagttgtttgtgtgggcggaaaaaatgctagatactgtagaactgcagtgcggtatgctgcacatgctgtgtttgtctgaagaaatgttgtcaatgctggcttgctctggactcaaacatgctccattctgtgttcactgtgctttcgtttggacaaagcgagccatttcagtcgttttcgctgaatttcagttcagctaaaaactagccatgatatgcactacgcacattgcatctctggacagtatgctcattgcatacctactggatatatgtcattaccttatcctccatgtaaaaaaaaaaaaaaaaaaaaaaagcggac

SEQ ID NO: 1510 - DNA, 822 bp, Zea mays
  Clone ID: PAT_MRT4577_168442C.1
ggaacattcgtactaaatatagtaaagaaatcaaaataatctttagatcaatctaagatttcgattcccagtaaaaaaaaaagaaatataatagaaaaatatgggacaaaaaataaatccactcggtttcagacttggtacaacccaaaatcaccattccttttggttcgcacaaccaaaaaattattctgaaggtctacaggaaccgccgccgacttctgattctaccaccacccgcctcctctcgagttcgatctgtttgctcccccagacatgtcgggccgcggcaagggaggcaagggcctgggtaagggcggcgcgaaacgacaccgcaaggtgctccgcgacaacatccagggcatcacgaagccggccatccggaggctggcgcgcaggggcggcgtgaagcgcatctccgggctcatctacgaggagacccgcggcgtgctcaagatctttctcgagaacgtcatccgcgacgccgtcacctacacggagcacgcacggcgcaagaccgtcacagccatggacgtcgtctacgcgctcaagcgccagggccgcaccctttacggcttcggcggctagggcgctaggctaggccatgctcgacccgccccccactctccgctctggcgtcgtcactggttccttgacccctgtgcgggtcggtcggtggtgctagggtcagcagttgtctggtgtctgtagcctctctggctatccgttctttggtgtgaaatggaattccaatcgtgtgggaatggatctctgttcgattgttcaattggcctaaaaaaaaaaaaaaaaaaggcccctagggcc

SEQ ID NO: 1511 - DNA, 595 bp, Zea mays
  Clone ID: PAT_MRT4577_168443C.1
atcgattcatcctcttcctcgagttctcctcaaccaaattcaaagtcacagcggcgaaactctcggcgatgtctggccgcggcaagggcgggaagggtctgggcaagggcggcgccaagcgccaccgcaaggtgctgcgtgacaacatccagggcatcaccaagccggcgatccgcaggttggcgaggaggggcggcgtcaagcgcatctccgggctcatctacgaggagacccgcggcgtgctcaagatcttcctcgagaacgtcatccgcgacgccgtcacctacaccgagcacgcccgtcgcaagactgtgaccgccatggacgttgtctacgctctcaagcgccagggccgcaccctctacggtttcggcggctgagaggcgctaccgccgctggtggccgtggcaaaagtcttgggtcgcggtcaagaaatcgagagtattctggatgacgtgcttagtttcgtagtattattatcactagtgcttattgttagcggttgttgggttcgaccactctaagccactgtcaaacagtaatatgagtaccgcatttccgtgtttcgaacttctaatatatcataatcttatgg

SEQ ID NO: 1512 - DNA, 685 bp, Zea mays
  Clone ID: PAT_MRT4577_168464C.1
actcctaagggcgattggtatcctcgaggccggccgggatcttctcccccagctccccagcaccagtccccaattatttggcctccgtcagagaggggagaaagacccgttcgaggcggcggcgatgtcggggcgcggcaagggcggcaagggtctgggcaagggtggagccaagcgccaccggaaggtgctccgcgacaacatccagggcatcaccaagccggcgatccggaggctggctcggaggggcggcgtgaagcgcatctcggggctcatctacgaggagacccgcggcgtgctcaagatcttcctcgagaacgtcatccgcgacgccgtcacctacaccgagcacgcgcgccgcaagaccgtcaccgccatggacgtcgtctacgcgctcaagcgccagggccgcaccctctacggattcggaggctaggcgcctcttcgtagctggggaatgcttagggggatacacgtctctgtcgctgtgggccatagtgttgctgcgttcctggatgtaatccatttatttttctgcaatgaagagatgctggcaagcatgctacctgcatatgtcagaaatggtagtaacagtgaatctttgttcacgaaccaacatgttttcgtgcttttggttgttcctatttcggtttactgcccagtgcgtcagtttacaggcggtgac

SEQ ID NO: 1513 - DNA, 610 bp, Zea mays
  Clone ID: PAT_MRT4577_168467C.1
cagcgaaaacgactgaaatggttcgttttgtccaaacgaaagcacagtgaacacagaatggagcatgtttgagtccagagcaagccagcattgacaacatttcttcagacaaacacagcatgtgcagcataccgcactgcagttctacagtatctagcatttttccgcccacacaaacaacttgcgaactgcagcaacaccagaaccgcagcgacggcgaagcgcggcgcggcaggcctagccgccgaagccgtagagggtgcggccctggcgcttaagcgcgtagacgacgtccatggcggtgacggtcttacggcgcgcgtgctcggtgtaggtgacggcgtcgcggatgacgttctccaggaagatcttgagcacgccgcgggtctcctcgtagatgagccccgagatgcgcttcacgccgccccgccgcgccagcctccggatcgccggcttcgtgatcccctggatgttgtcgcgcagcaccttccggtgacgcttcgcgccgcccttgcccaggcccttgccgcccttgccgcgccccgacatcttcgccgcggagacgagaggattggggaatttttgcttgttggttggtgtggtgagccct

SEQ ID NO: 1514 - DNA, 657 bp, Zea mays
  Clone ID: PAT_MRT4577_168470C.1
gatcggcccaccggccaggcactcgggcgagcgcacaaaagctcttcctcgagtcctcctcaaccaaattcaaagtcacagcggcgaaactctcggcgatgtctggccgcggcaagggcgggaagggtctgggcaagggcggcgccaagcgccaccgcaaggtgctgcgtgacaacatccagggcatcaccaagccggcgatccgcaggttggcgaggaggggcggcgtcaagcgcatctccgggctcatctacgaggagacccgcggcgtgctcaagatcttcctcgagaacgtcatccgcgacgccgtcacctacaccgagcacgcccgccgcaagactgtcaccgccatggacgttgtctacgcgcccaagcgccagggccgcaccctctacggtttcggcggctaggtcggcccatctcccggtggcgaattacgtggtggcggtggacggtggtggtcgtgttgtgtgtttggtctagtgtagtctgtgttgtctttatcggtgctgttttctgtggtggttgtactgcatcgttctagtttctagtccatgtgctgtaatatctcgctgctgtaatcaatggaatgtcctcgtttcaagcctcatgacatatcgctcttttgtaaacctgaaagaattccgtgcactacgc

SEQ ID NO: 1515 - DNA, 745 bp, Zea mays
  Clone ID: PAT_MRT4577_168471C.1
ttgggaccctcgaggccggccgggactcgtctcatctcttccatacgaccataccctacctccaaattcccaattgtcaacctctcctcagagttcgagtgaccatgtcggggcgcggaaagggcgggaaggggctgggcaagggcggcgcgaagcgtcaccgcaaggtcctccgcgacaacatccagggcattacgaagccggcgatccggaggctggcgagaaggggcggcgtgaagcgcatctcggggctcatctacgaggagacccgcggcgtgctcaagatcttcctcgagaatgtcattcgcgacgctgtcacctacacggagcacgcccgccgtaagaccgtcaccgccatggacgtcgtctacgcgctcaagcggcagggccgcaccctctacggatttggcggctgaggggtcaggggtgtcccccagcttctgctggtcgtggcagaagtcttgggtcgcggtcacgaaatggagtgaggcgagagtattcttgcccatgtgcttagtttcgtaggcttatcactctagactctagtgccttggtccagtagtagcatacgacttgtactgcatttacttgttctgaacctctaaatatgatgaaatgtggattcacttgatctcacagacaaccagttaattcggatcaaattttgtactggctttctcgatcatcccagttcgtgttgctcctgatatttgccagtttttcatctaaaagaacatttgccgaa

SEQ ID NO: 1516 - DNA, 699 bp, Zea mays
  Clone ID: PAT_MRT4577_168474C.1
aaaaaaaaaaaaaaaaaaaaaaaaaaaaaaaatccaatccatcagtacccaatctcccctacaccagaaaaatcaccagttcttcggtccgcgtcagagaggccgcggcgatgtctgggcgcggcaagggcggcaagggtctgggaaagggcggcgcgaagcgccaccggaaggtgctccgcgacaacatccagggcatcaccaagccggcgatccggaggctggctaggaggggtggcgtgaagcgcatctcggggctcatctacgaggagacccgcggcgtgctcaagatctttctcgagaacgtcatccgcgacgccgtcacctacaccgagcacgcgcgccgcaagaccgtgaccgccatggacgtcgtctacgcgctcaagcgccagggccgcaccctctacggcttcggaggctaggctagacgcctcttcatagtcggggactggttaggggacatgtctctgtgtgatgctttctgtggtagtattgctgcaatagctgtgtaatccatcgcttctgcaatgaagcgctttgagacatgctacgtatgttgtgtctgtgggtgattgtatttctggtagtaaccgtgattcttcctgaattttggataatacaagctcattcgcagtagtttctgatgtaatcatgtcttatcgtttgagagatgaaaaaaaaaaaaaaaaaaggccccta

SEQ ID NO: 1517 - DNA, 1094 bp, Zea mays
  Clone ID: PAT_MRT4577_168475C.1
agactgatgatcagggcaataggcgggtaccagcatagacgctgcgactaagcagcatccgtggtggtagggttagcagcagcatcaatggtaatgctgagcggcttccctcggcccatggtgaacccttttgtgccatccggcatgcgggggcccgggggcggcttcggcacagctggatgctccgacgggggagtgccaataggatggtggccatctcggctgttgtggccataatgctgaccacggcctctgcctctacctccacggcctctccctctcccctgctgcctcattccacccttgtcatgggtgccatcttcggcctggtgatcgaaatgtgtttctgagatttgggcggtaacatctgttccaaagtctcgtggatgatcagttgtgtcagggccatcttcatctgcagcatactcctcatccccaccttttcttccttgacctaacccatgtttcagacatccaagcggacgcgtgggcggacgcgtgggcggacgcgtgggcggacgcgtgggcgcgtagctctcggtttcggcgatgtcggggcgcggcaagggcggcaaggggctgggcaagggcggcgccaagcgccaccgcaaggtgctgcgcgacaacatccagggcatcacgaagccggcgatccgtaggctggccaggaggggcggcgtcaagcgcatttctgggctcatctacgaggagacccgcggcgtgctcaagatcttcctcgagaacgtcatccgcgacgccgtcacctacaccgagcacgcccgccgcaagaccgtcaccgccatggatgtcgtctacgcgctcaagcgccagggccgcacgctctacggcttcggcggctaggccgcctccccttctgatgctttgatgtgacggccgtggtcggttgtgtgtctagttggccggtctactgtagtttgttctgtatcttcgtttcgaggtgttccagtttctagcccatttggtgtaatattttcactgctattatcaatggaaagccctcggttctatccccaaaaaaaaaaaaaaaaaaaaaaaaaaaaaaaaaaaggaaaaaaaaaaaaaaaaaagcggcc

SEQ ID NO: 1518 - DNA, 1022 bp, Zea mays
  Clone ID: PAT_MRT4577_168476C.1
taattctcttgattagtttgctcggctgaagaaatcaggacgcgtgcctggtgtcgctgctcagctgcatgtacttgtacaaccgttcctccctgcagctgctgccccttctctctttttgtttaccttggattgatggattgttaaaaaaaaaaaaaaaaaaaaaaaaaatccaatccatcagtacccaaccttcccctacaccagaaaaatccccagttctttggtccgcgtcagagaggcggcggcgatgtctgggcgcggcaagggcggcaagggtctgggcaagggcggcgcgaagcgccaccggaaggtgctccgcgacaacatccagggcatcaccaagccggcgatccggaggctggctaggaggggtggcgtgaagcgcatctcggggctcatctacgaggagacccgcggcgtgctcaagatctttctcgagaacgtcatccgcgacgccgtcacctacaccgagcacgcgcgccgcaagaccgtgaccgccatggacgtcgtctacgcgctcaagcgccagggccgcaccctctacggcttcggaggctaggctaggcgcctcttcgtagtcggggactggttaggggacatgtctctgtgtgatgctttctgaggtagtattgctgcaatagctgtgtaatccatcgcttctgcaatgaagcgctttgaagcatgctacgtatgttgtgtctgtgggtgattgtatttctggtagtaacagtgattcttcctgaattttggataatacaagctcattcgcagtagtttctgatgtaatcatgtcttatcgtttgagagatgaattgcttttggcagcctttgctggtattctcatgctttttttatgcattaggatattagaggtctgttgagttcgcaattatttagttttttctatcttttatttaaatttggtcgacttagcttacgtaaaatttgagcagcagacaggccctagatgcatcaattgcgtgaataatgatctttcttccaaaaaaaaaaaaaaaaaa

SEQ ID NO: 1519 - DNA, 1037 bp, Zea mays
  Clone ID: PAT_MRT4577_168477C.1
cacggattcgcttgtccacctgacgaaccgcggcaaaagcgccaaaacccatcccaccatccaaacccgatttgacgtctccaacgcactcatcccccgaaattcctcgcctcgcgcccaaagcacgactcaaaaatttccccatctccccccgcgcactctcccaaatcctcccctttaaacccacctcaaatcctctcctacgccgcaccgaattcgagacctccaattccctcgtagcagcagcaccagtagagtctccttcctctccggcggcgatgtctgggcgcggcaagggcggcaaggggctgggcaagggcggcgccaagcggcaccgcaaggtgctccgcgacaacatccaagggatcacgaagccggcgatccggaggcttgcgaggaggggcggcgtgaagcgcatctccgggctcatctacgaggagacccgcggcgtgctcaagatcttcctcgagaacgtcatccgcgacgccgtcacctacactgagcacgcccgtcgaaaaaccgtcaccgccatggacgtcgtctacgccctcaagcgccagggccgcaccctgtacgggttcggcggctaagcgcgccctgtccatctgggggtgggcctggtactggtggcgcttctccgggctcatctacgaggagacccgcggcgtgctcaagatcttcctcgagaacgtcatccgcgacgccgtcacctacactgagcacgcccgtcgaaaaaccgtcaccgccatggacgtcgtctacgccctcaagcgccagggccgcaccctgtacgggttcggcggctaagcgcgccctgtccatctgggggtgggcctggtactggtggcgcttctcctttgggttccctgttctgtgctttccattctgtgggaaggtaccggattcctagatctatgtttcgatccggtgtttggtggtccatgtgatgtcgtgtagtagtacaaagagttccaactcctagttgtatcttagttgtttcctttgcagaaatgaaatgataactacgattgcctagc

SEQ ID NO: 1520 - DNA, 740 bp, Zea mays
  Clone ID: PAT_MRT4577_168479C.1
cattgggaccctcgaggccggccgggaaccatcttctcccccagctccccagcaccagtccccaattatttggcctccgtcagagaggggagaaagacccgttcgaggcggcggcgatgtcggggcgcggcaagggcggcaagggtctaggcaagggtggagccaagcgccaccggaaggtgctccgcgacaacatccagggcatcaccaagccggcgatccggaggctggctcggaggggcggcgtgaagcgcatctcggggctcatctacgaggagacccgcggcgtgctcaagatcttcctcgagaacgtcatacgcgacgccgtcacctacaccgagcacgcgcgccgcaagaccgtcaccgccatggatgtcgtctacgcgctcaagcgccagggccgcaccctctacggcttcggaggctaggcgcctcttcgtagctggggaatgcttagggtgatacgtctctgtcgctgtgggtcgtagtgttgctgcgttcctggatgtaatccattttttttttctgcaatgaagagatgctggcaagcatactacctgcatatgttgcgcctgggtgattgttctccttagaaatggtagtaacagtgaatcttgttcacgaaccaacatgtttttgtgcttttggttgttcttttttcagtttactgcccagtgcgtcagtttaaaggcggtgataatttgacacccaattcgcaaaaaaaaaaaaaaaaagcggcc

SEQ ID NO: 1521 - DNA, 728 bp, Zea mays
  Clone ID: PAT_MRT4577_168497C.1
gcccccttccttagcctgggatttcggttcaacaggctgaccccaccaacagcaagcgaaaatctcccgatcccctctagtctccgcggcgaagatgtcggggcgcggcaagggcgggaagggcctgggcaagggcggagcgaagcgccaccggaaggtgctccgcgacaacatccaggggatcacgaagccggcgatccggcggctggcgcgcaggggcggcgtgaagcgcatctccgggctcatctacgaggagacccgcggcgtcctcaagatcttcctggagaacgtgatccgcgacgccgtcacctacaccgagcacgcgcgccgcaagaccgtcacagccatggacgtcgtctacgcactcaagcgccagggccgcaccctctacggcttcggcggctaggctaggccggtcgcgcctcgttgtcgtcgctgcggttctattgtttttgcaattcgcaagttgtggctgggtggcgaaaatgctggttactgtaccactagatcaagcatgttgtgcgtgtctgaagaaatgccaattgtgacttgctgtttgttcaaacatgctccacatttcaacacccgtcgtccctgcgatgtagttaatttagccatgatatgtcctgcgcgcatcccatctctgtccaatatgtttaatgcatttctatactgggtaatccattacctctgtttcattttatttcgatgaggaactagtttattgg

SEQ ID NO: 1522 - DNA, 745 bp, Zea mays
  Clone ID: PAT_MRT4577_168498C.1
aaaaaaaaaaaaaaatccaatccatcagtacccaaccttcccctacaccagaaaaatccccagttctttggtccgcgtcagagaggcggcggcgatgtctgggcgcggcaagggcggcaagggtctgggcaagggcggcgcgaagcgccaccggaaggtgctccgcgacaacatccagggcatcaccaagccggcgatccggaggctggctaggaggggtggcgtgaagcgcatctcggggctcatctacgaggagacccgcggcgtgctcaagatctttctcgagaacgtcatccgcgacgccgtcacctacaccgagcacgcgcgccgcaagaccgtgaccgccatggacgtcgtctacgcgctcaagcgccagggccgcaccctctacggcttcggagggtaggctaggcgcctcttcatagtcggggactggttaggggacatgtctctttgtgatgctttctgtggtagtattgctgcaatagctgtgtaatccatcccttctgcaatgaagctatgttgtgtctgtgggtgattgtatttctggtagtaacagtgattcttcctgaattttggataatacaagctcattcgcagtagtttctgttgtaatcctgtcttatcgtttgagagatgaaatgctttgggcagcctttgctgtaatctcatgtttttttaatccattagggtattagaggtctgttcagttcgcaattatttagttattttctatcctttatgc

SEQ ID NO: 1523 - DNA, 864 bp, Zea mays
  Clone ID: PAT_MRT4577_168501C.1
cattgggtacctcgaggccggccgggactaactgtcatgtagtgtagtggtatgcctctcttaccggagactgtagatgccaagttcgaatcccttgcttttaaaaaaaaaaaaattaaaacaagcgccactaatctcgccttccgaggaaactcaccagcccaccacagacccgagcggaagaagccatgtccgggcgcggtaagggtggcaaggggctcggcaagggcggcgcgaagcgtcaccggaaggtgctgcgcgacaacatccagggcatcaccaagccggcgatccggcggctggcgaggaggggcggcgtcaagcgcatctcggggctcatctacgaggagacccgcggcgtgctcaagatcttcctcgagaacgtcatccgcgacgccgtcacctacactgagcacgcccgccgcaagaccgtcaccgccatggacgtcgtctacgcgctcaagcgccagggccgcaccctctacggcttcggcggctaggctgatgggctcctcgcgatgttctccccttctgcagatgcgacgttttctggccgtgcccacaagtcttgcggtcaagaaagtttcaggaactcttgttagttcatctctggctgtggtaggtttatctgaatcgtgagactagtaggtttatctgaatcgcgaggctagcaggtttacctgaatcatgaagcagtgatgaaattatgtgagcatcggatgttggaaatcgagcttgtaatgcaatttgttactcttgatgcaaatgaatggtctggtcgttacttctgtagttacgattttaaactggtgattgttgcgtttctcatgcaactgaatcgtgtcagcaaaagttgctttgcac

SEQ ID NO: 1524 - DNA, 981 bp, Zea mays
  unsure (1)..(981): unsure at all n locations
  Clone ID: PAT_MRT4577_168502C.1
cattgggtacctcgaggccgggccgggatcgcacaaatcctcttcctcgagttctcctcaaccaaattcaaagtcacagcggcgaaactctcggcgatgtctggccgcggcaagggcgggaagggtctgggcaagggcggcgccaagcgccaccgcaaggtgctgcgtgacaacatccagggcatcaccaagccggcgatccgcaggttggcgaggaggggcggcgtcaagcgcatctccgggctcatctacgaggagacccgcggcgtgctcaagatcttcctcgagaacgtcatccgcgacgccgtcacctacaccgagcacgcccgccgcaagactgtgaccgccatggacgttgtctacgctctcaagcgccagggccgcaccctctacggtttcggcggttaggtcgcccctctcccggtggcgaattacgtggtggcggtggcggtcgtgttgtgttcttggtctagttagtctgtgttgtctttatcggtgctgttttctgtggtggttgtactgcatcgttctagtttctagtccatgtgctgtaatatctcgctgctgtaatcaatggaatgtcctcgtttcaagccccaaaaaaaaaaaaaaaaaaaaaaaaatccactcgccctcccacacagaaaaccctagccgccgccaccgaagcggcctcccaggtaagcaggagcgtccaccccgccgccgtcatgaagcgcaatccccgcgtcacgagctcccgccggaagtgccgcaaggcgcactttacggccccgtcctccgtccgccgcgttctcatgtccgccgggctgtcgacggagctccgccacaagtacaacgtgcgctccatcccgatccgcaaggaccacnaggtgcaggtcgtgcgcggcacctacaaaggccgcgaggggaagggggggcaggtctaccgccgccgctgggtcatccacctcgagcggntcacccccnataaggtgaacg

SEQ ID NO: 1525 - DNA, 2110 bp, Zea mays
  unsure (1)..(2110): unsure at all n locations
  Clone ID: PAT_MRT4577_168504C.1
actcctggtaccctcgaggccggccgggccgggacgttatcgcgcacatctcctgatcctcgttcctctccgccccgcttgcgccgcgcctccgcccccgtctcctgtgagatcagctccggcggcacgcggatatgactacttcaaggcgtcttgctgacaggaagagtgcaaagttccagaagaacatcacaaagaggggttctgtgcctgagaccacggtgaaaaagagcaatgactaccctgttggacctatagttcttggattcttcatttttgtggtcattggatcatccttgttccagataatcaggacagcgacaagcggtgggctggcctgaattcactgagctaaaaccagaaatttatctgtccgtgagctgggaggcagtatctgtgttgtgtagcaaacttgttcatggatatgtagtgcgaatgtcactactgttctgtttgcagtatcaaaagagtttaaactgatgttgtaaccatgcaaaggctgaaaattttaaagagtatgggagaaaccttaatctaaaaaaaaaaaaaaaaaagaagccaactaaagaatcccgcgatccatcgagtttttgaacgcaagttgcgcccgaagccttctggcggatcgcggccggccgggccgggacgttatcgcgcacatctcctgatcctcgttcctctccgccccgcttgcgccgcgcctccgcccccgtctcctgtgagatcagctccggcggcacgcggatatgactacttcaaggcgtcttgctgacaggaagagtgcaaagttccagaagaacatcacaaagaggggttctgtgcctgagaccacggtgaaaaagagcaatgactaccctgttggacctatagttcttggattcttcatttttgtggtcattggatcatccttgttccagataatcaggacagcgacaagcggtgggctggcctgaattcactgagctaaaaccagaaatttatctgtccgtgagctgggaggcagtatctgtgttgtgtagcaaacttgttcatggatatgtagtgcgaatgtcactactgttctgtttgcagtatcaaaagagtttaaactgatgttgtaaccatgcaaaggctgaaaattttaaagagtatgggagaaaccttaatctaaagaagagtggctctgcaaaaaaaaaaaaaaaaaaggcgcctacggcccnngaaaaaaaaaaaaaaacgcaaaaaaaacaaaaaaaaaaaaaaaaaaaagtacacatcatctcttccaaatcccaccagcaaatccccaattcctccgagttcgagcgaccatgtcggggcgtggcaagggcgggaagggtctgggcaaaggcggcgccaagcgtcaccgcaaggttctccgcgacaacatccagggcatcacgaagccggcgatccggaggctggcgaggaggggcggcgtgaagcgcatctcggggctcatctacgaggagacccgcggcgtgctcaagatcttcctcgagaacgtcatccgcgacgccgtaacctacacggagcacgcccgccgcaagaccgtcaccgccatggacgtcgtctacgccctcaagcgccagggtcgcaccctctacggattcggcggctgagaggcgctaccgccgctggtggccgtggcaaaagtcttgggtcgcggtcaagaaatcgagagtattctggatgacgtgcttagtttcgtagtattattatcactagtgcttattgttagcggttgttgggttcgaccactctaagccactgtcaaacagtaatatatgagtaccgcatttccgtgtttcgaacttctaatatatcataatctttaggggagaagatgccacattatacaactcactcatacggcgcccatatatacccccctaaatttcgccccccgcgccccttgttttccccccccccctcctttatttccccccctttccnatttccccccaccccccccttttcccgtcttcccccgttgattcaaaacaacacaactttcaacttgtttccgtttccgctttccctcgttttacacacccccttccctttaatatattttcccccccacacccttcccacatatttataatac

SEQ ID NO: 1526 - DNA, 726 bp, Zea mays
  Clone ID: PAT_MRT4577_168609C.1
cggacgcgtgggagcagctggaagacgcctggaagaagccggcgcctgctccggcctcagcgagaaagatacttcgagactgccctctccttccgtagccggatcaacccactcgttcgcctcaaagccaaaggtatcgagccggacttcgggctctacggcctcaaggcgatcaccaaggtcttcaagagcggcatcaacgcgacgccggtgatccagtgcagcaagggccccttcgacaagtacatgctgttccagctctacttctgcgcggcggggaacggcacgttcatcgactgccccgcgccgcagcagtacacctgctccaaggagatcctcttccaccccttcaagaagtggatgctcaagcagcagctcaaccaggacgacgaccctttccagctgcctggcgtcgccatggacaactgatacaccgtaccgtcgtctctgtttgcgtttctgtcaagtgtgcatggaataatactgtaactgtgtttcctgccgggcaatgcactgtgatatgatgcccaacgaataaatgtcgcttttatttttattcgacttcccccctgtaccgtgtggaaataaacctattataagcatcgtgttgaaactcatgatatgcatgagcagctagtgaaaagtttgaatcctagatgaattgaaacacactattatatgattgctaaataaaaaaaaaaaaaaaagggcggcccggacgcgggg

SEQ ID NO: 1527 - DNA, 483 bp, Zea mays
  Clone ID: PAT_MRT4577_168644C.1
gaactagcaacacacaaagcacaatagagcaccaacaatggcaggcaaaacattgtgcctccttatgctcctagggctttctgcaagtagctgctactgcgaccattgtcccgcaaagctcgcaagctcctatagcttacgttgttcccccgtacctctcaccagcggagtctacaggatagtagaaaacccaattcttacaaccctacaggatccaacaggcaatggcaggtgagcatcttacctttatcacccttgctcctacaacaatcatgagccctattacaacagttaccttgggtgcatctattggcacaaaacatcatggcacaacaactacaacaacttgtgctagcaaaccgtgctgactactctcaccaacagcagcttcttccattcaaccaactaggttcattgaactctgcttcttatctgcaacaacaacaactaccatgcagccagctacctgctgcctacccccag

SEQ ID NO: 1528 - DNA, 144 bp, Zea mays
  Clone ID: PAT_MRT4577_168736C.1
acagaacacaagaattacttaatctaacattacccaaactggcattattacaatgttagccgctgatgaccaccatgggaacaggtatctaggttcaagcaggcgcctctgctggctggcaagggggagcacacacaaacacac

SEQ ID NO: 1529 - DNA, 2907 bp, Zea mays
  Clone ID: PAT_MRT4577_168744C.1
aagagtgactcagtgacagtagtgttcgggcccgatcgactgctcctagaagcctcggccgcgcctctatctcatctccttcctcctgttgagcccgccggcctcccacagcttactacaaaaaccctaaccccttcccttatcctctgctccctctccacggttccacgaacgttggcgcgcaagctcgtggtgtgagcggtcactgtctcccatcccatggctccggcgctgagcgggactctgggcgcgtcgtcggtggcggcgctgcggccctgcgcggggaggagggcgccgtccgccgcgagctcggttgcgccgcgcgggagcggggtggtgaggtgctccagagggctcaggtgggacgcccacagaagcagggggaggttgctcagggtgaggtgcgatgcggccgtcgcggagaagcccgccgaggaggaggcggctggggagaagttcgagtaccaggcggaggtgagccgcttaatggacttgatcgtccatagtctgtacagtcataaggaggtatttctccgggagcttgttagcaatgcgagtgatgcgctggataagctgaggttcctcggcgtcactgattcttctttgcttgctgatggcggcgagctagaaataagaattaagcctgaccttgatgctggaacgattactatcactgacactggtgttggtatgactaaagatgagctcaaggactgccttggtaccattgctcagagtggcacctcaaaatttctgaaggccctcaaggaaaacaaagaccttggggcggacaatggtctaattggtcagtttggtgttggattttactcagcttttcttgttgcagagaaggttgtggtgtccaccaagagcccaaaatcagataaacagtatgtgtgggaagctgtggctgacagtagctcttatgtcataaaggaagagactgatcctgagaaaatgcttactcgtggaactcagattaccctgtttctaagacctgatgataagtacgagtttgcggacccttcaaggattcaaggcttagtaaaaaattactctcagtttgtgtctttccccatatacacatggcaggagaaatcaagaactgttgaggttgaagaggatgaagagccgaaagaagttgaagaggcaacgaagggtgagaaaaagaagaagactattacagagaaatattgggattgggaactagccaatgagacaaaacccatatggatgagaaatccaaaggaaattgagaacaccgaatacaatgagttctataagaagacattcaatgagtttttggaccctcttgcccacactcacttcacaactgagggtgaggtggaattcaggagtgttctttatgttccaggcatggcgcctcttagtaatgaggagataatgaaccccaagaccaaaaatatccggctatatgttaaaagagtcttcatctctgatgactttgatggtgaactgttttccaagatacttgagctttgtgaaaggtgtggtggattcaaatgaccttcccctcaatgtttctcgggagattcttcaagaaagtcgaattgtaagaattatgcgcaagcgacttgtcagaaagacctttgatatgattgaagagattgcggaaaaggaagataaggaggactataagaagttttgggagagctttggcaagtttgtcaagcttggttgcatcgaggtacacagggaatcacaagcgccttgctccattgttgcgcttccactcttctaaaaacgagggagatttgataagtcttgatcaatatgtagagagcatgcctgaaagtcaaaaggcaatctactacatcgctacagatagtctccagagtgcaaagactgctcctttcctggaaaagctggtccagaaagatattgaagttctctaccttattgagccgatagatgaggttgccattcagaacttgcagacctacaaagagaagaaatttgtggatatcagcaaagaggatctggaattgggtgatgaagaagaagagactaaagaaaccaaacaggagttcactctcctatgtgattgggttaaacaacagcttggcgacaaggttgcgaaggtccaaatatcaaagcgtttaagttcatctccatgtgttctcgtatctggcaagttcggttggtccgccaatatggaaaggctcatgaaggctcaaacacttggtgacacatcaagtttggaattcatgaggggaagaaggatcttcgaaatcaaccctgaccacccaattatcaaggatttgagcgctgcttgcaaaaatgagcccgaaagcacagaagccaggagggctgttgagctcctatacgaggctgctttaatctcgagtggatatactccggagagtccagcggagttgggtggcaagatctatgagatgatggcgattgccctcggcgggagatggggaaggtccgacatggaggaggccgaagcgtcgacgggtgaggccagcgcagaggcagactcatctgaaggcaccgtagcagaggtgattgagccctcggaagttagacccgagagcgatccgtggagggaccagtgagttctcccacgggcatcctttgttagaactccatatttagcagtgccggggaaaaaaactaagccatgggcaagaacatatttggtcacagttgcttctatatgggttcttgccgtggcaatttttttgtaggcttagactttgccggccaccagaatcttattgaggaggtagtggccttagaaaagaataataaagcatgaagactgatgattacatagcgaaattgtgctgtccctctcaataatatttataatgaaaagaacttatttctgcaacttaataaaaaaaaatttttgattcaaaagcccccccccacccc

SEQ ID NO: 1530 - DNA, 340 bp, Zea mays
  Clone ID: PAT_MRT4577_168951C.1
agcgcatcccggagcgcgtggtgcacgcgcgtggtgtctccgacaagggcttcttcgagtgcacccacgacgtgacgtcgctgacgtgcgcctacttactgctcgcgcccggcgtgcggacgcccgtgatcgtgcgcttttcgacggtgatccacgagcggaggtcccatggagacatatccgcgacccgcgcgggttcgtcgtgaagatgtacacccgcgagggcaactgtgacctgctgggcaacaactttcccggcttcttgatccgcgacgggatcaagttacgctacgtgatccactcgaacaagcccaacccgtggtcgtagtgcatgagtact

SEQ ID NO: 1531 - DNA, 155 bp, Zea mays
  Clone ID: PAT_MRT4577_169249C.1
aagggaacggagatcaatttttcccaacacaacccgagttactgtcggcaagacccagacctttacatttattttaccccgaaaaaagaaagggaaatcaatcggaccacgcgcaaaggcacattatattggcacatacattgcttacacaacca

SEQ ID NO: 1532 - DNA, 2148 bp, Zea mays
  Clone ID: PAT_MRT4577_169250C.1
cacgcgagagcgaaacggaacaccattgttggaaataaaataaaagaacaccacatcgacatcctctcacctccctcgcactccattggatttgggggagctcgggggggcgcgggccactgatgatccccggaacgagcaccgatccgtggcgaggaaactccaccgggtagccggcccgggagcgcggggcacggcgatggcgggcgccggggcagcggccaatggcggcaggaacaagtacgcggttctcgatcggagcgaggagcgacagacggacgctaggacggagcggcggaggaggccgttggcgcccgagagcgagagggggagaagggagcggttcgtgtacgcctgcgcggtcttcgcctccctcaacgccgtcctgctcggctacgatgttggcgtaatgagtggcgcgatcatctacatgcagaaagacctccacataaccgagtttcagcaagaaatcctagtaggctgtctgagcgtggtctcactcttgggaagcctatcaggggggcgaacatctgacgcaattggcagaaaatggacaatgggcctcggtgcaattgtgttccagataggcgcgaccatcatgacgtttgctccatcattcactgtgcttatgatagggaggctccttgctggggttggcattggctttggtgccatggtatctggagtgtacattgctgagatctcccccgcaggtgcccgagggacgctcacatcccttcctgagatctgcatcaattttggggatccttcttggctatgtttccaattatgccttctcaggcctttctgagcacatcaattggaggattatgcctggtgtcggtatcctcccatcagtcttcattggctttgcgcttttcgtgatcccggagtcccctaggtggttgatgatggagaagagagtttcagaagcaagggcagtgctgctgcagattagcgagtctgaagctgaagctgaagaacggctggctgagatcgaggaagccgcaggtctgatgaaatcaatgaaatctgaggacaaagaagtgtggagggaacttttgaacccgtctcccgccgtccgtcggatgctgtacgctggttgcggtattcagttgttccaacagatcacaggaattgatgctactgtctattacagcccaacaattttcaaagatgctggcatcaagtctgatcaggagcttctcgctgcaactgttgctgtgggtttcactaagacagtgttcatcttggttgcaattttcctaattgatagagttggacggaagccacttctttatgtgagcaccattggcatgaccatctgcttatttctcttgggggttgcacttacactgcaaaaccatgcggtggggcttatgtctccacgtgttggtatcgacctagcaattttcgcagtttgtggcaacgtggcattcttttcaattggcatgggaccaatatgttgggtcttgtcctcagaggtatttcctttaagattacgagctcaagggtcagcgcttggtcaagtaggtggtagagtgagcagtggtttggtttccatgtcattcctttctatggcccgtgctatatcagtggcaggaatgttcttcgtctttgctgcaatatccactatctctgtactgtttgtgtacttttgtgtgccagaaacaaaagggaaaacactggagcagatcgaaatgatgtttgaaagtggggacgaatggggaggaggtgaaattgagcttgaggatacacagcatttaataccgagtatcaagaagtctgtgcctcttggttgatatttgtagcatcaataaaattcttattagctccatgtttcaatgacgagccaaccaaaccagctggattctgaactttggtttcgagtgatctggccacactgagccacgaccgatctgataaaagataagcttgatagacataggtgcaacgtagaagattaattgtgatgttagttcaaaatgtcaatgattttactgggaggcggtctgtaatgtatgatcttacatctcttgtaccttcttacatctctcgtacctcccagcggaagaatatactcgcagaaaagttttctactgtgcatttttttataaccctaaaatgagtattagatgctatttggag

SEQ ID NO: 1533 - DNA, 653 bp, Zea mays
  Clone ID: PAT_MRT4577_169326C.1
ggcgtcttcacttgttctggtcttctcggagcccctgatgaagaggttgagattttggcctcaggcttatcttggcctgacattcaactggggagctttactagggtgggctgctattaaggaaagcatagaccctgcaatcatccttccattgtatacagctggtatttgttggacgctggtgtatgatactatatatgcgcatcaggtgtttcgctatccctactttcatattaatccttgatgaagtggccatttcatgttgtcgcggtggtcttatacttgcatatctccatgcatctcaggacaaagaagatgacctgaaagtaggtgtcaagtccacagcattaagatttggagatttgaccaaatactggatcagtggctttggcgcggcatgcttcggcagcttagcactcagtggttacaatgctgaccttggttggtgtttagtgtgatgcttgagcgaagaatggtattgtttttacttgatattgactccagacctgaaatcatgttggacagggtggccctactatccattcgtagcagctgcagctgcccagttagcgtggcaggtttcgaccgtggatctgtctagccgctcagattgcaacaaggagtttggtgttcaacaagtggattggagcttt

SEQ ID NO: 1534 - DNA, 158 bp, Zea mays
  Clone ID: PAT_MRT4577_16940C.1
cgcgtacgatcgctagactccaaggtcatcactctccgggagacggggaggtcccacggcttctacttcattaccttctcctccgagaactccaaagacgacgcgatctataacatgaacggcaaggacctccccggccgtaacatcaccgttaacca

SEQ ID NO: 1535 - DNA, 403 bp, Zea mays
  unsure (1)..(403): unsure at all n locations
  Clone ID: PAT_MRT4577_169506C.1
ggggcgggggtgcaggtgctgctacggcgaccattttcccgcattgctcacaagctcctatagcttcccttcttcccccatacctctcaccagtggtgtcttcggtntgtgaaaacccatttattcaaccccacaggatccaacaggcattgggggggggggtcttacctttatcacccttgttcctccaacantcatcagccctattacagcagtttcctttggtgcgtttnttggctcanatcatcggggcgcatcttctgctacaacttgtgctggcttaccttgctgccttctctctgcgtcttcggtttcttccattcgaccagcttgctgcgttggtctgtggttgttgtttgcggcggcggcgtctgctcttcgtcctgttgggtggtggctaccc

SEQ ID NO: 1536 - DNA, 197 bp, Zea mays
  Clone ID: PAT_MRT4577_16960C.1
tagtgaagccgccgccgctgtagtgtccatagccaccgcaggagactgaaatggggggctttatcaagacacacaagaccaatgcgtacttcaagcgtttccaggtgaagttcaagataaggcgcgcttgcataacggtctacagggtcagtataatgctgattaaccaagacgaacacaagtacttatgacccaca

SEQ ID NO: 1537 - DNA, 2358 bp, Zea mays
  Clone ID: PAT_MRT4577_169639C.1
gccggcccggtctgtagctccgagatcatgaagcgcgagtaccaaaacgccggcgggagcgacggctacatgagtctcctccaaggacaagtcgatggcggcagcggcggcgggggcaggggagcaggaggaggaggtggacgagctgctggcggcgctcgggtacaaggtgcgttcgtcggatatggcggacgtcgcgcagaagctagagcagctcgagatggccatggggatgggcggcgcctgccccaccgctgatgacgggttcgtctcgcacctcgccacggacaccgtgcactacaatccctccgacctgtcgtcctgggtcgagagcatgctgtccgagctcaacgcgcccccgccgccgctcccgcccgcgacgccggcaccaaggctcgcgtccacctcgtccaccgtcacaagtggcaccgccgccggtgccggctacttcgacctcccgcccgccgtcgactcgtccagcagtacctacgctctgaagccgatcccctcgccggcggtggcggcgtcggccgacccgtccccggactcggcgcgggagcccaagcggatgcgaactggcggcggcagcacgtcgtcgtcctcttcctcgtcgtcatccatggacggcggccgcactaggagctccgtggtcgaagctgccccgccggcgacgcaggcggccaacgggcccgcggtgccggtggtggtggtggacacgcaggaggccggtatccggctggtgcacgcgctgcttgcgtgcgcggaggccgtgcagcaggagaacttctctgcggcggacgcgctggtgaagcagatccccgtgctggcctcgtcgcagggcggcgccatgcgcaaggtcgccgcctacttcggcgaggcgctcgcccggcgcgtgtatcgcctccgcccggcaccggacggctccctcctcgacgccgccttcgccgacctcctgcacgcgcacttctacgagtcctgcccctacctcaagttcgcccacttcaccgcgaaccaggccatcctcgaggctttcgccgggtgccgccgcgtccacgtcgtcgacttcggcatcaagcaggggatgcagtggccggctctcctccaggccctcgccctccgccccggtggccccccgtcgttccgtctcaccggcgtaggcccgccgcagcccgacgagaccgacgccctgcagcaggtgggctggaagcttgcccagttcgcgcacaccatccgcgtcgacttccagtaccgtggcctcgtcgccgccacgctcgctgacctggagccgttcatgctgcgaccggagggcggcggcgacacggacgacgagcccgaggtgatcgccgtaaactcggtgtgcgagctgcaccggctgctcgcgcagcccggtacactcgacaaggtcctgggcaccgtgcgcgcggtgcggccgaggatcgtgacggtggtggagcaggaggccaaccacaactccggcacattcctcgaccgcttcacggagtcgctgcactactactccaccatgttcgactccctcgagggcgccggctccggctccggctccggccagcccaccgacgcctccccgccggccggcacggaccaggtgatgtccgaggtgtacctcggccggcagatctgcaacatcgtggcgtgcgagggcgccgagcgcacggagcgccacgagacgctggtccagtggcgcggccgcctcggcgggtccgggttcgagcccgtgcacctgggctccaacgcctacaagcaggcaagcacgctgctagccctcttcgccggcggcgacgggtacagggtggaggagaaggacgggtgcctgaccctgggatggcatacgcgcccgctcatcgccacctcggcgtggcgcgtcgccgctccgtgacgtccccaccgccccccgtacctcgccggcacagcacagcacaaaagcacagtggaagctaagacgtcagtgaacgctgctgaactgcagatagcgactgtggggccacaacggtcctcgccggagcgacgagatggacacttggagtccgaccggatcggcctgtgttcgttcctgtttccggtcccccccttctctcttccccgttgttccttcaacccgtcaactatggtagcccgtagccctactgctacgtttaaatgtgtattactattacgtgtaattcctcccagcgctgatatccaataaggacgaaccggatttcgttagctcgaatgagaattttgtatacagtgcgtccgatcctaaaaaaaaaaaaaaaaaagcggccgcttttttttttttttttttaggcacacacaagtattcaaattgacagaaatataatttaagtaacaaag

SEQ ID NO: 1538 - DNA, 2806 bp, Zea mays
  Clone ID: PAT_MRT4577_169640C.1
cgcagctccccacttctcatcgccccctttttttaatttgtggccatctttggggtggtgggcggaggatttctaactggatggtgaagtttgtctggcgaaaaggacggctgcgacgaacccgtccatcgatccaacgctgtgcgcgcgttgggggagggacctgccaggccccacctgcagcgacagactattgatagatgccttcctctctgatcacctgatggctgatgccttcgcggccgtcttcgcctgccgctgctactactagttgccttcctcgcttccccgtctcgccccagccgcttcccccctcccctaccctttccttccccactcgcacttcccaaccctggatccaaatcccaagctatcccagaaccgaaaccgaggcgcgcaagccattattagctggctagctaggcctgtagctccgaaatcatgaagcgcgagtaccaagacgccggcgggagtggcggcgacatgggctcctccaaggacaagatgatggcggcggcggcgggagcaggggaacaggaggaggaggacgtggatgagctgctggccgcgctcgggtacaaggtgcgttcgtcggatatggcggacgtcgcgcagaagctggagcagctcgagatggccatggggatgggcggcgtgggcggcgccggcgctaccgctgatgacgggttcgtgtcgcacctcgccacggacaccgtgcactacaatccctccgacctgtcgtcctgggtcgagagcatgctgtccgagctcaacgcgcccccagcgccgctcccgcccgcgacgccggccccaaggctcgcgtccacatcgtccaccgtcacaagtggcgccgccgccggtgctggctacttcgatctcccgccccgccgtggactcgtccagcagtacctacgctctgaagccgatcccctccgccggtggcggcgccgtcggccgacccgtccacggactcggcgcgggagcccaagcggatgaggactggcggcggcagcacgtcgtcctcctcttcctcgtcgtcatccatggatggcggtcgcactaaggagctcccgtggtcgaaactgcgccgccggcgacgcaagcatccgcggcggccaacgggcccgcggtgccagtggtggtggtggacacgcaggaggccgggatccggctcgtgcacgcgctgctggcgtgcgcggaggccgtgcagcaggagaacttctctgcggcggaggcgctggtcaagcagatccccatgctggcctcgtcgcagggcggtgccatgcgcaaggtcgccgcctacttcggcgaggcgcttgcccgccgcgtgtatcgcttccgcccgccaccggacagctccctcctcgacgccgccttcgccgacctcttgcacgcgcacttctacgagtcctgcccctacctgaagttcgcccacttcaccgcgaaccaggccatcctcgaggccttcgccggctgccgccgcgtccacgtcgtcgacttcggcatcaagcaggggatgcagtggccggctcttctccaggccctcgccctccgccctggcggccccccgtcgttccggctcaccggcgtcgggccgccgcagcccgacgagaccgacgccttgcagcaggtgggctggaaacttgcccagttcgcgcacaccatccgcgtggacttccagtaccgtggcctcgtcgcggccacgctcgccgacctggagccgttcatgctgcaaccggagggcgatgacacggatgacgagcccgaggtgatcgccgtgaactccgtgttcgagctgcaccggcttcttgcgcagcccggtgccctcgagaaggtcctgggcacggtgcgcgcggtgcggccgaggatcgtgaccgtggtcgagcaggaggccaaccacaactccggcacgttcctcgaccgcttcaccgagtcgctgcactactactccaccatgttcgattctctcgagggcgccggcgccggctccggccagtccaccgacgcctccccggccgcggccggcggcacggaccaggtcatgtcggaggtgtacctcggccggcagatctgcaacgtggtggcgtgcgagggcgcggagcgcacggagcgccacgagacgctgggccagtggcgcagccgcctcggcggctccgggttcgcgcccgtgcacctgggctccaatgcctacaagcaggcgagcacgctgctggcgctcttcgccggcggcgacgggtacagggtggaggagaaggacgggtgcctgaccctggggtggcatacgcgcccgctcatcgccacctcggcgtggcgcgtcgccgccgccgccgctccgtgatcagggaggggtggttggggcttctggacgccgatcaaggcacacgtacgtcccctggcatggcgcaccctccctcgagctcgccggcacgggtgaagctagacgtcattgagcgctgaatcgcagttagcgaccgggccaaggttctcgccggcgtgatgagatggaacactttgactcccgcggccggatcggcctgtgttcgttcttgtttccgatctcccttctctttcccgttgcttcgatcccgtcaagtatggtagaccgtagcctattgttatgtttaaatgtcaattattatgtgtaattcctccaagcgccgatatccaataaggacgaaccggattttcgtttaaaaaaaaaaaaaaaaaaaaaaaaaaaaaaaaaaaaaaaaaaaaaaaaaaagggcggccgccgactagtgagctcgtcgacccgggaattaattccggaccggtacctgaggcg

SEQ ID NO: 1539 - DNA, 410 bp, Zea mays
  unsure (1)..(410): unsure at all n locations
  Clone ID: PAT_MRT4577_169652C.1
acgcttgagaccaagtagcaacatacaaagcacaatactcgtccaacaatggcagccaaaatatttggcctacttatgctccttggtctttctgcatgcgctgattcagcgaccatcttcccgcaatgctcgcaagctactatagctttcattatttccccgaacctatcaccagccgcgtctaccgtatgtgaaaacccaattcttcaacactacaagatccaacaggcaatcgcagctggcatctcacctttatcacccttgctccttcaacaatcatcagccctattacaacaattaccttttgagcatttattggcacaaaacatcatggcacatcaactacaacaacgtgtgctagcaaacctagctgnctactctgagcatcagcaggttcattcattcaacca

SEQ ID NO: 1540 - DNA, 1113 bp, Zea mays
  Clone ID: PAT_MRT4577_169869C.1
cattgcgccccgcgcgccggccggccggtcgattcccccactccactcgccgcccgcggctgggctgcgctgcgcatcgacgacggacgacgacacaatcacccccaccccccgtccaatcagcagcggacgagggacgaccacggccccccgtctgccgcacgcgcgcccgctctgccagctgctgctactactgctaaacctcgcccaccagtcgcgtgaggaaatagcaacctgctgagctcgctcgttcgctcgctcgcctgccttcttccctgggcaagctagctagctaggatcgaggaggagctctgcccggccatgcagcgtggggatccgctggtggtgggccgcatcatcggcgacgtggtggaccccttcgtgcgccgggttccgctccgcgtcgcctacgccgcgcgcgaggtctccaacggctgcgagctcaggccctccgccatcgccgaccagccgcgcgtcgaggtcggcggacccgacatgcgcaccttctacaccctcgtgatggtagatcctgatgcgccgagccccagcgatcccaacctcagggagtacctgcactggctggtcactgatattccggcgacgactggagtatcttttgggaccgaggtcgtgtgctacgagagcccacggccggtgctggggatccaccgggtcgtgtttctgctcttccagcagctcggccggcagacggtgtacgccccggggtggcggcagaacttcagcacccgcgacttcgccgagctctacaacctcggcttgccggtcgccgccgtctacttcaactgccagagggagtccggaaccggtgggagaagaatgtgatctcgacccggccgggtggaaattaataagatgacgggtaatcgggtatatgtatatatttatatatatatgtatatgtacgtgtatttgatctggtggcctttggttatatttgggtggggtgtatttgatatattatctgtggcagattggcgcattctctggcgcatatttgatagctacatgtatctatttatacagatataaagcgagcaataatatgcatatgagagggttcagccacatcagtcattactctctccttttccc

SEQ ID NO: 1541 - DNA, 286 bp, Zea mays
  Clone ID: PAT_MRT4577_169904C.1
ctggcttctcctccccctcttatcaagtcctcctcgggttagggttccttagggttttgtggaggggcgatggcggcggctgatgtggagtaccgttgcttcgtcggcggacttgcctgggccaccagcaacgagtcgctggagaatgccttcgcctcctacggcgagatcctgaactccaaggagatgaccgaccggtagacggggaggtcccgtggcttcggcttacgtaccttctactacgagaactgcatgctagacgctgtggataacatgaacgggaagg

SEQ ID NO: 1542 - DNA, 389 bp, Zea mays
  Clone ID: PAT_MRT4577_169911C.1
ctaacaacatacaaagcacaatttcgttccaacaatagctgccaaaatatttgggctgcttattctcctagctatttctgcaagtgctgctactgctaccatattccctcaatactcacaagctcctataacttaccttcttcccccgtacctatcaccaactgtgtcttcagtatgtgaaaacccaattcttcaaccctacacgatccaacatgcaatcacagctgacatcttacctttatcacccttgttcctccaacaatcatcagccctattacatcatttaccttttgtgcatttattgtcacaaaacatcatgtcacaacaactacaacaacttgtgctagcaaaccttgcttcctactcttatcaacatcattttcttccat

SEQ ID NO: 1543 - DNA, 203 bp, Zea mays
  Clone ID: PAT_MRT4577_170000C.1
cattgcgaccacagacagtgcgcgctctaagggcttttttttttgagataacaaggaggagaggaggagattgccgtcactatcacctgggtgaaggctaggcaaatcttctacaggcggggcaaccccaccgtcgaggtggacgtgggccttaacgaccgcaggtaccccaggggggccgtacccagcggcgcattcactgg

SEQ ID NO: 1544 - DNA, 1995 bp, Zea mays
  Clone ID: PAT_MRT4577_17005C.1
atgaaacacgtacaattcttcttgattaattgaaacacaaacattttacaagcgttttgtaccgccgacaacttcaataacgtatttgacttgggattactcacacagtactgctactatttgttttctcttaattcactagccatttcggctaaccagatcatcaaagaaaaacaatggaaattaaatcagcgagcgatgatgcaagctacgcgcatcactagaacgacgtagtggtaatcgatcgattaatgcctagttaatttaattaaagactgcacatatatactaggcgccaattaatgatctgttcgtgcgtatgtgttttgaactgcacggaagctaggacgtacggtcgatcaggaggtggtgacgaacggtttgtacactttgaggtcagagacgatcccggcaacggagcctgcggcggaggcgacggtgatgacgaggcaggcgacgctgagcagctgcaggcacacccaccgcgtgctccacctgggcaccttcttctgcacgatgtacatctccacggggaagtagacggtgagcggccagaaccccagcgcgcccaggagcccgaccacgtcgttgaagaagggcagcagcatggacaccaccgtcgtggccaccacgaacgccgtccgccacgtcagccggaacaggctgagcttgtagcaccggccgccggcggtcccgagcgggagcgggacgtcgacctcgcccgtgatgtagcgggacttgggccacctctggcgcgcccacttctcgacgaaggcgaacaggggctggcagtagacctggtaggcgccgacgaggtgcacggcgatggcggcgttggcgacgtcgaggagccagaagggctcgtagaagccgaagcccgtgaggaggttcccgggggcgttgtccccgaacgcggcgtaccccatgcacccgcacagcatgtagaagaacgtggtgacggccacgctgacgacggtggcgcgccgcatgaccttggactcggacggcggcggcgcgcggatggtgtcctggatctcgatgaggatgagggagtaggagtaggcgaaggcgatgtcgccgaacgcctgcaggctgcgccacatcttgtcgaccggggtgaccgcgccgacgctgatccccgtcaggctgccctgcacgcccttgttggacaccacctgcgcgatgcccaggcccaggccgatggtggagtaggtgaaggacatgacggcggcgaggatggagagccacgatatctggtcgaagtccgggatctgcgagaagaaaatctgcacgacgccgaagatgatcatgtagggcgtgctggagatgttgcaggggtccccgtgcccctccacgtggaagcagttcgccctctggatcgccagcatgctaatagaggcggcaatggtgtagcctatggcgactccgacgatgttggcgtactgcaggaagccgcagaaccagaccttgacgccactgagattggcgttaaccgcgtccatgtacgtgtagttgcgcttgccggtgcaggcgtcgccggagcggtagcagtcggcgagtagggccgatgtgtagtaggtgacgaaggagaagagcagcatgacggtggggcctgccacccagccgagctgcgcgatggcccacgcgagcgacagcaccccggaccctatcacggccgtgataatgtgcgcgctcgccgtccacatcgtccctgtgcgcttgaggcgaccgtcgtcgtcaaagcactttgaggcggccgccgcgtgatgaccgaactccacggagctcacctccatggccgccggccgggtagcagtgcttggcggcgggccggcacacacccttctccctcccgcagtagcttggtctgcacagcaccaccagtgacaaatacacagcacacgaacaactgtgaggcttcgctgcagttagagcacgcacacagagagagccggatatatattgtaggagatatttcacacactagttagtgat

SEQ ID NO: 1545 - DNA, 431 bp, Zea mays
  unsure (1)..(431): unsure at all n locations
  Clone ID: PAT_MRT4577_170168C.1
ggcggaccgaccactccctccacaaccgccttcagcactctacggtcgagggtcctcgagtnnccaagatcagtggctcgagtcgggagacagcaggagggtcccgcggctttcggctttcgtcaaccttctccacgtgaggagggcgatgacggaaccgccatcgagggcantgaacggcaagagagcctggactggccgcaacaaatcaccgtcaaccgagggcccagtctccgcgtgcggcacgtggagggcggcggctggtcgggtaccggtggtgagccgtggagggcggcggctacgtgcggtgtgcgggcgccgtgatggcaggtggcggctacgggcggtgtgcggcggctaccggtggacggcgggagcttaccgtggtggtggcggctgtacttgcggtggcataccgtggcggcgggcta

SEQ ID NO: 1546 - DNA, 413 bp, Zea mays
  Clone ID: PAT_MRT4577_1701C.1
aaaaaaacccccgcttttccattatataaaggctgggccccatttataacagcatggccccccccccccgcctgaaaaatcctaacaattggcccgggggggtttcatttaccccaaacccgggggggggggggtcacctacgagcagactccccccaacagggggccaacaaaataaacagggtagggtcgatggctgaaaaccgacaaacaagcaattttgcttcgagcgaccgcccccccccagttccaaaagaacgagaagaatgaccggttcaggggttaccccttcacgtccccgcccttgagggggaccgggggcaccccgttcaccctggccttggggggcacgtcctccccgtaaagcatgccccccttgttccgggggatcggggctgccccctttttttccg

SEQ ID NO: 1547 - DNA, 2098 bp, Zea mays
  Clone ID: PAT_MRT4577_170411C.1
ctgctccggtcgctgctgaacgccgatctgattggcttccacacttttgattatgccagacacttcttgtcgtgctgcagcaggatgctcgggctcaagtatgagtcgcagaggggctacattgctctggagtactatggccggacagttactatcaagatcttgcctgtgggagtagacttggagcgggtgcggtcaggcctcaacgattcggtagctggggccaaggccgccgagctggtgaaaccgttctgtcagcagaaccgtctgctgttgcttggtgttgatgacatggatatcttcaaaggaattagcttgaagcttttggcgtttgagcagctcctaatgcagcatccggagtggcggggaagggtggtgcttgttcagatcgccaatccagcaagggggcggggaaaggatgtgagggaggtacaggaagagagcgatgcaatggtgaggcgcatcaacgacgcgttcgggcagccaggttaccagccggtgatactgatcgaccagcctctgcagttctatgagaggatggcttactatgtcgtcgcggagtgctgtttggtcactgcagtgagggacgggatgaacctgatcccatacgagtacgtaattgctcgacaagggaatgagaggatagatagtattctaggccttggtccggcttcaaggaagaagagcatgcttgtcgtgtcagagttcatcggctgctcgccctccctgagcggcgctatccgtgtgaacccttggaacatcgattcagtagccgacgcaatggactacgcgctggagatgccggaaggggagaaggtgttgagacatgagaaacaccacagatacgtgagcacgcacgacgtcgggtactgggcgaacagcttcctgcaagatcttgagcggatttgcctcgaccataacaggaggcgttgctggggcatagggtttgggctgaagttcagggttgtggccctcgacccaaacttcaagaagcttgcggtggagcacttggtcttggcctaccggaggacgaagaagcgtgtcattctcttagactacgatgggacgctgatgccgcagacttcgctcggtaagagtcctacctcaaggacgatagacatgttgaacagcctttgccgcgacaggaacaacatggtcttccttgtgagcgcaaagagccggatgactctgaacgaatggttcttaccatgtgagagccttggactagcagctgaacacggctgcttcctcaggctgagaagagacgcagaatgggagacatgcgttccggtgatagactgcagctggaagcagatcgcagagcctgtgatgaagacctataccgagactacggacgggtcgactattgaggacaaggagactgccatcgtgtggtgctacgaggacgccgatccagatttcggatcctgccaggccaaggagctccacgaccatctggagagcgtgcttgcaaacgagccggtctcagtgaaagctggacccaacctcgtcgaggtgaagccacagggcgtaagcaagggcctggtggcgaagcggatcctgtcgacgacgcaggagcggggcgacgccgacgacgacctgccggacttcgtgctgtgcgtgggcgacgaccggtccgacgaggacatgttcgaggtgatcgcggcggcggccgccgcgaggggcgtgtcctccctgcaggcggaggcggaggtgttcgcgtgcactgtggggcgcaagcccagcaaggccaagtactacctggacgaccccgcggacatcgtgcgcctcgtccagggcctcgccagcgtctccgacgacgaccagacgcacgccccaccgccgcccctccctcggtggcgacgacgacggacaccgtgccgaggtgaaccgtgtcggcgtgcgcggggtgcggttagctctaggtggcatgagaccttgtggttgtggtggaagaactagtggaagggaccgtcgctcgcgactgttggcaggtggtgtacaaaatgctctaggaatgttgtggtctgggaatgtccttgttcgtgctgcctaaaaaaaaaaaaaaaaaaaaatccgcagggaaggccgcggtacc

SEQ ID NO: 1548 - DNA, 2276 bp, Zea mays
  Clone ID: PAT_MRT4577_17042C.1
tcgagccggaaaaaaagtgcctccccccgatccgcttcccccttccacccgccgatcgccctccgctcgctccaccgcggcgggcgatcgctcatctccccctaacctcccccgctcgcgattcccgaggcgaggtgccacccaccgcagatttcttccgacggacggttggctcgctcaccccctacttcgctgatcggatcgcgtgctgcccgaggtagaggtgatgataaggcatagttgtttgacttagcctgccttagctatttcttgaagctaagggaaataataattggtgttatggcatttagaaatatggtttgcactccccaagtcattaatcttacatcagactcagagagagggcaagctcaaggaggcaatggtagtgagatatctgagcaaggtgcacaacatgctgtcagagttgtaggaaatgcaatgaacattggtctctctggtgtgcgaagttactatgatatgagcataaatcatcaccatcagtctgttcataacccacccccgaatttaggtgttgattctggttttgtcttcgcatcaaatatgtacaatccctgcatgtcatcaacatcaatgaacagacatgtttctcatgctcagagctttggatcagggaatcaagtgttgcctcaaaaccaagtcccaggaactatggatgagagtagcagaaatgacagtattggtgaaagtgctagagagcatattaaaaggaaaaatgctgcagttgctggaagctatcattttgttaatggatttgcaagctcaagctcatcttctcatgcacctcaaaatcctatgcttgggccttgggacccttcttttgaatcaactgtttcttctaatgttgcaccattcaacccatcagaatatcatggacacaacaacagttggccgtccttagaaggatcttccataacaggaagtaatggattcaactcaatggttgttcatccagactcagtacagcgtgggaactatacatttccacccactcatattagccattcatggatgtcccatgctacaaatggtattgctgatggagttccccagtgggaatatgccaatgcaactgctaatattcaaggcagatttgcccattcaggagccacagaaatcgcaaatgttggttttcatgaatatcagaatggcccttcaactatttgtcggggaccagtaccttatttccaccagcatgcgatgcatggcatgcaagctcttgatcctactcaaatgcaagttccttatcaacaatgccacagtaatggtttcttgcatggtggtattaattaccctggaaaccgtctccaattaggtccacgaaatccagttctcttcaccagttctgaacgtgcttttgggcctccacagcatccgttcctggcaaatccagttaaccaccgcaacataaggattctaccacccgagcatgctacaataatggatttttcgagattgtatgaagtgtcaaatactgtagatgagcatagagatatgcgtctagatatagacagcatgacgtatgaggagcttttagcattagaagagcagattggagatgtcaatactggtctgacaaaaagtcacattgtagataaattgaggactagcctatatgttccaggaatatcgagcatgtctgatcagccatctaaatcttctctagagaatgatgcttgcataatatgccaggaggagtaccaggctagagactgcgttggcacccttgactgcggtcacaggtaccacgcggagtgcgtgaagcagtggctgatggtgaagaacttgtgccccatctgcaagacgacagcattgtctgccaacagaagacaaggacagtgagcgggaatggagaagcctgttggttatttgctttgacaaacgttcagctcaattttgtatataaagaagtggtagacaatggcgctacctgtatttgttgttcactttgttgtgactgggagtactcagcttcctgaaactgtacagccataacatttgttatttttcttcaaatgtagaatgttttaaatcgctcagtaaaccgtacagccataacatttgttatttgtcttcaaatggagaatgttttaaatcaatcagatcgccaccaatccttgtaactactggcttggctgaaactagtcgcacatggatcgtcctgtacattttttaggagttgacgactattagctttgataaaactagtcgcacatggatcctcctgtacaaaaaaaaaaaaaaaaaaaaaaaaa

SEQ ID NO: 1549 - DNA, 2264 bp, Zea mays
  Clone ID: PAT_MRT4577_17046C.1
cattgggtacctcgagaagggccgggccccgatccgcttccccctttggccgccgatcgccctccgctcgctccaccgcggcgggcgatcgctcatctccccctaacctcccccgctcgcgattcccgaggcgaggtgccacccaccgcagatttcttccgacggacggttggctcgctcaccccctacttcgctgatcggatcgcgtgctgcccgaggtggaactttataattttgttgcgtgttttcataatgaaattagggaatgcctatggtggaaaaaatgtagaggtgatgataaggcatagttgtttgacttagcctgccttagctatttcttgaagctaagggaaataataattggtgttatggcatttagaaatatggtttgcactccccaagtcattaatcttacatcagactcagagagagggcaagctcaaggaggcaatggtagtgagatatctgagcaaggtgcacaacatgctgtcagagttgtaggaaatgcaatgaacattggtctctctggtgtgcgaagttactatgatatgagcataaatcatcaccatcagtctgttcataacccacccccgaatttaggtgttgattctggttttgtcttcgcatcaaatatgtacaatccctgcatgtcatcaacatcaatgaacagacatgtttctcatgctcagagctttggatcagggaatcaagtgttgcctcaaaaccaagtcccaggaactatggatgagagtagcagaaatgacagtattggtgaaagtgctagagagcatattaaaaggaaaattgctgcagttgctggaagctatcattttgttaatggatttgcaagctcaagctcatcttctcatgcacctcaaaatcctatgcttgggccttgggacccttcttttgaatcaactgtttcttctaatgttgcaccattcaacccatcagaatatcatggacacaacaacagttggccgtccttagaaggatcttccataacaggaagtaatggattcaactcaatggttgttcatccagactcagtacagcgtgggaactatacatttccacccactcatattagccattcatggatgtcccatgctacaaatggtattgctgatggagttccccagtgggaatatgccaatgcaactgctaatattcaaggcagatttgcccattcaggagccacagaaatcgcaaatgttggttttcatgaatatcagaatggcccttcaactatttgtcggggaccagtaccttatttccaccagcatgcgatgcatggcatgcaagctcttgatcctactcaaatgcaagttccttatcaacaatgccacagtaatggtttcttgcatggtggtattaattaccctggaaaccgtctccaattaggtccacgaaatccagttctcttcaccagttctgaacgtgcttttgggcctccacagcatccgttcctggcaaatccagttaaccaccgcaacataaggattctaccacccgagcagcatgctacaataatggatttttcgagattgtatgaagtgtcaaatactgtagatgagcatagagatatgcgtctagatatagacagcatgacgtatgaggagcttttagcattagaagagcagattggagatgtcaatactggtctgacaaaaagtcacattgtagataaattgaggactagcctatatgttccaggaatatcgagcatgtctgatcagccatctaaatcttctctagagaatgatgcttgcataatatgccaggaggagtaccaggctagagactgcgttggcacccttgactgcggtcacaaggtacacgcggagtgcgtgaagcagtggctgatggtgaagaacttgtgccccatctgcaagacgacagcatttgtctgccaacagaagccaaggaaaatgagcaggaatgaaataagcctgttacttatttgcttcgacaaacgttcagctcaattttgtacataagatgtggtagacaatggtgctacctgtatttgttaactttgttgtgaccgggagtacccagcttcctaaaactgtacagccataacatttattatttttcttcaaatgtagaatattttaaatccgctcagttcgcccctccaatgtgtatgatatggcgaaccagggagacaaagcttccgtaatggcatctttaggcagccttgtatctattaactttgctgaaactaatagaacatggatccctcctgtacatttttttag

SEQ ID NO: 1550 - DNA, 1297 bp, Zea mays
  Clone ID: PAT_MRT4577_170642C.1
cattgggtacctcgaggccggccgggccttcacttctctgcttccgacctcgtagcgaatcggaccggggggctagggttccggtgcgcctctgcaatcggacgcgaggctaggctgggcatggagggaaccgctgcggcccggaagaggtcccggccggagacggcgaacggggctgccgccgccgggaagcgctccaaagacacggagtcatttcaaactggtctatcaagcaaatcgaagccttgcaccaagtttttcagtacgattgggtgcccgtttggcgagggatgtcattttctgcactttgtccctggtggttacccggcagttgcaaaaatgctgaatctaagtagctctgctgtatctgcgccatcaagaactcatgtggatcatgccgctcttaccggtgcctctcatccagcttctacggtcaagacacgcatgtgcaccaagtacaacactacagaaggctgcaagttcggtgataagtgccatttcgctcatagcgaaagagagcttgcgaagccagcctacatgtctcaagaaggacctcctatgggtggtcgatatggacgagctgaacctatgcaaccagctgccatgggccctccagcaggaaactttggtgcctcggcgactgccaagatcagtgtggacgcctctctggccggtggcataatcggcaagggtggggtcaacactaagcagataagtagaattacaggcgtcaagctctccatccgcgaccacgagtctaaccccaacctaaagaacatcgagctggaaggcaattttgaccagatcaagcaagccagcgacttggtgcgtgatctcatcgcaaccatcagcgcaagcatgccagcgaaaaatccatctgctgccgcggcaccagcaggaggaggccgaggcggtggtccagggggcaagagcagcaactacaagacgaagctgtgcgagaacttcttgaagggtgcctgtacttttggtgaccggtgccacttcgcccatggcgagacggagcagcggagaggtgctgcatgagagtcgaggtgctctaggcaatgagatgccatgtgctctctccttttgctactgtgaattttcgccttgcagcgctaggcggttggactgttgtgttgtgttgcgacgtcaatggattaaactctagatttcagctttctttttttaacatataagttcgagaaaacgttaaactgtcgtgcagcttgcattttgttggtcggtaagctagcaggctgctagcccatgacaaacctgtgtgacaaaaaaaaaa

SEQ ID NO: 1551 - DNA, 1857 bp, Zea mays
  Clone ID: PAT_MRT4577_170683C.1
ctcgcaacgggccggggtatgagaaacgtactcgcatttagtctattgcacaaaggaatagctgatctagacatgcaattagttgttggtttagtcagtcagtcaagccagtcaaatcaaacctgaaccccgcttaagcgcaagtgagactgtgagagagaaagagcaaagggaagtcatcgtaggtattttgagaacattccatgcatacttgcctggctcgcatttgcctgcgagatcaccaatcaaacaagccacccgtgctgcctgctaccctgctacgctgcacaatcatcctgcggaatttagtaacggcaagttattccaaagttccgatccccaagttgtttattctccaatagtttgtcggtttgtgtgcttcagattcctcccgctctcgcgcaagtggtacactgtgtttccagctaccattttctccactaactaattttattttcagtgtctctcgtttctttatttgcgcgtcaagtttcagccattccttgctcaaaggaaaagtttgagccattccctgggaaggtaggtgagggtactggacaaatccgaaatgcaaatgggcatatgcatgctacatataaccgtaggcttgctactgccagagactcgggtacatggtatcgggttacagtccaaacaggaaattctaaggccgatggaagataaggatatgggtacagtcacccggtcctgccatgacgcgaaagcttatagaaatcaggtggcataaatactgtgcagggctaaaggttggtgggtcgaatggaccaggccatcaggttatcgagaaagctctcatctcttctatttctaggctagcctaggtctggaccagttaggcacgcaagtatcaatcgattcataagaggaggaggccattgagggagccaagtagaaggcagtcacggcaaacaacgcttgttgtaaagctggtgagcaactttgtcaagcctcaagagctcatggaagatggcagtgctccaagacggtctactccacccacccgcagaagcagatctgctgagttccacaatttttcagaaaggaggagaagggataagatcaacgagaagctgaaagcattacaggagcttcttccaaactgcaacaagaccgacaaagtttcgatgctagacgaagcaatcgactacctaaaatcccttcagctacagcttcagatgctggtcatggggaagggaatgtcaccagtggttcctcttgagctgcagcaatacatgcattacatcacggctgaccctgcccagttgcctccgttgcgcccctccggccagcagcaccgacaatttcagataactcaagccaatcctcagcgacaatctaacgtcgagtcggatttcttgagccagatgcagaacttgcactcttctgagccgcctcagaactttctcaggccaccgaaattgcaactttatacaccggaacagaggggtggcctacccagcacgagccacaacactggatggatttctgggagttcctcgtataacttcatggagtgatgtgctcctaatgacaaaatttgacacggcaggcgtgcagccttgtactgggaagagatcgttcagtttgggacctgcagcatggttcacctgagagaattccatgaatgtgtagtactagttaactagctagctagttgtgttattaaataaaacgttgtgattgtgatgctgctcattttgctatctgaatcttaccgtccaattctcctccatgttcatgcaaaggctgacaggtggcgtctgtatttatctgtgcagcagtatgctactatttgttagattgatctcatctagttcggttaaagggccgaacctt

SEQ ID NO: 1552 - DNA, 291 bp, Zea mays
  Clone ID: PAT_MRT4577_170759C.1
ggcagcaccaagaagcacgattttttgcttaggattaacttataacaaatcctgtcaggagtaacagcatccatcgatccacagtgcatgctggttgatgcatgggtctgctggagccgaggatgaacacagcactaacaactgacacagagcgaccttgcaatcaaaaacacagatgggcaacaacaaacgagacgaacgaaaataaaccctttggactagggtaaacattacagtagcgaacatgatcacttggccgaacgggccacaccgtttagttcattcatattc

SEQ ID NO: 1553 - DNA, 1822 bp, Zea mays
  Clone ID: PAT_MRT4577_170773C.1
gccggccgggccgggaacagctgggtcccactactcctgtccccacttggcattgtaaccaagctgccgcagcccgcagcggccaccaatgcggagcggccgcctgcgtcccttcacctatccgaatggggcttatcgccaccatccaatcgaagctctggaacctcctccactcccagcttccgccgacgctcgcttcagctgctgctttccttcccatccttcaacaggtgcaatttgcatttcccatggagctcactgattaataacgtgtgagctgaacttgcttttctgtggacaatttggaacttcagtactagtttccgataggattcagggagaaatgatctcttttaacaatttattttggagctcccttcagccttctttcaagttttacagaaagtgcctgacaaactgcccatattttgcactgaccatgcattcaactacaaagcccttgggttcatctatgccggtaaagagggcgcatttgaagccacatgccgcagacatcaagaggaacccccatgtacatgagctttacaaattggtttaccgacttccggagaaccttagctggctgttggcaccaccagaaattcctaaaagacctgcctcaaagaagaaaaaacaaaaagacgaaatagtggccggtaacagctttggtgtgatcttggagtgggagggagttgttgtggatgatgatgatccagacttggagccccgggtttggtatgttctatcactagaagaggggaagtctttccctccagatgcattgctgaagaaaatcgagggaatgagaactgaccaggctattgcagaagtcttatgttggtcagaagatccagcagaaatccaaaggttggcaacacacaaggaggttatatatcaaaaacttcaaggtggatactaccagctgcgaccacatgtgcttgatttcttgaacacccttgtgggttttgacattccaatagcaattgcagctcctcgctcaaggaagagccttgaagaagggatcaaaactgttggtctgcaaggctacttcgatgctatagttgcattggaggacttctgcttagggaaacctgatggtgagatgtttgaagtcgcagcggagcaacttggtctggaaccagatgcctgtgttgtgtttggtaactcaaacttgacgacggaatctgcacataacgctgggatgaggtgtgtggcagttgcaggccgacaccctgcctatgagctccaatcagcaaaccatgttgtgagatggcttgatcagctctctattgttgacttgcagaggcttgctaatggtgaagttattggtcgcaggggtagagaatctgacatggatatggaaattgtgattgaggaatgatgatgtttctgcaaaaatgacgcactaatatattgttgtgcttataatctgatacacctaagtaatgcattacattttgtaaacaggccaagcagtgcaagttccggactaaggatactccggagtttgcattaccttcctggtttgcttgtgatgaattggaattcgcctaaaactcttttagtcattagagttggaagtgaagaaactcccacccgtaacttgtgtatgtacagtatatatatgtattacctattcttcgctacatctttgaaggtgtatctgttgggattttcgggaggggctcaatttaaatgcggttaaatggcctttgggttttacggggtcacgagtgaggggagaagggaagggaagggaagggaagggaagggatggaggttgattcaaataataatgtctattaaatttgattatgctaaa

SEQ ID NO: 1554 - DNA, 1178 bp, Zea mays
  Clone ID: PAT_MRT4577_170837C.1
cctcgaggccggccgggacctctcccgttcacctcccactgccgtttacctcacgctctctcgtggtcgttgcttcctggcggcggcgccgccctcttcgtcgggccattcaccggcgacgagcattcatctggaggagagcatcacactcatctaactgatattaggatgagtctatgtacaatagcacgccgactatgtctttcaaaaccatcctctgtgaatcgtctttcagtaatttgggctcatctatacagcaccgaggctgcaaaggacacgggtgctaagaagtacaagtaccctgatgtatacgacccatacgggcctatgtcgctaccgtcagagaaagttgtggatctagctgaccgcatcgctgctctccctcctgaggagatcaaacagattgctccagcccttctattcagactgaaccaagagccgccacaggctatctccggccagggtttcagttttggtgctcagggtggtgcgggggtcggtgccggaaaggctgaggaaaagaaagctgagaagacagtcttcgatgtcaagttggagaaattcgatgctgctgcaaagatcaagattatcaaggagatcaggacctttacggatttggggctgaaggaggcaaaggagctagtggagaaggccccagtcattctgaagcaatcgctcacaaaggacgaagcagaagcaatcatagggaagataaaggcagctggcggtgttgctgtcatggagtgaacgaagggatgaccatctcgacacaacacacttttatttcctatttttgttgccatgatcaagcatttgaattgcacattgcagtgcctttatgctgatggagaaaatagtttacatctacgttggtaaccaaggcgagagggaaactagagatttagttgctatgatgatattcatgacttgttctagaataagcagttctttgggctctacacaacttatttggtggagtgaatggatgttgccatcagggccaataccatgaatcttatgttcttgttgtatctgctatgagttataaacacttcgcagttgcttaggtaccctgatatattctctatgtcagttacattgcagtgtaaaaaaagttctgttgttgtagatctggtatggttggatttagtttccagtaacaaaaactttgattcacg

SEQ ID NO: 1555 - DNA, 1361 bp, Zea mays
  unsure (1)..(1361): unsure at all n locations
  Clone ID: PAT_MRT4577_171218C.1
cacgcacctagggttttcgcgccgccgccgcagccgcacaatgccgtcgcacaagaccttccggatcaagaagaagctggcgaagaagatgcgccagaaccgccccatcccctactggatccgcatgcgcactgacaataccatcaggtacaacgccaagcgcaggcactggcgccgcaccaagctcggcttctgagcgtcgggattggccggctgctgcgtcggaaggctagggtctaagagctatcttctgttttatcattgtctctgtttctgtcagctagcaagtgacgctgtgatgcttttattaagattttgatgagtggtgacgttaagagaacattggcagtactgtgttgtaccccaagattgcttgcagcattgctatgctcagtatcgcaccatttaacttattatatgtgttatgttgcaatgattgaggtctaaaaaaaaaaaaaaaaaagcggccgcgagcggcggcgtcctcctcgtccttcgttgacggcgtcgcggtggcgttcgactccgccgacccngtcagatggtgatggtgtcaggcggcgggggtaacgcgtgggcgaaggagatgaccctccgccgcaggatagccagcatattcaacaagacgcaggaacacttccctactctgaaggactacaacgattatctggaagaagttgaggatatgactttcaacctgatcgaagggatagatgtcgaggagattgaagcaaaaattgcaagataccaacaggaaaatgcggagcagatatacttgtccagagctaaaagggcggaagatcttgcggcagcacttaaagcaagcaggatgaaccctgtaaaggccgaggccaatgatacggctgctgggagttctcagggtattagtggcggggcaggagttcagggccagtatgcacctgccgctgttcttgggggagtggctcagccccgccccacaggtatggcgccccaactaatcggcagtgggtcggatcctctgcaaggagacgacgaggagaccaggagactacgcgcagagcgagcagcacgggctggcggatggactgctgaattgagcaagagaagagcgcttgaggaggcgtttagcgccatattcatctaggattagatcaaaaggcaacacatggcctggaggaaagccggcatacttaaaatggctgtcaaactacaaagcgttggatgatctgtgtcgtgattatctttgggacatggaattctcacaaattgtggtgaagcaccctttgtgtgcctttggttgcaaaagcatgctttttgtccaaaaaaaaaaaaaaaaaaaaaaaaaaaaaaaaaaaaaaaaaaaaaaagaaaaaaaaaaa

SEQ ID NO: 1556 - DNA, 1986 bp, Zea mays
  Clone ID: PAT_MRT4577_171286C.1
ccgggaaaaaaagacttgaacacggccagcgtctcatcggctgggcgtggtctactgcacgcacacttaccaccagccaccgcaagtgaatcgctagtcggaagaccatgtcctcagaggccagcagcgtcgtcgtcgccgacgagaatggagcggcggagacggtcggcgtcggacggtacgtggaaatggagaaggaccaagactcgagcgcagccaagtcgcggctctccggcctgctctggcacggcggctccgcctacgacgcttggttcagctgcgcgtccaaccaggtggctcaggtgctcctgaccctgccctactcgttctcgcaactggggatgctgagcggcatactgttccagctcctgtacgggctgatgggcagctggacggcgtacctcatcagcgttctctacgtggagtaccgggccaggaaggagagggagaaggcggacttcaggaaccatgtcatccagtggttcgaggtgctggacgggctgctcgggaggcactggaggaacgtcggcctggccttcaactgcacgttcctgctcttcggctcggtcatccagctcatcgcctgcgcaagcaacatctactacatcaacgacaagctggacaagcggacgtggacgtacatcttcggcgcctgctgcgccacgacggtgttcatcccgtcgttccacaactaccggatctggtcgttcctgggcctcgtcatgaccacctacacggcgtggtacctcgccgtcgcgtccctcatccatggccaggttgatggcgtgaagcactccgggccgaccaagatggtgctctacttcaccggggccacaaacattctctacactttcggagggcacgctgttaccgtggagatcatgcacgcgatgtggcggccgcagaagttcaaggcgatctacctgatggcgacgctgtacgtgctgacgctgacgctgccgtcggcggccagcgtgtactgggcgttcggcgaccagctgctgacccgctccaacgcgctggcgctgctcccgcgcacggcgttccgcgacgccgccgtcgtgctcatgctcgcccaccagttcatcaccttcggcttcgcctgcacgccgctctacttcgtctgggagaagctcgtcggcctgcacgactgccgcagcctctgcaggcgcgccgccgcgcgcctccccgtcgtcgtccccatctggttcctcgccatcatcttccccttcttcgggcccatcaactccgccgtcggctccctcctcgtcagcttcaccgtctacatcatcccggcgctggcgcacatgatcacgttccggtccgcaacagcccgtgagaacgcgatggagccgccgccgcggctgctggggcgttggacgggcgcgtacatgatcaacgcgttcgtggtggcgtgggtgctggtggtcggcttcggcttcggcggctgggcgagcatgacaaacttcgtccgccagatcgacaccttcggcctcttcaccaagtgctaccagtgcccgccgccaccgcccctgccgttccccggcggcggcctcggcaacatcacgatgccattcaacggcgacgggctccctcctaccccggctccttcgccggcgcattacttcttccgccaccaccggcatcacagccaccaccgcgggctctgatgagagacgatgaaatgaacccggcttaccaccagtagtgcgtgcgtggcacactgctgctttagtttgagctgatcccttagttaagtctagcttaattagcacctgcatgcagcatcttcgttctctcctctagcttgctggtgtcgaacgcatgctttcccggtttcagtgactttagagaccctgcctgagcctgacacgaggggagtatcgctgtatcagtactagcatgcagtctcttgtgttccgggctgtgtcctggcgtggagctcaaagaaggggaatccatttctacaaaaaaaaaaaaaaaaaa

SEQ ID NO: 1557 - DNA, 1163 bp, Zea mays
  Clone ID: PAT_MRT4577_171287C.1
tcgaggccggccgggccggggacttttgttttgttttatatatgggctccccgtctacttgcatccaaaagaactcctggggaaagaaacagagataaggagaaagacgggtttcttttatcgtcgcctgtcggacgtgctctgctgcagagtcttgcttcacccgtccggcacctcactctctggcctgctgtatatatccacctccctccggcctccatttcttctcgacttgaacacggccagcgtctcatcggctgggcgtggtctacactgcacgcacacttaccaccagccaccgcaagtgaatcactagccggaagacaggccaaccccactgctagtgctaggaatctaggagcgagaacgagagaccatgtcctcagaggccagcagcgtcgtcgtcgccgacgagaatggagcggcggagacggtcggcgtcgggcggtacgtggaaatggagaaggaccaagagtcgagcgcagccaagtcgcggctctccggcctgctctggcacggcggctccgcctacgacgcttggttcagctgcgcgtccaaccaggtggctcaggtgctcctgaccctgccctactcgttctcgcaactggggatgctgagcggcatactgttccagctcctgtacgggcttatgggcagctggacggcgtacctcatcagcgttctctacgtggagtaccgggccaggaaggagagggagaaggcggacttcaggaaccatgtcatccagtggttcgaggtgctggacgggctgctcgggaggcactggaggaacgtcggcctggccttcaactgcacgttcctgctcttcggctcggtcatccagctcatcgcctgcgcaagcaacatctactacatcaacgacaagctggacaagcggacgtggacgtacatcttcggagcctgctgcgccacgacggtgttcatcccgtcgttccacaactaccggatctggtcgttcctgggcctcgtcatgaccacctacacggcgtggtacctcgccgtcgcgtccctcatccatggccaggttgatggcgtgaagcactccgggccgaccaagatggtgctctacttcaccggggccacaaacattctctacactttcggagggcacgctgttaccgtggagatcatgcacgcgatgt

SEQ ID NO: 1558 - DNA, 127 bp, Zea mays
  Clone ID: PAT_MRT4577_171300C.1
aaacacacgaataatcatgaattattattgaactgggccccgttctactggatgatcaacaatgatatcccgaatacttcttaattgagaccttccaaggtgatcctatacgccctgggggcttaac

SEQ ID NO: 1559 - DNA, 937 bp, Zea mays
  Clone ID: PAT_MRT4577_171309C.1
gtagagcagagagctagtcgctcgcgcgggcaatccaaacctttccctattcttgcaaggtctcggaaacggaaaggcccctgctccgctgcgcgtttgcgagtttgggaagaatccttgcctgccggagggggggaaacgggcgagatggggcgagggcgcagcgagataaagaggatcgacaaccccacgcagcgccagtccaccttctacaagcgcagggacggcctcttcaagaaggcccgggagctcgccgtcctctgcgacgccgacctcctcctcctcctcttctccgcctccggcaagctctaccagtacctcgcgcccaccgtcccctctgtcaaggagttcgtcgagaggtacgaggcttcgacgcacaccaaagtttggtccgacatccgccaggagaggcgccgcgagctggagaaggtggccaagatgtgcgacctcttggagaaggaactgaggttcatgacggtggacgacggggagcggtacacggtgccgtcgctggcggcgctggagcacaacctggaggcggccgtgcgcaaggtgcgctccgagaaggaccgcaagatcggcggcgagatgagctacctcgagaacatgatcaggggacgccacgaggagcgctacgggttgtgcaacaagctcgcgcatgctcaggcatcgaacaacgagggaggagggagggtcgaccccaccaagcagcggcctggaactcaaactgggtctcaactgacgctggctggctggaaagctcgaggactatgctctgttccttgggtactgtacttctgtaggttttggttgagttgggttgttggtcagcagttgtcccttagatcaaacaagtctcgagtttgatgtgttaatgtactccattattcaggtgggatcaagtacctttgctgctccgattgaagtatattgtttt

SEQ ID NO: 1560 - DNA, 2054 bp, Zea mays
  Clone ID: PAT_MRT4577_171418C.1
ctggccggggcaagtctaatcgagcagctttgtactttgaccgcgctgacattctctatccatttcgttctggacgctgcttgcttccacagctccaccatcatcatcgcgtaatcctgcaggtgcagctaccgcctatcggcatcctatcgccgcttcgcttcgagacggaaggctgtcccgcgaggggtggagccgagaggagttcgccgtccgagaaggtctgtcttcgggatctccctttggcggcgcagttgttttgatgggaactcagtaaccgctcgagaggaaaggagcggatgctcaactgtagcaggaagatgggtagatccgcgagtgttcttcaagtccttctggtttccgcaaccatcgttgttgctcagacccaatgggctagtggtgtatggggcatgtactgcgaggacttgacagcgagtgcagaaaggccgcacagggcctcggtaacagatttcggcgccgtcggagatggtgcgactcttaacacgaaggcgtttcagaatgcgctcttccacctcgactcattcgcgaagaagggcggggcgcagctgttcgtgcctgctgggaggtggttgactgggagttttagcctgatcagccatctcacgctatcgctggacaaggacgcagtgattcttggatcaccagactcctctgactggccagtgattgatgctcttccatcctatgggcgcggtagagaactccccggcaaaagacatcaaagtctaatatttggatccaatcttaccgatgtgataataaccggtgccaatggcaccgtcgatggccagggtgcggtttggtgggactggtttcacaaccacacattgaactatactagaccaccgctcgttgagctgatgtactctaccagagttgttatttccaacctgaccttcataaattcgccgttctggaatatccatcctgtgtactgcagccaggttctggtccagcatctcacaatcctagcacctatcagttcaccaaacaccgacggcatcgatccagactcatctacaaacgtctgcatcgaagactgctacgtcagaaacggcgacgacatagtcgtcatcaagagcgggtgggacgagtacggcatctccttcgcccaccccagctccaacatcagcatccgcaacatcacaggacagacaaggaacagcgccgggctcgcctttggaagcgagatgtcaggcggcatatcggacgtccgagcggagggggtccggatcgtcaactcggtgcacggtatccgcatcaagacggccccggggcgcggagggtacgtgaagaacgtgtatgtagctgacgtcagcttcgacaatgtttccatagccatcaggatcactggaaactatggtgaacaccctgacgatggctacgacaggaacgcgcttcccaccataagcaacataaccatcaaggatgtcgtgggtgtcaaaattggtgttgcaggaatgctgcagggcattccgggggatagcttcagtggcatctgcttgtcaaatgtttctctaagtgtcaggtctactgatccatggaattgttcacttgtcgaagggtattcgagctctgtgtcacctgaggtgtgcgagcaactgagagccactcctgggcccggacagatgtgctatggcggtaactatccggcagctgcggcacaaccgcagccgccgcagaagtcaggtgctagccggctggtaagtcctttcctctcgataagttggtttctacgtaggtaaccttgagcatagtatctacttatcatcccccccccccccctgttcccacttcccagcagcttggtaattgtagtttatggagttcagtaccatgtacttttgttccaaaaactatttgctggggcatgtaggtactgattattcttactcagaaatggaatggatttgtttgacttgaacagttctgttgaaacacgtcaggttctgggctggcttgtccttgtaagatacgggtaccggcatagaacttggtttctcctcgcaaacgaacttccagggttattcaac

SEQ ID NO: 1561 - DNA, 1705 bp, Zea mays
  Clone ID: PAT_MRT4577_171422C.1
cccacaaaaaaaaaaaaaaagaccgaccgaagccccccgtcccccaccaaccaaaaaaagcccgcacgagacgagagacgagacccagacgtctcgccctcggcttcttcctcccctccctgaccgctgccgcgacctctcggcgaaaccctaacctaccttagaccccgccgccgccgccgccgccgccaagggagagagagacttgcacatcaaagggcgtccgatggggaagaagaagaagcgcgtcgataaggtcttctgctactactgcgaccgcgagttcgacgacgagaagatcctcgtccagcaccagaaggccaagcacttcaagtgccacgtatgccacaagaagctctccaccgcctctggcatggccatacacgtcctccaggtccacaaggagtccgtgaccaaggttcctaatgcaaagcctgatagggagtcaacggagatagagatatttggaatgcagggaattcctgcgcatgtattggctgctcattatggagaagaggaagacccttcaacaaaggtacccaaagtagaagtgcctcaggtaaggcctgttattatgcctaattcgctaggcatggcatttcctccgcgaccagcttatggtgtggcacctccaatctataatcctgcactcaatcctttgatggcccggcctccaatttggcctgctgcaccagcgcaagcttggtatccgcaacaagcagcatatccacaacaatcagctgtttcagttcctcccatagttgctgggctcccaccacaacagccactattcccaattcagaatgtgcctactcctatgacatcagcagctgctaatgtacttcaaacatcgtttcctatggcccctccaggagtaccttcacctgttgcccctcatgtttcccagcctttgtttcctgttaacacttcagctgtcaatggagctgtaaattccccatttttagcatctgttgcacctggaaccattccagcaagctcttcagcagcagtcggtgttgcaggaattggatatggaaccaataaccaaggcactagagaacccagcagttggatcttcacctgcagtatccaataataaggcgtctggtgcccaaccagctacgaatgaggtatatctggtgtgggatgatgaagcaatgtcaatggaggaaagaaggttgtcgttgccaaagtatcaggtgcatgatgaaactagccagatgaactctgttgacgcagcaattgatcgaagaatatcagaaagtcggctggcaggacgcatggccctatgaagaagctgggctttgctcggtagattatcccccttgcatttcaccgaaggactctgcctgcgcttgtatctcgctgtgcagcagtcggccctcttcatttagttagcgaatggagttgctgcagttaagaggaatgtgttgtttctgacttgtttgagtgtcgagcctttgttcttctatgtttccagcatcgacaagaaaatgaattagtagcacttaggagttattttggtccaactgtcgcctcattgggaatatattgatgaacacctcaatccctgcccgattgtaacctggtcatgtgctattgccaattgaagcctaatgctgtgcattggcttgaaagcaacttaaaaatgttacggattataatatttaaaaaaaaagaagggcggccgccgaagagagagctc

SEQ ID NO: 1562 - DNA, 1513 bp, Zea mays
  Clone ID: PAT_MRT4577_171541C.1
gttttcatcctccttgaagcgaaaacgatcgagcttgtatcgcaggcatttcggtacactacgttctccggctgtgtagagcttctgcggagatgggtgccgagttgggagaagcgggtgtccctgcccgggacatggtggacgcgctggaaggcgtgcgctccatcctgctgaaaccgtcggagcgcctcgacgacaagcgcttcacgaggatcgccggcgccgacttcgacgacgccggcctcggcctcgccgggttgctcggctcgctcgcgtccacggggttccaggcctccaacctcggcgacgccatcgacgtcgtcaaccagatgttggactggaggttgtcccacgagaagccaagcgacgactgcgctgaagctgaactcgatcctgcgtacagagaatccgtcaagtgcaagatattcctggggttcacttcgaaccttgtgtcttccggtgttcgggagatcatccggtttcttgttcagcatcgcatggtggacgttattgttacgactgctgggggtatagaggaggacctcatcaaatgccttgcgccaacctacagaggcgacttcactctgcccggagcgctgctgcggtccagaggacttaaccggataggaaacctgctggtgcccaatgacaactactgcaagttcgagcactggatcatgccgatcctcgacaagatgctgctggaacagtccacccaaaatgtttggacgccgtccaaggtgattgctcgccttggcaaggaaataaatgacgaaagctcctacctttattgggcgtacaagaacaacatccctgtgttctgcccagcattgactgacggatcaattggggacatgctgttctgtcactcggttcacagtccaggtcttgttgtcgacattgtacaagatgtacggctgatgaacgcggaaaccatccacgcaagcccaaggaagacagggattatactccttggcggaggccttccgaagcatcatatatgcaacgccaatatgctgcgcgacggagctgactatgcggtgtatgtcaacacagctcaggagttcgatggcagtgattccggggcgcggcctgacgaagcggtttcatggggaaagatcaagagctcagcgagaactgtgaaggtgcattgtgatgcgacgattgcctttccacttcttgtggctgcaacatttgcacgcaaggttcacggcactaaatcaacaaactgaatcggaggcagtgaaattaaaatatggcgctctataactagctgaaactttcctcatatgatggttgagcttgaagcatgaacttttatttgcttgaagggtgtctatctcttagctcgtttactatttatacattactgtaacatatgtatgatatatattcatttgaaaccatttgggttattatcatacaataaaacttgtgtgtacgagaacatttgtgaccctctcttcaaattctcaaaattgttgctctaaaaaaaaaaaaaaaaaaaggtgac

SEQ ID NO: 1563 - DNA, 346 bp, Zea mays
  Clone ID: PAT_MRT4577_171547C.1
gggttcgtgaggttctccggggttcaggtttcgcgagtgacgcggatcgagatggccgcttccggtgtggagtaccgctgcttcgtatgcggcctcccctgggccacggacgaccactccctccacaacgcctgcagcacctacggcgaggtcctagagtccaagatcatcctcgatcgggagacgcataggttccgcggcttcgggttacgcaccttctccacggccgaggcgatgccgaacgccatacagggcatgaaccgcacggagctggaccgtcgaagcatcaccgtccaccagggccactcccattgaccacgtggaggcggagatcctggccgtttct

SEQ ID NO: 1564 - DNA, 311 bp, Zea mays
  Clone ID: PAT_MRT4577_171659C.1
ctcagggttgggacttaatagatcatgtcgggcaaacaggctcgagcttccaagcaatatgagaaggcagcccagtacattgactaccacacttcgttcagtgaagatgagaagaagcatccaagacatctgcaattcagcggcaacctatacactgctgcctgcaatctgaagttgaccgattacaaggaaactgcaaatctttgcacaaacgttctggaactacacagcagcatgtcaatgctcactacaggaaggtgcaagcttacattcagcttactgacctagatctagcataggccgatatcaaa

SEQ ID NO: 1565 - DNA, 1169 bp, Zea mays
  Clone ID: PAT_MRT4577_171718C.1
ccggccggggggatcgagtccgcctacgtctcccgtcgttcacctcccggctcccagtcccactgcctctctcgctctctcgtggcttcctggcggcgactgggcgagcgccgccgccctcttcgtcgggcccgcccttcaccggcgacgtgcatccctccggagaagaatattgcgctcacataactgaataactgatattaggatgagtctctgtacaatagcacgacggctatgtctttcaaaaccatcctctggcagtcgtctttcagcaatttgggctcatctatacagcactgaggctgcaaaggacatgggtgctaagaagtacaagtaccccgatgtatacgacccctacgggcctatgccgccgccttcggagaaagtcgtggaactagctgatcgcatcgctgctctccctcccgaggagatcaaacagattgctccagcccttctcctcagactgaaccaggagccgccacaggcggtatctggccagggtttcggtttcggtgcccaggtcggctctggggcaggttctggaaaggctgagaagaaagccgagaagacagtcttcgacgtcaggttggagaagttcgacgctgctgcgaagatcaagatcatcaaggagatcaggacgtttacggatctggggctgaaggaggccaaggagctggtggagaaggccccagtcgttctgaagcaatcgctcacaaaggaggaagcggaagcgatcatagcaaagataaaggcagctggcggtgttgctgtgatggagtgaatgatagatgatcatctagacatcacgccttcttttttgtttcatatttttgttgccatgttcaggtatttgagattgcacattgcagtgcctctgtgcagatggaggaaatagactagttcacagctacgttggtaacaagggagagatggagagtagagattagttgctatgatgatagtcatgacttgttctagaataagcagttctttgggctctacacagcttttctggtggagtgaatgtatgtggccatcagggccaacgatatgaatcttgtgctcttgttgtatctgctatgagttataaacacttcgcagttgcttcattaaatgctaaaaaaaaaaaaaaaaaaaggaaggccgcccggcccagtcagtcccggtcc

SEQ ID NO: 1566 - DNA, 354 bp, Zea mays
  Clone ID: PAT_MRT4577_171748C.1
cgcgtatagaacctctaaaatgttcctaactcgccagtctgaggagcacctggagctcatggacgcctgcggagccggtagcaaggggaagaagggtgcggccgggcgcacggcagacggccccagtaagaaatccgtgactcggtccgataaggtcgggctgcagttccccgttggccggatcgggcgctacctgaagaatggccggtacgcgcagcgcgtgggcactggcgcccccgggtacctagacccgtcctggagtacctcgccaccaaggttatgaagttagcagggaacgcctggcacgacaactagaagactctcatgattctgcgccacgtgcttctggggatc

SEQ ID NO: 1567 - DNA, 1924 bp, Zea mays
  unsure (1)..(1924): unsure at all n locations
  Clone ID: PAT_MRT4577_171760C.1
cattgggtacctcgaggccgggccgggcttccccctatttcaccgaccattttccccattttacagcggcgaatatctctcatctcccccgtcctctttgctgcaacacctcctacccacccgacagaaatatcctaagcgctgacccgaatacccgattcgctcctcgtccggtcgattcctgctcctaatcgctcgaatcgagtccttgccccgtgttccgtgccacaatctgggcgcttggctcccgcgagccggggttcttgggcctgggcggaggccatggacaagccggtggcgccgggcattatcaaggaggagctcatggagcagcagccgccgatgcaggacggtgtgggtggcggcggggatgcgccgcgcccgatggaggggctgcacgaggtgggtcccccgcctttcctcaccaagacgttcgacctggtggaggacccggccaccgacgccgtcctctcctggaattcggcacgcaacagcttcatcgtctgggacccgcacgtcttcgccgacgggctgctcccgcgcctcttcaagcacagtaacttctccagcttcgtgcgccagctcaacacctatggcttcagaaaggttgatcctgacaggtgggagtttgcaaatgaaggtttcctcagaggtcaaaggcacctgctgaagatgataaagagaaggaagccaccatcagctgtggcaccattgcgacagcaacgtgcccctgcttcttgcctggaggttggtgagtttggatttgaggaggagattgataggctgaagcgtgacaagaacattttaatcacagaagtagtaaaactaaggcaggagcagcaaagtactaaagatcatgtgagagccatggaggaaaggctacgagtggctgaacagaagcaggtacagatgatggggttcttggcaagagcaatgcggaacccagagttcttccagcagttggcccagcagcaagacaagaggaaggagctcgaggataccatctcaaagaaaagaaggcggcccattgacaacacaccattctacagtgatggggaaagcgaacagcttgattcacagttgaaaatgttcgagtcaggtgttctcaatgggctcaatgaacctgagctggagaatttagcagtgaacattcaggagcttgggaagggaagcatagatgatgggaacttgactcaagttagtgaccagtcagagctgaacgacgacttctgggcagagcttttggtcgaagattttggagacaaggcaggacagccagagttggagggaagaactgaagacgtgaatgaccttgctcaacaactggggtatctgagttcttctagcccaaaatagagccagttcctaatggttgcccccacaatcactggtgctttccctaccctactgttgcagaccatcctgatcaaaccggaatgatgatggatctggcagacaagttgactggtggtggagaggtgttcatactgaaggcgtgctgtggagaggtcactgccttgacgttgaaggcttagcgctgtactctgctgtgggagttacgtgtggggtgttggctaaatgtctcttccggcgtcttctggcaaaatgatctcgtggacggtgactggcaaagatgcctaggggccaacgtatacgtacacagctgttatcagatcttgttcaaagtcattgcgcggttttgacggtgctatgtatcgatcagggttctggccttctggggttgggttgtagaattgactggctgatctagtgttctccatgtatgactggtgtaaccttaaaacaccctcagcttgttgttgaactgtgacaagcatcttttttttttgttgtactccattttcatcatcattgtacatcaaattgctgaattatgaacagattnnggataatttggccgact

SEQ ID NO: 1568 - DNA, 2395 bp, Zea mays
  Clone ID: PAT_MRT4577_171761C.1
cgcgagcggcagccctttgccttgtttggatactctagtattccccctaattcacatgtgttgagatatattggggtgtaaattagtttaatttatactctaataaacctcaacacacgtggattgcggtgaatactagagtatccaaataaggcctaaggggtattaaccccctcccccccaaaaaaagtcctgggaatctatttactgatttcacttatataggtgtagtgtaactgtgtaaggaaacattttagcgtcggaaaacaagattttgaagcaattaagtgattttgtattttgtgctctttgaggttgtggaaaacaagactcgaagtggttgaagtgattctgaccagacctactgcattatgttttgagcatatctggtcgtgtagtgggtttatggcagtagggattcagtgctatcgttttcactcattagcgcatttgattgtaaacaaatacatccttgaaagtgtttatgatacattctccggtgaacctcatcttcaggtgaggcaaagagaggggagattaactctcccagcaaatttataatcctgacatggtttcttgaacttttttattgtagctagatggaacaagatactggatgaagtaccaagaatcagattgttttgttctagaagactctactgaccaccttcacatgctatagtatattgctggcctatcattatccctgttattgcagatataaatatacaaaagctgaaatttacagagaacctcatccaagcgaacataatgccttatgactgacctgctgatgaccatttctggtctattgcaacctgcagggcttcagaaaggttgatcctgacaggtgggagtttgcaaatgaaggtttcctcagaggtcaaaggcacctgctgaagatgataaagagaaggaagccaccatcagctgtggcaccattgcgacagcaacgtgcccctgcttcttgcctggaggttggtgagtttggatttgaggaggagattgataggctgaagcgtgacaagaacattttaatcacagaagtagtaaaactaaggcaggagcagcaaagtactaaagatcatgtgagagccatggaggaaaggctacgagtggctgaacagaagcaggtacagatgatggggttcttggcaagagcaatgcggaacccagagttcttccagcagttggcccagcagcaagacaagaggaaggagctcgaggataccatctcaaagaaaagaaggcggcccattgacaacacaccattctacagtgatggggaaagcgaacagcttgattcacagttgaaaatgttcgagtcaggtgttctcaatgggctcaatgaacctgagctggagaatttagcagtgaacattcaggagcttgggaagggaagcatagatgatgggaacttgactcaagttagtgaccagtcagagctgaacgacgacttctgggcagagcttttggtcgaagattttggagacaaggcaggacagccagagttggagggaagaactgaagacgtgaatgaccttgctcaacaactggggtatctgagttcttctagcccaaaatagagccagttcctaatggttgcccccacaatcactggtgctttccctaccctactgttgcagaccatcctgatcaaaccggtacttttcaaattcaattcaatgacacaaacctgttaaaatctggtaacattttcattccatttcttttatattgctggattagccaggaatgatgatggatctggcagacaaggtttgacgacccatccttctaaccatatccattatgtttgcgcagttgcatcttcagatttgccctcatcttttcttccccatctcccaactcctcccttctgaaacattctaaattgctccttatccagttgactgggtggtggagaggtgttcatactgaaggcgtgctgtggagaggtcactgccttgacgttgaaggcttagcgctgtactctgctgtgggagttacgtgtggggtgttggctaaatgtctcttccggcgtcttctggcaaaatgatctcgtggacggtgactggcaaagatgcctaggggccaacgtatacgtacacagctgttatcagatcttgttcaaagtcattgcgcggttttgacggtgctatgtatcgatcagggttctggccttctggggttgggttgtagaattgactggctgatctagtgttctccatgtatgactggtgtaaccttaaaacaccctcagcttgttgttgaactgtgacaagcatctcgtttttttgttgtactccattttcatcatcattgtacatcaaattgctgaattatgaacagatccctaaataattttggtggactggcgtcttggcatttggcg

SEQ ID NO: 1569 - DNA, 337 bp, Zea mays
  Clone ID: PAT_MRT4577_171806C.1
gacgcaacactctagactgagtcgtagtacgcgttcgggattctctaatgccacatggtggatccgcggatggtgaagctcagtcaaaagttcgataccctccacatccttcgcgcgatactggactcttccacgggaacgttcatcattgccggccgcgacggcacggaggatgggaatcgcgcgatctccactgggtatacggatttggtcccgttcgggcgcgtgttcatggctaaccctgacctgccacggacgttccagctagacgctcaccttaacacgtactacagagacacgttttacatccctgatccggttattggatccctgacga

SEQ ID NO: 1570 - DNA, 360 bp, Zea mays
  Clone ID: PAT_MRT4577_17197C.1
atcaacatataaagcacaatagtgtaccaacaatggcagccaaaatatttctgcctccttatgctccttgggctttctggaagtgctgctacggcgaccattttaccgaaatgctcgcaagctcctataactgtccttgtttccccgtacctctcaaaagcagggtgtttcgtatatgaaaacccaattctttaaccctaccagatccaacaggcaatcacaggtggcatgctacatttatcaccctttgtccctccacaatgatcagccctaatacatcaggtacctttggagcatttattgggcaaaaaaatcagggggcaaaaaactacaacaactttgggtttaaaaaacttgggt

SEQ ID NO: 1571 - DNA, 552 bp, Zea mays
  Clone ID: PAT_MRT4577_172100C.1
cgcacatatcatactataccatattttgggaagcacggtcaccaccgccaaggaagccaggatgctagcattgatcgctctcctagctctttgggcaagcgccactagggcgacccagattccagggcactagacagcagacatgccattggggaccatgaacccatgcatgcagctctgcatgatgcaacaggggcttgccagctagatggcgaagccacacctgacgctgcagcaactgtgggacttaccgatacaaaccatgccagagatgacgccacaaatgatgacgcctaacatgaagacaccatagatgatgccaaccatgacgacaccaacgaccatgactaacacgacgacgtaaatgaagatgccgcaatgtcactgcaacaccgtctcgcagattatgctgcaacagcagtgaccattcatgctcaacccaaaggccatgaccaatccacccatgttctacacagcaaccattcagcagaggctggatacaacatgcaaccaacctacatgaactccaataaggagatgacaagccatcgc

SEQ ID NO: 1572 - DNA, 491 bp, Zea mays
  Clone ID: PAT_MRT4577_172115C.1
ataattcaagaaactgacaaaccatctgcggattgaaaaatcaaggtcgaaagcaactttttgcatacatcaccataaagccgtgggggtgttttttggtcacatgctcatcgaacctacagatgcaccacgaccaaagcacacactcgggtgctttatcacaagctctgcacactcggagcccagttgcacggaaaagagacacctgctcactgtccagcaaaccattgtttgttgctcacaaaacctcactgggacataacacgcactgtttacccactgaacttggccatcatctttccaatgataggggcccccttatgattagttcggggcttaccaataacaccaggatggttcatcacattttgtaaagcccacatgacctctgggtcactgaatgctgccataaggccagggtcattcaggattttactaatataaacattaccgggcaacaccaccaggggaaacctacgagcatgccaccc

SEQ ID NO: 1573 - DNA, 416 bp, Zea mays
  Clone ID: PAT_MRT4577_172179C.1
ttcgtttttattttccgtgctatggatggactccgggtgaccatgcgactgcgggacgctcccctacacgagttccttccagaatggaacatccaggtcatggtaagtgaatcacgtgctgagacgggagccaaccaggaagatgccctcgcgcgaatcgaaaagctctaagaagtaaacgcgaagctgggctacctggagagcatgctaggtatatcgcaccctgaattgtcagagatgcaagaccgagccattttggaagctgctatagcaatgaccaaccagagggatcaagtgttcgcagaaataatgcgccctatggctggaacaccacaggaactggggcattaagtgactattatccgccaagttgctcagaaagtagtcgccaaagtgggcaagactatcaggtacaa

SEQ ID NO: 1574 - DNA, 1112 bp, Zea mays
  Clone ID: PAT_MRT4577_172255C.1
cccttccgttccgtccgtccacttgccgttgccgaccacaacccgctcccggaggacggcgggatgagggggcaagccaacggagtggaggaccgccggcagcggggcgacgaccacgaggcggacaacgacggcgaggaggcggaggaagaggagggcgacgacgagggccgccaccggggccagggcccgccgcagcagcggcgccaccaggcccagaggccgaactccggcccgcagcagcagcagcagccgcgcccgccgccgccgctcgccaggaacgtcggctacgtcggcaagcatcgcctctccgccgccatcgcccgcctcgaccaggagctccagtccctccaggaggagctggacgagcttgagaccatggaatctgcgtccgcggcgtgccaggagtaagcagattttgagtgtgtagcgttgtgttttccacatcatcatcatcatcacgtgctgtttcttctcgttgttgatgtatggctgcccttgtgaacgaaacagagtggtcacgagtacggaagggaagcctgacccgcttcttcctgtcaccagtggcccggagaactcgtcttgggacaggtggttccagcgggtgcgttcccgcagcaacaaatggtgggcatcgaaaggccctgacttctcgtagctcctgcaaataaagcagagaccatcctcatcagtcgtgtgcagattagaatgaaacacgttgagatgtatcgtccattggtgtcctggggaaacagaacaggcggcggcggcggcggcgagtgcggtgtggctctcgcaacgcctgatagtttttttttttttttgagagaatcattgtgtacgtagtaatccctaacgaggccgaacatagatgcatccacataggcctggttgttgtgtttcctagagattctgactcactaggtcggattcctgatggtcatgcgatctcgctgttctttcttcaaacgtgaagaatcacattgtctttgaaaagtttcagaaaaaaaggagaatcagattgaacgttgtttaaaaaaaataaaataaaaaaaaaaataaaaaaaaaacaattagaaaataattataataaaaattaaaattaaaaatgg

SEQ ID NO: 1575 - DNA, 1120 bp, Zea mays
  unsure (1)..(1120): unsure at all n locations
  Clone ID: PAT_MRT4577_172258C.1
gtcggggtcgccatcaccgtcgcaccgcgcgctgctcccagcctccctttcccttccctggctgcttggctgggttagttgattgactcccagtaaaacgggcagcactgcacggcacgacagaacccactcggncactcccgcctctctctactatacccagctactcgcacgcagatccacccacccacccatcgttccttccgttccgtccgtccacttgccgttgccgaccacaacccgctcccggaggacggcgggatgagggggcaagccaacggagtggaggaccgccggcagcggggcgacgaccacgaggcggacaacgacggcgaggaggcggaggaagaggagggcgacgacgagggccgccaccggggccagggcccgccgcagcagcggcgccaccaggcccagaggccgaactccggcccgcagcagcagcagcagccgcgcccgccgccgccgctcgccaggaacgtcggctacgtcggcaagcatcgcctctccgccgccatcgcccgcctcgaccaggagctccagtccctccaggaggagctggacgagcttgagaccatggaatctgcgtccgcggcgtgccaggaagtggtcacgagtacggaagggaagcctgacccgcttcttcctgtcaccagtggcccggagaactcgtcttgggacaggtggttccagcgggtgcgctcccgcagcaacaaatggtgggcatcgaaaggccctgacttctcgtagctcctgcaaacaaagcggagaccatcctcaccagtcgtgtgcagattagaatgaaacacgttgagatgtatcgtccattggtgtcctggggaaacagaacaggcggcggcggcggcgagtgcggtgtggctctcgcaacgcttgatagtttttttttttttgagagaatcattgtgtatgtagtaatccctaacgaggccgaacatcgatgcatccacatcaaggcctggttgttgtgtttcctagagattctgactcactaggtcggattcctgatggtcatgcgatctcgctgttctttcttcaaacgtgaagaataacattgtctttgaaaagtttcaaaaaaaggagaatcagattgaacgttgtt

SEQ ID NO: 1576 - DNA, 1004 bp, Zea mays
  Clone ID: PAT_MRT4577_172365C.1
cctcgagggccccggccgggcgagtgccctagtaaccctagccgcctgaggccgacgccaaatctctcctgaccgcaacggggaactcgacccccgcctccgccaccgccaccgcgccggtcgccgacccactcagatgaacacgtctccgtccagatacagtgaacgcagggagcccactggatgtctcaaagagggccaggatgatggaaccaggtgctccctattttggggctatgggaagcagcgccagcggtgccggcggcggcttctaccagccctttaacagcaacctagctggtgcagggtctagcaccggtatccaaagcttcccatgtgtccggctgcgaggccttccctttgattgcaacgacattgacgtctgcaagttctttgtggggctggacatagtggactgcctcctggtcaacaagaacgggcgcttcaccggcgaggctttcgtggtcttcccaacatccatgcaggcagagtttgcgctgcatcgcgacaggcagaatatggggcggaggtatgtcgaggtgttcaggtgcaagaagcacgagtactactgcgcaatagccaatgaggtgaaccagggcggttatttcgagccggagtaccgtcgctccccgcctcctccgaggcctaggaagccgtctgaagataagggcagcatggagtacacagaggttctgaagctccgcgggcttccctactctgccaccactgaggacatcatcaagttcttcctggagtacgagctggcagaggagaacgtgcatatcgcctaccgcaccgatgggaaggccacgggtgaagccttcgttgagtttccgacagctgaagtcgcgaagacggccatgtgcaaggataagatgaccattgggacgaggtacgtggagctgttcccgtcgaccccagaggaggccagcagggcgaaatcccgaggcaggcattgaagaaacgtgttccagtgatcttctgtatgcatgcatgcggccctc

SEQ ID NO: 1577 - DNA, 1548 bp, Zea mays
  Clone ID: PAT_MRT4577_172366C.1
cattgggtccctcgaggccggccggggtgccctagtaaccctagccgcctgaggccgacgccaactctctcctgaccgcaacggggaactcgccccccgcctccgccaccgcgccggtcgccgacccactcagatgaacacgtctccgtccagatacagggcaatgatgggaggctgggggggttcggatgggtacgagggatcaaagaggacgcgaatgatgatggaatcgaatccctacttcgcagtgaacgcagggagcccactggatgtctcaaagagggccaggatgatggaaccaggtgctccctattttggggctatgggaagcagcgccagcggtgccggcggcggcttctaccagccctttaacagcaacctagctggtgcagggtctagcaccggtatccaaagcttcccatgtgtccggctgcgaggcctcccctttgattgcaacgacattgacgtctgcaagttctttgtggggctggacatagtggactgcctcctggttaacaagaacgggcgcttcaccggcgaggcttttgtggtcttcccaacagccatgcaggcagagtttgcgctgcatcgcgacaggcagaacatggggcggaggtatgtcgaggtgttcaggtgcaagaagcacgagtactactgtgcaatagccaatgaggtgaaccagggcggttatttcgagccggagtaccgccgctccccgcctcctccgaggcctaggaagccgtctgaagataagggcagcatggagtacacagaggttctgaagctccgcgggcttccctactctgccaccactgaggacatcatcaagttcttcctggagtacgagctgacagaggagaatgtgcatatcgccatccgctcagatgggaaagctaccggtgaagcctttgttgagttcccaacagctgaagttgccaagacggccatgtgcaaggataagatgactatcgggacgaggtatgtggagctgttcccgtctaccccagaggaggcgagcagggcgagaacccgaggcaggcattgaagaaacgaatggcttggctcaatgatctctggttgcatgtggctgcaatcgactgtagttttcacttcgcatgcttatctgtatcgcttttagattgtgttagttgtgtgtatttgacttcttatatgcgaactgaactgtaacaactttcctttgttggccggccgcacatgtacggcataatcatttatggattttgctacgtttgagttgtatgcatgcatgcggccgcgttcgagctcagttttcattttgcatgcttgcctctgtgtgtcgctgttaggtggtgttaacctgagctgtcatgtttcgctactgatcgtgcagtgatttgttatatctgaagttttgaactgaattgtaacagttgtcttctgttggatgcacttgtatggcatatcgtttctataaaaacacgaaggttgcttctttcgttgatgttggggacgtgatggaatttaagtgttgcagtgaaatgcttggtgagctcactttgcccccat

SEQ ID NO: 1578 - DNA, 2008 bp, Zea mays
  Clone ID: PAT_MRT4577_172368C.1
taaattttatgtgtatctatgctaaaatattagatttatcatataagttggatgttttaggaacatccctcagtgccatgttgattatttggtggaatttgttttgtttccgcaatatcagggtagggtatttcttaaataagtttacccctgttataattatgtccctaggttgtggttctcggagtagttctgttataactctttgtgctaggttgtgatgctcgaaatagttttgtccttgtgcctgaattctagctatcatgtctaaaactcgtgatcaagcagaagttagtttcatgatatcaacttttaattcagcttcattacacagctcaaatttcatttacgggataaggttccacctccagattaagctctaaatttgttcatgcatgcttgtgtactggatgtaaaacgatcaaacaacccaagttggaagcatgccatttaaatgttcagagaaaatttctaggcgtagctaaaaactgattctgcctatttgttgcaaataattgctttattgagactcaaatttcatggttatgtgcagcttgcttagtattgcatattatccttcgtatcagctctattatgtcttttctgcacaattatatttatatttgggttattatttgaatttgggattgagagatggggggttattctccttttcttttctctttttgggactggattatctgaaggacgcgcggccctgctagcctcctgcggacgccgccgactccctcccgaccgcactgctgaactccaccgctcactccgcccccgcccccgcgtcgcccgccggggcgaccgccgctgtacgccagctgctcagatctcgtcgggccccttcgccggcgaccatcacctgttagggcaatgatgggaggctggggggtttcggatgggtacgagggatcaaagaggacacgaatgatgatggaatcgaatccctacttcgcagtgaacgcagggagtccattggatgtctcaaagaggtctaggattgttgaaccaggcccgccctattttggggccatgggcagcaacactggtggtgccagtggtggcttctaccagcccttcaacagcagcaacttagctggtgcaggggctagcactggcatccaaaactttccaggtgtacggctgcgaggtctcccttttgattgcaatgacattgatatctgcaagttctttgtgggactggacatagtggactgcctcctggttaacaagaatggccgcttcactggtgaggcttttgtggtcttcccaacagctatgcaaacagaatttgctctgcatcgtaacaggcagaacatgggccggaggtatgttgaggtgttcagatgtaagaagcaggagtactacagtgcaatagccaacgaggtgagccagggtggttactttgagtcggagtatcgccgctcctcacctcctccgaggccccctaagaagactgctgaagacaagggcagcatggagtacactgaggtgctgaagctccgtgggcttccctactctgcgaccactgaggacatcatcaagttcttcctggagtatgagctgacagaggagaatgtgcatattgcgatccgctcagatgggaaagctaccggtgaagcctttgttgagttcccaacagctgaagttgccaagacggcgatgtgcaaggataagatgactatcgggacgaggtatgtggagctgttcccgtctaccccagaggaggcgagcagggcgagaacccgaggcaggcattgaagaaacgaatggcttggctgaatgatctctggttgcatgtggctgcaatcgactgtagttttcacttcgcatgcttatctgtatcgcttttagattgtgttagttgtgtgtatttgacttcttatatgcgaactgaactgtaacaactttcctttgttggccggccgcacatgtacggcataatcatttatggattttgcctcgtttgagtttcaaaaaaaaaaaaaaaaaaaaa

SEQ ID NO: 1579 - DNA, 634 bp, Zea mays
  Clone ID: PAT_MRT4577_172423C.1
cattgggtacctcgaggccggccggggagcttatcaattatcatcgccatccgcacctctctccatctccctgctcctccgcctccttcttgatccaagcaagccagggatcgccatgccatgactcgcgaggagcaccactgtctgaatcaaatgcctacgccgccaccgtccaagacctacccgcacgacgctgcatgccgcccgtaataatggcttcttcggcatcaagaaccgcccctgcaaggctgcgaaggcccctacctcaaacagtgcatagcatgggcatgccaaatgcctgctttgttgagcatagacatattccacgtcaaaaagctcgaacatattgtgccttcctccctgaactgcgatattccccctgagaaccgcactgagcaccagctgattgtatatatcataggatggagttgtgatgccttcttacttcagatgacaacactaaggatgatcttatgactcccccctgcatgtatactcttgtgaccctcatctaggaaggtgttgaaagtggccaggatcttgctgcgactgtacagcctgctatgacggatcagcagatctgcgcgctgaaggatgtgttcccaagtaacttccctgccttggaatactgtat

SEQ ID NO: 1580 - DNA, 2884 bp, Zea mays
  Clone ID: PAT_MRT4577_172472C.1
ggttctgtcaaatctccgttgtctggactgcacacagccacacacataagaatggtgacgatactgtatggagtacatactaacagctagtacaaaggtttcccgctggcacgtcgtcgttgtcgttgtcgtgacaaagaaatctgatggcataccaggaattttctcaagaaggggccaattccctgtatgccactggaaaatatactcattccttgtatgccactggccccacatgtcatagacaccaaaaaatatacctatatgccactcagtggcacacaagggatgagtataaaatctgatggcataccaggaattttctcaagaagaagctgggttggtgccgtgcgtgggcttggctgcttgatctgctgtgtgctgtgcgctcctaggcgggcaatgaatgaagccccagccatacgcccgtccaggaggggaaggcgaaggaggcggacttgaaaagcgtcacctcaacctcgtgaccgcgcagcagcagcagcggcggcggcaggcccatggagcctgctcactgctgccaaagcgcctggcgcggcatcgcgtactttccatgtagctgccatgtttggcgcgcgggctaagctgtggtggcgttcttggagtcggatgtgatttttgactcctggccacaagcaagcaccccaacgcactaacggtccgtaggagtggctcctcctgttacagtattactgtgccaaatactcctcgtgtttgttgtttgcttcaatggaggcctaaaggtgctgccgtcttcacagatactcaggcagtaaaagtccccttctctctccctctccaggaggagtcaatgccctccggtttaacattggcgcgcgaggaggcgtcacatttgcgtcctgtggccgtcacatggatgaagccccgccatttacttcctcgtatttaccttgggctgtagatttgagattctgctttatttaaccgctcgctgctacaccgtccgtggtacccgttgtcaactcactgtcactggcttttgtcctggcgctccctcccttcgccatgcccatgcacgtcccagcgttttcagattttcggtcagactaaaatattctccttgtttcaccgtcatccaggcctagacttcggaggaggcccgagcgagcaggctttcctgctgtccaggaccaagcggccgttcactccgtcgcagtggatggagctggagcaccaggctctcatatacaagtatctcaatgccaaggcccccataccttccagcctgctcgtttccatcagcaagagcttcaggtcatccaacagaggtatgcatgcatgttctcaaccacaagactaaaaaggaggttctctacttcaaagctgttatgctagcacctgcaataaataaaccaaacgagaagagagagaaagtacatatattattttgcacaaatgaataaagaataaccaaaccattatatatgccataaagattgaccactgtattgcctttttgagtataaatgtaatcagagcttgacagactctctaacgcagtgagctggaggcctctttaccaaggctacgcaaacgcagactccgacccagaacctgggaggtgccggcggacagacggaaagaagtggcggtgctccaaggaggcgatgcctgatcacaagtactgcgagcgccacatcaataggaaccgccaccgttcaagaaagcctgtggaaaaccaacctagaaaggccaccaaggaggtgactaccgctgctgctggctcgttgccgtgtgccgggccacaaggtagcttgaagaaggcaaaagttaatgactccaagccaggcactggcagctattggacagatagcttaaacaggtaaataccaccagagtcatctccttgttttagcatcatatctgaataataaaatcccaacttaatacttgtgaatcctattataagagcatcgacgatgcttcattttcaagtactaatctggaacagtattagtatgttatggttctaaataatgttagttgccacttagcattcataataataattctcatttccacgcgaccgtacatattttcaggacaatgctgagcagagagaaggcaaacaaaccgacggacgacgagtctttgctgcttagttcgacgaagaacagtcagcccaccttgtccctgctcactcaactgaagcagcagaacaaaccagataagttaggtcccacaccggaaaatgagccgaactcggacacgatgttgaaagcctggggtggcagccaccacaagagcatttcctccacacagcgccatgacgctgaatccctccaatcagtcctccaaaatttcagcctagcccagaatgacaggttggagtcagaaaagaacagatattctgattccgtgctagtctcatcggctttctattctgcagacggtccacaaacaacctgccttacacctaacatgacacaagtgcagcaggactgcatatcaagctcctgggagatgcctcaaggtggacctctaggcgagatcttaacgaactccaagattagtgaggacttaagcaagtgtggatctaggtcatatggttggctattgaatcttgaccatgcaccatgattcctcaatccatggagagcttgacatagatatctcaccacggatgcaaacaatgagtcaggaaaaaagaaggtccaaatgaccgtactgtttaccccatgcatgctcgttatctacatgtgtacttctatttttgtagtattcagctgttgaattatcagttcttctgaatctggctgtatcttaaacaaattctagtttccgtcaaatgatatcttgcttgcaaaaaaaaaaaaaaaaagggccctagggccgcggccgctct

SEQ ID NO: 1581 - DNA, 278 bp, Zea mays
  Clone ID: PAT_MRT4577_172520C.1
atcgagaagtttaagatatttatttcttacatcttgtgggtgaaccttaaagctatcgatagactcgaagaggctgaggcacttaagatggaaattattccaaaccccaaggaagttgatggtgtgaaagtcctttaactctaaaccgcatctggtgcatctattcggttctttgacaaagcgatcggtattaatgttttctgttcaaggtttttcccattgaatgctacatttgattctgttgcgttggcagtctgatctttacaccattgattata

SEQ ID NO: 1582 - DNA, 289 bp, Zea mays
  Clone ID: PAT_MRT4577_172773C.1
gttggcttcgcctccccctccggttcgtgttcgggttcgtgaggttctccggggttcggtttcgtgggtggacggatcgagatggcggcgtcggatgttgaggaccgctgcgtcgtcggcggcctcgcctgggccacggacgaccactccctccacgacgccttcagcacctacggcgaggtcctcgaggccaggatcatcctcgatcggtggacgcacaggtcccgcagcgtcgagcttcggcagcttctccactgaggaggcgctgctgtacgtcatcgatggcatg

SEQ ID NO: 1583 - DNA, 1851 bp, Zea mays
  Clone ID: PAT_MRT4577_173322C.1
ccattgggtacctcgaggccggccgggatcccaactatcccgatcccgtcgaccctgccacatacagcctcgtttgagctctagactcgagagaggcggatagggagaggcagcaccgcagggagcagtgacagagaggccgagcgagagagagagatggacgtggagaggaaggtggtggaggcggacgacgacggccgcgtcagaacagggacggtgtggacggcgacgacgcacgccatcaccgccgtgataggctccggcgtgctggcgctgccctggagcgtggcgcagatgggctgggtcctcggccccgtcgccctcgtcggctgcgcctacatcacctactacaccgccgtcctcctgtccgactgctaccgcacgccggaccccgtccacggcaaacggaaccgcacctacatggacgtcgtccgctcatgcctcgggcctagagatgtggtggtgtgtggactcgcacagtacgcgatcctctgggggacaatggtgggctacaccatcaccactgccacgagcatcatggccgtcgcgcgcacggactgccgccaccacaggggccacgacgcggcctgcgcctcgtcggggacggtgtacatggtggcgttcggcgtcgtcgaggtggtcctgtcccagttcccgagcctggagaagctcacgatcatctccgtggtcgctgccgtcatgtcgtgcacctactccttcgtcgggctgttcctgagcgccgccaagctcgcgtcgaaccacggggcgcgcggcagcctcctcggcgtcaagatcgccgcgggcgtctccgcgtcgaccaagacgtggcactcactgcaggcactcggcaacgttgccttcgcgtacacctactccatgcttctcatagaaatccaggacactgtgaaggcaccgccatcagagaacgtgacgatgaagagggccagcttctacggcatcagcgtgacgaccatcttctacgtctcgctcgggtgcatcggctacgcggccttcggcaacgccgcgccggggaacgtgcttaccggcttcgacgagccgttctggctcgtcgacgtcgccaacatcgccgtggtcgtccacttggttggggcatatcaggtgtacgcgcagccgatcttcgcgtgctacgagaagtggctggggtcccggtggccggactcggccttcttccaccacgagtacgcggtgcgcctgcccggctgcgcggtgcggttcacgatgtgcaagctggtgctgcgcacggcgttcgtggccgccacgacggtggtgtcgctgatgctgcccttcttcaacgccgtgctcgggctgctgggcgccatcgccttctggccgctgacggtgtacttcccggtgaccatgtacatcgcgcaggccaaggtggcgccaggcagccgcaagtgggtggcgctgcaggcgctcaacgtgggcgcgctcctggtttcgctgctcgccgccgtgggctccgtggccgacatggtgcagcgcctgggccatgtcaccatctttcagacgcagctctaaaaaaagtattcagatcttatgcttggggacgcgcttgcagaggcatgcatcatacatatgcttgtgccgtatattcacctgtgatcttagtacattggttttggaagaacaactaaaaatggagcatgtaagtcattccacctagatttcgtgcattgcaagagtgctttttggggtgaaatagcagacagtgcacactccatgacacatttgaagcccagctaagcgttgggctgaattaatgattatgtttcttcaagggaaaaatagcacatcacatttttactctttaaaaaaaaaaaaaaaaaa

SEQ ID NO: 1584 - DNA, 2626 bp, Zea mays
  Clone ID: PAT_MRT4577_17336C.1
ggggttctgcgtggccatttcgcaacaactccctccatcgtcttgaggcgtgcgcagccatggctgtcctcggcaccgcggcggttgaggtgctcatcccggtagcggcattggttggcatcgctttcgcgttgttgcagtggtatgtggtggccagagtccccgtgccttcgcacgccggcgaggacggcggtggaggaggcaataagaacgtgagggaggaggaggagcatgtggaggaggacggcatggactaccttctcgtggaggcccggtgcgccgagatccagcgcgccatctccgtcggcgccacgtcgttcctgctaaccgagtacaagtacctggccgtgttcacggcggcgttcgcggtggtgatcttcgtgttcctgggttcggcgcagcggttcagcgcgcgccctgggccgtgcgcgtacgacccgtcgcgggagtgccggccggcgctggcgaacgcggccttcagcgcggtggcgttcctgctgggcgcggcgacgtccgtgctgtccgggtacctcggcatgcgcgtggcgacgttcgcgaacgcgcggacggcgctggaggcccgccacggcgtggggcgcgccttcgccgccgcgttccggtcgggcgccgccatggggttcctcctcgcctccagcgcgctgctcgtgctctacgccgccgtcaacctcttcggcctctactacggcgacgactggggcgggctctacgagtccatcaccggatacggcctcggcgggtcctccgtcgcgctgttcggtcgcgtgggcggcggcatctacaccaaggccgctgacgtcggcgccgacctcgtcgggaaggtcgagcgcaacatccccgaggacgaccctcgcaaccccgcggtgatcgccgacaacgtgggggacaacgtcggcgacatcgccgggatggggtcggacctgttcgggtcgtacgcggagtcgtcctgcgcggcgctcttcgtggcttccatctcctccttcggggcggagcacaacctcacggcgatgatgtacccgctgctcatcagcgccgtgggcctgctcgtgtgcgcgatcaccactgtcgtcgccaccgacgtcaccgaggtgaagggttccgacgaggttgggccggcgctcaagcggcagatcctcatctccaccgtgcttatgaccgccggcatcgccgccgtcaccttcctcggcctgccgcccagcttcaccctcttcgacttcggcaacgacaagcacgtcaagaactggcacctattcatctgcgtgtcggccggtctgtgggcggggctcgtgatcggctacgtcaccgagtacttcacgagcaacgcgtacggcccggtccgggcggtggcgcggtcgtgcaggacgggcgctgcgaccaacgtcatcttcggcctcgccctcgggtacaagtcggtgatcgtgcccatcttggccatcgcggcggccatctacgccagcttcccgctggcggccatctacggcatcgcgctggcggcgctggggatgctgagcaccatcgccacggggctcgccatcgacgcctacgggcccatcagcgacaacgccggcggcatcgcggagatggccggcatgccgcaccgggtccgggagcggacggacgcgctcgacgccgcgggcaacaccacggccgccatcggcaaaggcttcgccatcggctccgcggcgctggtgtcgctggcgctgttcggcgcgtacgtcagccgcgccgggatcacggcggtggacgtgctgagcccgcgtgtgttcgtgggactcctcctcggcgccatgctcccctactggttctcggcgatgaccatgcggagcgtcggaagcgcggcgctgaggatggtggaggaggtgcgccgccagttcgacaccatcccgggcctcgccgagggcctcgccgtgccggactacgccacctgcgtcaggatctccaccgacgcctcgctcaagaagatgatggcgccgggcgcgctcgtcatgttcagcccgctcgtcgccggtacgctcttcggggtcgagacgctcgcggggctcctcgccggcgcactcgtctccggcgtccaggtcgccatctctgcctccaacagcgggggtgcatgggacaacgccaagaagtacatcgaggccggcttgtcggaggaggcgaggtcgctggggcccaagggatcggaggcgcacaaagcggcggtgatcggggacaccatcggcgacccgctcaaggacacctccggaccgtccctcaacatcctcatcaagcttatggccgtggagtcgctcgtcttcgcgcccttcttcgccgcgcacggtggcatcatcttcgaccacctctgatcaatgcatgctgctgacgttccatggcaaaggcgccggctgtcgccgcaagccgcctctttgaatttgccgtgatcagttagtaagaataatcgtcgtgtatgtagcctgtaacaagtaatgccagaccaccagagttggaggcttattcatgtctggccctcttatcttacccttgaatatgttgctcggtatgctgcaactgcaatacaaagcgcgaacactagtcggctagaaataaaagcaaaaaaaaataaaaagtacccaaa

SEQ ID NO: 1585 - DNA, 355 bp, Zea mays
  Clone ID: PAT_MRT4577_173437C.1
aaaaatgaaacggcttataattcgcaataggggaattttccctttcccattttttaagaaacaaaaggggatggctttttccctgactttttgggattcaaaacagggcgtcgtagtaaccctagggctggactaattgggctttaagcaacgggaaacgggaacattttaacaggcgggagcaaccccgttcgcctttttggggtccctgttgcccttgggccccaacagggggtccgtttccttggcaggcatttgtgacaccgggagggggttccctggggacttttttttgccctcaccccccgaaaaaatggagtaaagccccatccccaaaatggcgacaaggatgccc

SEQ ID NO: 1586 - DNA, 495 bp, Zea mays
  unsure (1)..(495): unsure at all n locations
  Clone ID: PAT_MRT4577_17351C.1
ggggtacacgcgnccccccctcgagnttttttttttttttttttttttttttttttttttttttttttttttttttttttttggagccggaaattaaaccgagtcactgaactgaagtttgtccaaagtaacaaagacgggcacccaaaaaaaaaaaaagacgatcccgtatgacgttcctaaacacaaacctggcagggaggggagttccccgatatctcaactaaacgggagctacagctagacttcaaaaaaaaccccgaaaacgaaaccaacgcacgccgactacagtctacagttcgtccttgtcaaaagacggttccaacccctccttggccgccggttcctttttttccacctccggttgctcctcggcctcgtccctctcctccacggccgggtgggggctaaagtccaggcttttgggcaccgacttgtaaatgctggacgcgaactccttggggtcgggaaggttaaaccccctctccataaggg

SEQ ID NO: 1587 - DNA, 392 bp, Zea mays
  Clone ID: PAT_MRT4577_173645C.1
tagcaacatacaaagcacaatattgtaccaacaatggcagccaaaatattgcgcctggttatgctactaggacttactgcaagtagctgctacagcaaccattttcccgcaatagctagcaagctcctatagctttccatcttcacccggacctttcaccagcagcgtcttcagaatgacaaaacccaattctttaaccctacatgatccaacaagcaatagcagcttgcatcttacctctatcacccgtggtcctcctacaatcataagccctattacaacagttacctaaggagcatttattggcacagaacatcagggcacaacaactacgacaaccagtgctagcataccatgctgactactctcagcaacagcagtttcttccattc

SEQ ID NO: 1588 - DNA, 1822 bp, Zea mays
  Clone ID: PAT_MRT4577_173809C.1
gcctctcctcctctcccctgccctcgcaaacgcacgcaccacagcatcgtccttcgttccattcccatccataccccctcgatcggccgggatgctgggtgtggggatggccgcggcggtgctgctcggggccgtggcgttgctgctcgcggacgccgctgcgaggagagcgcactggtggtacagggaggcggctgaggcggtgctggtcggcgccgtggctttggtggtggtggacgccgcggcgcggagggcgcacgggtggtacagggaagcggcgctgggcgcggcgcggcgggcgcggctgccgccgggggagatggggtggcccttggtcggcggcatgtgggccttcctccgcgccttcaagtccggcaagcccgacgccttcatcgcctccttcgtccggcggttcggtcgcacgggcgtgtaccgaagcttcatgttcagcagcccgactgtgctggtgacgacggcggaggggtgcaagcaggtgctgatggacgacgacgcgttcgtgacggggtggcccaaggcgacggttgcgctggtcgggccgcggtcgttcgtggcgatgccgtacgacgagcaccggcgcatccgcaagctgactgccgcgcccatcaacggcttcgacgcgctgacggggtacctgcccttcatcgaccgcaccgtcacgtcgtcgctgcgcgcgtgggcggaccacggcggcagcgtcgagttcctgacggagctgcggcgcatgacgttcaagatcatcgtgcagatcttcctgggcggcgcggaccaggccaccacgcgcgcgctggagcgcagctacacggagctcaactacggcatgcgcgccatggccatcaacctgcccggcttcgcgtaccgcggggcgctgcgcgcgcgccgccgcctcgtggccgtgctgcagggcgtgctggacgagcgccgcgccgccagggccaagggggtctcgggcggaggagtggacatgatggaccggctgatcgaggcccaggacgagcgcgggcggcgcctggacgacgacgagatcatcgacgtgctcgtcatgtacctcaacgccggccacgagtcgtccggccacatcaccatgtgggccaccgtgttcctgcaggagaatccggacatgttcgcgagagcaaaggcggagcaggaggcgatcatgaggagtatcccgtcgtcgcagcaggggctgacgctcagggacttcaggaagatggagtacctgtcgcaggtgatcgacgagacgctgcggctcgtcaacatctccttcgtctccttccgtcaggccaccagagacgtcttcgtgaacggatacctcatccccaagggctggaaggttcagctctggtaccggagcgtgcacatggacccacaggtgtaccctgaccccaccaagttcgacccgtcgaggtgggagggccactcgccgagagccggcacgttcctggcgttcgggctgggcgccaggctctgccccggcaacgacctcgccaagctggagatttccgtcttcctccaccacttcctcctcggctacaagctggcgaggacgaaccctaggtgccgggtgaggtacctgccgcacccgaggccggtggacaactgcttggccaagatcaccagagtcggtagctagctgctagattgtgatggaagtacgaatgaaaaaaaagcccagcagaaactctagcggctgggccggctggaaattatgggccgggccattgtggttgcccccccctgtctgtgcaaaaataaaacaagcagaaaggaataaaaaaaaggaaaagtattacttcgaacgctg

SEQ ID NO: 1589 - DNA, 378 bp, Zea mays
  Clone ID: PAT_MRT4577_173816C.1
tacaactccctatattgagtcgtattacttctccttctctcccggacctctatcgtgttcatcatcacgggctacataactctctccctcgcacccatggcgacgccggacaacacggggcaccggcatccgctgcacatatttggggagtggtacgtgtacaatccggccacgtccgagggcttcatcgtcatattcaacaacgccagctactacaagaagaccaccaccggccctgaggctgggaacgcgcgcacaggcattccgccggtcttcaggaacagcggccgcgacggcgggtacaggcccgacttcggcgacggcaaccagtacacgcagcccacactgaagaagttggccttctgtgggtgctgaatc

SEQ ID NO: 1590 - DNA, 186 bp, Zea mays
  Clone ID: PAT_MRT4577_174037C.1
ctgtggctcctttcttctcaacggcagcggccgcggcatggcggactactgcggcggcctaaccgtacccgtcgtcaggacctgtctcatggcgggctccggcggactcatcttcggctacgacattggcatctcatgaggtgtgtctgagatggaggattttctgaacaagattttccccgggtt

SEQ ID NO: 1591 - DNA, 2474 bp, Zea mays
  unsure (1)..(2474): unsure at all n locations
  Clone ID: PAT_MRT4577_174085C.1
tccacgcgttcgcccacgcgtcattgggtacctcgaggccggccgggaaaaaaaaaaaaaaaaaaaaaaagaagatatataattattattcgcagcaaagaggggcacaagcaagagaaggattaggacacaaacgctagagagagagagagaggtggtggccggtgggacgtccgtggtggtggtggagttggatcggctgtgcttgttccttgctcctcgctggatcagaggaggtcatgatcaactaatgcctattcatttattatggacttgcaccagttgttaaagtacagattaactggtgctaacgtctactacgaatttcctacagagaacaacttagcaaacactccttggccagctagtccactgaagtctgagttcagcagctcatcatacactcctctttcatcccagcttgagtgtgataatttgtctgcactcagcaatactccagataaccagagctccacagaaaccatttcagcacaaccaatatcaccactggaagtagacagctcatacaaacaggcagctatccttcgggagaacacccaagtgagacctgatccattgtacacaacatcaaggcataatatgcaacacgctttacgagaaatagagactgttctgatggcacctgatgctgatgatgcagccactagcaccaagcatgaatttgaggaacataaacctgctcagctgatgaggcagcggtcaaggacatggagtcatgaatctaggcagccatcaccaggagttgtacggacacaacttgcatctggataccccacagcaagctatgagttccgcccagagaaacggctaagggagttaagggaggatccgcagagcatggtgaagcagctattaaccaagtgtgctgaagcattaagtgaggagaggatagaggagttccttaaccttgttcagcaagctcgtggagttgtatcaattactggggagccaatccagcggttaggtgcttacctccttgagggtttggttgctagacatgcaaactcaggtacaaacatatatcgtgccctgaagtgccgtgagccagagagtaatgaactcttgtcttacatgaagattttgtataacatctgtccgtacttgaagtttggctatatggctgccaatggggcaattgcagaggcattaagaaatgaggacaggatccatattattgatttccagattgcccaagggacacagtggataacactgatacaagcgctagctgcaaggcccgggggtccaccacacgtgcggatcactggaatagatgacccagtgtcagagtatgcccgtggtgaaggtctggaccttgtagggaagatgttgaaaagcatgtctgaggaattcaggatacctttggagtttacccctctgcccggtatttatgcaactcaagttacaaaagaaatgctggacattaggtcaggcgaagcacttgctgtcaacttcactctgcagctgcaccacaccccggatgagagcgtggacgtgaacaacccacgggacgggctactccggatggtgaaaggcctgtctccgaaggtgaccacgcttgtggagcaggagtcgcacaccaacacgaccccgttcttgatgcggttcaccgagaccttggactactattcggccatgttcgagtcaatcgacacgaacctgccacgggacaacaaggagcggatcaacgtggagcagcactgtcttgccaaggacatcgtgaacatcatcgcctgcgaggggaaggaccgggtggagcgtcacgagctcctgggcaaatggcggtcgaggctgaccatggccgggttcagaccatacccgctgagctcgtacgtgaactcggtgatcaggaagctccttgcctgctactcggacaagtacaccctggaagagaaggatggcgcgatgctgctcggctggaagaacaggaagttgatatctgcttctgcttggcactgacagtaacgttttcagaagaccggaagtacacgtcaactcttacatatatatatgtatgtatgtataatgaattacctggtctgctttccgcaaaaaaggacgccctttgttgtacatgtacatgatgctgtacccttagttttcctgaagtgcagaccagagaagagaacattgacattagattgtagctgctaagctgtatggtaattacagttttcttttgctctcatgtattcacccctgtcataaaaaaaacccagcgtattcttagctaatcagcatgcatacatgctgagatgcttcttagtctttctttcatgctcttgagcgtgcaatgatgtcaacaagttaacatgccctgatgcccctccgagggaagatggatctcaagtcttccatctgcgagatcccagtttgggcaggcaaagtgtgctgnnnnnnnnnnnnnnnnnnnnnnnnnnnnnnnnngnnnnnnnnnnnnnnnnnnnnnnnct

SEQ ID NO: 1592 - DNA, 1969 bp, Zea mays
  Clone ID: PAT_MRT4577_174111C.1
cattgggtacctcgaggccggccgggagacagagaggctagaacaacctgaatttcatccccaccgtcgcctcgctcgacctccacctctctttcctcccggcagcaatggaggcggcacccaggtgaggcgagcaagcagccagccctggctccccgatggcgtgcctggcgccgcagttcaagtgggcgccgtcggccgccgcccacatgccttcctcgtcctcgtcctcgtcctactccaggtgctccgcgctccgcgtccactgcgccgtcacctccgccgctgtcgtcgaggaccgcaccaacggcagcgcggcgcagctgaggctcgcttacgcggctccggcgattcagagaaactttgaggcaactctggcatcagaagcacttctaaatgaagaggcggtagtagcagcggcagccgcagaggcagttgctcttgccagagcagctgccgaagctgcccaagaagttgttcagatagtacaaagaaacaaccatcagccggtaattagaccaaaaaagtgtgtggacaactacttggcaaatgaaatccttcgcacagagatgcgatcgagcagtcctgacatgtatgctaataatcctttgatggagtatctggactcttatggtatcatggatgctgaagatgaattagatgcttatgcgcagtatactgagaacatagctgtgaaatctgctcgtcaatctgagagaaaagctaggagaactagagcagcaataaaagctagcacaaccctccatgcttcacaaaaggttgcattatcctcaaagaagaagcggtccaagggttcctcgtctagtatgaatcctttaggttcgttgtggaagatgaccggtaggagacttcttacagccaaggaagaggttgaattctcagaaggtattcaggatcttttgaagcttgaggcgatccaagctgagcttatagagtacaatggcggtcagccaaccttctcgcagtgggcaacagcagctggagttgatgagaaaactttgcgcaagcgcttgaattatggtatttattgcaagaacagaatggtaacatctaatgtgagacttgtaatctctattgccagagagtttgaaggccctggaatggacttttatgatcttattcaggaaggaatgcagggccttataaggggagctgaaaaatttgattcatcaaaaggttttaggttctctacgtattctcactggtggatcaaacaagcaatgcgtaaatctgtctcagaacaatcccaaatatttcgcttgcctgctcacatggttgaagcaagctaccgtgtaaaggagtgtacaaaacgacttcgccgtaagcttagaagacgacccaccaatgaagaaattgcagtggacactggtattccaattaaacgagttgaggcagcagtaaacctcccaaaatatagtgtgtcccttgatagcaaaattggttccaccgacatgacatatcaggaggtcacagctgatcccagtgctgagacagctgaagagatgctcaacagaatgtccatgaagaaggacgtacacatggcactagatactctcaccactcgcgagaagcaagttgttgttctgaggtttgggctcgaggatggtcggataagaaccctgcaggagatcggtaacatcatgggtgtgagcagggagagaatccggcagatcgagtctggcgcgttccggaaactaaggagcaagaagaaggtgaaggctttgaaggattatctggtgccagtaggcaattggtgaaccgtttgtttgcagaatttgttttccttttggttcctctttttttttttgaggattctgtacttgtaccattttacgtgggtcctcatgtaaaacacgctatcagaatacttgcatcacaagaggaaagagtagtttagttccgtgggaaatgaagtaaaattcacaatttctaaaaaaaaaaaaaaaaa

SEQ ID NO: 1593 - DNA, 1487 bp, Zea mays
  unsure (1)..(1487): unsure at all n locations
  Clone ID: PAT_MRT4577_174278C.1
cattgttggctcgctccaggccggcaggaatctccctctttcggaagaaaacaccctccacctctctctctctctctctctctctctctctctctctcttgttgggacctggagaagaggaaggaacagggagcaggggggaagaagaggttgctgcgacggctcaagcctcaaatttttggatccaggcagacaagcagagaaacaccagttggtcaagatgtcagctggtttccagctcggtgtgatcgggtcacttgcactctctgtcgcatcctcagttgccattgtcatctgcaacaaagctctcatcagcacgcttggttttccgttcgccacaacattaacaagctggcatctgatggtgaccttctgcaccctccatgtggcacatcgcttgcatttcttcgagcccaaggcgattgatggacagacggtgatactctttgggttgctgaatggcacgtcaattggccttctcaacctgagcttaggattcaactccattggattctaccagatgacaaaattggcgatcatacctttcactgtgctattggagactatcttcttgaacaaaagattcagcgagagtatcaaactctctcttctggtcttacttcttggagtaggaattgcttcaattactgatctcaagctaaacatgcttggttccatcctttctggcctcgccattgccactacttgtgttggccaaattctcacaaatacaatacagaagaggttgaaggtctcctcaacgcagcttctgtaccaatctgcgccttaccaggcaggaattctgtttgcaactggcccttttgtggatcaacttcttactgaccggagtgtctttgcacacaaatactctgctccagttctgggtttcattgtcctatcttgcttgattgcggtgtctgtgaacttcagtacatttcttgtgatcggaacaacatccccagtgacataccaggtgcttggtcaccttaagacatgtctggttctatcatttggttacactctattacatgatcctttcactctaaggaacatattgggcattctaattgccatatttggtatggcactatactcctacttctctgtaagagagggcaagaagaagtcagcaaatgatgctctaccagtttcacagatggcagataaggaggctgaaccacttttggcaactaaagacaacaacgacaccaagaaagcaaatggtttatctcacgactgctgaggcttttcttgtagtttaggtctagtatgaactgcccttcgaatttaaaggacctggaaagccattcttttcattcttgagttcctttttaggaaacggagcttttaaaatttgtatagaatgcatattttgacattaaaattattatttgattgtattctacacacagcagttccagctgaagttttactagtgcagatctcgtaaaaaaaaaaaaaaaaaagcggccnnnnnnnnnnnnnnn

SEQ ID NO: 1594 - DNA, 227 bp, Zea mays
  Clone ID: PAT_MRT4577_174307C.1
tcttctgttcgctagctgtgcatcatccgtcgttctggcgagcgagcgagcgagggagagacctagcttgactgaccggacgtcagcaggccgagaacgaatcgcgtgtttgtgcatgagccatggcggaccaacagcagccacagcatcagccgcaagagatggacctcgttcgtaccggaggcctcgaactgccttcagggttccgtttttcacccgagcgactt

SEQ ID NO: 1595 - DNA, 605 bp, Zea mays
  Clone ID: PAT_MRT4577_17436C.1
atcgcacatattattgagaccaactaagcacatagaaagcacagtactgtaccaacactggcagccaagaaattctgccttcttatgctccttgggctttctgcacgtgctgctaccgcgaccattgctcccgcaatgctcgcaagctcctatagcttccattgttcccccgtacctctcaccagcggcgtcttctggatgtgaaaacccacatcttcaaccctacaggatccaacaggcaatagcagttggcatcttacctttatcaccctcgatcctccaacagtcatcacgccctattacaacagctacctttgctgcatttattggcacaaaacatcagggcacaacatctaccacaactggtgctagcaaaccttgctgactactctcagcaccagcagcagcttccattcaaccaactacgatcattgaactctgatgcttatgtgcaccaacaacaactaccattcagccagctacctgctgcctacccccagcaatttatggcattcaactcaactagcagcacagaactctccagcttatctacagcaggagcaactactaccattcagccagctagctggtgtgagccctgctac

SEQ ID NO: 1596 - DNA, 250 bp, Zea mays
  Clone ID: PAT_MRT4577_174586C.1
gctctacttccgccagcgttatcatcatggacaactgcgaggagctcatcccggagtggttgggcttcgtgaagggactagtggactcagacgacctgccgcttaacatcttccgcgagacactgcagcaaaacaagatcctcaaggttatccgcaagaacctggtcaaggaagtgcatcgagatgtacttcaagatcccggagaacatggacgactacgccaaggtctacgacggcttctttaagaaca

SEQ ID NO: 1597 - DNA, 211 bp, Zea mays
  Clone ID: PAT_MRT4577_174660C.1
aacaccctagagtgagtcgtattataccacttccacatcctgatagtggtggcctacagcgacggcattcgtctctgatcaagccgcaatgcaaagatgcgtatgtcgtcggcggcacccgttccggcggcaactcaacacaccatgtatcatgttgcgtggcgaccgttgtccggagatttggctgagctagcgaccttgccacacctga

SEQ ID NO: 1598 - DNA, 307 bp, Zea mays
  Clone ID: PAT_MRT4577_174833C.1
caagcctgccctgtccagccttgttaaacagcacagcgagacatcacgagagctagagagagatggcggccacggtttcctccttcccggtggtgaacatggagagagctgagacagaagagaggacaacggccatggaggtcatccgcaacggctgcgagaactggggcttcttcgagctgctaaagcacgggatctcgcacgagctgatagacgaggtggagcggctgaccgaaggcgcactagcggaccttccgggaggccaagtaccaggaattcgcggcacggacactggaaaccggcggag

SEQ ID NO: 1599 - DNA, 371 bp, Zea mays
  Clone ID: PAT_MRT4577_174881C.1
ggacagtgtcaaacgaacattatactatttgattgagacacaccaacaccaataacaagttgcgctgaattggtcaattataggagaatcctagccgacacagaaggagaaaaagaaaggacactgtgccttggcataaaggggggcttagcggaaacaaccctacacctctaattttggcacgtatacatatagggacgggagggactaacgcccaccagctcgctatgcgcgagagatataaggtgagaacacatataccggcagacattctaccttgcccctatttttaccattggccgggacagacaagcaggtagtgcgcatatagaatcacagaagacatgaaacccaggggctacataatggat

SEQ ID NO: 1600 - DNA, 1585 bp, Zea mays
  Clone ID: PAT_MRT4577_174940C.1
gggctttcttctactgttcaccccgcgtgcgctcgctcactcgctctctcccctctggctctgagtggcgctagtgggcgaccgccgccgcgtccctccgtccctcgtcagcccctccgtcaggtcttcgtcggccccctcgccgacgagcacccaccagccaggcatgagagcgcgcttctagaataatgtctgtgcttacctgcgtgattgaaagcatgggctcatcctgtagcagatcccattctttcgacgaggctgaagcagctgaaaatgcaaagtctgcagacattgaccggaggattttgcaagaaacaaaagccgaacaacacatccacaagctcttacttctcggtgctggagaatcggggaagtctacaatatttaaacaaataaagcttcttttccaaactggctttgacgaggcagagcttaggagctacacatcagtcatccatgctaatgtgtatcagacaattaaaatattatatgagggagctaaagagttagcccaagtggaaccagattcttcaaaatatgtcttatctccagataatcaggagattggagaaaaactatcagaaattggtgccagattggaatacccatcgttgaacaaagaacgtgtacaggatgtaagaaaactatggcaagatccagccattcaggaaacttattcacgtgggagtattctgcaagtcccagactgtgcacagtacttcatggaaaatttggacaaattatctgaagaagattatgtaccgacaaaggaggatgtgcttcatgcaagagtacggacaaatggtgtggtagaaactcagtttagccctctaggagagagcaaaagaggcggagaggtctataggctgtacgatgtaggaggccagagaaacgagagaaggaaatggatccatcttttcgaaggtgttaatgctgtaatattctgtgctgccattagcgagtatgatcagatgttatttgaggatgagacaaagaacagaatgatggagactaaagaactctttgattgggtgctaaagcaaagatgttttgaggtccctttaagcgtgtgcgagtggtttaaagattaccagcccactgcacctggcaaacaggaggtggaacacgcctacgagtttgtaaaaaagaagtttgaggagctctacttccaaagcagcaagcctgaccgtgtcgaccgagtgttcaagatctacagaacaacagccctggatcagaaacttgtaaagaagacattcaagctgatcgacgagagcatgaggcgttccagagaaggaacttgatcgaggatgtggtgttataagccacaagacaagtaactaggatggtgtgaggagcagaaagtttacagtgtcgcggctttggccgattgtgattctttttacatgaggaacatttgttgatctttttgccccaccacaagccagtaaaagtatctgttttgcgctggtcttggggaggtttgggtcgtctccatttccccccaatgttaggacaaaatgtacttaccatcttttggagctctgcctgtttggcctcacaatatcaagttcattcgttgttgtct

SEQ ID NO: 1601 - DNA, 1746 bp, Zea mays
  unsure (1)..(1746): unsure at all n locations
  Clone ID: PAT_MRT4577_174943C.1
ccggccggatacagcacggaactacgcgtccgcgctgcctttcttctactgttcaccccgcgtgcgctcgctcactcgctctctcccctctggctctgagtggcgctagtgggcgaccgccgccgcgtccctccgtcaggtgcccaggtgtagcctcgtcagcccctccgtcaggtcttcgtcggccccctcgccgacgagcacccaccagccaggcatgagagcgcgcttctagaataatgtctgtgcttacctgcgtgattgaaagcatgggctcatcctgtagcagatcccattctttcgacgaggctgaagcagctgaaaatgcaaagtctgcagacattgaccggaggattttgcaagaaacaaaagccgaacaacacatccacaagctcttacttctcggtgctggagaatcggggaagtctacaatatttaaacaaataaagcttcttttccaaactggctttgacgaggcagagcttaggagctacacatcagtcatccatgctaatgtgtatcagacaattaaaatattatatgagggagctaaagagttagcccaagtggaaccagattcttcaaaatatgtcttatctccagataatcaggagattggagaaaaactatcagaaattggtgccagattggaatacccatcgttgaacaaagaacgtgtacaggatgtaagaaaactatggcaagatccagccattcaggaaacttattcacgtgggagtattctgcaagtcccagactgtgcacagtacttcatggaaaatttggacaaattatctgaagaagattatgtaccgacaaaggaggatgtgcttcatgcaagagtacggacaaatggtgtggtagaaactcagtttagccctctaggagagagcaaaagaggcggagaggtctataggctgtacgatgtaggaggccagagaaacgagagaaggaaatggatccatcttttcgaaggtgttaatgctgtaatattctgtgctgccattagcgagtatgatcagatgttatttgaggatgagacaaagaacagaatgatggagactaaagaactctttgattgggtgctaaagcaaagatgttttgagaaaacctcattcatgttatttcttaacaaatttgacatatttgagagaaaaatacaaaaggtccctttaagcgtgtgcgagtggtttaaagattaccagcccactgcacctggcaaacaggaggtggaacacgcctacgagtttgtaaaaaagaagtttgaggagctctacttccaaagcagcaagcctgaccgtgtcgaccgagtgttcaagatctacagaacaacagccctggatcagaaacttgtaaagaagacattcaagctgatcgacgagagcatgaggcgttccagagaaggaacttgatcgaggatgtggtgttataagccacaagacaagtaactaggatggtgtgaggagcagaaagtttacagtgtcgcggctttggccgattgtgattctttttacatgaggaacatttgttgatctttttgccccaccacaagccagtaaaagtatctgttttgcgctggtcttggggaggtttgggtcgtctccatttccccccaatgttaggacaaaatgtacttaccatcttttggagctctgcctgtttggcctcacaatatcaagttcattcgttgttgtcgatgcnnaanaaaaatatatanattatattatattttatatcttatttagg

SEQ ID NO: 1602 - DNA, 306 bp, Zea mays
  Clone ID: PAT_MRT4577_174972C.1
ccggccgggacaccaccattgagaccactctagcatagaatgcacaatagtgtacctacagtggcggccaagatattttgcttccttatgctccttggtctttctgcaagtgctgctaccgcgaccattgtcccgcaatgctcacaagctcctatagcttcccttcttcccccatacctctaataagcggtgtcttgagtatgagaaaacccatttctggaacgcctacaggatccaacagggggtcggagcaggcatcttacctttatcatccttgtttctgcaacgaccggggtccctattaca

SEQ ID NO: 1603 - DNA, 309 bp, Zea mays
  Clone ID: PAT_MRT4577_175212C.1
cccacgcgtccgcccacgcgtccgaccacgcgtatggttcgtgggtgaccggatcgaaatgggggcgtctgatgtggaataccgctgcttcgtccgccgcctcttctgggccactgactaccacttccttcacaacggcttcagcacctaccgcgtggtcctcgagtccaacatcatcctcgatcaggagacgcataagtcccgtggcttccgcttcttgaccttcttcaccgaggatgcgatgcgcaacgccatcgttggcatgaacggtactgagcttgactgacgctacatcaccgtcatctaggc

SEQ ID NO: 1604 - DNA, 573 bp, Zea mays
  Clone ID: PAT_MRT4577_175238C.1
ttccagatcatcagccaactgcatcttctctccagcttcatcccgctgcaactatctcacccaaccaacaaaccccccctcacacatcaacatgactggacgcggaaaaggtggcaagggcctcggcaagggcggagccaagcgtcaccgcaagatcttgcgtgacaacatccagggtatcaccaagcccgctatccgtcgtctcgcgcgtcgtggtggtgtcaagcgtatctcagccatgatctacgaggagacccgtggtgttctgaagaccttccttgagggtgtcatccgtgacgctgtcacatacactgagcacgccaagcgcaagaccgtcacttctctcgacgttgtctacgcccttaagcgtcaaggccgcaccctgtacggtttcggtggttaagcgcttttctttcatggttttcatatcacgacttctaccggcctcatcggtctatggtcggtttcggtgcttgggtggacggtcacaatgccttgtatagtaggctacggagtttacggtcacatcagtgggattaactgcttttacatggaatgataccataattcttc

SEQ ID NO: 1605 - DNA, 2597 bp, Zea mays
  unsure (1)..(2597): unsure at all n locations
  Clone ID: PAT_MRT4577_175240C.1
ccgggnaaaaaaaaaaaaaaaaaaaaaaaaaaaaaaaaaaaaaaaaaaaattcagtcatgtggaaattcaatgttgccagaacaggacagttgacttagagcttcttgcaaagagctgcaagtcactacgccgcttccccattcccgacgggacctggtcctcctctccactctctcttctccctccaataattctctccacccctgcttgctgcagcttcaagcactaccgaatcagggcgagtgggagcagaggagggaatcccatgtctccgcccctcgctggagcagatcgttgtcgagccgacgtggagctgctgcggtagaaagctagcggagcctgcgagctagcctgatccgtccgcagtccgatcgggatcgatgggtggggaggcgccggagccgcggcggctgacccgggcgctgagcatcggcggcggtgacggcggctgggttcccgaggagatgctgcaactcgtgatggggttcgtcgaggacccgcgcgaccgggaggccgcgtcgctggtgtgtcaccggtggcaccgcgtcgacgcgctctcgcggaagcacgtgacggtgcccttctgctacgccgtttccccggcacgcctgctcgcgcggttcccgcggctcgagtcgctcgcggtgaaggggaagccccgcgcggccatgtacgggctcatacccgacgactggggcgcctacgcccgcccgtggatcaccgagctcgccgcgccgctcgagtgcctcaaggcgctccacctccgacgcatggtcgtcacagacgacgacctcgccgagctcgtccgtgccagggggcacatgctgcaggagctgaagctcgataagtgcaccggcttctccactcatggactccgcctcgttgcccgctcctgcagatcactgaggactttatttttggaagaatgtcaaattgatgataagggcagtgaatggatccacgatctcgcagtctgctgtcctgttctgacaacattgaatttccacatgactgagcttgaagtgatgccagctgacctaaagcttcttgcaaagagctgcaagtcactgatttcattgaagattagtgactgcgatctttcagatttgatagagttcttccaatttgccacagcactggaagaatttgctggagggacattcaatgagcaaggggaactcagcaagtatgtgaatgttaaatttccatcaagactatgctccttgggacttacttacatgggaacaaatgaaatgcccattatgttccctttttctgcaatactaaagaagctggatttgcaatacactttcctcaccactgaggaccattgccagctcattgcaaaatgcccgaacttactagttctcgcggtgaggaatgtgattggagatagaggattaggagttgttgcggatacgtgcaagaagctccaaaggctcagaatagagcgaggagatgatgaaggaggtgtgcaagaagagcagggaggggtctctcaagtgggcttgacggctatagccgtaggttgccgtgagctggaatatatagctgcctatgtgtctgatataaccaatggggccttggaatctatcgggacattctgcaaaaaactatacgacttccggcttgttctacttgatagagaagagaggataacagacttgccactggacaatggtgtccgagctttgttgaggggctgcaccaagcttcggaggtttgctctgtacttgagaccaggagggctctcagatgcaggtctcggctacattggacagtgcagcggaaacatccagtacatgcttctcggtaatgttggggaaactgatgatggattgatcagcttcgcattgggttgcgtaaacctgcgaaagcttgaactcaggagttgctgcttcagcgagcgagcactggcccttgcaatactacatatgccttccctgaggtacgtatgggttcagggctacaaagcgtctcaaaccggccgagacctcatgctcatggcaaggcccttctggaacatagagtttacacctcccaatcctaagaacggaggttggctgatggaagatggggagccttgtgtagatagtcacgctcagatacttgcataccactccctcgccggtaagaggctggactgcccacaatccgtggttcctttgtatcctgcgtgagtgtaaatagactaagctggtgtctttccttagcctcctggtcaacaagaatggtgttgataactcgatatatgcggttattgtatggatctagatggctagctgctacgtactgtaataagctactagtagctgagagatgtcctggaataagcccttgctatttttgcctgtactgctttctaatcctagggagatgtatactgctaagcaacgatggaagatgtgagtctgcttgctcgccctgatttgatttgtaccattggaggtataagaatacctgggttttggccgtctccagcaacttacccatctctgtacttatattcaaactttattgagcgaacagtgcagtcttattaaaaaaaaaaaaactaaaaccaaaaaacaaaaatggggcggggcggtctaaaccc

SEQ ID NO: 1606 - DNA, 2621 bp, Zea mays
  Clone ID: PAT_MRT4577_175243C.1
tgggtacccctcgaggccggccggggtgcgccgatcaaattccctgcccggccccctgccgacgtggcatggcatccccagctggagcccgcagaagtaaacgccgcatcccaaatccccaccccacctcgtcctcctctccactctctcttctccctccaataattttctcctctctgcttgctccagttccaagcaccaccgaatcagggcgagtgggagcagagggaatcccatgtctccgcccctcgctggagtagatcctcggcgagccggcgtggagctgccgcggtagaaagccagctgagcctgcgagcgcctgatccgcccgcagcccgatcgggatcgatgggtggggaggcgccggagccgcggcggctgacccgcgctctgagcatcggtggcggtggcggcggctgggttcccgatgagatgctgcaactggtgttggggtttgttgaggacccgcgcgaccgggaggccttgtcgctggtgtgtcgccggtggcaccgcgtcgacgcgctctcgcggaagcacgtgacggtgcccttctgctacgccgtgtccccggcacgcctgctcgcgcggttcccgcggctcgagtcgctcgcggtgaaggggaagccccgcgcggccatgtacgggctcatacccgacgactggggcgcctacgcccgcccgtgggtcaccgagctcgccgcgccattcgagtgcctcaaggcgctccacctgcgacgcatggtcgtcacagacgacgacctcgccgagctcatccgtgccagggggcacatgctgcaggagctgaagctcgacaagtgcaccggcttctccacggatggactccgcctcgtcgcccgctcatgcagctcactgagaactttgtttttggaagaatgtcaaattaatgataaaggcagtgaatggatccgcgatcttgcagtcaactgtcctgttctggcgacattaaatttccacatgactgagcttgaagtgatgccagttgacctagagcttcttgcaaagagctgcaagtcactgatttccttgaagattggcgactgtgatctttcagatttgatagggttcttccaatctgccacatcactggaagaatttgctggagggacatttaatgggcaaggggaactcaccaagtatggggatgttaaatttccatcaagaatttgctccttgggacttactttcatgggagcaagtgaaatgcctattatatttccttttgctgctatactaaagaagctggatttgcagtacactttcctcaccaccgaagaccattgccagctcattgcaaaatgcccgaacttactagttctcgcggtgaggaatgtgattggggatagaggattaggtgttgttgcagatacgtgcaagaagctccaaaggctcagaattgagcgaggagacgatgaaggaggtgtgcaagaagagcagggaggggtctctcaagtgggcttgacagctatagcggtaggctgtcgtgaactggaatacatagctgcctatgtgtctgatataaccaatggggccttggaatctatcgggacattctgcaaaaaactctatgacttccggcttgttctgctcgatagagaagagaggataactgatttgccactggacaatggtgtccgagctttgttgaggggctgcaccatgcttcggaggtttgctctgtacttgagaccaggagggctctcagatgcaggtctcggctacattggacagtgcagtggaaacattcaatacatgcttctcggtaacgttggggaaaccgatgatggattgatcagtttcgcactgggatgtgtaaacctgcgaaagcttgagctcaggagctgttgcttcagcgagcgagctctggccctcgcaatactaagtatgccttccctgaggtacgtatgggttcagggctacaaagcgtctcaaacaggccgagacctgatgctcatggcgaggcccttctggaacatagagtttacacctcccagttcccagaatgctggtcggttgatagaagatggggaaccttgcgtagatagtcatgctcagatactggcatacggctctcttgctggtaagaggttggactgcccacaatccgtggtcactttgtatcctgcgtgagtgtaaatagactgagggcccgtttggtgcccatggaaccgttgtctggaacaatttctggtaggattgcttgctgatttgtataggctttgatcagctggaaacaaatgaacaaggcctaagctcgtgtctttctctcacgtccttgctttcttagcctcatggtcaacaagaatggtgttgataacacgatatgtgcttattgtattgatctagatggctagctgctacgtactgcaatcagctactagtagttgagatgacctggattctggaataagcccttgctatcttcgcctgtactgctatctaatcctaggaagcatgtatatgtatactggtaaaagtaacgatggaagatgtgagtctgattgcccgccctgatttgtctcatgggaggtataagactatctccagcaacttacccatctctgtacttatattcaaactttattgagcgaacagtgcagtct

SEQ ID NO: 1607 - DNA, 262 bp, Zea mays
  unsure (1)..(262): unsure at all n locations
  Clone ID: PAT_MRT4577_175247C.1
cctcgaggtcggccggcagaccaccacaccaccactaacagaacagctaagcctctccacaagacagcaacatggctgaggaggaggccagaaggtggaggtggaggtaccaaggagcccgaggcggcggcgaaggaggacgtagccgatgacaaggtccgtcatccccgcgaccgacccgccgtcgtcgccgtcgncggccgacgactncaatgcccctgggccatcgtcgagaaatagttgcagatgaatcctgctcccc

SEQ ID NO: 1608 - DNA, 358 bp, Zea mays
  Clone ID: PAT_MRT4577_17540C.1
acgcgttcggatccacctgacgcagatgaccttttggttcagcaggcatgacgtgggaaaggtcattggcggctatcttgctcagggcattctccaacatgaccccttcgaggtcctggaccagaggggagtgggcgagctgctgaagcttgctacatactggggcccgatagctaggcctaacttgaaagtgggcacttgtggataacactgtggagagccttactctgaggccttattcgcgaaagctgggctggattacgtttctcgctcccctttcacggttccgattgctatgctagctgcaactcaagtgcttgtctgaagctgcctcttcattggcaaccggattgcctgc

SEQ ID NO: 1609 - DNA, 419 bp, Zea mays
  Clone ID: PAT_MRT4577_175419C.1
gcttcatataaagcacaatagtgtaccgacaatggcagccaaaacatcttgcttccttatgctccttggactttctgcatgtgtagctaccgcaaccattttgcaacaatgctcacagcctcctatagcttacattgttcacacatacctataaccagcggtgtattcaatgtgtgaaaccccaagagttcaaccctacaggatacaacaggcaatcgcaacaggcatcttaccattatcacccttgctcctacaacaaccgtcagacctattacagcacatacctctggtccattaggtggcacaaaacatcagggcacaacaactacgacaactcgtgctagcaaaccttggtgcatactctcagcaacatcagtttcttccattcgaccaactgtctgcattgaactctgctgctt

SEQ ID NO: 1610 - DNA, 465 bp, Zea mays
  Clone ID: PAT_MRT4577_175436C.1
aaaaaaacagttttggaattttattattacataaacatcgttgagtcaaaagcgcgggggtttaagtcaacacaaatgtaaaacaacccgtcctgaaaaaagtttacagcctgcaccaaacactgaaagtttgaaatgaaagggaaaatttttgaacctaaaggaggggatcaaaaacttttggaacaaaaacactgaaaagtttggctgccgggtcctttaaaaacccctgccaggtttgggggtgctggtgtccttgccggcgtcgggggggggggtgccgtccttgtcctcgccggccatgccgagggagttaattatcgggtccttggttcccacgggggggctgacaaccgtgtccttggcccccagggccgtgctgacaaccgtgtccttggcccccaggggcgggctaatcaccttttcccctgcctgttgaagaaaagcgccgtttttgtccttgcc

SEQ ID NO: 1611 - DNA, 2454 bp, Zea mays
  Clone ID: PAT_MRT4577_175464C.1
aattcggcacgaggccgccctctgtgcccaaaggagctcctctccatcccatctccaacgtcgccccaacccccatcaccgacagggaacccacctctcacgtcgacaccgccagaggaggagatggtggagatacgggcgttgcgatccgaggcagcacgctagagcgacgagagcgtggcgacgtggagatcatgggagtcctgcgcagcgtcgcggcgaggcgcccgtcggggaggcagcgtgcacgtagcgagcggcccgcttgccccccgggcgggtcccgcctgtcgcgcgaaccagggaaatatctacatctcgtctgcgccgccgctgggagttattagggttctacttctagcccgggccgactccactccaatccaatcctggggcgggcgactgcctccttccctcgatctattccccatcttgtcctccctttgctaaaaataacgaggcagaggcatcttcgatttgacgtgcgcttcctcttcctcgctcgctctcggtcgcagtgatggctgatgtcgacgagtaccgttgcttcattgggaacctgtcctggtcaacgactgatgaaagcctcaaggatgcgttcagcaaattcggcaacctcactgaggcaaaggtggttcttgacaaattttcaggacgttctcgtggtttcggctttgtaacttttgatgagaagcaagccatggaggatgctattgagggaatgaatggactggacttggacgggaggaacatcactgttgataaagctcagccacaaggacctggtagagaccgtaatggtgaccgtgattatgaccgcgagcgtggatctcgttatgaacgtggtcgtgactatggtggtgggcgtgcaccgcgaggtggtggtggtggtggtggtgactgcttcaagtgtgggaaacctggtcattttgctagagagtgcccatctggggatggtgggagaggggacagatatggtgggagagatgacaggtatggcggcggtggcggtcggtggcggtcgttatggttctgaccgtggtggtgaccgatactctggccgtagccgagatggcggcagctatgggggtggcgatcgctacagccgtgaccgatcaggtccttactgatggccttagttcttgattagaccagtatgtgccatccttgagtatgaaagtctatctactaggcatatgacttggtcatagtgcttggcgcttggatcctgcatgtttgcttgatgtgctatttggctattaaaagaaataataaaaaaaaaaaaaacaaaaaaggcatatgacttggtcatagtgcttggcgcttggatcctgcatgtttgcttgatgtgctatttggctattaaaagatggattttgtcactgtgtttgatgaccctggtcctaattaagcttatgcctgtgatacgggggattggatggcaagttagtgtccgcatttgtgttcttttcggggaagcaaggggttgactactataatctacttgaacacacctacagctacaagaaaaaactatgttcttgttacctcttctgaaagcaagtgatgaatcgtccattagagaaaattaactggcttctttttggttatttgttcttgttgtggattggttgatactgtggttctggatttggttacttgcgtcctaagatcatttcagttgtcattttagtctggccagttgatccacgaatgcaaagagattatcctttggttccattctatgtgcctttagcattggagggcctctatttatggttgcttgatgaactggttatgtttgcttcgccatgttggtggggtgttccttgagctgtcccgtgttccttgtgacttgtgagaacaccagaggttatgcttgcctgagtggatgtgatgctacctggttgctgttcctttgacaatgcaccaatgtcctatcgcagcttatatactctggttccagattaattactggtgcccctttgagaggagttatgatgatgttattattcatcagcagcattctaattgcccttgatttagtgtagcctttttttcttagttcaccgaatctcaggatgcaaacgttaggttacttttactgttcgtactaaccaattgagcttttgtactaaaaaaagtatgttacattaagctgctccaggttccgttttctcccggctttgaacatgttgatttgtactgaaagtgctcctctctgtttgtgctgtatgtttatcatttgtggcgatttggggcatttcctttgaggctattctttcattcagtccattggcgcctgagactgcgaaatattcagtcatttacaacacaacaaccaacggttaaaagtacagtgtgatcattttacagtgatctagatggtccagcttgcttgtttctcaactgctgtattgttcaaatcgtattttgtgccggatctggccaagc

SEQ ID NO: 1612 - DNA, 294 bp, Zea mays
  Clone ID: PAT_MRT4577_175476C.1
ggcttctcctacctctcttaccaagttctcttcgggttagggttacttagggtttggtggaggtgcaatggcagctgctgatgtggagtaccagctgcttcgctcgacgggcttgcacttcagacaccagcaacgaagtcctcgagaatgcctacgtctgctactgctagatcctcgactccaatgtaataaaccgaccgcgagacggtgaggtcttacggcttcggcttcgttaccttctactacgagaactacatgctagacgctatcgagaacatgaacggcaacgatctc

SEQ ID NO: 1613 - DNA, 374 bp, Zea mays
  Clone ID: PAT_MRT4577_175574C.1
tttagagtaagtatcttttcagagaagcacaaccatggtggggcaccaagaagcaccattttttacttaggattaacttagaacaaatccttacaggagtaacagcatccattgatccacagtccatgctggttgatgcatgctttgatggagcccaggatgaacacagcactcacaactgtacacagagcgaccttcccatcaaaaacacagatgggcatcaacaaactagaccaacgaagatgaaccctctggactagggtaaacattacggcggcgaacaggataacttggccgcacgggccccaccgatgagctactccagtttccgtcggagtggccgcagccgccgctactgttgccaccgccgaagc

SEQ ID NO: 1614 - DNA, 1962 bp, Zea mays
  Clone ID: PAT_MRT4577_17557C.1
ccggagtgcgagtctgtaatgcagcagcatgctagaatgagctgctcgattagagaaatcatctacctttcttgttggacggtttgttgatgagctccaacagggagtctcagatccagatgctactttaacaaagaaaaatgggaaatccataatggaaggtataacaagctcttcatcaaggtctagaacaaaaggaccagcagatgaaatgtgggatgtccagagtactacttctgaagtgaccttcaagacggccgacaaggaggaagcgacctcagctgatggagctactaattctgcctctcagacaccaaaaaatgaaattcggcacgagaggaaagttcacaagtcactctgggcttatgttgctgatataatccgtcttggatttattcaacatggtgactcccatgattctagtcacaaatcagttaagaaaagttcatctaataattctcagagcacagagggttggctttctagtcaggaacgtgataatgatggcacaaagaagaaaaatggaagtaccaacactctgggtggtggtgaacaagaatctggagtggcttcaatgtcaaatgaggaatatttgcacactgatacccatggtttgcagatatcagaaactgttgttgaacctcaagtaggtagatctgagggagacttgttgcctacaagttctacagatgatctacatatatcaggggggagaacaaagcaatctgatgcaggtgaattacgcaaaggaaatagcatagatgatagcactccaacttatctagatatcacgataggacatttacctgaacgcaaaactgcatccaggatcacaacagagggttctggtgagtttattactgggaaaggaatgttagctggcacatcttctgtgaccatcagtgcaatggaagctggtcgcagtgaagatggagctgattcgatatatgatccttcaggtgctataactccttatcatgattctcaaacgcaaacagtaatgccacatgagaatacctcaactggtatccttggaccaccagcgttacctgtgggagtttctacaaggtttgaagaaaagaatatcatgcaagaggccccagaaattattaaaacaggagggaaggatacagaattgaaaaggagaaattttcaaagaaataaacaagtattgaaggatacatttgatgaatgggaggaagcataccagcgggatgctgagcagagaaaagctgatgagttattcatgagagaagctttacttgaggcccagagagctgcagatatttgggaggtacccgttggtgcagtgttagtacagaatggcgaaattattgctcgtggttgtaatcttgtcgaagatcatagggattcaactgcgcatgctgaaattgtttgtataagagaagcttctaacaaactcaagacatggcgcctagcggacacaacgctttatgtgacattggaaccttgtgccatgtgtgctggtgctattcttcaagctagaatcgatactgtggtatggggtgccccaaacaagcttctgggagccgatggcagctgggttaggctgttccctggggatggacaaacaagcactcttgattcaacaaaccagagccaggccgcagggcctgtccaccctttccatccgaagatagccatcaggcgtggtgtgctgtcggccgagtgctcagagataatgcagcagttcttccagctgaggaggaagaagaaaccacagtcaccaccgcaggcccaccgccatgggcaccatcatcctgtcaagttcttcagcaagatgcaccacatgttcggcacgatattctgtttataacttcgcctctctgttttattttagcttcctaaatttcgtattatggaagtgtgaaaaatgcatttctttctgtgcatctagtgtttttatacaggtccccgtttgtgttaaaaaaaaaaaaaaaa

SEQ ID NO: 1615 - DNA, 783 bp, Zea mays
  Clone ID: PAT_MRT4577_175664C.1
gccggtcagcaggaggagcagcggcggcggcggagagaaggctgctaactggtggccggccgttcgccgcgagctccggcaccccgcagccggccggcacgcctccggtccggcggacggcagcagcagcatgtcttcggccgccccgctgctaggcggcgaggccggcggtggcgagcccgcgccgcggacgccgccgccgccgtcgtcgtgggtggggcgcgtggtggacgcggcggaggcgcgcgcgcagctggggttcgcggtgccgatggtgctgaccagcatggcctactacggcatcccgctggtgtcggtgatgttctcgggccagctcggcgacgtccacctcgccggcgccacgctcggcaactcctgggccaccgtcaccggctacgcgttcgtgaccggtctgagcggcgccctggagacgctgtgcgggcaggcgtacggcgcggggctgcaccgcatgctgggcctctacctgcagtcgtcgctcatcatgtcggccgccgcgtcggcgctcgtctccgcgctgtggtggttcacggagccggtgctcctgctcctgcggcaggagcccgaggcgtcccgcgccgcggcggcgttcgtccgcgcgcaggcgcctggcctcttcgccttctccttcgtgcagtgcctgctccgctacctgcagacgcagtccgtcgtgctcccgctcgtcgcctgctccgtggccccgttcgcgctccacgtcgcgctggcgcacctcatggtcaacgtgctcggcctgggcctcacggg

SEQ ID NO: 1616 - DNA, 2915 bp, Zea mays
  unsure (1)..(2915): unsure at all n locations
  Clone ID: PAT_MRT4577_176181C.1
cctggtatnntttacttctcttaacaagnntctttcaatgggtatatagnatacccnnatgctaggtcactnnnacttctncnngccaatacctnntgttagnagggcagnagnnatgttacccctaatnnataatcagtnnncattctgccccaaattgggntcatcttgggttctncnnttctacctatagcgctgtgcttcaagtgggtnncctcgcgtnngcatgtnntttccnnttttgaccaatanngttgcaccaaaaaacctnnttcagttnngcttcagggggggtgagtannactagatcaaaccatgtnnntctgtgcattcagnnaacatgcaagaaanaaatggctaatcaaaatatantttgcagnncctttgcgtgaagagagctaggtgggccgtagaaaaggcttcagttcagatctcatttcagatagcacaggaccaatctggtctgcagtgttcaactggaatataagatttcgctgcataggtcaaaattgaagtttacggtgctgtacgctcaagcgatgtaaacgatcagaatgtgaacgatacgtccaggaagcggactcagatgactagcagatactgtcatggctcaggatgaagctgtggctacccaaaagactggaaatacaacatctccttctaaggattacccaactccttctccatatcctgattggtcaaccatgcaggcatattatggccctggtgtcttgccaccaacatattttactcctgcaatagctccaggtcatccaccgccatatatgtggggtcctcagcctataatgccaccccctttcgggacaccatatgctgcagtatacccacatggtggagcttacccacacccccttgtgcccatgatgtcaactccaatgagcgtggagccagccaaatctgcgaatagcaaggagaaaaattccaataagaaacttaaggaaatagatcggactgcagtgtctgctggcagtggtaacagtaaaagaacagtgtcatccattgaagattacagtgcagaaggctcaagcgatgtaaacgatcagaatgtgaacgaaacgtccaggaagcggagctcagatggtggacctggcgcagaaaccaccacaggtggaaacacggaatgtgttttagctcctaaccatacgctggggaatgctaccattttgccacaacactgcttttcagctccagtaattaagcccagtgctacaaatgtcgcgaactcgagggcgataggcacggcattatctccaccacctggtgtgatggttccagttcataatgcagtaccatctgacttatcagttaaggatgagagggaattgaagcgcgaaaagaggaagcagtcaaatagggagtctgctagacgatcaaggctgagaaaacaggctgagacagaggagttggctacacaagtggagtctcttgcagcagagaacacgtcccttagatctgaaatcggccggctaacagagagctcagagaagctcagactagagaactcagctctaatggtgaagctgaaggacaccgcagaaccgtctcccagcaaagcagccgcatccccatcctctccccgtgcctcggcggagaacttcctttccatgatcgacagcgccaacgcgccgagcgtcagcaggcacacggagcacggcggtcccaggctccggcagctcctggactccagtccggcgacagacgtcgccgccgtaagctgatgatgaagccggtccggcaaatacgccacagcacatgcatgtggcctggggattccgcaggctcatgcggctcgagtgctcgccgtaaacgtcagcgttacggactcggactctgtactccagtttaggcactgattccaccgagggtaccggtaattttatctgctctcgcgccagagtgccgggctgcctgcgaccactcctgtgtacccagagttgtaacgtagtagggtgttgtgctgcatgccgaccttttgaaacttttcgagaccgtcatttggaccatttttttcgtcgcaataacacaatacagatcggagtttgtacaggaaaaaaaaaaaaaaaaaaaaaaggcccaggcgggcgccccacccccctagctgtttttccccataccaaacaggaactattacccaatcacctcaacctcaattgcccccccccccgtctttttcctagaaaaaacacattccccactattatcccgatccgcactatttccccccctcattagtcatcgcacatccatcctcctcgccatgaaccttccagttttattccccccgccactacagttatctcccccacccccaaccttttccacctatttctttttattttcctccctatccaccacacaccccgctacctatccacccttgaccttttttcccccattttatgccatttttcccccaccccactttttactgcccaccctatattttaccccccattctcctttcacctcccaccaccatctcaatattacttatactagttctcccaaatgttgacccggcctatataccaccattcttctccccacttccacgccgccgttctttcacccatttattctcctccccttcttcttccacctctgttatcacccagctgtatcgctctctgcatggagacacgcaactcgttctnattcacgttcgnatagttcaccacacgcgcccgctcagctctatccagtgtcatacttcccgccgatantctattcanccaatatgtatgatgcctcctcttacgtgttagtacataactcgatctagtcgtactttgagtcagaccgcccttgggtcacaggtttatgtcgatgttttaagtacattactctaagatgcgtgttgatctgntgtacttctcatcccgtatattacatat

SEQ ID NO: 1617 - DNA, 2356 bp, Zea mays
  unsure (1)..(2356): unsure at all n locations
  Clone ID: PAT_MRT4577_176183C.1
tttcaattctgcgggcaatgcgttgatttctccnnnnnnnnnnnnnggattcatgcagcatccagctgcatccagttatttggcttagcctcgtcgtttatattagagtagttcgtgggcgatgattattattacggtggctaaattcgagttatgcacatattcatcacggagaccccgagagttggtgcatgatgcactgaatcccagctgcacatgtttaaaacagcgacacagttatatcccagtaggannnnnnnnnnnnnnnnnnnnnnnnnagtgcagcatcgtcgcgtcagcagcggcgaagctctatactggtcagacccattaggtgtattccattcccacctacagtcggtgaatcactcgtcnnnnnnnnnnnnnnnnnnnnnnnnnnnnnnnnnnnnnnnnccttagcttattaactggtgaagtggtttctttcgccctgtaactctttgggtgtaacttatggagagcgattagcaaattattaccgttttagatagttctgcgtcaagattttaaannnnnnnnnnnnnnnnnnnnnnnnntgtctctgtcaccctttgcgtgaagagagctaggtgggccgtagaaaaggcttcagttcagatctcatttcagatagcacaggaccaatctggtctgcagtgttcaactggaatataagatttcgctgcataggtcaaaggtttgtacgagtgtcggactgcagtgtctgctggcagtggtaatattatttgaacagtgtcatccattgaagattacagtgcagaaggatactattgtgtaaatgagtaaattgtatgttgtgataatctgaacttttactcagatggtggacctggcgcagaaaccaccacaggtnggaaacggctacccaaaagactggaaatacaacatctccttctaaggattacccaactccttctccatatcctgattggtcaaccatgcaggcatattatggccctggtgtcttgccaccaacatattttactcctgcaatagctccaggtcatccaccgccatatatgtggggtcctcagcctataatgccannnnntttcgggacaccatatgctgcagtatacccacatggtggagcttacccacannnnnttgtgcccatgatgtcaacttcaatgagcgtggagccagccaaatctgcgaatagcaaggagnnnnnttccaataagaaacttaaggaaatagatcggactgcagtgtctgctggcagtggtaacagtaaaagaacagtgtcatccattgaagattacagtgcagaagcctcaagcgatgtaaacgatcagaatgtgaacgaaacgtccaggaagcggagctcagatggtggacctggcgcagaaaccaccacaggtggaaacacggaatgtgttttagctcctaaccatacgctggggaatgctaccattttgccacaacactgcttttcagctccagtaattaagcccagtgctacaaatgtcgcgaactcgagggcgataggcacggcattatctccaccacctggtgtgatggttccagttcataatgcagtaccatctgacttatcagttaaggatgagagggaattgaagcgcgaaaagaggaagcagtcaaatagggagtccgctagacgatcaaggctgagaaaacaggctgagacagaggagttggctacacaagtggagtctcttgcagcagagaacacgtcccttagatctgaaatcggccggttaacagagagctcagagaagctcagactagagaactcagctctaatggtgaagctgaaggacaccgcagaaccgtctcccagcaaagcannnnnnnnnnnnnnnnnnnnnnntgcctcggcggagaacttcctttccatgatcgacagcgccaacgcgccgagcgtcagcaggcacacggagcacggcggtcccaggctccggcagctcctggactccagttccgcgacagacgtcgccgccgtaagctgatgatgaagccggtccggcaaatacgccacagcacatgcatgtggcctggggattccgcaggctcatgcggctcgagtgctcgtcagcgttacggactcggactctgtactccagtttaggcactgattccaccgagggtaccggtaattttatctgctctcgcgccagagtgccgggctgccgcctgcgaccactcctgtcctgtgtacccagagttgtaacgtagtagggtgttgtgctgcatgccgaccttttgaaactttcgagaccgtcatttgcaccannnnnnncgtcgcaataagacaatacagatcggagtttgtacaggacggatgctgcctggtgtgcgcaattctctactg

SEQ ID NO: 1618 - DNA, 2340 bp, Zea mays
  Clone ID: PAT_MRT4577_176184C.1
tttcaattctgcgggcaatgcgttgatttctcccgcctctctgcgcggattcatgcagcatccagctgcatccagttatttggcttagcctcgtcgtttatattagagtagttcgtgggcgatgattattattacggtggctaaattcgagttatgcacatattcatcacggagaccccgagagttggtgcatgatgcactgaatcccagctgcacatgtttaaaacagcgacacagttatatcccagtaggaggtattattttctattgatcttttgagtgcagcatcgtcgcgtcagcagcggcgaagctctatactggtcagacccattaggtgtattccattcccacctacagtcggtgaatcactcgtctgcatctcatcgaagctggtgatgcaagctttgcatgcatccttagcttattaactggtgaagtggtttctttcgccctgtaactctttgggtgtaacttatggagagcgattagcaaattattaccgttttagatagttctgcgtcaagattttaaaccatttttttctgtaagttttttgctgtctctgtcaccctttgcgtgaagagagctaggtgggccgtagaaaaggcttcagttcagatctcatttcagatagcacaggaccaatctggtctgcagtgttcaactggaatataagatttcgctgcataggtcaaaggtttgtacgagtgaaaaaggtatttatttttaagttcatttagtattattttggctggctgaattgtatatttctatgttattttactatactattgaaaaaatgagtaaattgtatgttgtgataatctgaacttttacatgacagactagcagatactgtcatggctcaggatgaagctgtggctacccaaaagactggaaatacaacatctccttctaaggattacccaactccttctccatatcctgattggtcaaccatgcaggcatattatggccctggtgtcttgccaccaacatattttactcctgcaatagctccaggtcatccaccgccatatatgtggggtcctcagcctataatgccaccccctttcgggacaccatatgctgcagtatacccacatggtggagcttacccacacccccttgtgcccatgatgtcaactccaatgagcgtggagccagccaaatctacaaatagcaaggagaaaaattccaataagaaacttaaggaaatagatcggactgcagtgtctgctggcagtggtaacagtaaaagaacagtgtcatccattgaagattacagtgcagaagcctcaagcgatgtaaacgatcagaatgtgaacgaaacgtccaggaagcggagctcagatggtggacctggcgcagaaaccaccacaggtggaaacacggaatgtgttttagctcctaaccatacgctggggaatgctaccattttgccacaacactgcttttcagctccagtaattaagcccagtgctacaaatgtcgcgaactcgagggcgataggcacggcattatctccaccacctggtgtgatggttccagttcataatgcagtaccatctgacttatcagttaaggatgagagggaattgaagcgcgaaaagaggaagcagtcaaatagggagtccgctagacgatcaaggctgagaaaacaggctgagacagaggagttggctacacaagtggagtctcttgcagcagagaacacgtcccttagatctgaaatcggccggctaacagagagctcagagaagctcagactagagaactcagctctaatggtgaagctgaaggacaccgcagaaccgtctcccagcaaagcagccgcatccccgtcctctccccgtgcctccgcggagaacttcctttccatgatcgacagcgccaacgcgccgagcgtcagcaggcacacggagcacggcggtcccaggctccggcagctcctggactccagtcccgcgacagacgtcgccgccgtaagctgatgatgaagccggtccggcaaatacgccacagcacatgcatgtggcctggggattccgcaggctcatgcggctcgagtgctcgccgtaaacgtcagcgttacggactcggactctgtactccagtttaggcactgattccagtgaagtaaccgagggtaccggtaattttatctgctctcgcgccagagtgccgggctgccttgcctgcgaccactcctgtcctgtgtacccagagttgtaacgtagtagggtgttgtgctgcatgccgaccttttgaaacttttcgagaccgtcatttgcaccatttttttcgtcgcagtaacacaatacagatcggagtttgtac

SEQ ID NO: 1619 - DNA, 666 bp, Zea mays
  Clone ID: PAT_MRT4577_176191C.1
aaaaaaagaaaacaacctatacaactaacagaaactataaaaaaaaaagaaagacaggaaaaacttccttgttatccccatccgcacctctgtccatttccctgctcctccgcctccttcttgatccacccaagccagggatggccatgcaggactcggaggagcaccacttcaaatcgaaggccgccgccggatactccaagacctacccgaagacaggttggctcccgaccgtaagaacggcttcatcgactataaaaaccgcccctgcacggttggggaggttcttacctgaaagactgcaaacaatgcccatgccaaatgccactttgttgccatagacatattcaacgggcaaaaagctcgaagatatgtgacgcttaggaaacaagtgagatattccgtatgggaaccgtactgagaaccaggtgatcgttatatgagaggatggatttgtgaccctttttacttgagatggcgacactaaggatgatcttagactcccaactgatgagactcttgtggcccagatcaaggaagggtccgaaacgcgcaaggatcttgcagggactgaccagcatgctatgggggaggagcaaatctgagcgcttaaggatgtagacccacagtaactcccctgccttggcatacggtatttcaagacct

SEQ ID NO: 1620 - DNA, 677 bp, Zea mays
  unsure (1)..(677): unsure at all n locations
  Clone ID: PAT_MRT4577_1762C.1
tcgggaggagaggagggaccacagagctagctcttctcgctagccagacgtcggtccatcgagacgagatccgaggatgtccgggtcgggcggcggcgtgtgggtgttcaacaagaagaagggcgtcatgcagctggagcagccggcgccggcgagccggaaggcgctggtgtacgtgccgacggacgaggtggtgcggtcggtggaggcgctggagcggaggctgggggcgctggggtgggagcgctactacgagaaccgcagcgtcgtgcagctccacaggcgcggcggcggcgccgacctcatcaccatcccgcgcgacttcgccggcctccgctccacccacatgtacgacgtcgtcgtcaagaaccgccaccacttcaaggtcgtcgaccgagacgcctagctggcaagcagctccgtcgtcgccgatgcatggtctcggcatgcatcaatcatcatgcgtgtgtgcagttgctcaacgatcgactgctgatcgatcgttgtaaaaaagaaaaaaaggaactcctgataatctcctggtcgatcgatgatgttgcaggagttatattattgtacttgttaatagtttgcacccatttgtaattttactccataaactaattcattaatatacgcaaactttaanannnnnnnnnnnnnnnnnnnnnnngana

SEQ ID NO: 1621 - DNA, 352 bp, Zea mays
  Clone ID: PAT_MRT4577_176389C.1
aaccgtggtcattgaactcttctgcttatttacagctacaacagctgctactttttaaacagctagctggtgcgagccctactgccttcttcacacaaccacagttgttgtcgttctaccaacacgctgcgcctaacgctggcacccttttacaactgcaacaattgctgacattcaaccaacttgctttgtcaaacccagcagcgttctaccaacaacccatcattggtggtgccctcttttagattactaatgagtaatagttcaatttaaaagtttttgactgatgttagtagcttcccagtaataagaaagttcatttcgtgatttaataaaaataaaaaaaataatt

SEQ ID NO: 1622 - DNA, 272 bp, Zea mays
  Clone ID: PAT_MRT4577_176479C.1
tcgcacaacatccaatgagaaagcagagcgggcctatccacccagggagaaagaggccaaaagggaggggagagtgtcatcatggcttccattgtcgcttccaggagggcctttcctctagttcgcgctctggataagctcatcgcagcatcctccgctcccggcactgtctccgcccttattccttttgcagacgcccgcggtcttcaagtatacaacacctgcccttcgctacaactctactaaggggccgagtctgaagacgatagcgt

SEQ ID NO: 1623 - DNA, 449 bp, Zea mays
  Clone ID: PAT_MRT4577_176683C.1
gggggcggggggcaaggaatactgcagcgttttaacctgataaataacaaatgttttcaaatccccattatttgcaaagttttgcgttttgcccacatgaaaaaaaaaaactgggggaaaaacttggattgctttagcattcatggcctgaccccgtaaaaatttgaattaggacctcttgccaaattaaatcgcctttttttaaactttttaaatcccaaaaccaaacatcccacgtttcccgtggaatatgaaatctctccaacctttttccgggttttcaaccacagttgaattcccatacttgtttttctttggcacaccaatttgtttgagttttatgactggaactccaaactggggcttatccaacattaaccggaccgaggagtacaagccgtgaggccatttttcaaaccgccatttttgggcaatcagttttcctttct

SEQ ID NO: 1624 - DNA, 327 bp, Zea mays
  Clone ID: PAT_MRT4577_176748C.1
tcccggctcgacccacgcgtacgggttggcttctactacccctgcgggtcgggttcgggttcgtgaggctctccgggttgggatgcgtgcatgaccggatcgagatggctgcatcagatgttgagtaccgttgattcgtcggcggcctcacctgggccacggacgaccactagctacacaacgccttcagcaactacggcgaggtactagagtccaagatcatcctcgatccggagactcataagtccgccgattatgctacgtcaccttctccacggaggaggcgatgcggaacgccatagacggcatgaactgcaaggagctgga

SEQ ID NO: 1625 - DNA, 253 bp, Zea mays
  Clone ID: PAT_MRT4577_176784C.1
ctctgttgggcaagaaaaagttacgctgcctttcgatgctttacaaatagggctaacgggggcatgtgttttgaccacagaaaggggtaaccaaagaaaagaaaagaaaagaaaggacaaagaaaagaaaatcaaaagtgtttgttgtttatgttcaacaatctttactgagggcactgctggggcaaatagaacccgatacggccagtacttgaaggcttgttttctccaagccctttgctctgcagctacc

SEQ ID NO: 1626 - DNA, 379 bp, Zea mays
  Clone ID: PAT_MRT4577_176815C.1
gcgtagtccattacaacagcctatagtgagtcgtattaaacggcttattactattgtaccttcgcaggttcgcacgcacctggacggaagcgtatgcgacgacgagtcagaagagtcatcggcgtcgaggaccgcagggtggcggactacatcccttcaccgtggcacgcagtgcagctgctcgtcctcagcggggccggatctgtcaacatctacgacgccaacgcgggcgtgctccgcacgctggctgggacacgctgggccgtctccatcatggtgccagaccaaatcacaccggacctcgccgcctactctgccgcagcggaccggtgggtcgccgacaacctggtcccctactacccggggacacgggtcaagt

SEQ ID NO: 1627 - DNA, 793 bp, Zea mays
  unsure (1)..(793): unsure at all n locations
  Clone ID: PAT_MRT4577_176859C.1
agttcgaaagccaagcgcgacgaggagaccagcggcgacacacgcagacgcagatttggcattcagaaaaaattgaaattgtgaactgtgaagatgacggcaccagcggagctttcccgtgaggagaatgtgtacatggctaagctcgccgagcaggctgagaggtacgaggagatggttgagttcatggagaaggtggccaagaccgtcgactccgaggaactcactgtggaggagcgcaacctgctctctgttgcatacaagaatgtgattggagcccgccgtgccccatggcgcatcatctcctccattgagcagaaggaggagagccgtggcaacgaggaccgggtcacgctcatcaaggagtaccgtggcaagatcgagactgagcttagcaagatctgtgatggcatcctcaagctgctcgaaacccaccttgtcccgtcttccactgcccctgagtccaaggtcttctatcttaagatgaagggtgactactacagatatcttgccgaattcaagagtgggcctgagaggaaggatgctgctgagaataccatggtggcatacaaggctgctcaggatattgctttggctgagctggctccaactcatccgattaggcttgggctggcctgaaacttctcggtgttctattatgagatcctcaactcgcctgatcgtgcttgcaatctcgcaaagcaggcattcgatgaggncattttcggagctggacaccctgagcgaaaaaatctaccaagacagcaccttgatcatgcaactccttcatgat

SEQ ID NO: 1628 - DNA, 1899 bp, Zea mays
  Clone ID: PAT_MRT4577_177068C.1
gtacccttcgaggccggccgggggcctgggccgttactagcttagctcatatacgtacgtacgcaggaaggctgcaagagagaggagcaatataatggctggttcttcgatggacactgaagctgcaggcaaggagctcaagcagggcagcggcggcggcggcggctacaccatgccggctactgctcatgcggtggacacagactcgtggcagcaggtggggctgctcctggtgatcggcttcaactgcgcctacgtgctcagcttctccaacctcatgatggtgcccctgggctgggcgtggggcgtcgcctgcctgctgctcgtcggcgccgccgcgtggtacgccaactggctcctcgccggcctccacttcgtcgacggccagaggttcatccgctacagggacctcatgggcttcatattcgggaggaacatgtactacatcacctggttcctgcagttcgcaactctacttctgtgcaacatgggcttcattttgctaggagcaagagcgctcaaggcaatcaacacggagtttacccacaccccagccaggctgcagtggttcatcacggccacgggaatcgtctacttcgccttcgcctacttcgtgccgacgatttctgccatgaggaactggctcgccacgtcggcggcgctgacgttagcttacgacgtcgctctgctggctatcttgatcagagatgggaaatcgaacaagcagaaggactatgacgtccatgccggatcccaagccgagaaggtgttcaacgcgttgggcgccgtcgctgccatcctcgtctgcaacacgtccgggctgctcccggagatacagtcgacggtgcgggagccggcggttcgcggcatgaggcgggcgctgctgctgcagtacaccgccggcgccgcggggtactacggcatcagcgtggcggggtactgggcgtacgggtcagcggtgtcggagtacctccccaacgagctcggcggcccgaggtgggccgccgtcctcatcaacgccaccgccttcctgcagagcattgtgtcccaacacctgttcacggtgccgatccacgaggcgatggacacgcggctgcagcggctggacgaaggcatgttctcccgctacaacctcacgcgccgcgtctgcgcgcgggggctcgtcttcggcttcaacgtcttcgtcaccgcgctgttcccgttcatgggggacttcgtcaacctcgtcggctccttagcgctcgtcccgctcaccttcacgttccccagcatggccgtcctcaagatcaaaggcaagagcggtgggagatgtaacagactttggcattggggcatcatagttctgtcctcggctctctgcgttgctaccaccgccgccgccgttcgtttgatcttcaacaatgctaggatctaccacttcttcgccgacatgtagcgagcgagtagtagtgggattgacatgtgtatcgtcaccacgaggtgatagtatggccacttcgttctcaattttttgcttggttcaagagtggaagggtacggtggtcacttagctcatgtttgataagggcactacatgattaataagcatgcatcatgtacgtagtcatcctatcaaaatttagaaaaatgagcttattgtgatcgatggaccacctccctctaaccaaacatctctgttttccgtgaaagcttaaaaggcaactcgtgaatgtgttcttttagacacctcatgcctattatttcttggaagtatagaataatgttgagagttgtaaacatacatgcatgtcgcatctagcccttttgtctatcacacgtgtgctacctgtagactaattgcattatagtgtgactcttgggactcagactcatgattatatataaaaagtattgaaattg

SEQ ID NO: 1629 - DNA, 377 bp, Zea mays
  Clone ID: PAT_MRT4577_17713C.1
cggaattcccggcggatgatgatcctcctatcattcgtgccgctcgtgcgtgcactcttgggttggtttctactgcccctccggatcgggatggggttcgtgaggttctacatggttcgtgttcctgggttagcggatctagatggctgcgtcagatgttgaataccgctgcttcgtcgtcggactcacctgggccactgacgaccactcccttcacaacgccttcagcacctaccgcgaggtcctcgagtccaagatcatcctcgatcgggagacgcagaagtcccgcggcttctgcttcgtcaccttctccacagaagaagcgatgcggaacgccatcgatggcatgaacggcaaggaacttgacggtcgcaaca

SEQ ID NO: 1630 - DNA, 284 bp, Zea mays
  unsure (1)..(284): unsure at all n locations
  Clone ID: PAT_MRT4577_177407C.1
gaccaactagcaactatagaaagcataaagtgtaccaacaatggcagccaaaagtntttcctacaatgctcattggcctttcttcaagtgctgctactgcgaccattttcccgcaatgctcgcaagctcctataacttcccttcttccaccgaacctctcaccagcaatgtcttcagtatgttaaaacccaattcttcaaccctacaggatccaactagcaattacaacttgaatataacctttatcaccctagatcctactacatatatcatccctataacaa

SEQ ID NO: 1631 - DNA, 811 bp, Zea mays
  unsure (1)..(811): unsure at all n locations
  Clone ID: PAT_MRT4577_17745C.1
tcgggaacaacgccctttcccttgccatttttggtgagtgcgccctttcccttcctccccagatccccgtccccgttttccacttttgcctccgccccaattcggataacaaacccctccgcctcgtcgcgtctcctcccagccgagccgatccggtagagagagggagagggagggactgagggaggaggagctgggttccggtcccggccgcccggccggctgcgcgattcgattgcagctctcgtccccgggcggcgtccaggatggtgcggggcaagacgcagatgaagcggatagagaacccgaccagccgccaggtcaccttctccaagcgccgcaacggcctgctcaagaaggcgttcgagctctccgtcctctgcgacgccgaggtcgccctcgtcgtcttctccccgcgcggcaagctctacgaattcgccagcggaagtgcgcagaaaacgattgaacgttatagaacatacacaaaggataatgtcagcaacaagacagtgcagcaggatattgagcgagtaaaagctgatgcggatggcctgtcaaagagactcgaagcacttgaagcttacaaaaggaaacttttgggtgagaggttggaagactgctccattgaagagctgcacagtttggaagtcaagcttgagaagagcctgcattgcatcaggggaagaaagactgagctgctggaggagcaagtccgtaagctgaagcagaagtgcaagaagcagccgccctggtgccgatggcttcggcgccgcctcgtgcgccggcagtcgacaaacgtggnaggacggtc

SEQ ID NO: 1632 - DNA, 1392 bp, Zea mays
  unsure (1)..(1392): unsure at all n locations
  Clone ID: PAT_MRT4577_17749C.1
cattgggtacctcgagggagatccccgtccccgttttccacttttgcctccgccccaattcggataacaaacccctccgcctcgtcgcgtctcctcccagccgagccgatccggtagagagagggagagggagagggagggactgagggaggaggagctgggttccggtcccggccgcccggccggctgcgcgattcgattgtagctctcgtccccgggcggcgtccaggatggtgcggggcaagacgcagatgaagcgaatagagaacccgaccagccgccaggtcaccttctccaagcgccgcaacggcctgctcaagaaggcgttcgagctctccgtcctctgcgacgccgaggtcgccctcgtcgtcttctccccgcgcggcaagctctacgaattcgccagcggaagtgcgcagaaaacgattgaacgttatagaacatacacaaaggataatgtcagcaacaagacagtgcagcaggatattgagcgagtaaaagctgatgcggatggcctgtcaaagagactcgaagcacttgaagcttacaaaaggaaacttttgggtgagaggttggaagactgctccattgaagagctgcacagtttggaagtcaagcttgagaagagcctgcattgcatcaggggaagaaagactgagctgctggaggagcaagtccgtaagctgaagcagaaggagatgagtctgcgcaagagcaacgaagatttgcgtgaaaagtgcaagaagcagccgcctgtgccgatggcttcggcgccgcctcgtgcgccggcagtcgacaacgtggaggacggtcaccgggagccgaaggacgacgggatggacgtggagacggagctgtacataggattgcccggcagagactaccgctcaagcaaagacaaggctgcagtggcggtcaggtcaggctagcagctacctcagccacgcacaggcccaatcaacgcaagctagctagctgagaataatcttttagatctctggtagtgtggagatcgagatgcaagccaagcaatgtgatatcgcgttgtgtgttaccaacctgtctgtctgtgtatcatcccgtcccgtccgtcagagtctcagagaacgaacacttcttctccttctccctgtagctagctgctcctgcttgtgtccaaaaaaaaaaaaaaaaaaaaaaaaaaagaaaaaaaaaacggnggagggggcagaaaaggnnaaaangagaaggaaaaaaaacccgggggcaaaaaaaaaaaaaaaaaaaagccgtgcccacaaaaaattttgtccctgggccgggcacccccctaggggggatttttgcagattttctcacactggggggccgttggggctgccctttgaagggccccttcggccttttgggggg

SEQ ID NO: 1633 - DNA, 1656 bp, Zea mays
  Clone ID: PAT_MRT4577_17753C.1
cttaatccaacgattagtgctttttattcacttaagccctcccacctcaacgatgagtgttcctggccagcagcctgatctttataattacatatgtgtccaacgtaagtgtcagtgcatcccatgatggcatacatacatattttgcgtacatacacatcacatgactggataattacatatgtccaatgtaagcgtcagtgcaccccatgatggtatacatacatattttgcatacatacacacatcacatgactggagaatcatgcagagatctctcatctcagccaagatcaggaacgatgaagtagtcctcgtcgtcgtcgtcaggcacctccatccgtgacttcttgaacaggcgcgccccgttcgccttgtagaacccggcgttactcactggctgcggcgaggcgaagaactccgccatggcagttttagctggcgaatgggcgtggaacaggtcgatgtcctcgaaccactccagctccttgagcccaagagacgagtctttcttgtcgctggattcgtagtccgacagctcgaggaggtcctcgacggcccaaccggacggtggcaggaacggcgaggacggcacctcctgcggcagcgcgtccttgaccgtccttgttttggtggtcgtcccggcagctggcgcgctgacgacggccgcgggcttggagctgcccttgggcggcgccggcgggaggccctcggcgctggcgccgcagacggagctgaagccgacgcggatgccggtggcgaggtagcgctggtggttgccggagagcgtgccggggacgtggatgggctcgtcgcagtcgcggcagaggagcgccctgtcctcgacgcagaagatgaaggccggcctctcctggcacacgtcgcagcgcgggaggctggcggggagcgccgcggcgtcgccgagcgggagccgctggtgcttgctggcgagcttgttggcggcgtggatctccacgtcgcagcgcgcgcacagcgccgcctcgtcggcgcagcacaccaccgtggccgccgcggcctcgcacgcgtcgcactggatcctcatgccgcccgttgggaagggagcttcgaggcggcccgccgcggcgcgtcggccgggcgggctgagccaatggcacgggcccttggggcgcgaacgccctaacgtgggtcggggcttccagtggagacaggcaggccagcagccgcctaaaaaaatcagcatgggaacgcgaacgcagacgtcgcagcgcggaaggctggcggagagcgcctcgagcgggaggcgctggtgcttgctggcgagcttgttggcggcgtggatctcgacgtcgcagcgcgcgcacagcgcggcctcgtcagcgcagcacaccacggtggcagccgcgccctcgcacgcgtcgcactggatcttcatggccgctccacctctctgtctgcagtctatactcccaggcccagctcgctatcctgtcctgtcgtctcgcaagtcgcaacaacgagggaggcaaggacgaacaagataaggccactgactgcgatggaggaggacgagcttgcgcgcgcgagcacgcaactggagcaatcagtgagctgccgctgctgggcgagcttgtggtggaggactcgccggggagacttgtggccaggggctcccgg

SEQ ID NO: 1634 - DNA, 4202 bp, Zea mays
  unsure (1)..(4202): unsure at all n locations
  Clone ID: PAT_MRT4577_17758C.1
tttcttttattttgttaacacctgattcaaagcggggtgacttattaacagttcacagggggtgccctggagtggcgaatctagggtgagagaagagttagtcctaactcccgcaaagaaatagcgttcttcagggccgtggtacctgacttttataattagcatatatgaccaacgtaagtgtctagtgcatcccgatgatggcatacatacatattttgcgtacatacacatcacatgactggataattacatatgtccaatgtaagcgtcagtgcaccccatgatggtatacatacatattttgcatacatacacacatcacatgactggagaatcatgcagagatctctcatctcagtccctgccaagatcaggaacgatgaagtagtcctcgtcgtcgtcgtcgccgtcaggcacctccatccgtgacttcttgaacaggcgcgccccgttcgccttgtagaacccggcgttactcactggctgcggcgaggcgaagaactccgccatggcagttttagctggcgaatgggcgtggaacaggtcgatgtcctcgaacccactgccagctccttgagcccaagagaacgagtctttcatggtcgctggatacgtagtccgacagctggagggggtcctcgtcggtttatctggactgttttaacgaatccgtgcgacgcggggctggatctcagtggatcgtggcagcaaggccactctgccacttacaatgccccgtcgcgttttaagtcgtctgcaaaggattcagcacgccgcccgttgggaagggagcttcgaggcggcccgccgcggcgcgtcggccgggcgggctgagccaatggcacgggcccttggggcgcgaacgccctaacgtgggtcggggcgggcggcgagcagaggcgccggttgctagcttggattctgacttagaggcgttcagtcataatccggcacacggtagcttcgcgccactggcttttcaaccaagcgcgatgaccaattgtgtgaatcaacggttcctctcgtactaggttgaattactatcgcggcgcggtcatcagtagggtaaaactaacctgtctcacgacggtctaaacccagctcacgttccctattggtgggtgaacaatccaacacttggtgaattctgcttcacaatgataggaagagccgacatcgaaggatcaaaaagcaacgtcgctatgaacgcttggctgccacaagccagttatccctggtggtaatcttttctgacacctctagctgcaaactccgagggcctgaggcgaccggtgcgcgctggcgaacgctgcgcttgctggaaaaacatcgaagtgtctcttagactgctactagcgtagcaacaaagacacaaagtgtgcttagagttatcatgttcacagctgtgcaatactacagtcaaagatgcacgacacatgacactggttgtacacacagcaggagaagaaacaaaactcctgccctttcttttattttagccgagatcagggacgatgaggtggtcctcgtcgtcggtgacctcggtccgggccttcttgctctggcgcaccccggcgccggcagtggcagtggctttggctggcctgtagtacgccgcgtcgttcgcggcctgggttccggaaagctccggtacctcggccaatctcctgccggctttcggcgtctgctcgtggaagaggtcgatgtcggtgaaccactccagctccttgaacccgagcggggactccttgtgcagcttgtcgctggactcgcagtcggagaactgcaggagctcgtcgacggcccagccctgtggcaggaactgcggcggcgagggcacctgctgcgccgcggaggagacggcggccttgggcggggcgtggtggtcggagtcgtcgtgggcgtcgcaggcgtcactgcacgctgacgaagcggaggcgaagccgacgcggatgccggtggcgaggtagcgctggtggttcccggagagcgtgcccgggacgtggatgggctcgtcgcagtcccggcagaagagcgcccggtcctccgcacatcaggggatcggggcttaccgacgcgccgcggcgggccgcctcgaagctccctttccaacgggcggcgtgctgaatcctttgcagacgacttaaaacgcgacggggcattgtaagtggcagagtggccttgctgccacgatccactgagatccagccccgcgtcgcacggattcgtaaaaaaaaaaaaaaaaaaaaaaaaaaaaaaaaaaaaaaaatatcttaagaggtacgtcccttgggaaaaaaaaaaaaaaaaaaaaaaaaaaaaaaaaaaaaaaagacaaaaaaaaaatgagaaaagaaggtgtatcccattatgagtaaattaaaaaaaactggcgctttcgactttttgttccattatattgagccataattntgtgtatttaaaatatataatattctagcgttttttttatttggtactagtttcccttctcgatttttttttttttttttttttttttttttttttttttttttttttttttttttttagggacgaatccgtgcgacgcggggctggatctcagtggatcgtggcagcaaggccactctgccacttacaatgccccgtcgcgttttaagtcgtctgcaaaggattcagcacgccgcccgttgggaagggagcttcgaggcggcccgccgcggcgcgtcggccgggcgggctgagccaatggcacgggcccttggggcgcgaacgccctaacgtgggtcggggcgggcggcgagcagaggcgccggttgctagcttggattctgacttagaggcgttcagtcataatccggcacacggtagcttcgcgccactggcttttcaaccaagcgcgatgaccaattgtgtgaatcaacggttcctctcgtactaggttgaattactatcgcggcgcggtcatcagtagggtaaaactaacctgtctcacgacggtctaaacccagctcacgttccctattggtgggtgaacaatccaacacttggtgaattctgcttcacaatgataggaagagccgacatcgaaggatcaaaaagcaacgtcgcgtatgaacgcttggctgcacaagccagttatccctgccttgtaacttttctgacatctgtccagtaagcttcaaacatctcatgatggcatacatacatattttgcatacatacacacatcacatgacaggagaatcatgcaaagatctctcatctcagccaagatcaggaacgatgaagtagtcctcgtcgtcctcaggcacctccatccgtggcttcttgctctggcgcgccccgttcgtcttgtagaacccggcgttgctcgctggctgcggcgaggcgaacaactcggggacctccgccgtagtggttttagcgggcgaatgggcgtggaacaggtcgatgtccgcgaaccactccagctccttgaacccaagaggcgagtctttcttgtcgctggattcgtagtcggacagctgcaggaggtcctcgacagcccaaccggacggtggcaggaacggcgacgacggcacctcctgcggcagcgtgtccttgaccgtcgtcgttgtcttggtggccccggcagctggcgcgctgacgacggccgcgggcttggagctgcccttgggcggcgccggcggcgggaggccctcagcgccggcgccggcgccgcagacggagctgaagccgacgcggatgccggtggcgaggtagcgctggtggttgccggagagcgtgccggggacgtggatgggctcgtcgcagtcgcggcagaagagcgccctgtcctcgacgcagaagatgaaggccggcttctcctggcagacgtcgcagcgcgggaggctgctggcgctggcggcggtggcgtcgccgagcgcgagcgggagccgctggtgcttgctggcgagcttgttggcggcgtggatctcgacgtcgcagcgcgcgcacagcgccgcctcgtcggcgcagcacaccaccgtggctgccgcggcctcgcacgcgtcgcactggatcctcatgccgcccccgcccctctcctactcctcggcctcaggcggcacaccctgagtccccacccaacccagctctcaggcctcacgtaatccggagcttcccgctcgagacaggcaggccagtaaccacctaaaaaaatcagcacggcaacg

SEQ ID NO: 1635 - DNA, 1341 bp, Zea mays
  Clone ID: PAT_MRT4577_177639C.1
ctcgaggccggccgggccgggcttctctcctcccttcgccggtcaccctatcgcggccgccaggagaagccgccgccacagcaggcgacaaagatgggggggttcgtcaagacccagaagaccaatgcgtacttcaagcgtttccaagtgaagttcaagagaaggcgtgctggtaagacagactacagggcaaggataaggttgattaaccaagacaagaacaagtacaatacacccaaataccgatttgttgtgcgatttaccaacaaggacatcattgcacaaatcgtatctgcaagtatcacgggtgatattattcttgctgctgcatattcccgtgagctgccacgatacggtctagaagttggtctgaccaactatgctgcagcctactgcactggtcttcttttggctcgtcgtgttctcaagatccgtgatttggatcaggagtatgagggcaatgttgaggccactggtgaggacttctctgtcgagccagcggaagagaggaggcctttccgtgccctcttagatgtcggccttattaggactactactggaaaccgtgtctttggtgccctcaagggagctttggatggtggtctagatattcctcacagcgataagaggtttgctggcttcaagaaggatgataagcagctggatgctgatatccaccgcaagtacatctatggtctccatgttgctgagtatatgaagaatctggctgatgaggagcccgagaagtaccaggctcacttcagcgagtacatcaagaaggggattgaggccgatgacatggaagctctgtacaagaaggtccatgctgccatccgtgctgatcctagcatggccaagtcaacaaaggcgcaaccaaaggagcacaagaggcacaaccccaagaagttgacctatgagcagaggaaggccagactcgtggaaaggctcaatgccctcaattcctcgggtggtgtcgatgatgatgaggatgacgaatgaagtgctagtcgcgcgcagcacagtagtgctatcctatttggcgatcagaacttgcgcaatggcatttgttgttccctttactcctgtaacaggcatttttttttgtttgagtttagagctggatatatggagttcacgatgtgctgccggttgaccttgctctttttatccctggattttgtcagtctttgggctgagacacaaatcttggaatctcctcaattcccagggatgaatggacgtgtagctcacatgggacaagatctgcgtcacgtcttgtacttaaaacaaaaaatatgtactccttgaatgaaattgagtcaaaaaaaaaaaaaaaaaaaa

SEQ ID NO: 1636 - DNA, 1202 bp, Zea mays
  Clone ID: PAT_MRT4577_177749C.1
cttgagaaaccaagctttagccttcttggaatcatgctggttgtttcgtttggagttctactaacagttgctaaagagacagaatttaatctgtggggatttatatttattatgcttgctgctgttatgtctggtttccgctggtccatgactcagattcttctccagaaagaggaatacggattaaagaatccttttaccttgatgagccatgttaccccggtgatggcaatagtaacagcaattatttccattgtgatggatccatggcacgacttcagagcaagtcacttttttgatagttctgctcacataataagaagcagcttgttgctgcttttaggtggcgctttggcctttttcatggttttgacagaatatgtccttgtttctgtgactagtgctgtaacagtgactgtagcaggaattgtgaaggaagctgtcactattctggttgctgtgctattcttcaacgatccatttacatggttgaaggcgcttgggctagcaataataatatttggtgtcagtctattcaatatttacaagtataaaaggttcaaaaaagggcattacaatgaaaatgctgggacaaatacccaatcttccaattggacttcaaaatacgtcatccttgatgaagatactgaagctcaagatgatacaggctgatctgaatgtgatagaatgcagactatatatggcgcttccagagaagcaagatcatctgtgcctgcatagtcttactttcacaggctaactgacttcatattctttgagttcatcaattactctggtcagccatgcacgaacatgacgcttgcagccgtgtggcaagttgggaagattacacatacatggaacatacaagatacaacctggtatcagtacatatgttttgtcctttcattcaaaacaaagaacagtgcatatatctgaacgaggcattctgcattatgtccactaagaaaatgctccatcaaatacaattagaactacagctgacacacttaactttctggaagaggataggactcaattttatagtccattctgattgttgaagagagattcggcatcggaacgtagctttcttttctttatttatttttagatgaaaataaacactcgtatatgtaatgttgtatgtatgggactgtatactgttttacacacgagcaccacaagttgaagttcttccc

SEQ ID NO: 1637 - DNA, 2269 bp, Zea mays
  Clone ID: PAT_MRT4577_177750C.1
ctggccggggacctttctaccagaaatcggagcgaaccaaactgccggaaaaacccctcgcctgcggcttcgcgtcggccgccgccgctgccgacactttaccgcgtgccttgcgcccccgcgccgctgatgcgatcagcgacgcacgccagatccgagcttctgtaggaccttcagccgtcgccgtcccatgggggactgcgtcgtcgaggacggccacgggcaccactactcggaggcggtggagggcgcggtttcgttgacggtagccgtggggctcgatgagcgggcggaagagtcgcgggaggaggaggagggtggcgggcagcggaagaaaatgggcgggatcccaagggagccgtcgttctcgcggtggtgcagggacccatctgccgcctccgcctccaataccgccgctgctgcggcgaccagtgacagcgacgcctcagaggagttcgagctgccgctcctgccatcctcctcgggcggcggcggctcaccgatggacattgaggtgggggcaacggcgagatctgatgatctgccgatctcgccgaggttgcttgcgaaggtcatcgggttgatagcgtgttggtacacactgagcacgtgcttgacgctgtacaacaaggagatgctgggaaagcacatgtggaagttcccggcgccattcctgatgaacacagtgcatttcacgatgcaggccgtggcgtcgagggccatcgtgtggttccagcaacgaggtctagagggagggccaagtaaaatgtcgtggaaggattactgtttacgagttgtcccaacagctttggctactgctcttgatataaatctgagcaacatttcacttgttttcattactgtgacatttgctacaatgtgcaaatctgcttctccaattttcattcttctgtttgctttcatgttcaggcttgagaaaccgagctttagccttcttggaatcatgctggttgtttcatttggagttctactaacagttgctaaagagacagaatttaatctatggggatttatgtttattatgcttgctgctgttatggctggtttccgctggtccatgactcagattcttctccagaaagaggaatatgcattaaagaatccttttaccttgatgagtcatgttgccccggtgatggcaatagtaacagcaattatttccatcgtgatggatccatggcatgacttcagagcaagtcacttttttgatagttctactcacataataagaagcagtgtgttgctgcttctaggtggggctttggcctttttcatggttttgacagaatatgtccttgtttctgtgactagcgctgtcacagtgactgtagcaggaattgtgaaggaagctgtcactattctggttgctgtgctattctttaatgatccatttacatggttaaaggcgcttgggctggcaataataatatttggtgtcagtctattcaatatttacaagtataaaaggttcaaaaaagggcatcacagtgaagatgctgggacaaatatccaatcttacaatgggacttcaaagtacgttatccttgatgatgatactgaagatcaggatgattcaggctgacctgaatatggtagaatgcagactactatatgcactggcgtttccagagaagcaagatcttctggtgcctgcatagacttacttccacaggctaactgatatcatactattttttgagttgatcaaccgctgtggccactggccagccatgcacgagcgtgacgcttgcagccgtgtgacaagttgagaagactacacgctcgtacatggaacatacaagatacagcctggtattcagtacagatgttttctcctttcgttcaaaacaaagaacggtgcatatatctgaacggtgcattctgcagtatgtccacgaagaaaatgttgcatcaattacaattagaaacacagctaacacacttaactttatggatgaggatagggttcggttttgtagtgcattctgattggttgaagggagattcagcatcggaacatagctttcttttctttagttctttctcttttttttgttgagatgaaaataaatactactaacaatcttatatgtaataatgttgtatttacgggaatgtgtaccgtttcacgtaggagcatttcgcgccttattgtaatacctcatcttgagaggtcagtgccaagtcggcacggtccatctcaaatttcctttgcgtattttgagagcagcttgtcattgtacatgtc

SEQ ID NO: 1638 - DNA, 426 bp, Zea mays
  Clone ID: PAT_MRT4577_177789C.1
aggcgttccgagctcccccgtggtgcggcacgcgctcctcttgtcactcctctgcgccggagcactcggtttcttgctctgctgccatggcgccgcggtagcgccggcctacgtcaccgtctccgccgccagcttcgcgccgtcctcaacgtgcagcgcctccgacccagttgcgccgcagcagaacgacacgttcaccgtgctgcggctgacgcaccggcacgggccgtgcgcccccttgcgggcgtcctccctggcggccccgtcggtcgctgacacgctgcgcgcggaccagcgccgggcggagcacatactgaggagggtgtcggtttttttctcgcctcagctgtgggactataaggcggcggcggtgacggtgccggcgaactgcgggtacgacatcggcacgtccaactacgtggagac

SEQ ID NO: 1639 - DNA, 863 bp, Zea mays
  Clone ID: PAT_MRT4577_177993C.1
cacctcttctcttcctcctcgtccgccgttgctgtctgtctgcctcctcctccgccgcctagctgcttacctgcttccaccgcaacaagcagagtgcgagcaaagacagaaaaccatgggcgccctgttgctcttcgccgtctgcctgctggcgccgatcgtgctggcctgcgccgtccgtggcaggaagcggcgggccgccgcgccggcgccggcgccggcgtgcggcaagaaggcgctgccgctaccgccggggtcgatggggtggccgtacgtgggcgagacgctgcagctctactcgtccaagaaccccaacgtgttcttcgcccggaagcagaaccggtacgggccgatcttcaggacccacatcctgggctgcccctgcgtgatggtgtccagccccgaggcggcgcgcttcgtgctcgtcacgcaggctcacctcttcaagcccaccttcccggcgagcaaggagcgcatgctgggcccgcaggccatcttcttccagcagggcgactaccacgcccgcctccgccgcctcgtctcccgggctttctccccccaggccatccgcgcctccgtgccggctgtcgaggccgtcgcgctgcgctcgctccgctcctgggacggccgcctcgtcaacaccttccaagagatgaagctgtacgcgctgaatgtggcattgctgtccatcttcggcgaggaggagatgcggtacatcgaggagctgaagcagtgctacctgacgctggagaaggggtacaactcgatgccggtgaacctgccgggcaccctgttccacaaggccatgaaggcccgcaagcggctgagcgccatcgtggcccacatcatcgaggcccggcgcg

SEQ ID NO: 1640 - DNA, 2490 bp, Zea mays
  Clone ID: PAT_MRT4577_177997C.1
attgggacctcgagccggccgggatatgcttccattaaaaatgtccaacttacctttttccccaaaaaaaaaaaaaaaaaaaaaaaaaaaaaaaaaaaaaaaaaaaaccccccaagcttcagtgcggcccgcccacgcgtccagggccggactccaggacaccccatctcatctcttgctcctcgtccgtagttgcagttgcagtgtcctcggccgcctctagtcctagccgtttactccttcctttcaccgcatcaagcagagagcaagcgaggcaagagccatgggcgcctttctgctcttcgtctgtctcctggcgccggtcgtcgtgctcgcctgcgccgtccgcggcaggaagcggcgggcgtcctccgcggcggcgggcggcaaggcgctgccgctgccgcccgggtcgatggggtggccgtacgtgggcgagacgttccagctctactcgtccaagaaccccaacgtgttcttcgcccggaagcagaaccggtacgggccaatcttcaagacgcacatcctgggctgcccctgcgtgatggtgtccagcccggaggcggcgcgcttcgtgctcgtcacgcaggcccacctcttcaagcccaccttcccggcgagcaaggagcgcatgctggggccgcaggccatcttcttccagcagggcgactaccacgcccacctccgccgcctcgtctcccgggctttctcccccgaggccatccgcggctccgtgccggccatcgaggccatcgcgctgcgctcgctcgagtcctgggacggccgcctcgtcaacaccttccaagagatgaagctgtacgcgctgaatgtggcattgctgtccatcttcggcgaggaggagatgcggtacatagaggagctgaagcagtgctacctgaccctggagaaggggtacaactcgatgcccgtgaacctgccgggcaccctgttccacaaggccatgaaggcccgcaagcgcctgggcgccgtcgtggcccacatcatcgaggcccggcgcgagggcgagcggcagcgcgggagcgacctcctggcctccttcctggacgaccgcgaggcgctcaccgacgcccagatcgccgacaacgtgatcggcgtcatcttcgccgcccgcgacaccaccgccagcgtgctcacctggatggtcaagttcctcggcgaccaccccgccgtcctcaaggccgtcatcgaggagcagcaggagatcgcgcggtccaaaggctcctccggcgagcccctgacgtgggcggacaccaggcggatgcgcacgacgagccgtgtgatccaggagacgatgcgggtggcgtccatcctgtccttcaccttccgggaggccgtggaggacgtggagtaccaagggtacctgatccccaagggctggaaggtgatgcccctgttccggaacatccaccacagccccgaccacttcccctgcccggagaagttcgacccctcccgattcgaggttgctcccaagcccaacacgttcctgccgttcggcaacgggacccactcgtgcccgggcaacgagctcgccaagctggagatgctcgtgctcttccaccacctcgccaccaagtacaggtggtccacctccaagtccgagagcggcgtgcagttcggccccttcgcgctgccgctcaacggcctgcccatgaccttcgtccgcaaggactgatgagccgccgacagatgtgtggatcgtggacggagccacaccaaaaccacggcaggccgacggaaccaaaccaaagccaacaacaaacaggcggatggatatggtatggcggtatatgctagctagtactactataggagccgcgaaaaccgcttccgggatttggcgttgcggcggtcgccatcggacgggacggggacaggcatcaggcaagcatgggatgatcacagaggaaaaaaaaaaaaaaacggtgtacagattcttcttcagctagtaggaccggatcccaagaagccggaagaggagaccaaacacaaaattaggcctagccacgtaggtgtcactcggtgtaagctactagttccagtaggcatcagatgacccagcgctacaaacaagtggcgtttaattgtaaaaccaaaccattttttttctctatcttcttcttcttcttcccccccctttagattttttttaataagctagccagacaacacccataggagaagaataagggaaaccataaaagaaagagagggaggccctgattgggattgtaagctagctaggttgtccgcctgaaagcaggctggcagctaggcacaataatccatggacggatggatggattggatgggtcgccggagtcaaaaggaggccacgtcgtcttccccgcaggcgcagccaaggactacggcccgggacggcgaccccgccttgtatttgtttcgtgatttcgtccaatgcaaaaaagacagtgactgctttcacagcaccaactgcccgtattacta

SEQ ID NO: 1641 - DNA, 5552 bp, Zea mays
  unsure (1)..(5552): unsure at all n locations
  Clone ID: PAT_MRT4577_178070C.1
aaggtcttggaaagcattttgaacaattaaagaaaataaaaagaaagatgcaacattgacggttccagttctgagaaggaagaatgtaacagtaactgctcgtcaatgaatggtatgcaagtatcagataagatatctgttgatgaaacgaataagggagctgatgtaagcaagttaatgccagaggatgctttctttcgcttgaagagtttgggagctggccttcatgaaaagtccctcgaagagctcacaaagatggcccataatttctatgatgagactgcactcccaaagctggtggctgatttcgcgtcccttgagctttctcccgtggatggaagaaccatgaccgatttcatgcatacaaggggacttaatatgtcctctttaggcagtgtggtagagctagcagagaagctcccacacatccagtctatatgcattcatgaaatggttattagatcctttaagcacatcgtccgagctgttattgctgctgttggtgacatgcaaaatatttctgcagctatagctgaaactctaaacatattacttggatctcccagacttgaaaatggtgctgacacagatgcccatattgacaataatttgcgtttgaaatgggtagagagcttcctttcaaaaagattctgctggaaactgaaagatgaatttgcacacttacggaaatttatcattctgagaggtctctgcagtaaggttggactggagctagttgcaagagattatgatatgaatagccctaacccatttgacaaatctgacattgtcagcattgttcctgtatgcaagcatgtggtctactcatctattgatggtcgaaacttactggaatcatcgaagatggcattggataaaggaaaattagatgatgctgtgagctatggaacaaaggcattgtccaaaattatagctggttgtggtccataccatcgactgacggctaatgcatacagnccttcttgctgtggtgctntatcatactggnagattntaatncaggcaactgtatatcaacagaaggcagctcgagggccggcatcgatctgcaagtctcgctacggcaataaaaaaagcagccgcaatggcgagcagcaccatggccctctcctccacggccttcgccggcaagggtgaacgtgccgtcgtcgtccgccttcggcgaggcccgcgtgacgatgcgcaagacggcggcgaaggccaagccagcggcggcgtccgggagcccgtggtacggccccgaccgcgtgctgtacctgggcccactgtccggcgagccgccgagctacctgacgggcgagttcccgggcgactacggctgggacaccgcggggctgtcgggacccggagacgttcgccaagaaccgctggaggtgatccactcccgctgggccatgctgggcgctcggcgtcttcccggagcttctcgcccggtgtgactattgctccggtgggccctcttgatatcaatgaagggagctgggtcttgacatccggaactatgaagattatggggatttatctgtcttctttaccgccttcaacattgaacgcccgcgcgtgcaggccatcgtatcagagctcatcgtgctgacttccttgaacaggaccaggaagggcacccaaaggagggacatagtgaagcggaagcacagacaactcaaaaggagggtcaagttgtgaaagtcgtttcaggtaaaggaaaggaaaacagagggaaagacatcgtgagaaactcatacaaaacagaacttgcaaggcaaattttgctcagtttcattgtgaagtcagtgcatgacagtttaggttccgcccaagctgaaccagagaggaagccaagtggatcagatgaagctagtaataaacagagcagcaacttagtcaagaatgcttctggtcgcaaagattcagataaacaagagaaatccatggaggttcccaagggcctgaaggatacagagggatttacagtcgtttcaaaacgtcgaaggcggccccagccattcatgaaccccataaacggcctctgttctcagccgtctatttgcacctctgtcagttaaggtctcattgcattttcaaagacctgcaatagtttggaagatggaccattgcttttgcttaggggttggtagaagaattttgccgtatccaagcgagcagcgagcatgtagtcaaactgtacaaaattttccaggataccctttgtaataataataaaaaaaaactgctgtaatctgcagtagctgtagcgctgaataaagtattcctttgtatgttagatatgacagaatcagaggaaatagcaagcagatgtttaggttaatccaacacaccaatagtgcttctctttacttttaggcatagatagcaatttgacagattaagatcatccacttcaaaccaggatcagggttatcaaggtcctagtcatacggcaaggaggaagtatatgatgccagtgccttccttcaaccaatgcctacttaactatgaaatggctctacagtatgtcaaccgtgcgctatatctgcttcagttttcatgtgggctttcacacccaaattcagctgccacctacataaacgtagctatgatggaagaaggcatgggaaatgttcatgttgctcttcgatacttgcatgaagccctgaagtgcaataagaggttgctaggagctgatcacatccagactgctgcaagctaccatgctatagccatagccctttcaatgatggatgcgtactccctaagtgtgcaacatgaacaaacaaccatgcagatacttcaggagaaactaggggaagatgacctccgaactcaggatgctgctgcatggctagaatattttgagtcaaaagcattagaacaacaagaggctgcccgaagaggcacgccaaaacctgattcatctattggaagtaaaggacatctaaggtatgaaactacaaatcatctgagcactttcaattataatatatttaaatttagattgaaacatctacctttacaaggtatctgatcttctagacttcataagctcggtccaagaatgcagagaaagaagagaaaaaagcaaaggtcagcaagggactgaaggatacagaggtattcacggtcaattaaaaacagcaaaggagactcccgccgttgatgaaccccatatttggcctattttctcagctgtctaattgcaactctgtcagttgaggtcattgcgttttcgaagacctgcaatattttgagagatggacctttgccatcgcctttgcctttgcttagaggattggtagcagagattttccctatccaagtgaactgtgagcagcgagcatttagttaaactgtacaaaaggtttccggaataccctttttgtaataaaagaaactgatgtattccgcagtagctgtagcgctggatataatgttcctttgtatgttatatatcacaggatcagaaagaagattctgtaactgctcctagccagatttcatttggtagctttttaaaaactgacaagttgaatggggattccagcattgctgaagataagacgtgcaatggtagtgctaaccaagaacaacggacaaagccaacaggaattaacaggccaaccagtatcgcttccaaatttatatcatacaaagatgtggctgtttcgccccctggcacagtattgaaacccattttggagaagaaggaagcaaaggagaagggtagtggacatgatatttatctaacactgtcatccgaggaagaagatccacagtttacagaaaatgagaaggaaaagccaagtgaggacagtagcaaagaggttctttcaagtcagcaagacttagagagtcatgtagaaacacctgacagcaacagtgatgaaaacccatctgcacctaagaaggcatctggaagcaaactgtcagcttcagcgcctccattcaatccaggatcactcttatcaatgtcccacccatacagcacggtggcaatatatgatgctagtgctgttattcaggcagtaccaaaccaagcaatggagattctccctcatgccattgacactagagtgcctcgtggccctcggtccaccttgtactatcgtactgggcattccttccaaaggaagcaaggttacacgcacagccagagcactattgtaaggggtagttactcccccacaaccatgaacccccatgctgctgaatttgtgcctggaaaaacttcgcaacaatctgatgtggctgacagagaacccagtcctgctaatcatgtggccaattctgatctggatgttgtatcgcagaccacagatgaagtgaaggctgaaacacctgccactgaaaaggcaggtcaagttgagaaagtcgtttcaggtaaaggaaaggaaaacagggggaaagacatcgtgagaaactcatacaaaacagaacttgcaaggcaaattttactcagtttcattgtgaagtcggtgcacgacagtttaggtccctcccgggctgaaccagagaggaagccaagtggatcagatgaagctagtaatgaacagaccagcgtcttaggcaagaacgcttctggtcgcaaagattcagataaacaagagaaagcgacggaggttcctaagggcctgaaggatacagagggatttactgtcgtttcaaaacgccgaaggcggccccagccattcatgaaccccataaatggcctatattctcagccgtctatttgcacctctgtcagttaaggtccattgcattttcaaagacctgcaatagtttggaagatggacctttgcttttgcttaggggttggtagaagaattttgccgtatccaagcgagcagcgagcatgtagtcaaactgtacaaaattttccaggataccctttgtaataataataaaaaaaaactgctgtaatctgcagtagctgtagcgctgaataaagtattcctttgtatgttatatatgacagaatcataggaaatagcagatgttaagctaatccaatattcagtggagcgcccttgtgctttatgatgttcctcaaaaaaaaaaaaaaaaaaaaaaaaaaaaaaaaaaaaaaaagggcggccgcatcatagtacgtcatatatcccagtagtgcttttcttatgcnctagtgtttctgcagtttctcaagatgtcgtggggatttatcgttgcaatctgcaaatgctgtcagagcagaagaaactgaatctgctaggcgccaagagtttgttcatgaaggcatgtcttttattgcttctttcccctgtgcccagactgctcagtgtggtcattggatgccttgtcagaggacggagcagcgtttcaccgtgaagcaattgcagctgcagaccagatcaccagaccactgaggccaggcgtgaactgggccggcagttttaaagctgttggcagctacgtatactgtacgagtctaaggagtagcctgcagctaagcgtagctgcagagaccacacaaatgtgaatcaaatcagttcagttccaaactgtcattgctgggagcc

SEQ ID NO: 1642 - DNA, 156 bp, Zea mays
  Clone ID: PAT_MRT4577_178107C.1
ttcctggaccaagggatgcgccgatgcactgttttatccggagggacaaagaaaattaaaccttttttttttatttaagtttaacgcaggccttacgggtaaagggaaagttcttttggctggtcgaagggtcaaaccaggggcacattccggata

SEQ ID NO: 1643 - DNA, 1457 bp, Zea mays
  Clone ID: PAT_MRT4577_178188C.1
ctttggtccctctccctcccccgtccgccctgcactctccagctcaacaaggaagaagagggggccttcaccacaccactcgattcctctttagagcacgacttacgaagtgtgcccaggccgtcgccgccgaccagcaaaagggctggaaagcccccctcttttgtgctgtgcgtgcaactcggctcctgccctgccatcttgctttccaagacccctgcgcccccagtcccataattagttaggattaggatcaccaccatttccaaatccttgcagagctgccgaagcgcggatcacagatgaagaggcaatccaagaggcccaccgccagccgcgaatccccagaaacaggggagaagcagaagctggcgttcgcggaggaagaggccccgccggcgcggaaggtggagcccgacgacgaggccgagatggacgaggacgaggacgagctgggcccgggcctgggcggcgggcgcgcggcgcggtcgccgtgcgggctcggggagaagaagcggcgcctggcgctggagcaggtgcgcgcgctggagcgctgcttcgagacggacaacaagctggacccggaccgcaaggcccgcatcgcgcgcgacctcgcgctgcagccgcgccaggtcgccgtctggttccagaaccgccgcgcccgctggaagaccaagacgctcgagcgcgacaaggacgccctcgccgccgagataagggagctgaggcagaagctgctgcccaagccggaagccacggtgaagctggaggcgacgacgggcaatgacacggcggaggagcgccgccaggcgacggccggcgcgccgcccgcgggggcctgcaaggacggctcctcggacagcgactccagcgtggtcttcagcgacgtcgaggcgtcgccctactccggcggcgcggcgttcgagccgccggccttggccgggctcggcgcgccgttcctggacacgtcggtggcgccgacgggctgctcgtctccccccgttttcgtcgagaccaagtggcagcagcacgggccgacacagtacccgttcccattcgactcgtacaaggcctgcgccggctatggcttcacggaggaatggctcgccagctcggacctcatcggcagcgacggcggcgcggcggggttcttctccgaggatcacgcctccagcctcaacttcaactggtgcccgagtggcatccagggctgggagtgaagaggggtttttgatctgcacggctagtgtaaaaaaaccgatgttacggtggcatttgtacatgcatggaactggagtctagtgacctggcctggcgagtgtggtgtggccaaagctagaggacatccagcgcaaaaggcgggaacaggagcagtagtagcctgtaacaataacggaataacttgagccaggctagtaaaaaaagaggatgtaaatgtaaaaagaggctgtcgcacc

SEQ ID NO: 1644 - DNA, 1531 bp, Zea mays
  Clone ID: PAT_MRT4577_178190C.1
agtcgtttgcccctttggtccctctccctcccccgtccgccctgcactctccagctcaacaaggaagaagagggggccttcaccacaccactcgattcctctttagagcacgacttacgaagagtgcccaggccgtcgccgccgaccagcaaaagggctggaaagcccccctcttttgtgctgtgcgtgcaactcggctcctgccctgccatcttgctttccaagacccctgcgcccccagtcccataattagttaggattaggatcaccaccatttccaaatccttgcagagctgccgaagcgcggatcacagatgaagaggcaatccaagaggcccaccgccagccgcgaatccccagaaacaggggagaagcagaagctggcgttcgcggaggaagaggccccgccggcgcggaaggtggagcccgacgacgaggccgagatggacgaggacgaggacgagctgggcccgggcctgggcggcgggcgcgcggcgcggtcgccgtgcgggctcggggagaagaagcggcgcctggcgctggagcaggtgcgcgcgctggagcgctgcttcgagacggacaacaagctggacccggaccgcaaggcccgcatcgcgcgcgacctcgcgctgcagccgcgccaggtcgccgtctggttccagaaccgccgcgcccgctggaagaccaagacgctcgagcgcgacttcgcggcgctgcgcgcgcgccacgacgccctccgcgccgactgcgacgcgctccgccgcgacaaggacgccctcgccgccgagataagggagctgaggcagaagctgctgcccaagccggaagccacggtgaagctggaggcgacgacgggcaatgacacggcggaggagcgccgccaggcgacggccggcgcgccgcccgcgggggcctgcaaggacggctcctcggacagcgactccagcgtggtcttcagcgacgtcgaggcgtcgccctactccggcggcgcggcgttcgagccgccggccttggccgggctcggcgcgccgttcctggacacgtcggtggcgccgacgggctgctcgtctccccccgttttcgtcgagaccaagtggcagcagcacgggccgacacagtacccgttcccattcgactcgtacaaggcctgcgccggctatggcttcacggaggaatggctcgccagctcggacctcatcggcagcgacggcggcgcggcggggttcttctccgaggatcacgcctccagcctcaacttcaactggtgcccgagtggcatccagggctgggagtgaagaggggtttttgatctgcacggctagtgtaaaaaaaccgatgttacggtggcatttgtacatgcatggaactggagtctagtgacctggcctggcgagtgtggtgtggccaaagctagaggacatccagcgcaaaaggcgggaacaggagcagtagtagcctgtaacaataacggaataacttgagccaggctagtaaaaaaagaggatgtaaatgtaaaaagaggtgtcgcacc

SEQ ID NO: 1645 - DNA, 614 bp, Zea mays
  Clone ID: PAT_MRT4577_178214C.1
gtcgatgacaagcctctagtgtgattcatcttaaagctcctgttaagatatttggagatttacacggacaatttggagatctgatgaggttatttgatgaatatggtgctccttcgactgcaggtgacattgcttacattgattatctattcttgggggattatgtagatcgcggccagcatagtttagaaactatcactcttcttcttgcattgaaggttgaacgtcctcgtggtgtgaatttgattcgaggaaatcacgaagctgcagatatcaatgctttgtttggtttccgaatagagtgtatagaacgaatgggcgaaagagatggtatctggacatggcatcgaatgaataggctatttaattggcttcctttggctgcgcttatagaaaagaaaatcatctgtatgcatggtggcatcggtcggtcaatcaaccatgtcgagcaaattgagaatcttcaaaggccaattacaatggaagctggctcggttgttctcatggatcttctatggtctgatccaacagagaatgacagtgttgaaggactgaggcccaatgcccggggtcctggtcttgttacatttgggcctgatcgggttatggagttc

SEQ ID NO: 1646 - DNA, 2012 bp, Zea mays
  Clone ID: PAT_MRT4577_178226C.1
gcggcgacacgccagggcggagagcacacaccgaagcgggccgcggcggcggcgcaggcgcaggcgcttacatgggagtagaggcgggcgggtgcgggcggagggcggtcgtgaccgggttctacgtctggggctgggagttcctcaccgccctcctgctcttctcggccgccgccgccgccgcagactcttactagctagctagccaccttcttcctcctcctccttgtaggtagtagtagtagtaggctacacaacaacgaccacatatatatatacatactaggtactactagcaggcgagcgagattcgtgcagtaattaaggccgcagccagttaataataattagtcgtcggcgagcgagagagatggtggaggaaggcgccaccgcggcggcgtcgaggagcgggccggcgccgttcctgagcaagacgcaccagatggtggaggagccgggcacggacgaggtgatctcgtgggcggagcagggccgctccttcgtggtgtggaagcccgtggagctggcgcgcgacctcctcccgctccacttcaagcactgcaacttctcatccttcgtccgccagctcaacacctacggtttccggaaggtggtgccggaccggtgggagttcgcgaacgagaatttccggcgaggcgagcaaggcctcctgtccggcatccgtcgccgcaagtcaacgacgccgcagccatccaagtacggcggcggcagcgtcgtgaacaccgcgttccctccgccgttgccctttccgcctcccgcgtcggtcaccacgtctggcggtggcggtggtgctggcgctggcaacgagcgcagctcctcgtcggcatcgtcgccgccacggaccgacgacctgaccagcgagaacgagcagctcaagaaggacaaccgcacgctgtccaccgagctggcgcaggcgcgtcggcactgcgaggagctcctgggcttcctctcgcgcttcctcgacgtccggcagctcgaccttgggctgctcatgcaggaagacgtgcgagcgggtgccggtgacgacgccgcgccgcgccgcgcaatggtcagccagctggagcgcggcggcgaggaggggaagagcgtgaagctgttcggcgtactcctcaaggacgccgcaaggaagagggccaggtgcgaggaggcggcggccagcgagcggcccattaagatgatcagaatcggcgagccgtggatcggcgtcccgtcgtcgggcccggggcggtgcggcggcgggaattaagtaaggtatggttggaactgatgcgccacggccggccgtgtgacagctttattacagcgagcgcatgttcgagtcgtggatgctttttgtgcgtgtttgtatttgtcatccaaggtgaggttgatggcaaggataattccagtgctgtggtaaaactgtgaaggcagaacacagggcacaggagataaccgtaacgcatgttaaaagttaattatgggatgctttggaggtagcaagattgaaagtagggaactagggatgaccggatgagtagacggtctagaaagacaagcccatatgtttggaatggaatattatcgtttttatatgttttgttaatctgttaaaaaaaaaaaaaaaaaaaaaaaaaaaaaaaaaaaaaaaaaaaaaaaaaaaaaaaaaaaaaaaaaaaaaaaccaaaaaaaaaaaaaaaaagggggccttggacctcaagtttttgttccttttagggggggtaaatggccccttgggggaaataagggcaatagttgttccctggggaaaatggttttccgttcaaatttccacaaaaaatccgacccgaaagcataaagggaaaagcctggggggcctaaggggggacctacctaactttaatggggtggggctcattgcccgttttcaagtgggaaaccctgtgggcccagttgatttaaggattgggccaccgcgcgggaagggggggttggcgtatggggcgtttttccgtttcttggttaattga

SEQ ID NO: 1647 - DNA, 449 bp, Zea mays
  Clone ID: PAT_MRT4577_178395C.1
aaccatacaggggcgtcatgagctcattcaatgctgggaccatccggcgtgtgttgggtcccgcctccgacccataattgaccagtcctggtcctacccatatgtacgattgcttactccctagcgccatcagcttcctcaagccagcggcgaccatgatctccccggacaccatccgaacggccatcgtgcgaatcagcaatggaactgcacgttgtgctcttcctctgcccagtgcctacgttcatccggatctggaagaaagggtcgaaggagcaatactcgccgatccagtacgtggggacgctgttgaactgcatgatgtgggtgctgtacgggctgacggcggtgcacccgcacaggatgctggtgatcaccatcaacggcgccggcatgccgatgcagatgacctacgtggcgcacattctgctctactcggaggtggctgc

SEQ ID NO: 1648 - DNA, 112 bp, Zea mays
  Clone ID: PAT_MRT4577_17855C.1
gcaggaatgataactgaatttgtcatctcttttgatgaccggtatctctactttgtaaattggctgcatggcgatattaagcagtacaacattgaagatcccgcaaagcctt

SEQ ID NO: 1649 - DNA, 697 bp, Zea mays
  unsure (1)..(697): unsure at all n locations
  Clone ID: PAT_MRT4577_178582C.1
caggccgatttcgggcggcttgaaatcgagctggccgaagttgaaatgcctggtctcatggcttgtcgtactgaatttggcccttcacagccatttaaaggtgctaagattactggatctttacatatgaccattcaaactgcagttttgattgaaacccttactgctttgggtgctgaagttagatggtgttcttgcaacatcttctccactcaagatcacgccgctgctgccattgcacgtgacagcgccgccgtgttcgcgtggaagggtgagactctgcaggagtattggtggtgtactgagagggcacttgactggggtccaggtggtgggcccgacttgatcgtcgacgatggtggtgatgctacactcttgattcatgagggtgttaaggcagaagaagagtttgctaagaatgggacaatcccagatcctaactctaccgataatgctgagtttcagcttgtacttactattattaaggaaagtttgaagactgatcctttaaaatataccaagatgaaggaaagactcgtcggtgtttctgaggaaactaccactggagttaaaaggctttatcagatgcaggctaatggaactttgcttttcctgctattaatggtaatgatctggtacccaagagcaagttcgacaacttgtacngatgccgccctcactggccgatggctcatgc

SEQ ID NO: 1650 - DNA, 292 bp, Zea mays
  unsure (1)..(292): unsure at all n locations
  Clone ID: PAT_MRT4577_178635C.1
attatttagaccaactagctttttttaaagcacaatagngtaccaacactgccggttaaaatattttgcctccttatgctccttggtatttctgcaagtgctgctacggcgaccattttccctcaatgctcacaagctcctatagcttcccttctttccccgtacctcttaccagctgtgttttctttatgttaaaacccaattctttaaccctacatgatctaactgtcatatcgtaattggcatattacctttatcacccttgttccttcaacaatcattatccctatta

SEQ ID NO: 1651 - DNA, 1948 bp, Zea mays
  Clone ID: PAT_MRT4577_178810C.1
ccaccacttgtaatattattattaccttgtaaaacaccattcacatttatgaataaaaatgttgtactagatagaattatagttgccatcacaagtcagataacaaccgactctgagaacagcctagcaaacaaacggctgtctgaaacaagcaaacataaaaaagcctagcgaatgtcagactcgccttccatcgccacttcccctaaagcaagcaataggcaaacacggataaagtagccttcgttcacttgcagatctcctctgcgggtggacgcagcgcgacccctccgaactgctcgctggaatacttcttgtatacaaccctcagcttgctctcaggggcagtcgagtgcgcgatcaccagcatcttcgtgcattcaatgagctctggcctctgactgccctgaagcccgtgtggtgcttgagggtgtcggtccaaaggggagcccctcttgagagtgagtctggctgcgtagacagcagaagcagcgaccagcgatggcaggcgcgtcaccaaattcgtattgcatcagcgccaattcagcgaagaagaacaccatattctccatctctttctcaactttgccgcccaatgttgcgggccttcagaaaacggacaaggaacatatacactgtagggacagtcaggttccactccagcctattcagaattcccttctccatcgaaagaatctgttctctactgtatgcactgtctgatatgaggatgaagtcgttcacctctggggcccaaatctcctcgtacttgcaggcgatcagcatagatgaaacgccgacaagctgcagctccttacgcaggactggttgcagcgagaggtactgatcgatgatgtacatggtcaggtagagagtttcgggcatcagttcaaacttgtggtgtacttcgattatccaatcagccaggatagccctcatcttagagttgatctcgagttgggcgtcgatgtagtcacatggccgtctctcgtgctgagcaatcttgtagaacgtgtagatgtcctcaatgtattccaccaccgcgagctcattgttgacgtccagcttgtcgatgtcatcgaccacttgtctaggcttaccagcgattccacaggcagcctttgagcgagccgagagcacggaagaaagggtgttgatggccttcctcctggagcggacggagctagcgctgctctcggactgcgccctgctctgttcagaatcggagctgagtactatgatatcctccggcggcggttgctgcttgacaggagccttcctctcctgcctcggcgcatgcctcgcaggcaggattgcggcattcttgattgcggccttcgcctgcgctttcttgacgagttgagcgccgaagcttctagtgatggggcgattgacctgctcctgcgggttccctgtggctgggcggacgctgacgaggttgcctatatcgccgagagggggtcgccggttcagagcgtcagctcgggcgggcacggccttggtctttccaagagcgggaacaccggctcggttgtgatggtgaagctgcggagcggcggcgttgtggttgcgcgaggccatctcttggtcctcgtcctgatcggcctggccgaagaagaggcccgagagcacggaggcgaagaaagactggaggcgcgcagcccgcgacccctcttccccgccggcgagcgcagccaccgcgtatcggcaaagcaacagcggcggcaacaagaagcgtgatgggtggtcgggtcggtcaaggtcaatcgatggcggcgcgtgatgggtacagttcttgaggggggacgaggagaggctcgtcccagcacaaaggcaacaagaagcgttttcttgccccctttcaccctctcttctcctctctcccagtccctgctcaatcaaaggcggcgcgtgatgctacagttctcgaggagaccgggcgcctggg

SEQ ID NO: 1652 - DNA, 306 bp, Zea mays
  Clone ID: PAT_MRT4577_178846C.1
gcgctctgcttcacctcactaacaccttctagctactctcactgtactgcaacaatgggcgctgggtcctcctgctcgcaggctcagatcgtcacggccgtggctgtactcgcagcggtgctgctgctgctggcggcgggggtcgagacggcgtttgcggcggtgagcagcggcgaggtgacgtcgtcagtagcgccgtgcctcgggtacgcgatggacatcgcggagacgccctccgcggcgtgctgcaccgaggagcgctcgctgaacagccgcgcgtcgtcaacggcggaccggcaggccacc

SEQ ID NO: 1653 - DNA, 356 bp, Zea mays
  Clone ID: PAT_MRT4577_179029C.1
aagcacaatagtgtttcatttctggcagccaaaatattctgcttgcttatgctccttggtatttctgcaagtgctgctaccgtaaccattttcccacaatgcttacaagcttctatagattcctttcttgcggcatacctctcaccagcggagtctttagtgtgcgaaaactcaatatcttcaaccgctacaggatgcaacaggccaatcgcagcatgcatgttacctttatcacccttgttcctcgcaacaaccgtcagccctatgtacaggagttacctttgcggcatttgttggcacacatcatcagggcacaacaactacaacaacttgtgctcggagaccttgctggctac

SEQ ID NO: 1654 - DNA, 212 bp, Zea mays
  Clone ID: PAT_MRT4577_179182C.1
gctgcgcataacgctggcacgctcttacaactgcaacaattgctgacattcaagcaacttgctttggcatacccaacaacgttctacgcaacaacccatcattggcggtgccctcttatcgattgcttatgcgttatagttcaataatgaagtttattggatgatacttgtagcttcccagaaatgtactttctatatatctgggaagccac

SEQ ID NO: 1655 - DNA, 345 bp, Zea mays
  Clone ID: PAT_MRT4577_179244C.1
cccacgcgtccgttggcttctcctcccactccgtatcgggttcgggttcgcgaggttctgcggtgtatcatttcaagggtgagcggatcgagatggcaacgtctgatgtagagtaccgatgcttcatcagcggactctcctgggccacggacgaccactccctccacaactccttcagcacctacggcgaggtcctcgagtccaagatcatactcaatcgcgagacgcataggtaccacagcttatgctacgtcaccttctccactgaggaggcgatgctgaacgccatcaagggcatgaactgcaaagagctggacggccgtaacatcaccgtcaactaggccc

SEQ ID NO: 1656 - DNA, 257 bp, Zea mays
  Clone ID: PAT_MRT4577_179465C.1
tactttcttattctgggaaaccacaaacacatccaaaaaacttcattattgaactataactcataagcaatctaaaagaggcaccaccaatgatgggttgttggtagaacactgctgggtttgacaaagcaagttggatgaatggcagcaattgatgcagttgaaagagggtgccagcgctaggcatagcgcgaaggtagaacggaaacaactgaagatgagccaagaaggcaatagggctgacatgaggctagctg

SEQ ID NO: 1657 - DNA, 1674 bp, Zea mays
  Clone ID: PAT_MRT4577_179630C.1
cattgggtacctcgaggccgggccgggagtaggttaaagcgacgccgccgccgcaagccgtccgccttgcccctcgaaggcttggtcctcctccttgtatcccgacctcccccgcgacagacccgtttccccgctaggctagagttatcgttcctctgcagcgatggcgatcaagcggaccaaggcggagaagaagatcgcgtacgacaagaagctgtgcagcctgctcgatgagtacaccaaggtgctcatcgccctcgccgacaacgtcggctccaagcagctccaagacatccgccggggcctcaggggcgactcggtggtgctcatgggcaagaacacgctcatcaggcgctgcatcaaggtctacgccgagaagaccggcaaccacacctttgacccgctcatggacctgctcgtcggcaacgttggcctcatcttcaccaagggagacctcaaggaggtgcgcgaggaggtcgccaagtacaaggttggggctcctgctcgtgttggtctggttgctcctgttgatgttgtcgtgccccctggcaacactgggctggatccctcccagacctctttcttccaggtgcttaacatccccaccaagattaacaagggtactgtggaaattatcacccctgtggagctgatcaagaagggtgagaaggtgggctcgtccgagtctgctctgctcgccaagctgggcatccgccccttctcgtacggtctccaggtcaccagcgtctacgaggatgggtctgtgttcagccctgaggtgcttgacctttctgaggaggacctaatcgagaagttcgccactggtgtctccatggtcgcttctctttccctggcattatcgtacccaacccttgctgctgtgccccacatgtttatcaatgggtacaagaacgtgcttgctgttgctgtggagacggactactcgtacccacacgccgacaagatcaaggagtacctcaaggacccgagcaagtttgctgttgctgctcctgtagctgctgcggactctagtgctgctgctgcccccaaggaggaagagaaggctccagagcctgccgaggagtcggacgaggaaatgggcttcagcctgttcgacgactaagccgctcttatcgtccatccgccgcaagttttgcttctgcttattattttagtgcattatgttttagtagacaaaccatgttggtgtaattgacaatgttatctccttaaatgttgaaagtgcccgtgttgtgtcacttgttattggtttcttgagctagtttggttctcttctcttgtgaaaaagatgtctcccgtaaagacacctcttcaagtaatctcatctaccacaagacatcttttaaagcaatgtgttagacttagattagttaatcatgtaaccaaagggtatgtactttggcatggatggcagtgaactttgttaggattggatggcttgaaattcagaacatctgataatcgttaggaccagctaacggcttagctaactaatgttcttcatggaaatgttgcagcctattccatgtggaaaggattgatgaagaagatgcaacatgcgaggatgaacgttgagattcgtaattttttttaatttagtgcactttgtatcaaattttgtatgaatttatattttatttatgaatatatatt

SEQ ID NO: 1658 - DNA, 1362 bp, Zea mays
  Clone ID: PAT_MRT4577_179632C.1
ctgtgcggcgctcgaggcggcgttccggaactaaaaaacacggccgcagtcgtttatcagctaggttaaagcgaggccgccgccgcaagccgtccgccttgcccttcacgaaggcttggtcctcctccttgtatctccactccccccttcacagatccgttcctccagctagggttagcgttcctctgcagcgatggcgatcaagcggaccaaggcggagaagaagatcgcgtacgacaagaagctgtgcagcctgctcgatgagtacaccaaggtgctcatcgccctcgccgacaacgtcggttccaagcagctccaggacatccgccggggcctcaggggcgactcggtggtgctcatggggaagaacacgctcatcaggcgctgcatcaaggtgtacgccgagaagaccggtaaccacacctttgacccgctcatggacctcctggtcggcaacgtaggcctcatcttcaccaagggagacctcaaggaggtgcgcgaggaggtcgccaagtacaaggtgggggctcctgctcgtgttggtctggttgctccagttgatgttgttgtgccccctggcaacactgggctggatccgtcccagacctctttcttccaggtgcttaacatccccaccaagattaacaagggtaccgtggaaattatcacccctgtggagctgatcaagaagggtgaaaaggtgggctcgtccgagtctgccctgctcgccaagctgggtatccgccccttctcgtacggcctccaggtcaccagtgtctacgaggatgggtccgtgttcagccctgaggtgctcgacctttccgaggaggacctgattgagaagtttgccactggtgtctccatggttgcctccctgtcactggcgatctcgtacccgacccttgctgctgtgccccacatgttcatcaatgggtacaagaatgtgcttgctgttgctgtcgagacagactactcgtacccacatgctgacaagatcaaggagtacctcaaggacccaagcaagtttgctgttgccgccccggttgctgctggggactctggcgctgcagctgctcccaaggaagaagagaaggctgcggagcctgaagaggagtcggacgaggaaatgggcttcagcctcttcgacgactagagctgctgttttcgtcaaactgctgcaagttttggctttttttttttatcatctacaagtactgtttcctatattttttagcagacaaattatcgtgtgtaatcgacaatgatatctccttaaattttaagtacctgtgttgtgtcaaaaaaaaaaaaaaaaaaaaaaaaaaaaaaagaaaaaaaaaaaaaaaaaaggcccctagggcc

SEQ ID NO: 1659 - DNA, 1318 bp, Zea mays
  Clone ID: PAT_MRT4577_180097C.1
tggcgtccgcccaaccctccaaaccaacgccgccaggccccttcccggggtcctcgacgcggccccgcaactgcagatccccaattcgtttatttcttcccaccgagccaagctgcgacgacggcggtcgcagcgtcgccttccctccctccgtaccgccgacgccgacgagcatattgggccgagcgcccgagcacctctcctgtcagcagcggcactcgccattccaagtacgaggtcgacgcgctgtggggcttgctgaaacaggtctacccccaagtgaaatcagggtcttcaagatagcttactgagatgtggggttttgcatcaaacgcttgggcagctgggctggagaagaggagttccccaaaccgcacttcctcgagtgctgcttattctgacgacgaagcatcctcgtgcacaagcagggaagaaggcctggagtgcccgatatgttgggagtctttcaacatagtggagaatgtgccttatgcgctatggtgcggacacaccatgtgcaagaactgcatcctagggcttcaatgggccgtcatcaaagtcccaaccgtgccgatccagctaccgttcttcatctgctgtccctggtgcaacctcctgtcgccccgcgtactttacaagggggaacctcacgttcccacgaaagaactatttcctcctctggatggtcgaggggatgaacggcgagcgggccagatcacgcccagctattcgcagcgagcagcatactccgtggctctcaagcagcagcagcgtgggcaatggaaatgcaggctgttcaaatcccactcgacgccacctcccgccaccatcggttgacacttcgcccaccaacgcaaatcatgccaaccacggggggtcccctctgctgaacgcagggagggtacaagcttcgctgcgcaagtccctgtcgttcctggtccacctgactgccaagtttcccctggtgttcgtcttcctcctcatagtgctgtatgcgatcccagccagcgcagcagtcttgttactgtacatccttatcactgtgctgttcgcgctcccctcgttcctgatactgtatttcgcgtatccgagcctggactggcttgttagggaaatctttgcctgagatttccttgttcggtaaaatctcaatgctgttgttgagtccttgtataactgaactttccctagatcttgttgcaagcgtggatgctattgcaaagttttggtttttacaccatgagatgtgtttaaaaaaaatcaataaagattttgttgcaagtgttgaagttattgccaaaaaaaaaaaaaaaaaaaa

SEQ ID NO: 1660 - DNA, 418 bp, Zea mays
  unsure (1)..(418): unsure at all n locations
  Clone ID: PAT_MRT4577_180119C.1
tgccattgaaaatgcgaaaacgatggggctatgcaacnccggtcaatccgttgtggccttgcaccgcatcggaatttcatccgtcatcaagctcctgactgtaaagtaagggtccaagggggagggacaccattttgcttggtgaatttttgtgaggctgcttacgcacatcagcgtatccacagcttttctgttgccaaaaaaacagactttgcgttctggtacaccttggtgttacaaggttgtgggaatttgtcgtttagatattagcgatttaaacagtttatcaactgctatagctaattaatttgcagctgtgctgcaactttatcgtactgaaaattttatgtttgtttcacatgcttgcttgttgattttatttcgtttggcaaaaaaaaatttcttgtttggttcagcg

SEQ ID NO: 1661 - DNA, 2139 bp, Zea mays
  unsure (1)..(2139): unsure at all n locations
  Clone ID: PAT_MRT4577_180122C.1
aaaggccttggcagtggcggcactcagcattgggatgacacccgaagaaggcacctcgaggccggccgggccgggaaaattccgtccacagaagaagaatccttctcgacgccgcccccattcattcttggagggcaagaagaacgcgcagtccaaaagcgaaacaaggggaaggggcgaggcagccaaacgaatcccagcacctgcctctcctttgcttgcgcagatctagcgatggcggcgggcggtgagttggcgtggggggaggagcccgtggcgcggcgccggcctaagaccaagatcgtctgcacgctcggcccggcgtcgcgatccgtcgagatgatctcgcgcctgctgcgcgccgggatgtgcgtcgcgcgcttcaacttctcccatggctcccacgagtaccaccaggagacgctcgacaacctgcacgccgccatggagctcaccgggatcctctgcgccgttatgctcgacaccaagggtccagagattagaactggatttttgaaagatgggaagcctattcaattgataaaaggccaagaaatcacaatttctacagactatagcattcagggtgatgagaaaatgatatcaatgagctacaagaagcttgctgttgatctgaagccaggcagtgtcatattgtgtgctgatggtaccatcactcttactgttcttcactgtgataaagaacaaggcttggttcgctgccgctgtgagaacactttcaagcttggcgagaggaagaatgttaatcttccaggagttattgttgatctccccacactcacagacaaggacaaggaggacatccttaaatggggtgttccaaacaagattgacatgattgccttgtcatttgttcggaagggttcggatcttgtggaggttaggaaggtacttggtgagcatgccaagtccataatgctgatgtcaaaggttgagaatcaagagggagtagctaactttgatgatatcctggcaaactctgatgcttttatggtggcaagaggtgatttaggaatggaaattcctatagagaagattttctttgcacagaaggtgatgattttcaagtgcaatattcaaggcaagcctgttgtgactgcaacccagatgttggaatctatgatcaagtctcctcgccctactcgggcagaagcaacggatgttgcaaacgcagttcttgatggcacagactgtgttatgctcagtggtgagactgctgctggggcttatccagagttggcggtgcagactatggctaagatctgcctgcaagcagagtcttgcgtagaccatgctgctattttcaaatcaatcatggcttcagctccaattccaatgagtccattggagagccttgcatcatcagctgttcgcacagcaaactctgccagggcagcacttatcttggtcctgaccaggggaggaactactgctaggcttgtagccaagtataggccatccatgccgattctgtccgttgtggttcctgagctgaagacagactcgttcgactgggcctgcagtgacgagggtccggcaaggcacagcctcattgtgaggggtgtcatcccaatgctgagtgccgccactgccaaggcctttgacaacgaagccactgacgaagctattggttttgccattgaaaatgcgaagacgatggggctatgcaacaccggtcaatccgttgtggccctgcaccgcatcgggatttcatccgtcatcaagcttcttactgtgaagtaggggtccaagggtgagggacaccattttgcttggtgaatttttgtgaggctgcttacgcacatcagcgtatccacagcttttctgttgccaaagatacagactttgcgttctggtacaccttggtgttacaaggttgtgggaatttgtcgtttagatattagcgatttaaacagtttatcaactgctatagctaattaatttgcagctgtgctgcaactttatcgtactgaaaattttatgtttgtttcaaaaaaaaaaaaaaaaaaaagcccaaaaaagaaaaaaaaaaaaaaaaaaaaaaaaaaaaaaacatgcttgcttgttgattttatttcgtttggcaaaaaaaaatttcttgtttggttcagcgnaatc

SEQ ID NO: 1662 - DNA, 427 bp, Zea mays
  Clone ID: PAT_MRT4577_180243C.1
tctttaacatgacaaagcacaaatagtggccaccaacaatagtgcagtacaaaatattggagccgccttatgctccttggtctttctgcaggtgctgctacagcaaccatttgaccgcgaatgctcgcaagcgtctatggcttccatccttcccccatacctgtgaccagcggtgtcttctgtatgtgaaaacccaattcttcaaccctacaggatccaacaggcaatcacagactggcatattacctttatcacccttgtacctccaacaatcatcagccctattacatcagttacctttggagcattgatagggacaaaacatcatggcacaacaactacaacaacttgtgctagaaaaccttgctgcctactctcagcaacagcagtttcttccattcaaccaactagctgcattgaactctgc

SEQ ID NO: 1663 - DNA, 790 bp, Zea mays
  Clone ID: PAT_MRT4577_180294C.1
ccagcccagccttgtctgcgtctcctcctcctttccccaacccagaccaggagcgccctctctcccccgccccctccccccaggaaaccagccatgaagggggccaaatccaagggcgccgccaaggccgacgccaagttggcggtgaagagcaagggggcggagaagccggccgccaaggggaagaagggcaaggccggcaaggaccccaacaagcccaagagggcgccatccgccttcttcgtcttcatgggcgagttccgcgaggagttcaagcagaagaaccccaagaacaagtccgtcgccgccgtcggcaaagcggccggtgagaggtggaagagcttgagcgaatcggaaaaggccccctatgtggccaaggccaacaagctcaagggcgagtacaacaaggccattgctgcctacaacaagggcgagagcgctgctgctgctgccccaaagaaggctgcggccaaggaggtagaggaggaagatgaggaggaatctgacaagtccaagtcggagatcaatgacgacgatgacgatgagggcagcgatgaggacgaggacgatgacgagtgaagaagacgcatcttgtcaaggctgctccggcggacaagtcgggagctgctgtgcgagaacggacctgagctgtgtgcggtggtgtcataaggagcctatccatctccactagaattatcccaagtttcacttcacatcgtgatgttgttttacctttttcctgtcattgtcctgctataacggatagcgctccctggtggcgccgccgccg

SEQ ID NO: 1664 - DNA, 581 bp, Zea mays
  Clone ID: PAT_MRT4577_180318C.1
tcatccacgcgtccgccgcgcgcgtgcggcttcttgctgccaaagcattccctcccctagccgttggcttcgtcgctcgtctccctgtgaggtgccgggagggaggaactggccgagtcctaagtggagaatcggccttttcttgtctcaccccggggtttgctgcgtctggtggtggtgaatgggagaaatccttgacatctgtgccggatcaggcgtgctagctcggcaatcaggggtttcacacatagctttcgctgcttggaatttgatgtactaatggagtctaagggtggttaaaatgttaccattactcgtcgtataatgtatgaagcttcccttggctacagcattgaggacgttcgacctgccggaggcgtgaagaatttccagtctgttggttactccaactgcgcgaggaagccatcctgatatcccttttggatttctcattctagcagtgtaggatttcttttgtgacacctttgattatgaccaatctctctggtctgctgcttcctgattattgaccagttacacatccttgctccttgcactcactcgtccatgtccagcattgt

SEQ ID NO: 1665 - DNA, 2068 bp, Zea mays
  unsure (1)..(2068): unsure at all n locations
  Clone ID: PAT_MRT4577_180468C.1
cccccccccccccctccccttcttctctttttctttttcccttcctcccccaccnattgtggtacccggtcgacgcccgcatagcctcctcgtctcctcgagaactgtagcatcacgcgccgcctttgattgagcagggactgggagagaggagaagagagggtgaaagggggcaagaaaacgcttcttgttgcctttgtgcttcagcggatccgcggtggctgcgcacgccggcggggaagaggagtcgcgggcggcgcgcctccagtctttcttcgcctccgtgctctccgggctcttcggccaggccgaggccgaggacgaggacgaggacgaagagatgcccacgcgcaaccacaacgctgccgcggctgccgctccgcagcatcaccatcacaaccgaggtggtgctcccgctcttggaaagagcaaggccgtgcccggccgagctgatcccatgaaccggcgagcccccctcggcgatattggcaacctcgtcagcgtccgcccagccgaagggaagcctcagctgcaggagcagatcaatcgccccatcacgcgaagcttcggcgctcagctcgtgaagaacgtgcaggcgaatgccgcaatcaagaatgccgcaatcctacccgcgaggcacgcgccgaggcaggaaaggaaggctcctgccaagcagccgcctcctgaggatgtcatagtactcagctccgactctgaacagagcaggacgcagttggagagcagcgctagctccgtccgctcgaggaagaaggtcatcaacaccctttcttctgtgctctcggctcgctcaaaggctgcctgtggaatcactgataagagacggcaagtagtagtgatcgaagacatcgacaagttggacgtcaacaatgagctcgcagttgtggaatacattgaggacatctacacgttctacaagattgctcagcatgacagacggccatgtgattatatagacacccaagtcgagatcaaccctaagatgagggctatcctggctggttggataattgaagtacaccacaagttcgagctgatgccggaaactctctacttgaccatgtacatcatcgatcagtacctctcgctgcaaccagtcctgcgaagggagctgcagctggtcggtgtttcagctatgctgatcgcctgcaagtacgaggagatttgggccccagaggtgaacgatttcattcttatatcagacagtgcatacagcagggagcagatcctttcgatggagaagggaatcctgaatagcctggagtggaacctcactgtccctacagtatacatgttccttgttcgttttctgaaggcggcagccttgggcaacaaagttgagaaagagatggagaatatggtcttcttcttcgctgaactggcgctgatgcagtacggcttggtgacgcggctgccttcgctggtcgctgcttcggttgtctacgcagccaggctcactctcaagagggctcccctctggaccgacaccctcaagcaccacacgggcttcagagagtcagagacagagctaatcgagtgcacgaagttgctggtcagcgcacactcgtcgtccgccgctgacagcaagctgaggtctgtatacaagaagtattccagtgagcagttcggaggtgtcgcgcttcgcccacccgcagccgcagtggagatgaagtaaacgaagataacttcgtgctacaagtaaacgaagataacttcgtgctagtgtttgttagtataatgtaatggaaggcgagcctgacattcgctagggtctatccgtctatgtttgcttgtcggggtagtcaagaaagtttgaatgcttgaggcagccgtttgtttggtaggctgttctcagagtccaggtgttatctgacttgtgatggcatgttgtgtttcatgtgatggatatcattagaatcctaatctagtacgatatctattcatgaatataaatggtatttattcatttgttcataaaaaaaaaaaaaaaaaaaaaaaaaaaaaaaaaaaaaaaaaaaaaaaaaaaaaaaaaaaaaaaaaaaaaaaaaaa

SEQ ID NO: 1666 - DNA, 444 bp, Zea mays
  unsure (1)..(444): unsure at all n locations
  Clone ID: PAT_MRT4577_18052C.1
gactttcttatttctgggaagccacaaacatcggacaaaaaactttattattgaactataactcataagaaatctaaaagaggacaccaccaatgatgggttggtggtagaacactgctgggtttgtcaaagcaagttggttgaatggcagcagggtggtgcagatgtaattttgtgtcagcggtaggcgcaacgcgctggnagaacggcaacaactgcggntgcgtcaacaaggtagcagggctcacaccagctagctggctgaatggtagtagcctgtgctgctgtaataagcaggagaggtcaatgctgctagatggctgaatggaagaaatagctgggggtaggcagcacgtagctggctgaaaggtagatgttgatggtgcgaacaagaagcagaggtcaatgaacctacctggttgaatggaagaaactgctgttgct

SEQ ID NO: 1667 - DNA, 1627 bp, Zea mays
  Clone ID: PAT_MRT4577_180546C.1
acggtggcagtactacgcagaacgcagcttcattgctctgaattcaacaggcggttcggaaaaacgagaccctgatcgacaagagttgaacacgctgacgcacgcacagtccggtagaccgagctgacatttgcactgtctagtaacggtgtcaacacagcagacaactggcgcacgggaaagggcacatagacgcacgcagcaacacggtgaacaaacaaaaaacctagggacaggacaggacaggacgaggcaacacagaaaaggaagaacacagaacgaaacgactggtctgctcaggccaccgatggagggagggaaggatggtcagctcgtcgacggccactcccggcggatgtcgaaggtgtagttgatctccaggtagcacttgcggtcgtcgtcgaggaacttggtcctggcagagtaggacccccgggcaaacattcccgacggggtggtgtcctccggcgtcacgtacgtgtagggctccagctgggggctgaacgtgccgagcatctccttggctctgtcaactttgagccccgtcttccagacggtgttggkgtagcggaggccggagacgatgttgttgctgacggagaaggtgaacttgagccggtacggggagccttcctttawggttaaccacacgcccyttccgttgggctccaccggcagcggcagcacgatgtcgggccgcccgggcgacaggatggacaggctcattatcttcacgtccggctccagcgtctctcccacggagttcaagtccacgccgccgaggagctgctccttccatcgccgcaggctctcgtcgtccttgtccttctcgagctgctccttgatgctgaccatgggaccgaggtcgatggccttgggggccttctcctcgtcctcctcgtcctcctcctcctcctcctcctccccgtgacaacgcggcgcgcacttgccgttgggcgccgtgtcgcagtgctccgcgggcggcgccgcttccttggccggctcccccggctccgggccggcggggacgtcgaccttggggcaggagatggcctccaccgccgacgacatcgtcgcacgcacgcgcgcgcagtggcttcggccttcggctagacaaggaaaggaaggagggcgggccggcggggagaggcgagcgctggcacagataccgagatgagcgcagcgaaaaggagagcgagcacgcagtcacgcacgagacgagtcgcgaggggaggggagagagggagggggaagcgaacacgtcgaggcggattatttcggacaggaggaacgggccgcggcgcaaggctccaaaaaaagaggccccgcgcgcacgccggccggacggcgaggggagattggtttgatactttgatccaacgcacgacgatggcagcgccagcggcagagaggagaggagaggagaggataggggggtgagccgtgagcggggggcgcttcgctttaattctcccccgcgtgccgcagggatgacggagaggagaggagaggagaggagaggcgacggagtggaggcaacgtgatgggcacgacccgacgcgccggcgccgcgctgcaacccctacaggtttacattggggactgcccggccggcctcgaggtaccc

SEQ ID NO: 1668 - DNA, 1844 bp, Zea mays
  Clone ID: PAT_MRT4577_180549C.1
ctcgagtttttttttctttttttttttggactccaaacaatatacttcgtttttttggccatttgtaacattgatcgcaaaaataggactcgaagcatgctacacttgatttcaatgctacagtcgaactctcgaagcacaacaggtcacgatcacggtggcattactacgcagaacgcagcttcattgctctgaagtcttaactcaacaggcggttcggaaaaaacgagaccctgatcgacaagttgaacacgctgacgcacgcacagtccggtagaccgacctgacatttgcactgtctagtaacggtgtcaacacagcagacaactggcgcatgggaaagggcacatagacgcaccgtgcgtcacgcacgcagcaacacggggcgtgttcggctggctacaagccgacactgttgcagctgtttggactgctgcagctgcaatccatagagagaaaaatactgtagaagccgcagccgcagccggattgcagccgcagcaagccgcagcgaacaagctgacggtgaacaaacaaaaaacctagtgacaggacaggacgaggcaacatagaaaaggaagaacacagaacgaaacgactggtctgctcaggccaccgatggagggagggaaggatggtcagctcgtcgacggccactcccggcggatgtcgaaggtgtagttgatctccaggtagcacttgcggtcgtcgtcgaggaacttggtcctggcagagtaggacccccgggcaaacattcccgacggggtggtgtcctccggcgtcacgtacgtgtagggctccagctgggggctgaacgtgccgagcatctccttggctctgtcaactttgagccccgtcttccagacggtgttggtgtagcggaggccggagacgatgttgttgctgacggagaaggtgaacttgagccggtacggggagccttccttgagggtgaaccacacgcccttgccgttgggctccaccggcagcggcagcacgatgtcgggccgcccgggcgacaggatggacaggctcattatcttcacgtccggctccagcgtctctcccacggagttcaagtccacgccgccgaggagctgctccttccatcgccgcaggctctcgtcgtccttgtccttctcgagctgctccttgatgctgaccatgggaccgaggtcgatggccttgggggccttctcctcctcctcctcgtcctcctcctcctcctcctcctccccgtgacaacgcggcgcgcacttgccgttgggcgccgtgtcgcagtgctccgcgggcggcgccgcttccttggccggctcccccggctccgggccggcggggacgtcgaccttggggcaggagatggcctccaccgccgacgacatcgtcgcacgcacgcgcgcgcagtggcttcggccttcggctagacaaggaaaggaaggagggcgggccggcggggagaggcgagcgctggcacagacaccgagatgagcgcagcgaaaaggagagcgagcacgcagtcacgcacgagacgagtcgcgaggggaggggagagagggagggggagggggaggcgaacacgtcgaggcggattatttcggacaggaggaacgggccgcggcgcaaggctccaaaaaaagaggccccgcgcgcacgccggccggacggcgaggggagattggtttgatactttgatccaacgcacgacgagaggagaggtgagcggggaggcgcttcgctttaatctcccccgcgtggcgcagggacggagaggagaggagaggcgacggagtggagacaacgtgatgggcacgacccgacgcgccggcgccgcgcccacgcgtccg

SEQ ID NO: 1669 - DNA, 226 bp, Zea mays
  Clone ID: PAT_MRT4577_180789C.1
ggcacctacacctatggcacctccacccatggccctgcacccatggcacctctacctatggggcctacacccatggcacctgcacctatggcacaaccctggtttggccactccagctagcttctgcgcttatgccacggacaagatcagcgtcgatgcgtaccttgcaagtggcatcattgggaaagggggagctaacataaaccaaatatcttacgtcacaggg

SEQ ID NO: 1670 - DNA, 311 bp, Zea mays
  Clone ID: PAT_MRT4577_18087C.1
accaacgattatcagatacggggggtcaacaagacaaaactgtttttggtaacccacattgccttaccccacgcgactacaccattatttttcagcaaaaggaaaaagatccttccctcccccttaggtgaagcgataaccataaggaaacctggtacgcgactgggtttttgataatgcatatgcctgccaaagataactgccaggcccttggtgcgaactttatatcacacaacggccccagggagctgcaagccgtgtgctggctgtctattaccggtagggggcaggcttgtagggaccctccttcg

SEQ ID NO: 1671 - DNA, 273 bp, Zea mays
  Clone ID: PAT_MRT4577_180924C.1
cggcggctacggcaactccgacgggaactggaggaactgagcggtggggcccgcgcgtgcaagttatcctgtgtgggtgccgtgatgtttaccctagtccagagggtttatcttcgttcgtgtcgtgtttggtgttgcccatctgggggtttgattggaagggcgctctgtgtcacttggtagtgctggggtcatcctcggtttcatcagacccatgcgttaaacaacatgggctgcggatcgatggatgctcttacccccgtctggctttat

SEQ ID NO: 1672 - DNA, 151 bp, Zea mays
  Clone ID: PAT_MRT4577_181067C.1
agcggctctcgcgggcgcgtcatgtaccggggagtcacaaggcaccaccagcacgggcggtggcaggcgcgcatcggccgcgtctccggcaacaaggacctctacctcggcaccttcagcacgcaggaggaggccgcggaggcgtacgacg

SEQ ID NO: 1673 - DNA, 648 bp, Zea mays
  Clone ID: PAT_MRT4577_181072C.1
ctcgaggccggccggggaaggaagttgcaagaagacgagcgtcaagtgaacctttaacttgcggggcgctggctgataccctgacggtgagggagtgatcgagctagctgagctccgatcctcgctaggtaggataccgccataccacaagactccttcacaagcttaggagccatggcaacaacagatcgatggcatctgccaccgtgctcaagtcctccttccttcccaacaagtgcgaatggatcgccaccaggcaggccgaccggtccagaccgcccaccggctccatggtgcgccgcgtctccgcctacgccgatgagctcgtgaagaccgcgaagacgatcgcgtcgcttttgttgtggcatcctgacgatggacgagtcgaacgcgaggtgcggtaagcggctggcgaccatcgggctggagaacacggaggccaaccgggaggcgtaccgcacgctgctggtcacgacgtcggccctgtgacagtacatctccggcgccatcctcttcgaggagacgatgtaccagtccgccgtcgacggccgcaagatcgtggacatcctggcgaagcatggcatcgtgccggggatcaaggtggacaagggtctttgtccgatcgccggctccacaacgagtcgtgga

SEQ ID NO: 1674 - DNA, 357 bp, Zea mays
  Clone ID: PAT_MRT4577_18114C.1
tttttcttctttttttttttttttttttttttttttgggggagggtcaacacaatgcttataataggcccatttccacacggtacaggggggaaggcgaataaaaataaaagcgacctttattcgttgggcattataacacaaggcattgcccgggaggaaacacagttaccggtttattccatgcccacttgacaaaaacccaaacagagaccacggttccgggtattaattgtccatggcgaccccaggcaactggaaaggggccccctcccggttgagctgctgcttgaacatccacttggggaagggggggaaaaagaactccttggaaccagtgtactggtggggggcgggg

SEQ ID NO: 1675 - DNA, 1336 bp, Zea mays
  Clone ID: PAT_MRT4577_181169C.1
ttgggtacctcgaggccggccggccctggccctctccttggcttttcctctcgctctcctcctctctcgcatcccaccgcatcacaaccacgacttcctcccgccgccggttggcttcgctgctcgtccacctccgcccggcccgtgggacgagtggggactggagagggtcgcctctgggcttcgcctctcggcggccgagtgtctgcgtcgtccacggagctgagagcctgagactgagactgagagcgaccggcggcggggatggcgagggagaggcgggagataaagaggatagagagcgcggcagcgaggcaggtcacgttctccaagcgccgccgcggcctcttcaagaaggcccaggagctctccgtgctgtgcgatgccgacgtcgcgctcatagtcttctcctccacggggaagctctcccagttcgccagctccagtatgaatgagataattgacaagtacaacacgcattctaaaaacctggggaaaacagaacagccttcgctggacttgaacttagagcatagcaaatatgcaaatttgaatgagcaacttgcggaagcaagccttcgactcaggcagatgagaggtgaagaacttgagggattgaatgttgaagaactccagcaattggagaagaacctggaatctggtctgcatagggtgcttcaaacaaaggatcaacaattcttggaacagatcaatgacctcgaacgtaagagtacgcagctggcagaggagaacatgcaactgaggaatcaagtatcccagatacccccagctggcaagcaagcagttgctgatactgaaaatgttattgctgaagaagggcaatcctctgaatcagtgatgactgcgttgcactctgggagttcacaggataatgatgatggttcggatgtatctctaaagttagggctgccttgcgttgcatggaagtaaacaggaaatgaggctccttgtcgattctgggtgtggatgtgggtgtgggtggagctgcggcctcagcggataggcacttgtgtatggttttatggacgaccggcccccgactacgtactgcaataatcttgcattggaagcgagatcggttaacctgatttgtcatccttgtggcttcatgatgcgatgttccgcttgtaccgtttgctagcatgttaactgaatttttagaatcgcatatacttttgttcttatatatcactgtcgtactgctcgtaagatgtatctactttattctatccaatgttgtaacctatcacctgccaacttccctactgttttggcgcgccgcaagctgtgctcaagcatgcttcatgtttgttat

SEQ ID NO: 1676 - DNA, 1444 bp, Zea mays
  Clone ID: PAT_MRT4577_181171C.1
cccacgcgtccggtctgcctttccctctcccagtttccgtttttttaatgctttgtttactcgcggggatcatggggtaatcgcgtgggccgtgcctggctgggtttatttatgccgacctgccaattggagcaaatcccctttcctgcccctccccctccgcctttcctctctctcgctctcctcctctcctctcctctcctctccttccgcatcacacaccacgactcccaaccgccggttggctttgctgctccgagctcttcctcttccacacccgccctctctcttgggtcggcggccgagtgtctgcgtcgtccacggagatcagggatcggcggcggggtatggcgagggagcgacgggagataaagaggatagagagcgcggcggcgcggcaggtcacgttctccaagcgccgccgcggcctcttcaagaaggctgaggagctctccgtgctgtgcgatgccgacgtcgcgctcatcgtcttctcctccacgggaaagctctcccagttcgccagctccagtatgaatgagatcattgacaagtacagcacacattctaaaaacctggggaaagcagaacagccttcacttgacttgaacttagaacatagcaaatatgcaaatttgaatgagcaacttgtggaagcaagccttcgactcaggcagatgagaggtgaagaacttgagggattgagtgttgaagaactccagcaattggagaagaatctggaatctggtctgcatagggtgcttcaaacaaaggatcaacaattcttggaacagatcagcgacctcgaacaaaagagtacacaactggcagaggagaacaggcaactgaggaatcaagtatcccacatacccccagttggcaagcaatcagttgctgatactgaaaatgttatcgctgaagatgggcaatcctctgaatcagtcatgactgcgttgcattctgggagttcacaggataatgatgatggttcggatgtctctctaaaattagggctgccttgtgttgcatggaagtgaaaaaacaagatggtctgtgttgatctgggtggagctgcggcttcagcagataggcacttgtgttattgtcttatggacgacccccgactactgcaataatcttgcatcggaagcgagatcagttaacctgatttgtcatccttgtggcttcatgatgcgatgttgcgcttgtaccgtttgctaggatgttaactggactagaatcgtgtctacttttgtactgctcgtgaatcctatctactttgtgctatccaaagttatgacctaccacttgcatcggcatggcgcgccggccgtaagctgtgctcaagcatgcatgcttcgtgttatacgtgtgtacttattgggaagttgagtctgcatacaacctgagcgtagttgttgtcttacagagagaccgtttagttttc

SEQ ID NO: 1677 - DNA, 349 bp, Zea mays
  unsure (1)..(349): unsure at all n locations
  Clone ID: PAT_MRT4577_181187C.1
ggaaagccacgggcctggatccttttctttcgattttctcccggtttttaatttcactattctctactagggggggggggggggtggcccccccgatccaatcaagggccgtttcagcggggtgaataataacaacgataataatctactgacccccccaagtttttgggtnnntaatcatcgggggggatgctgcacccccaccaggagatcgagggggaatcggactcgtcgtcgtagtcgtcctcgtcgaagtcgtcgagatcgtcaaagtcccacagctcggcttgctcctcctcctcgggcatttgccactggttttgaaaaatctcgccggactccagtagct

SEQ ID NO: 1678 - DNA, 378 bp, Zea mays
  unsure (1)..(378): unsure at all n locations
  Clone ID: PAT_MRT4577_181204C.1
atgtcggcacnaggcaaggggggagcagcggcgggccgcacaccggaccagctcagctcagctcaccaagacaatcaatcatgggtcgtgcgcgcagtggcgctgccgctgcccccctcctcctgctgctcgccgccgccgcancggggctcgggtccgccgcgtcnccggcagccagggggggggtccgcaaggcttgccgcacgacgcantacccttcggggtgcgagcagagcctggggtcntacggcggggcgccgccgccacggagcccgcgggagcgggggcgcgccncgctntcngggagcgcggaccgcgcgcgcgccgcgtcngcgtacgtgggccggctgtgcggcgccagcaacgggaaaggcgcga

SEQ ID NO: 1679 - DNA, 261 bp, Zea mays
  Clone ID: PAT_MRT4577_181426C.1
cccacgcgtccgaaaccctctggactagggtttatctgggctcgcctcgttagttgttacccatctgtgtattcgattgtaaggtcgatctgtgtcacatgctagtgctgcggtcattctatggttcatcagactcatgcatcaaccagcatggactgtatgatcgatggaagctgttactcctgtcatgatttgttctaagttaatcctaaggaaaaaattgagctattaggtgctgcaaaacatacatacaacggcagt

SEQ ID NO: 1680 - DNA, 180 bp, Zea mays
  Clone ID: PAT_MRT4577_181481C.1
caaaaggacaggcagccaaatgccccaccacagcggagcccctcctcactgactcacctgcaaaaaccacttgcaaaccacacaaaccgaaaacgccagcttccctgccttcatttttagcaactttttcctttaatctcccgtggcagtcacccttctttgccccccgcgcagatttcg

SEQ ID NO: 1681 - DNA, 2620 bp, Zea mays
  Clone ID: PAT_MRT4577_18149C.1
cctcgaggctggccgggccgggcagcctgcggagatgcagtagaggccgccaggcgcagatggaatgagcgaccgggctctgctccgccgctagcctgccgccgcaccgcgccgtcgatcgccgcgccatgaacggtccccgcggctaccccctttctccaccggcaccttacccccgtatggcgtgatccaatgatagcaccaagagcgcaccttcccctctccctgacggcgtcgtcctccccgcacggcggcgcgcgcacccgcaccaagaagaggaagaaaccatgtcccccaacctggacagcgccatcaagagccaggtgccggcgctgctcctgaggcgtctcttcggcgcgtcccggcgggacgaggccaagcagctccagcggaccccggcgccggtggggaggcggagggtgttcgtgcagacggagaccggctgcgtgctcggcatggacctggaccgcggggacaacgcgcacaccgtcaagcgccggctgcagctcgcgttcaacatgcccaccggcgggacctcgctcaccttcggcgatcgcgtcctggagaacgacctctccttcttacgcccggactcgccgctactgctcacccggaacagcatcaaccggagctgctccaccccgtgcctctgccccgtctccaaggacttcgagcacaaggactgcagcggactggttgagatgctcggctgctccagcagctgtgcccgggtgaagcgcctcgtggacgacgtggtgactgccatcaggagcggcgtggatccggtccccattagcagcggccttggtggctcgtactacttcaggaacgtcttgggcgacagggttgctattgtgaagccgacggacgaggagccctttgcgccaaacaatcccaaggggttcgtcgggagggcgctcggtcagccgggcctcaagagatctgtgcgagtgggagagacggggtttagggaggttgcggcgttcctgttggaccatgacaacttcgccaacgttcctgccacggctctggtgaagataacacactccattttcaacataaactgcccggtaaatggaggaaacctggcaccggctcatgaccagcaacagcaagttaacagcaagattgcttcgttccagcagttcatagcccatgacttcgacgccagcgaccatggcacgtcaagcttccctgtcgctgctgttcataggatcggcatactagatatccggattttcaacactgacaggcacgccggcaatgtgctggtgaggaagcttaacggtggcacaggccgctttggttgccagacagagctgttcccaattgatcatggcatgtgcttgccggagaacttggaggacccttacttcgagtggatccattgggctcaggcttctattccgttctctgaggaagagctcgagtacatcagaaatcttgatccaaggaaagatgtgcagatgctgcgccgggaacttccgatgatacgtgaggcctgcctacatgtactggccctgtgcacaatcttccttaaggaggctgcagctttcggactctgcttggccgagataggcgagatgatgaccagggagttcagagggatggaggaggaaccaagccagctggagcttatgtgtatggaggccaggaagagagtagcagagtgggagcccttctctgccacagctgaacatggagaagataccgatttccagttctcggtggatatgctaggagaatacagtgatgtagtgcgatcaccaaggttcaatggctcaggttccaaagtgtccagtttcagaagccctttgtctaagctcgtcgagagcgtcgacgagggcagtgatggccatgaagatcaaaacgagtctgatcgagtcttgtatgctggatggaatacatctagcgttcctagcaaagctatgggccatagtggcaatgcctcaaaaagtgcaatgaacaggagtgccgatgaacaacttccatcaagtatgtgttttgtcaggctgtcggatatgagtgcagatgagtgggatgtattcctcgaaaaattccaggagctgctgaaagaggcactgcacgagagcgcaagggcagcagcaggtcaaaggatgaagcagcggctgggcacttcatgcaagttttgagcagggcaatagcgcatcagagaagaaaaaatatgcagtgctacttgtactgcttgcttatggagtgagtacaggatgaagatatcatcgtatgcggcaccttcaaccttgtgcaacgatctaggttgcagcagccatgtccagcaggtagataggaccacaagcatatgtagtgacggtgtggagaactgctacgcgtgtttattagctatatgtttacgaaggggaatgcttaataataaatgtttgtcagcctgtgtatattggcttgatgttagatactccagctttagcatgcaatttcttagtcgctgaaaattctttgtagcttgtgatgtgacctgtgagcagtgtaaacattgcacctttgatggaaaaataatgcttacctgttgttgaatgcaattttttagtcgctgaaaaaaaaaaaaaaaaaaaaaaaaaaagggcggccaccaacaagtgag

SEQ ID NO: 1682 - DNA, 404 bp, Zea mays
  Clone ID: PAT_MRT4577_181507C.1
ccggcaatcgcactggcatcttacctttattacccttgttcctccaacaatgatgggcggtattacacagttacctttggtgcatttattgcacaaaacataggcacacaactacaacaacttgagctatcaaaccttgctgctacttcacacagcacattcttccattcaaccaatactgtatgaactctgctcttatttgcaacacaacaactaccattagcagctatctgctgcctaccccagcaattattccattaagcactgacacattgaactatctgcttattacagctgcacagctactaccattcaccagctaactggtgtgagcacctgctaccttatgacacaaccacagttgacgacgttctaccaacacgctgtgcttaacgctggcaccc

SEQ ID NO: 1683 - DNA, 262 bp, Zea mays
  Clone ID: PAT_MRT4577_181515C.1
tgttcatagcaaccagcatgtgcgaggattcatcacacatgctgagcagctcagagccaagggtgtagacgagatccagcatatcagcggtaacgaccccttcgtcatgatggcgtgggcgaagacctatcccgagaacaagcacgtgaagttcctcgccgacggatctgtagcgtacaccaaggtgctcgaactcgagctcgatctcacggtcaaagggctggacgtgcgctctaagaggttcgctctcctggtcgacgac

SEQ ID NO: 1684 - DNA, 838 bp, Zea mays
  unsure (1)..(838): unsure at all n locations
  Clone ID: PAT_MRT4577_181634C.1
atcccctttcacttcttcagcttcctcttcctatcaagttgcctttcacttcttcggtttgctcttcttcgccaagttatcatccatcgagttaggcagtttagatcttggaggaaaggagtagctagctaggttccttttccttcccccgagccgggagagagaaaacagagcggagaagagacacacaggaaccggaggttgaccgggctaaagtaggttggagctcctggctgggccttttctcttggcgacgacatggcgaagctccacttcttcctcctcttgctgctggccgccgccgaagctattcacggcgaagatggggcgtacataggcgtcaacatcggcacggccatgtcatcggtgccggctgccacgcagatcaccacgctgctccgctcgcagaacatccggcacatccgcctctacgacgccgacccggggatgctgtcggcgctcgccaacaccggcatccgcgtcatcatctccgtccccaacgagcagctcctcgccatcggcaactccaacgccacggcggccaagtgggtggcgcgcaacgtggcggcccactacccgtccgtgaacatcacggccatcgcggtcggctccgaggtgctctccacgctccccaacgccgcgccgctcatcatgcccgccatgcgctacctccagaacgcgctcgtggccgcggcgctcgacaagtacatcaagatctccacgccgcactcgtcctccatcatcctcgactccttcccgccgtcgcagggcttcttcaaccgctcgctggacccggtgctcgtgccgatgctncagttcctgcagtccaccggcgccc

SEQ ID NO: 1685 - DNA, 712 bp, Zea mays
  Clone ID: PAT_MRT4577_181639C.1
ccacgcgtccgcacaccttggacatatatatggaaaatagcttcacagtctagattccatggcatcaaggatggggatggtggctattctgtccttgtttgtttgtgctcttgttgcttcaacatctgtcaatgctaatgtgtggcagactgatgaggatgctttttatagtacaaataaactgggagtcaatggcaacatggagatggcacaacaacaaggtggatttattggccatcgcccaagacttgcattattcaatagggcatcaaaacaactggaccgtgaaaaaagacctgtgcctagcgggccagaccccatacatcacagcatcccatcacatgctcctcagcatccaccatcatatggcaaagctccttatgaagatgacaagagcatagcatctcctggtctgtccaacccgataggtcctccaccatttttagatagatactagttcatgcaaaagtagtgagtatttatgcacctatgccaatgaataacctctaattacctacatgtattggcctggtgtttggtaaacatgaagcaataactttctcttatcgaaatacaggtctcaagaccgcctatgttgtctcagcatatgttagtgcagcatagtctggccctaagtctaggtactaggaggagggttgagttaggcacggtgagctagctataaaaaacttagccactccaatggagatga

SEQ ID NO: 1686 - DNA, 676 bp, Zea mays
  unsure (1)..(676): unsure at all n locations
  Clone ID: PAT_MRT4577_18164C.1
ngatagaggtgtgatcggctcaagcaccagctagccacctcgctgcctcgctggtgctcttccacctcctgcaccacagcgccattgcgcttccacggccagctaccgctgccggaatatacactggtggatctttaacaggttcctccggtccgatccaccgccagcttccgacgtcgtactcgggcggatcggttccacaatgggggaacggggagcagaggaggacggctcgggcggctcctccctctccctcatgtgcctggaggacggcgccgacctcgacgccggtggctccgcggagagcgccgacgacggcgagccggccgtcgttgctcacagcgacgccggtgaggaccaggaggaggagtacatggactacctcgtgtccaaggagagcagcttctgctgctccccttcctcctcgcccgtctcctccgacgccggcgccgagacgcgcccttcgtccacggcgtcgtcatccgacgagtggttccgctgcgcgcgccacgccaccgtcgcgtgggtccttgagacgcgggcttacttcggcttctcccaccgcgcggcgtacctggccgtctcctacatggaccgcttctgcctccgncggtgcatggacgtgtcagtgatgccctgggcggcgncgctgctggccgtggcgtgcctgtccctg

SEQ ID NO: 1687 - DNA, 127 bp, Zea mays
  Clone ID: PAT_MRT4577_181736C.1
gtcgtccgccttgccattaacgaaggcttggtctttcttcttggatctccactcgtccattcacagatccgttccttcagctaggggtagcgttcatctgcagcgatggctatcaagcggagcaagg

SEQ ID NO: 1688 - DNA, 290 bp, Zea mays
  unsure (1)..(290): unsure at all n locations
  Clone ID: PAT_MRT4577_181800C.1
gtgcggagccggggtccgcgtcgacgccgctgctgcggcggaggggctcgtacacgcggaccgtgtcgcacgcgcgcgacgagctcagcagcttccgctccggcctacggtggatgtgcgtcgaccactcggacgcctccagccctgccgtgtcctggctcgtcttcgccgcgctcggcgtggccgtccctgccgccgcgcacgcggcggcggcgccgcggcgcgcctacgacacgcaggtgcaggtctcgctcacgctctccgncgcgctggcctacaccaccctctac

SEQ ID NO: 1689 - DNA, 344 bp, Zea mays
  Clone ID: PAT_MRT4577_181814C.1
gtagaatagttctgcagattttatctctgtaaaaaaaaaaaaaaaaaaaaaaaaaaaaaggaaaaaaaaaaaaaaaaaaaaaaaaaaaaaaaaaaaaaaaaaaaaaaaaaaaaaaaaaaaaaaaaaaaaaaaaaaaaaaaaaaaaaaaaggggggggccgttttaaaggatcaaagtttacttccccgtgcttgcaaaaaaatagtttttttatagggtcacctaaataaaattaattggccggggtttaaaaacgtaggaattggaaaaaccttggggttaccaaatttaatccctttgcaaaaaatccccttttcgccacttggtgtaataccaaaaaggcc

SEQ ID NO: 1690 - DNA, 2279 bp, Zea mays
  Clone ID: PAT_MRT4577_181875C.1
ggcgcctcgctcgaggccgggccgggtacagcttcagcttgtattcaaagagaggcagcgcagggtgcaagaagctgtccctccctccctcccctgtgcttctgctagctaggtgcctgcggaggagagatagggatacgatggccggcggtggcatcgtgaacacgggcggtggcaaggactaccccggcaagctcaccctcttcgtgttgctcacctgcatcgtcgccgccaccggcggtctcatcttcggatatgacatcggtatctcaggcggcgtgacgtccatgaacccgttcctggagaagttcttcccggaggtgtaccggaagaagcaggaggccaagacgaaccagtactgcaagtacgacaaccagctgctgcagaccttcacctcctccctctacctggccgcgctggtcgcctccttcttcgccgccaccgtcacccgcgccgtcggccgcaagtggtccatgctcgtcggcggcctcaccttcctcgtcggcgccgccctcaacggcgccgcccagaacatcgccatgctcatcgtcggacgcatccttctcggcgtcggcgtcggcttcgcaaatcagtccgtgcctgtgtacctgtcggagatggcgccggcgcgtctccggggcatgctcaacatcggcttccagctgatgatcaccatcggcatcctggctgcggagctcatcaactacggcaccaacaagatcaaggccgggtacgggtggcgcgtgagcctggcgctggcggcggtgccggcggccatcatcaccctgggctccctcttcctcccggacacccccaactcgctgctggagcggggccacccggaggaggcacgccgcatgctccgccgcatccgcggcacggacgacatcggcgaggagtacgcggacctggtggcggccagcgaggaggccgacaaggtgcgccacccgtggcggaacatcctgcgccgccggtaccgcgcgcagctcaccatgggcgtcgccatccccgtgttccagcagctcacggggatcaacgtcatcatgttctacgcccccgtcctcttcgacacgctggtcttcaagaacgacgcctccctcatgtcctccgtcatcacgggcctcgtcaacgtcttcgccaccgtcgtgtccatcgtcaccgtcgaccgcgtcggccgccgcaagctgttcctccagggcggcgcgcagatgatcgtgtgccagctcatcgtgggcacgctcatcgccgccaagttcgggaccagcggcacgggggacatcgccaagggctacgccgcggtcgtcgtggtcttcatctgcgcctacgtcgccggcttcgcctggtcgtgggggcccctgggctggctcgtgccgtccgagatcttcccgctgggagatccgcccggcggggcagagcatcaacgtctccgtcaacatgttcttcaccttctgcatcgcgcaggccttcctcaccatgctctgccacttcaagttcggcctcttctacttcttcgccggctgggtcgtcatcatgaccgtcttcatcgccttcttcctgcccgagaccaagaacgtgcccatcgaggagatggtgcttgtctggaagtcacactggttctggaaaaggttcatcgccgacgaggacgtgcacgtcggcattggcaacaaccacccggccaaaaacggcagcgacaccaagggggccgacgcgtgaacgtgatctcaacatctatattccatctacagtcacaactgaaatgtacatttaggcttccattgttccatcaactagtagctacatgtcctcctagtaaagtaccagtgtttgtttgtgtaatgtttgttacgcccattaaattcttcttggattggatgaactacaagcaaagacattccctggatgcagtacaatgataacagcagccagtaggcaaacacattccagatggaagcagagattgccttttatccctcaaaatgccctccgccaacgccaagctcggcggcatgcagtagccatggccgtccctcgctgctcatgttgttgggcaataatctacccatccagtattatttttgggggcttaccgggaaatttgaaaatcatcaccaatgtattataatcgtctcattaggtaggatgactggatgatgacgaatagtcaactagtcttcgtcccctgcctttttttttattctgtgcgggatactgaatgtggagtataattatgtttgcaccagatcaaaccaaatatgaatatcaattgcaagttgccctgc

SEQ ID NO: 1691 - DNA, 279 bp, Zea mays
  Clone ID: PAT_MRT4577_181965C.1
gactcgtgggtcgatacaagactctatactgagtcgtattaccacctcgccgtccctcacgttcctttcacggactcgccagcgcctctccgcgccgtgatctagatgcaggttgttcagcatgggtctggtgaaggaaggcgtcgacatggaggagggaaccctagagatcaggatggagtagaggactgtaactggtgtggccgggcctctggttaacctggggaaagtaataggcccacagtaccaataatctgtgaacatccgacctggagatgg

SEQ ID NO: 1692 - DNA, 413 bp, Zea mays
  Clone ID: PAT_MRT4577_181993C.1
actttcttatttctgggaagccacaaacatcagataaaaaactttattattgaactataactcataagaaatctaaaagagggcaccaccaatgatgggttgctggtagaacactgatgggtttgacaaagcaagccggttgagtggcaataagttgctgcagatgtaagagggtgccagcgttaggcgcaacgtgctggaagaacggtgacactgtggttgcgacaagaaggtagcattggctcacaccagctagctggctgaatggtagtagttgttgctgctgcaaataagcaggagagctcaatgctgctagctggctgaatggaagaaattgcttggggcaagcggcaggtatctggcttaatggttattgtctggtggtgccaattagtagcagtgttccatggagc

SEQ ID NO: 1693 - DNA, 404 bp, Zea mays
  Clone ID: PAT_MRT4577_182189C.1
acggtccgttcgctcctcctcctcccagccgcagctggtcgcggctgctgcggtccttacaagtgggctgctgctgctggcggcggctgccgaaacggcgtcggcggctgtgatctgcgacaaggcgacgtcctcggtggcaccttgcctcgggtacgctatgggcatctcggcgtctcactccgcggagtgctgcaccacagtgcgctcgctcaacatccgcgcgtagtcggcggctgaccggcaggccacctgcaactgactcaagagcatgactggccgtctcggcagcctcgtcaacatggccaacgccagcaacatccccggcaagtgctgcttctccgtcgacttgcccatcagccccaccgtctactgcaccaagatcaactgatcgatggaaccat

SEQ ID NO: 1694 - DNA, 891 bp, Zea mays
  Clone ID: PAT_MRT4577_182206C.1
ctcgaggccggccgggccgggggatatagacgttgtcagttgtcattgctaccaacctcaggtcaccagcaccttctccccacacccccgagttcgagtgcaaccgaagagccaagaggagctgtccgcgtcgtttcgactcccgccgccgaaaggccgagcccgtgcccgtgctcgcaaccctaatcccctttccccgttgcctctcgccgggaagaagagggagccgcgtggcgtcgccagccagcacgcgccccctcccttcccggctccctccgcgccgtgggcgaggcgcatccaacccgatccgccctcaccgcgaggcggaggacctggaggggagggagacaggtctggtgcaccctctctcgtccgcgccggcgagcgccaagtgtcccccacaggcttggctgaggaagacccgtgctctgtgggtcttggacactgcttcaccatttaccaagtcttgagttattgctccgttgttagacaagaaatcaaactctctggccaaacacaatgatggcacaagcctgtaagaagaggagaggagtttatataagcactgaattgggaggctctgatacagattctgatgttgagggaagcaaaccctctaaaaaatctggggtgacatcaatttctacatgcgagcatcagtcatcttataatctcaaggctgcaagtatgaaaagtagcaggatgataaggctgtgtggaaatattgtaaggaagctcatcgatcacaaaggtggttggcttttcaaagatcctgttgatccagatctatataagattcctgactactttgatgttatccgcaacccaatggatttgggtactgttaagaataaactcacaaaaaagaagtatgtaagcattgaggagttc

SEQ ID NO: 1695 - DNA, 253 bp, Zea mays
  Clone ID: PAT_MRT4577_18220C.1
acaacacctatagtgagtcgtattatcagcgacgaccggaactgtgtgaaggagtccagaggtacggcaagagtgacaacagtcgctgtcgcagatctgaaaggcagcatgggtgatgcagtagtttgtgtgcaacgtgatcctgaccagaggcttgctcgacgacctgttttaggcagcactccagaccaagtaattgcacccaaaggtgtgaagccaacattatcagcagatctcaatacacttgccttag

SEQ ID NO: 1696 - DNA, 558 bp, Zea mays
  Clone ID: PAT_MRT4577_18233C.1
gttggtttatgctccgcctacgggccggggtcgggtacctgagggtctacgaggttcggtatcgtgggtgagcggatcagagatggcgcgatgccgatgttgagtaccgatgattcatcggcggcctcgactgggccacggacgaccacttcgtccacaacgccttcagcacctacagcgaggtcctcgagtccaagatcatcctcgatcggatagacgcagcatgtcccgcagatactgctcattcaccttctccacggaggaggcgatgcggaacgcacatcgagggcatgaacggcaaggagctggacggccgcaacatcaccagaaactaggcccaatcccgcggcgggcgtggaggctgaagcggcggcgggtacggcggaggcctgggaggcagtagctacagcggtggcagacgccgtgatggcagcggcagctacggcagtggcagcggctaatgtggtggccgtggccgctacggtggtggtggcggtacctacggaagtcgcaaccgtggcggacgctacggctactccgacgggaactggaggaact

SEQ ID NO: 1697 - DNA, 259 bp, Zea mays
  Clone ID: PAT_MRT4577_182340C.1
tacttctcatgcttcgtccgccagctcatgacctactgattccggaagtgggtgccggacgggttgtgactctgggacgagaagttccgtcgaggcgggcaatgcgtcctgtccggcatccgtctctgcgagtcaacgacgccgcagccgtccgagtacggcggcggcatcgtcgtgaacagctagtgccctccgccgttgccctgtcctcctcccgcgtcggtcatgatgtcttgcggtgtctttggtgctttcgctg

SEQ ID NO: 1698 - DNA, 318 bp, Zea mays
  Clone ID: PAT_MRT4577_182430C.1
cgggttcgtgaggttctccgcggttcgggtgggtcgttgagcggatcgaggagggcggcatctgatgtttagtaccgctgcttcatcggcggcctcgcctgggccacggacgaccactacctacacaacgccttcagcacctacggggaggccctcaagtccaagatcatcctcaatcgggacacgcagacgtcccccggcttcggcttactcaccttctccacggaggaggcgatgcggaaccccactcagggcatgaacggcacagaactagacgggccgaacatcacccgtaacgaggaccagtcccgactctga

SEQ ID NO: 1699 - DNA, 461 bp, Zea mays
  Clone ID: PAT_MRT4577_182672C.1
actacacgaaacgaccggtgggttgtttttatttattcactcgcagaacacaacacactgagtgggggggctcacccaacagcacaatgtacagaccatgaccacggaagactgaacagaacacgtcccccccagacctaccaaaaaaaaacaaccacaggaccccccacaccagtcgcgtcgttgaaacccaaaacccgaccccccgacccgaacccgacgcgaccattcacctggggtgcatgtttttttcagccggagatttggatgcttttaacctcgggctttttgacctcggccttgggcacggggaccgtgagcacccctttctccagggggggccttaccttctgcgtcttggggttttccgggagggggaagcccccaacaaactggccgttgttgccctccacccggtgccacttgtggcccttggcctccttttccctgctgggccgccc

SEQ ID NO: 1700 - DNA, 463 bp, Zea mays
  Clone ID: PAT_MRT4577_182740C.1
aacccgaaaaacaaatcttattcataaacaaaatggggtcacaggtttttctccatacgtacatgcccattggggggggcgccgctgaccccctagagctgcatacttacttattcaaactggtccagcctggggcaacgtcgggaggtcacatgcttacagaccacaaattttcataacaatagcttggcttggctgcttcacagaataacccaacgacaacccccaaattgcgaccatttaaaataaacaactcaaaagcaaatcgaccccaaaagcccgtcttactcattaagcactcccgccttttcctccatgggatccgcttcctcctcccaacataaaaaattagccagtttggagtccttcttcataggaggaggagcactctccacgttctcgccgtcaaagcaggggaaaacaaatttgggcgagggagcaacagcgttttcagcagcacaaa

SEQ ID NO: 1701 - DNA, 1744 bp, Zea mays
  Clone ID: PAT_MRT4577_182743C.1
gccgggaaaaaaaaaaaaaaaaaaaaaaaaaaaaaaaaaaatttaaaaaaaaaaaaaaaaaaaaaaaaaaaaaaaaaaaaaaaaaaaacccctttgggcttcctcattctagtagttaaggattttttttctgaccctttgattttgaccaatctttttggcctgctgtttcctgataatcgaccggttccccagttttgctccttgcactcctccctccatctccagcattgggttctgattcacctgctccaagggctgttctttttgttgctgaggcttccccggcctaagttatcgggtttgagggctatgaaaagcgccttgaaatcacattctttgaggcacctgtttttggggaccctcatgggcgtggtttgcgtgccctctccagggcccaaatggactttgttctggatcttgcacggggcacaattgtgtccgagctctccaacaaggatttcgactcatatgtcctttctgagtcaagcttgtttatctatcctgtgaagattgtcatcaagacctgtggcactaccaagctcctgctcaccattccaagaatccttgagcttgctgaagagctgtctatgccacttgctgctgtgaagtactcccgtgggacgttcatctttcctggcgcacagccagccccccacaggagcttctctgaggaagttgctgcacttaaccgctactttggcggcctgaaatctggtggtaatgcttatgtgattggagatccagcaagacctggacagaagtggcacgtcttctacgccactgagtacccagagcaaccaatggttaaccttgaaatgtgcatgactggtctggacaagaagaaagcttctgtctttttcaagactaatgctgatgggaacacaacatgtgccaaggaaatgacaaagctctctggcatctctgaaatcatccccgagatggagatctgcgattttgactttgaaccctgtggctactccatgaatgcgatccatggctctgcattctccacaatccatgtgacgcccgaggacggtttcagctatgccagttatgaggttatgggcttggatgccactgctctgtcttatggtgaccttgtcaagagggtccttcggtgctttggcccctcggagttttccgttgccgtgaccatctttggcgggcgtggccatgccgggacatggggaaaggcacttggtgcagaggtctatgactgcaacaacatggtggagcaggagctgcctggaggcgggctcctcgtataccagagcttctgcgctgctgaagacgctgttgctacctcgcccaaatctgttttccactgctttgacggcgagaacgtggagagtgctcctcctcctatgaagaaggactacaaactagctaatcttctctgctgggaggaggaagcggatgccatggaggagaaggcgggagtgcttgatgagtaagacgggcttctggtgtcgatttgcttctgagttgtttattttatatcgtcgcaatttcgtggttgtcgtttggttattctgtgaagcagccaagccaggctattgttatgaaaatttgtcgtctgtaagcatgtgaacttccgatgttgccacatgctggatcagtctgaataagtaagtatgcagctctaggtggtcagctgcgtctaccacaatgagcatgtacgtatggagaaatatctgtgaacccattttgtttatgaataagatttgttttttttcgagtt

SEQ ID NO: 1702 - DNA, 1342 bp, Zea mays
  Clone ID: PAT_MRT4577_182747C.1
ggccgcttttttttttttttttcgaaaaaaacaaatcttattcataaacaaaatgggttcacagatatttctccatacgttcatgctcattgtggtagacgcagctgaccacctagagctgcatacttacttattcagactgatccagcatgtggcaacatcggaagttcacatgcttacagacgacaaattttcataacaatagcctggcttggctgcttcacagaataaccaaacgacaaccacgaaattgcgacgatataaaataaacaactcagaagcaaatcgaccccagaagcccgtcttactcatcaagcactcccgccttctcctccatggcatccgcttcctcctcccagcagagaagattagccagcttgtagtccttcttcataggaggaggagcactctccacgttctcgccgtcaaagcagtggaaaacagatttgggcgaggtagcaacagcgtcttcagcagcacagaagctctggtacacgaggagcccgcctccaggcagctcctgctccaccatgttgttgcagtcatagacctctgcaccaagtgcctttccccatgtcccggcatggccgcgcccgccgaagatggtcacggcaacggaaaactctgaggggccaaagcaccggaggaccctcttgacaaggtcaccataagacagagcagtggcatccaagcccataacctcgtaactggcgtagctgaaaccgtcctcgggcgtcacatggattgtggagaatgcagagccatggatcgcattcatggagtagccacagggttcgaagtcaaaatcgcagatctccatatcggggatgatttcagagatgccagagagctttgtcatttccttggcacatgttgtgttcccatcagcattagtcttgaaaaagacacaagctttcttcttgtccagaccagtcatgcacatctcaaggttaaccattggttgctctgggtactcagtggcgtagaagacgtgccacttctgtccaggtcttgctggatctccaatcacataagcattaccaccagatttcaggccgccaaagtagcggttaagtgcagcaacttcctcagagaagctcctgtggggggctggctgtgcgccaggaaagatgaacgtcccacgggagtacttcacagcagcaagtggcatagacagctcttcagcaagctcaaggattcttggaatggtgagcaggagcttggtagtgccgcaggtcttgatgacaatcttcagaggatagataaacaagcttgactcagaaaggacatatgagtcgaaatccttgttggaatggtgagcaggagcttggtagtgccctcg

SEQ ID NO: 1703 - DNA, 1731 bp, Zea mays
  Clone ID: PAT_MRT4577_182762C.1
cctcgaggccggccgggagatatagcactcgctgctcgccttggtcccaactacccgctccctgtccagcgtccagcgtgcaaccaacacctcccacgagtccgcgacgcgtcagcgtcaccgtccgtcgtcgcaaacgagcccagtggcgattcgctttcgaaccgcactcgccctcctccgttctcttctctccctcctcctatagttggcttctcgcaaccctctgctttcgatcagctttctccgctccccatttccctctccaactccaatccatggcctccacggatcgctccacgccggcggaggacgagcaacagcagaagcgcccgtctctcttctcgccgtaccagatgccccgcttccgcctcacccaccggtgagcctccatcgcggtggtgctggcgccgatgaccaggtgcagggcgcccgacgcgatcccaggccccgcgctcgcggagtactacgcgcagcggtccacggagggcggcttgctcatctccgagggcaccatcatctcgccgtccggccctgggttccctcgtgtccctgggatatacaatcaagaacagactgatgcatggagaaaggtggttgatgctgttcatgccaagggagctatctttttctgccaactatggcatgtaggccgagcttctcaccaagtatatcagccgggtgctgctgctccgatatcctcaactgataagccaatatcatcaagatggaggatactgatgcccgatggatcctatggcaagtatccaactccgaggcgcctagccacatccgagataccagaaattgttgagcaataccgtcaagcagccgtaaacgccatcaaagcaggtttcgatggcatcgagatccatggcgcccatggctacctcatcgatcagttcctcaagggcggtatcaacgaccggactgacgagtacggtggctcactctccaaccgttgccggttcctcctggaggtgacccgagccgtggtctctgcgataggggcagaccgcgtcgcggtccgagcgcccccggccatcgaccacctcgacgcctacgactccaaccccctgcagctcggcctggccgtagtggaccgcctcaacgctctccaggaggagaccgggcggctggcctacctgcacgtgacgcagccacggtacacggcgtacgggcagacggagtccggccagcacgggagcgccgaggaggagagccggctgatgcgcgccctgcggggcgcctaccgcggcacgttcatgtgcagcggtgggtacacgcgcgagctcggcgtggaggccgtcgagtcgtgggacgccgacctggtgtcctacgggcggctgttcatcgctaacccggacctggtggagcggttccggcgcgacgccccgctgaacagatacgtgcgcaagacgttctacaccccggatcccgtcgttggttacacggactacccgttcctcggccagcctaaggcgcgcatgtgattattagttaggttggtaactataagaggcggactattgttcgtgtattgtggcttgagaaaataagcaaacacatggtggtagtgctgtgcaataagccttaggtgcaaacatgagcctcctgggcctttagataatgatctaattatagatgtaattatagttttgtcaagaagttaatgtttatttgcacagcaatcagcagtcatctctcataaaaaaaaaaaaaaaatagtta

SEQ ID NO: 1704 - DNA, 2810 bp, Zea mays
  Clone ID: PAT_MRT4577_18278C.1
accgaatccccagaccaaatcgccgtcgccgtcgcatcgcagcatcgggagtcccagggtcccggaccgaatccatttccagacacccaaggccaagatccatcgctcgttccaacctgcctcctccttcttctgcttggtcgtctgatctcgttcaccattcgtgtccaatccgatccatccaaccgctgtgaatgatggcgctcaacctgtcccaccagaccggcgcggccgtggcggcggcaccggcggcgccacgagcggccgtcgtcgcggcggcggccacggcgccacgctcggccgtcgtcgctgcggcggccaccgtggcgccgtcgtccgtgtcggcgcccgcccccgctccggcgctccagctgcagacgatgacggtggacccggcccccgtgcaggcgcccgacgcggtgaagcccgcccgcctttccccgccgtttcttggatttctaggatccagacaaccgcccttgtgagcctgccttcctgcctactacctgcgtacgtacaggagggtccttgcttgggtgatccgggtgcctggtttctcggttccgcggcttccgctgctgttggattcgccgagccggagccgccggagatgaccgtcgacgagctgaagctgcaggcgagggccagcggcggccacggcgccaaggaccagttccccgtcggcatgcgcgtgctcgccgtcgacgacgacccgacctgcctcaagatcctcgagaacctcttgctccgctgccagtaccatgtgacaacaacgggacaggcagccacggccttgaagctgctgagggagaagaaggaccagtttgaccttgtgatcagcgacgtccacatgccggacatggacggcttcaagctcctcgagcttgtgggcctcgagatggacctcccggtcattatgctgtctgcaaatggggagacacagacagtcatgaaggggattacccatggagcatgtgactacctgctgaagccagtgcgtattgagcagctgaggactatatggcagcatgtggttaggcggaggagttgtgacgccaagaacagtggcaatgacaacgatgattcgggtaaaaagttgcaggtggtgagcgctgaaggtgacaatggcggtgttaatcgcaacaagagaatttcacgcaagggtagggatgataatggtgatgacggtgatgattctgatgacaacagtaatgagaatggagactcgtcgagccagaagaagccaagggttgtgtggtctgttgaattgcaccgaaagtttgtggctgctgtcaaccagcttggcattgacaaggctgttccaaagaaaatattggatcttatgaatgttgagaacatcacaagggagaacgttgcaagtcatctgcagaagtatcggctgtatctgaaaagactcagcgcagatgcaagcaggcaggctaacctaactgctgcatttggaggaagaaaccctgcttatgtgaacatgggactagacgccttcaggcagtacaatgcatatgggagataccggccagttccaaccactaaccattcacagccaaacaacctccttgcaaggatgaactctcctgcatttggtatgcatggtctgctgccttcgcagccacttcagattggacacaaccagaacaatctgagcacttccctagggaatgtcggggggatgaacaacggcaacctgatcaggggtgcgcatatgccactgcaggatactagcaaatgctttcctactggcccttctggtaattcgttcgcgaacatatcaaacagcacacaactggttacgacaaacaacttgccattacagtctcttgagccaagcaaccaacaacaccttggtcggctgcattcctctgcagaccctttcaactcatttgttggtgagcccccccagtttgcagatcttggaaggtgcaacaccacctggccaaccgcggtctcatcatccaatgttcaggagattggccagaaggacaggatcgtgaataggcccaagcttgagcctctctcaagctttacagaagcatccagtcagatccctttgctgggaagtgaaatgcagagccaccaagtagcatcactagccagcaacggtcttccgatgccgttcactcaggaagcggtgcccttcgcttatggaagcagcacgaactcgagagagatgctgaataacaaccttgcgcttagtaattcaggcgtcaactctacattgccgaaccttcgcatagacggttctgttgttccagggcagacactgggtggtagcaattcaggtggttgtgttgtcccccctctgcaagatggcaggattgatcaccaagctgtcagcagtcatctaaactacaacaacgaactcatggggacaggtaggctgcaaaggggacttagtggtggtctggatgacattgtcgtggacatgtttaggccggaccgcgcagacgatggcgtctccttcattgatggggactgggaactggtctagcaagtttcagttctctacatcaagtctgccttcgtgtgagattttccgcatttgtggttgtggaggggttcggcgcttgattggtccaaagttgtttatagtagcaagattgcatcacaaatgccctttgcatttggtttttcagtttagcgaccaggttccagtgtcacgtccgaatatcaactatgtggtatttgctaccttaactcgtatggctatgttttcaagtcaggtgttaactgtggctatcgtgatatatacagcatggttatgagccaaggaatgctgtcctgtttcctcttgg

SEQ ID NO: 1705 - DNA, 469 bp, Zea mays
  Clone ID: PAT_MRT4577_182851C.1
cgcacacgttcgtcagaggagtacaagtgctggtaccgtcaccatgttccagaagtgctcaggcgcttctatagcttcccttaatgcctagcacctctaaccaacggtctctttggaatgtgagaacccacttcttcaaccctacaagatccaacatgcaatcgcagctgtcatataacctcaatcacccttgatacttcaacaatcattagccgtattacagcagctacctttggtgcatgtattggcacacaacatacaggcacaacagctactacaacacgtgctatcaaaccttgctgcctactctcagcaacagcagtatcttgcatttgactatctagctgtattgaactctgctactatttgcaacatcatcaactaccattcaaccagcttcctgttgactacccccagcaataacttccattcaaacaactggcagcattgaactctactgcttatttac

SEQ ID NO: 1706 - DNA, 414 bp, Zea mays
  Clone ID: PAT_MRT4577_18325C.1
cattgctcacaagtcaaacctcatgttgtgtgttaggacgggtcttcatctctgatgaattcgatgatcttcttccgaagtacctcagctttcttgatgggtatggttgactcatacaccttgcccctcaatgtgtcccgacaaacgcttgaacagcatagcagtgtgaagaccatcaagaagaaactgatccgcaaggctcttgacatgattaggaaacttgctgaagaggatcctgatgagtacagcaacagacaaaagactgatgatgagacgagtgcaatggaggagaagaagggccagtgcaccaagttctggaacgagtttggctaatccctcaagctgggaatgattgaagatgctacaaacaggaacctggttgtgaaacttttcgaatttgaaagctgcaactta

SEQ ID NO: 1707 - DNA, 2020 bp, Zea mays
  Clone ID: PAT_MRT4577_183348C.1
taactcaaaaaaagagatcggattagtttttttttccctaaaatcatgctctacactacatcatacaagactggctactaatattgaacaagctaaataaatatgttctgagattccactaatgttacaagttacaacaacaagcacaccgtgcataaacatacagcaacttagaagatgctccaagtcctagccaacaaaggaaagggaaagaaaatgacttctaggttttcacgtctccttttggttgaccaagaagagatggtcggtagagtgaatggccttgtgccatctcaattctttcgcgtggatcatacattgtctcatctcttatagcctgaagaatcgaatcagcaggacggtccctcgtgatcagaatcctatgtagtgcttttaggatcgggcacatctcaaccggcgcaacagatctgttggcttctggatgcatgacacttaagctatcctgactaagaagctcataaaacgcatcaactgcagagacaccctgaatggtcccttttcctttaatactgtcacccatttctaatgtcaattcacctttagctaacttctgcccataccatgcattacgacctttcaacaatgtgacataagtgtcagctaataagggtccagcaagtttttcaggttcttcttccagaaggtgtgtgatgtagatcatctcagatgtgcaaagtgcaaagtaaacagatttgctggttgcactctcgttggttagtgcagctaccataccagcaccaatagcatagacattttttaagccacccatgacttcatgagtgatgagatcactgttatcccacacaataaaatgaggctgcctcaaaaactttgcaaggggctttctccatttgtcagctccacaaatacgtgcatttgcatattctttgttgtaaatttcagaagcaatattaggtccgccaagataaagaatattctctgatggaactccagttgcattgctaatcatctgcgtgggagttatgatccgtgggagtggatccagcgaggcctcaattcctttggcgagggagatgatgatgggggcagtaatcctctccttccagtacctcctgatctccccgaacacctccctggtgtcggtggaaggcaggccgttgacgacaatgtcagcgtcccagacggcctcctgcaggttggtgacgaccttgagcgggcagagcggcgtgtcgatcatgttgaggcagaagccgtccctgagtatctcgtcggcgtagagcgtgcggtcgccgaggcgcgcctcgacgtacttgaggtaggcgcagcggcggatcaggcggcgcaggacgtcctcgcgcgcgttgatgacgtcgaagaggtgctcggcggtggcgcggtcgacggcgcggcccgggcggcgccagatgcggacctgcgccttgtcgcggaggtggccgtacgcgtcctgcagcagcgcgcagaagacgctgccccaggcgcccgccccgacgccgacgatccggagcgggtcgccgtccgccttccccagctgccgccgcagcaagtccagcttctcctccaccacggccccgttcgcatggccgtccggctggcccagcgcctccgccccgcccattgccctgatctcctccgcctcttcctctctcgccgaaaacgaggcaggctacataacccggtctgtctcgttcggcagaagaggagagacggggaaggctggattaagcgacggcagcaaagctataataactaactcggggagagagaaaggagcggacggcttttcttttggccgaaacgagctcggatcgacgcgaattcgggtgggtttggccgccgaatcgcagcgaggcgaagcgtcggccgcgacggccggagagcccgagggagtcggggcttgctgccggcccgccggccctgtcgcggttgccggttgggttggtgcgccagtacacgtcgcctcgggctctcgatcagctcggccagattggcgcctgctgcccagtgcccacaaaaaaga

SEQ ID NO: 1708 - DNA, 389 bp, Zea mays
  Clone ID: PAT_MRT4577_183709C.1
cgacccacgcgtacgctctcctgcccaccgccatcgcccctcctacgctctgcgctgccacagcctcaccccggcgcccccgccgattcacgtaggcctttgttggaaggaacgatggagcagaccttcatcatgatcaagcccgacggcgtccagcggggcctgatcggcgacatgatcagtctccttcgagaagaaagggttctacctcaaggggatgaagctcatgaacagtgagagggccttcgcgcagcagcactacgctgacctttacgacaagcctttattcactcggttgaacagatacattatgtccggccccgtagtggcgatggtgtgagaggcgaatgacatcatgttgactggccgcaggatcattggggccacca

SEQ ID NO: 1709 - DNA, 445 bp, Zea mays
  Clone ID: PAT_MRT4577_183795C.1
agcaacgtaaaaagcacaatagtgtaccaactatggctgccaaaatattttgcctccttatactgcttggtctttctgcaagagctgctacagcgaccattttcccgcaatgctcgcatgctcctatcacttacatacttcccccgtacctatcaccatccgtgtcttaagtatactaaaacccaattcttcaaccctacaggatccaacatgcaatctcatctggcatcttacctttatcaccctcagtcctccaacaatcatcaaccctattacaacacttacctcttgagcatttattggcacaaaacatcagggcacaacaactacaacaacttgtgctaacaaaccttgatgcctactatcatcaacagcagcttcttccattcaaccaactaagttcattgaactctgcttgttatttgcaacatcaacgactaccatt

SEQ ID NO: 1710 - DNA, 353 bp, Zea mays
  Clone ID: PAT_MRT4577_1837C.1
aagtatgctcttgacgaaagcaagctattcataaacgacaaataaccttgagcaaatgcgcttactgctggtaatccgataaggagagtcaacaagacaaaactgtatttggcatcgcacataaactcaccccttttcgctacaccgttgttcttgaccagaagcaagcagctccttcaatcccccctcatctcaggcgataagcatgagaaaacctgctacgcgactgcatatatgataatgcatatgcgtgcaaaagataattgacaggccagtgtagcgaacttcatatcgcactacgagccccagtgagctgcaagccttgtgcatagttctcatcctggacaggcttg

SEQ ID NO: 1711 - DNA, 1995 bp, Zea mays
  Clone ID: PAT_MRT4577_183825C.1
cattgggtacctcgaggccggccgggagctgcaaagtccggacaaagctcgcgccgcccaccgcacccgatccgcctcgcccaggcgtgctgccgtccgctcccttctcccgcgccgtcgcctccgcctacgcccgggccgacccgctggacccagcgtgcgccgctccactcggacgcgccgccgccctctcgggttgaggcggaggtgcttggggacccgcctccatggcgagcgccggcaacagcggcagcggggacgacgatgcaggagggaagctcctggcggatcgctaccagaagggcgaggtcctcggcgagggcacgtatggagtcgtcttcaaggccatcgacaccaagactggaaatacagtcgcggtaaagcgaatccggataggaaaggacaagaaggaaggtgtcaacttcactgcgttgagggaaattaaactacttaaggagctgaaagatcctaatattatagagctgattgattgtttcccttacaaggaaaatttgcaccttgtgtttgagtttatggagaccgatctggaagctctcataaaagataagaacataatactctctccagctgacacaaaatcatatgtccagatgatgttaaaaggtctagcgttctgccataagaaatgggtgctacacagggatatgaaaccaaataatttactcattggtgccgatgggcagctcaagcttgctgacttcggtctggcccgtgtgttcgggagtccaggaaggaacttcactcaccaggtctttgcacgttggtaccgggcaccagaattattatttggctcgaagcagtacggatctggggtggatatttgggccgctggatgtatttttgctgaactgcttactcgcagagcctttctccagggttctagtgacattgatcaacttgggaagattttcgcagcacttgggaccccaaaatcttctcaatggcctgacatggtttatcttcctgattatgttgaataccaatatgttgctgcacctccactacgtacgttgtttccaatggccagcgatgatgctttggatcttctgtcaaaaatgcttacctatgatccaaaagcaagaatcagtgctcagcaggctctagaacacaggtacttttcatcgttacctgcaccaacaagaccatcgcagcttccaaggccacgtcggaaaggagatcaagggaataacaagattcctgatctcaacctgcaggatggccctatggtgctctccccgccaagaaagttacgtagggtgacagcgcatgaagggatggaaggtatgcacaggacagataaagtggacgaacatccttctgggatgaggcacaccgatgacatgcccagtcagagttctagaattccaatgtcagttgatgttggggctgtgtttggcacacgacctgcacctaggccaacattgaacagtgcggacaagtctcgtttaaaacggaaacttgatatggatccagagtttggatacgcggagtagaaggaacacatgtttacatgcaccattcttttcttattggggatgttgatttttaaaataagattctgacacaatcaactgagatgttaccgtcatcgcctcacgaagaggaaaactgaagagagattattctaatttatcccgagtcacatagggtattacagctaaccaattccgtaaggcaggctcttgaaaacagtagactcaatgggatattcatgagtggagagtgttatggggaattggaggatggaaaagcttgctccatgcgtgtttgtacgtgttttgccaagattgtgctgaagcatctgatctatctactgattctctattttccgtactgtcaattcccgttcttgtatggacagagctttgagcatgttttcagtcagacaccttaggcagtgattcttattgtacaacttatatcatctgacatttcttttgagatgattaaacaatgcatggcgaaaaagggggg

SEQ ID NO: 1712 - DNA, 296 bp, Zea mays
  Clone ID: PAT_MRT4577_183858C.1
ttttcttttggtttttcggggcaacaaaaagcacctttgtttccttaggattaacttataacaaatcctgccaggagtaacaacattcatcgatccacagaccatgctggttgatgcatgggtctgctggagccgtgcatgaacacagcactaacaactgacacacagcgaccttgcaatcaaaaacacagatgggcgacaacaaacgagacaaacgaacataaaccctttggactagggtaaacatcacggcggctaccaggataacttgggcggccgggcctaaccggtaagtt

SEQ ID NO: 1713 - DNA, 3647 bp, Zea mays
  Clone ID: PAT_MRT4577_183903C.1
gatgacgacgccaagccaagggtctattttttgaaataaaactgcaacggcataattgtgcaaaaaaaatccaaaaaggactaaaatgcaaaaaaaaaagttgggctttttcacagctcacaggaactctactcttctaaagctcatagctaaaccaaccagactttgcaccttgagttctacaaaacagctctttaaaagatacaaggatcacaatatcaaataaaaaacatgctcagagaattacactagcaataccacagtagttatatccaacttgagacatttcaaaacctttgctactgcctactggccggtctaacaaagaacaggagattaaatccaagatgcaccagaattatgccgctgtgacaattctccgtcgtacacaaagatcatcttacatataagcaggttcctagctaagtacaaggtaataaacatacttatccaaagaagcaccgtggggctctaaaccctcgtacaaacattttgttaagttgctgcccccagagtgtcggattttgggtcagccagcttctgtgttgtaatactacaaataaggcttgtgtgacctcgcaaaacagagaaactggctccaaagggaaatgagaaacaagcagagggccaataaaaccatgatagggggcagttggcatcacgatgctgctaacttttacttatcaggtagacgtctccccgttctaagcatcctccagctttggttcaagttcatcagagagatggtttggctctatcgacaaagagcttcctgcttttctcttccgggctagcatgacttctgatgtaggtgcctcatcggtgagagaagcttcttcactggcatcgccctcgtgttttgtagcaactgcccaggctatgggtttcacttcttctggttgaaaagacttagaggcaatcatacttgcttcatcacttggatttatcaacttcggtttctttttcacatagtcctgccgtagaggtctaggtatctggaacgaaaactgagctaaagttacaccctgagcaccatactccggattctcttggaggaacctatcgacttcaaccagagacctaagtttccttccagtaggagaggtatagtatacatcagcaaatttggtacccccttcacctcttatcctaatctgcctttcccatccgcgagggggttgtgcaatattgggtttgtcaatagcccaaagcctgctaccatcctgagatatatcttctgggtcattgcatgttacatcaggtctccattcacgagctcttttgcatacaaaaggttcctctataatacgttcacgaatttcttcatacttctctttcgttggaataagcctccatttaaaacatttagcacattggacagtgaatgctccaatagatggcgatattccccttgttatgattgacttctgcaaacggttttcccccagttcatcttgctctttatctcctgcttcagagttgaaaacgaccatttgatttgatgcagcttctgaagaaaaaccatcattgtcaaatcgggggccattactatcagaaggcaccacaatatgactgttctttgacgattgaggagatttagaagtttccatcggttttgtacaaattattagagcctgggtacccctgtattttttgaagagagactgtgtcgaactcaggaccttcggctcagtgggaagccttgctttaaatgcagttgtgatggcttattttatgcttcgcagcgaacgaagaaatcgatccgagcccggacggatctctaccacgccccgacccagtgtctacgatttgagcatgcagtaggcccccaacggcgggctccgaagatatcgaggtcggggggccgggggcggcgggggaacggggagggagtgctccggcgaagaacagcggggtttacggcggagccgcggaggggagggattgaggatgggagtgcttactcgcgttctccgcccacgcgtccgcccacgcgtccgcccacgcgtccggccccgcatggcaccccaggggcggagagcgacgaggagatacggcggggtgccagagatgggcggcgcgtcggcgtcggcctcgtcgggcgccggcgcggacgagcgtcccaagggggaggacggcaagcaggggcaggtggcggcgggggcgcagcctccagcgggcgggaagaagcgcgggcgcacggcgggggacaaggagcagaaccggctgaagcggctgctgcggaaccacgtgtccgcgcagcaagcgcgagagcggaagaaggcgtacctgacggagctggaggcgaaggccaagggtctggagctccgcaatgcggagctggagcagcgggtgtccacgctccaaaacgagaacaacacgctccgccaggttatagatgttagtggaaaagaattcaaattcacctgggcatctggacgtggcgaattgtgtgatatttatgaagaacgtcagagtggagaggatggaaatgggttgcttctggagtgtggctctacttggcgcaagtgaaccctatagcctgggcagttcctacaaaacatgagggtgatgccagtgaagaagcttcttttgccgatgagacacttgcatcagaagtagtgctaacccggaagaggaaaataggaagctctttgtcagtagagccaaaccatctctctgatgaacttgaaccaaagttggaggatgcttagaacggggagacttctaactgaaaagtaaaagtgggcagcgtcgtgatgccaacttacccccctgccatggttttattggtcctctgcttgtttctcgttttccttgggagtcagcttctctgttttatgtggtcgcacacggccttatttgtagtattacaccacagaagctggctgacccccactgagggagaggtgattgatgcaagcattgtgtatgatccttggacaagggaatcgcgggggtttggttttgtcaccatggctgctactaaggaggcagatcactgcatcaaatatctggattgttctgtgttgcaaggtcaggtcataattgtttagaagtactctacacagaacattttattgttttgtcttcaccaccgagaatccgagatcgcctcccatagcctccacatccataaggtcctgcttgactgcgacgacgtccaggctgatgccctcatcgtggatcgactcgcctcgctctagaaggagtggcccctctggagttgaatatgcagttataaccaatttttaccccttttatcctagaagagttgccaagacacggtataagaccatgataatagactaagagaggatttggctctaattactatatgttttatttatgcagtcccatgagaactttgagtatttgcagattgctttattaatttattaaagttaaagattgtatgtgttgagtatgtatccactcttgttggaagtgtcttgcaattccaatccaaggatgtataaaatactgcatgggctaagtatgtgttttttcatgtatttggagtatatatactttttgttgcttgagaacatgtatgtacactagaagcttgtcaattgtgtgaacttgagttgatccctgtctaacctgagtatatatatatatatatatatattttgttgcttgag

SEQ ID NO: 1714 - DNA, 393 bp, Zea mays
  Clone ID: PAT_MRT4577_184060C.1
tattcgagctcaagtcctacgcgctccaaagccctttcactttgcgaagctttttgaccccaggtccggtccctgacataaccgacaactcgaagagccgtggaggcgcatgctaggccggagtcctcgcaggaggaggaggaggactggaaggaggccgaggcggacgtccacgaaatcgaccgtgccgtcaccaatggctccgaagtggggggcgtagcccacagacaggccgatccgtttctacaccagacggaatatacgacctttttcactttgtccatgccaagtctctatagcaggcctagacgtggtctacaaacacatatattattgttggatgctgcaatgactagtcgacacataaattcaaaggaagaactgttatgactg

SEQ ID NO: 1715 - DNA, 1464 bp, Zea mays
  Clone ID: PAT_MRT4577_184395C.1
aaacaaaactgaagcaacccaacataagggcatttatgacacgataaggaatggaaaattcagtgctcatacctcctatcatactacagatttatagcagtggcagtgtggcttgtcgttttctcatcctgctctatttagccttcagcacctctgaactcagctgtcagctcgagttcagaaaaaaaaataacatatcacactgctttaatggggcgatcaccatgctgtgagaagattggactgaagaaaggcccgtggacaccggaggaggatcagaagctgcttgcctacattcaggagcacggacatgggagttggcgagcattgcctgtgaaggcgggcttgcagaggtgtgggaagagctgcagactgaggtggacaaactacctgagaccggacatcaagaggggcaagttcagcttgcaagaagagcagaccatcatccagcttcatgctcttttaggcaacaggtggtcggccattgcaacccatctaccaaatcgcacggacaatgagatcaagaactactggaacacacacctcaagaaaaggctggccaagatggggatcgatcctgtcacccacaaatctatcagtggcactcgcattggcaccacaaacgacaaatcaaccaaggccgccgcaagcctcagccacatggcacaatgggagagcgcccgcctcgaggctgaggcacggctggctcgagaatcgaagatacggacagcaacgccaacaccaactgctctccatgcgcagccaacgatactacctgcctctgctgcttctccatgccttgacgtgttgcatgcttggcagggtgcaaagatagacctggagtcacctacctccacactgacgtttacagggagcaatggtggcacgctgccaacccccaggaccaatggactagacgtatcagaaagcaactgtgcgatgtcgcatcagaggagtgatgagttggaggatgaagaaaacgattggcagatcttcagcaagcaccaattgctggaactcgacagcaaggagagggaagaggacttcattggttgtgaggagccgtggttctcagagatggctggggttggagctggcttcactggcatgctgcttggtgtatccaatgagcatgatgcatcagaatgctggggtgagtccaataatggccaaactgagcgcagcaaccaagcatcagatgaggaggacaagaattattggaatggtgtccttgacatggtaaactcagagctgacacccaagtcgcctccatttgtctagactctagaatacagtcccctccgttttatttcaagtactcctgagcaaaatctattggatcatctcaagtcaaaagagaaacagaacaagcactacaaataaatgctgcatgtgctacaacaatatgttttttttgtccatgcatgtgaaagtgaaataattaactattgtgtggatggagtt

SEQ ID NO: 1716 - DNA, 358 bp, Zea mays
  unsure (1)..(358): unsure at all n locations
  Clone ID: PAT_MRT4577_184607C.1
ggccggcggaggcgtatcggatccatttattgaactgttaacttaacttttcttagctcaccaccaccacacacggganagaggtatatctagcatagcaagccacccaatcatctacttaacaacaactagctagccatgctgccgtccttcttgtcgccgacggcgagcgccgcggcctctgtgacgcctccgtcgcggcccataccaagcaactacgggccccccgtgctgggcccgctgcgggaccggctcgactacttctggtttcagaaccaggaccagttctttctgaagcgcgcggcggcgcaccgtagaaccgtgtttctgaacaacataccgcccacctttccctttt

SEQ ID NO: 1717 - DNA, 1192 bp, Zea mays
  Clone ID: PAT_MRT4577_184761C.1
cctcgaagccggccggtccgcctcacggcgagaaccgaccggctcgacccttctgccggcgatgcgctcctggccttaactggccgggtcgtgcctccggcgccgttactttgaagaaattagagtgctcaaagcaagccatcgctctggatattatcctggtttaggattatgttgcttttgaaaaaaaaaaaaaaaaaaaagaaaaaaaccgcccgtcattttcgtcacccctgacgctcgacgcctctcctcctctcctcccccacccgtgccatcgcccctccctccggtctgcgctcccacagcctcacccctgcgcccccgccgattcgcgtcgccctttgttggaaggaacgatggagcagaccttcatcatgatcaagcccgacggcgtccagcggggcctgatcggggacatcatcagtcgcttcgagaagaaagggttctacctcaaggggatgaagttcatgaacgtggagaggtccttcgcgcagcagcactacgctgacctttccgacaagcctttcttccccgggttggtggagtacatcatttccggccccgtggtggcgatggtgtgggaggggaaggacgtcgtgttgactggccgcaggatcattggggccaccaggccttgggaggcagcccccggtaccattcgtggggactacgccgtggaagtcggcaggaatgtcatccatggaagcgactccgtggagaacgggaagaaggagatcgctctctggttccctgaaggtgtggcacagtggaagagcaaccttcatccctggatctacgaggcttgaacagttgagcttggatgccttgcctgcttccatggaaaccagagttttgtttgagtattatctgttggctctggctgaagagtcataatttagcgctctgtgtgttacaccagagttaagtctgcctgaacttatgtggcatttgtttgagtttctaccttcgtgccctgttttctaatgtaccgtggttgtgaaccggtcaatgtgatctgaaataaaacattgcgtgccaagtttgtgttacaagtttgatgccctgggaatgccaggcaactaatgtggtaataaacattttgcccatcttttaaaaaaaaaaaaaaaaaaaaaaaaaaaaaaaaaaaaaaaaaaaaaaaaaaaagaaaaaaaaaaaaaaaaaagcggcc

SEQ ID NO: 1718 - DNA, 717 bp, Zea mays
  Clone ID: PAT_MRT4577_185079C.1
ccggccggggcaccggatccctcctctctttccccggcacctgtcacgggaggaggatggacaagagcggcggcgaggcgttcggttcgaatgctccgggcaacatcttggcggcaggcgggctgggtcccttgtggctcgtcgacattgccaacatgtgcctcatcctccacctgatcggtgcataccaggtatacgctcagcctgtcttcgcttcggttgagaggtgggccgcctcacggtggccagaagccaagttcatgagcagcgcatacaccgtgagcatccccctcgtgcagagaggatcggtcaccgtcgcgccgcacaagctcgtcctgaggaccgtcatagtcggcgcgacgactgcggtggcgctggcgatacccttcttcaacgccgtgctggggctcctcggcgcgttcagcttctggccgctcacggtctacttccccatcagcatgcacatcgcccagggcaagatcgccagggggaccaagtggtggtgccttctgcaggctctgagcatggtttgcttggtgatctcggtggccgtgggtgtaggctctgtcactgacattgtcgatagcctcaaggcctcttctagccctttcaaattgtaggctaacaggttactgtagtcatgtacaatgctctgagccgatcgtgcgttgaggtttaaaagaactgtggtgcgcgaattcgcgtcaatatcgaaac

SEQ ID NO: 1719 - DNA, 1490 bp, Zea mays
  Clone ID: PAT_MRT4577_185080C.1
gcgggacacccgggcgcgtgcacgggagacgggagtatggacaagagcgcggtggcggcatacgacgtcgagcggggcgactacgaggaggagcacgaacggagagggacggtatggacggcgacggcgcacattgtgacggcggtgatcggctccggcgtgctggcgctggcctggagcgtggcgcagctgggctgggtcgcggggaccctcgcgctcgccggcttcgcctgcgtcacctactacacctccacgcttctcgccaacgcctaccgcgcgccgcaccccgtcaccggcgacaggaaccgcacctacatggacgccgtcagatcgtacctcagtcccagggaggtgttcatgtgcgggatcgcgcagtacgtgaacctgtggggcaccatggttgggtacaccatcacggcgaccataagcatggccgcgatcaggcagtccaactgcttccgccggagcggcgccggcgcgcagtgcgacgcgccggggaccgtgctcatgctggcgttcggcgtggtccaggtggtgctgtcccagttccccggcctggagcacatcacctggctgtccgtcgtcgcggcggtcatgtccttcgcctactccttcatcggcctcggcctctcggtggggcagtgggtgtctcacggcggcggcctcggcggcaggatcgctggtgctgccgcggcgtcccccaccagaaagctctggaacgtgcttcttgccctggggaacattgccttcgcctacactttcgctgaagtgctaattgagatccaggacacgctcaagtcaccgccaccggagaacaggacgatgaagaaggcagcgatgtacgggattggagccactaccatcttctacatctctgttggctgcgccgggtacgctgcgtttggttcagatgctccgggcaacatcctgacggcaggcgggttgggtcccttctggctcgtcgacattgccaacatgtgcctcatcctccacctgatcggtgcataccaggtatatgcgcagcctatctttgcttcggttgagaggtgggctgcctcccggtggccggaggccaagttcatcagcagcgcgtacaccgtcagcatcccgctcatgcagagaggatcggtgaccgtggcgccttacaagctcgtcctgaggactgttctggtcgccgcgacgactgtggtggcgctgatgatacccttcttcaacgctgtgctggggctcctcggcgcattcagcttctggccgctcacggtttacttccccataagcatgcacattgcccaggacaagatcaccagggggaccaagtggtaccttctgcaggctttgagcatggtctgtttgatgatttcagtggccgtgggtataggctctgtgactgacattgtcgatagcctcaaggtctcttccaaccctttaaaaactgtaagctaaaggttattgtagtcacgtacaatacatataaaatctgctctaagtcg

SEQ ID NO: 1720 - DNA, 1948 bp, Zea mays
  Clone ID: PAT_MRT4577_185084C.1
ctcactgatgatgatggtggtcggggtcgttgttgtcgctacataataacgataattcagaaggagctacaagagcagagagagagaggaataatcgatcccttgacagcagatattatacattggcctcgaggccggccggggcaccggatccctcctctctttccccggcacctgtcacgggaggaggatggacaagagcggcggcgaggcggcggcggcggcagcagcagcagacgacgtcgagcggcgggggggcgactacgagcaagacgagcacgagcggagagggacggtgtggacggcgacggcgcacattgtgacggcggtgatcggctccggcgtgctggcgctggcctggagcgtggcgcagctgggctgggtcgcggggcccctcgcgctcgccggcttcgcgtgcgtcacctactacacctccacgctgctcgccggcgcctaccgcgcgccgcaccccgtcaccggccacaggaaccgcacctacatggacgccgtcagatcgtacctcagtcccagggaggtgttcatgtgcggggtcgcgcagtacgtgaacctgtggggcaccatggtcgggtacaccatcacggcgaccataagcatggccgcgatcaggcaggccgactgcctccgccgggacggcgccggcgccggcgcgcgctgcgacgcgccagggaccgtgctgatgctggcgttcagcgtggtccaggtggtgctgtcccagttcccgggcctggagcacatcacctggctgtccgtcgtcgcggcggccatgtcgttcgcctactccttcgccggcctcggcctctccgtagggcactgggtgtctcgtggcggcggcggcctcgggggcagggttgcaggtgccgccgcggcatcctccaccaggaagctctggaacgtgcttctcgccctggggaacattgccttcgcctacactttcgctgaagtattgatcgagatccaggatacactcaagtcaccaccaccggagaacaggacgatgaagaaggcagcaatgtacgggatcggagccaccaccatcttctacatctccgtcggctgcgctgggtacgccgcgttcggttcgaatgctccgggcaacatcttggcggcaggcgggctgggtcccttgtggctcgtcgacattgccaacatgtgcctcatcctccacctgatcggtgcataccaggtatacgctcagcctgtcttcgcttcggttgagaggtgggccgcctcacggtggccagaagccaagttcatgagcagcgcatacaccgtgtccgtcagcatccccctcttgcagagaggatcggtcaccgtcgcgccgcacaagctcgtcctgaggaccgccatagtcggcgcgacgactgcggtggcgctggcgatacccttcttcaacgccgtgctggggctcctcggcgcgttcagcttctggccgctcacggtctacttccccatcagcatgcacatcgcccagggcaagatcgccagggggaccaagtggtggtgccttctgcaggctctgagcatggtttgcttggtgatctcggtggccgtgggtgtaggctctgtcactgacattgtcgatagcctcaaggcctcttctagccctttcaaaattgtaggctaacaggttactgtagtcatgtacaatgctctgagccgatcgtgcgttgaggtttaaaagaactgtggtgcgcgaattcgcgtcaaatatcgaaacttctcgattgtattttcagagagtatttattgaatttgatcagtaagcacaattttgctggctaacaggttactgtagtcatgtacaatgctttgacccgatcgtgcgttgaggtttaaaagaactgtggtgcgcgaattcgcgtcaaatatcgaaacttctcgattgtattttcagagagtatttattgaatttggtcagtaagaaaac

SEQ ID NO: 1721 - DNA, 194 bp, Zea mays
  Clone ID: PAT_MRT4577_185199C.1
cgaagaagagctctgtgatgccgcggtctacgccgggagcaatttcatggcaccattggagccctactaacaaaggaagaggatgacggtgttcttgtgtggagctatactaactcggtgctgcgtttttgctacatggttggaccgccggaataaatgtatggtccagtttgctcgacagctacttaggtgat

SEQ ID NO: 1722 - DNA, 144 bp, Zea mays
  unsure (1)..(144): unsure at all n locations
  Clone ID: PAT_MRT4577_185297C.1
cgcatcgccatggcgccgccgcagacgatcccccggcgcggcctctttattggcggggcctggagggagccgtgcctcgggcgccgnctttcccgttgtcaacccggccacccgggccaccatggcgacatcccggcgggcacg

SEQ ID NO: 1723 - DNA, 276 bp, Zea mays
  Clone ID: PAT_MRT4577_185349C.1
gttcactccgtccctctccccgcgagccgccagaggcacgttcgccctcggttcgacccggattcgtccgcccgagaccgggattcgctccgcaaagcgcggatctgaacgctgcacttcgcgtaaccaatgaaatacgtcatcaagggggccaaatccaagggcgccgaggaggccgatgccaagctggcggcgaacagcaaggtggcggacaagcccaccaagggcaagaaagagaaggccggtaaggaccctaacaagcctaacacggctccc

SEQ ID NO: 1724 - DNA, 2048 bp, Zea mays
  Clone ID: PAT_MRT4577_185399C.1
ctctctcatctgtaggatgtaaaaaactcagccaggaaagctgctgaaactgttctgttggttattgatgaggaaggagttgaaactttgatacctgagcttctaagaggaatcactgacagtcaggcatcaatgaggcggggctcagcctacctaattggtttcctctttaaaaacactaaactatatttggctgatgaggcttctgatatgatgtcaaccctaataattttgttgagtgatacagacaaggctactgtatcagctgctttagaagcattttcaagagttgttgcatctgttccaaaggaacagctcccaacacacataaaactagtgcgcgatgctgtctctacagccagagataaagagcgtagaaggcgaaagggtgtgcctattcttctgcctggcttatgtctttctaaagcactgcaaccttttcttcctatatttcagcagggtttaattagtgggtcggccgaaacaaaggagcaggcggctgaaggtctaggagagttaattgatgtaacaagcgagaagactcttaaggaagttgtagtgccaattacaggacctcttatccgcatccttggtgatcggtttccatggcaagttaagtcagcaatcctatcaaccctgacaatcatcatcatgaaaggtggaattgcacttaagcccttccttccacaacttcaaactacattcgtgaaatgtctacaggataacaataagtctgtccggacgagggctgcagctgctctcggaaagcttagtgctcttagcacacgggtggatcctttagttagcgatcttctgtccatgttgcagtcaggagatgaatctgtaaaagaaagtgtgctttctgcactcaaaggtgttatcaaacatgctggcaaaagtgtcagtgctccaataaggtcacggggatgtgctcttcttgaagatctgctgcaggctgaagctgatgatatccgcagttgtgctgcaaaagtgattggcacattgtctcagtacatggatgacagagagattccagatttggtgcaaatccttttggaagtgggcacctcatcggactggtgtaccaggcatggtgctttgttagcattatcatccatatcaatgcattctccatcaaaattatgtgatttggcatcctttccatctctggttgatcttctgaaagattctcttaaagacgacaagttccctgttcgtgaagttgctacaagaactctgggaaggatactcgttttcgagctacagtcagaagctgacaccttgcaacttgttcagttgcttgtcttggccttgcgtgatgattctagtgaagttaggagaagatctttgtcgtgtatcaaagctgctgcaaagatgaaccattcagctcttgctacacatcactctatattgggcccggcaattgctgatgctttgaaggactctagcatgcctgtacgtctagcagcggaacggtgtgcccttcatgttttccagttgactaaagggccagataatgttacaacagcgcagaagtacctaggcatgactggcttggaagtgaagaaaatcgcaaagcttaacgaggagagtgatggcagtgagagcagtgatgatgacaggaggacatgacctctactcacagcaagcttgtatcggttcagttattatgatctttatatatagttaggcaagttagctacattgacagtggaaggtggggtcattttttgttctgtctgacccattttgtgaacatcctttttgacaacaaatactggcagaggaagacacgtcggcatttgtcatattttgttgcggcaaaccgacaatgtttatggaaaccaacaatttttgttaaagttattcaatcaaagaagtatatgtacccagtttttcccagagttgggaccgggacttgtgttcacttcaatttgaatggacaaatttcgaggacaaaaatatataattaaatttataaaaaaatttgttagaaaattttagggggtgtttctttattttgtgggcttttttttagggtttctttt

SEQ ID NO: 1725 - DNA, 3408 bp, Zea mays
  Clone ID: PAT_MRT4577_185400C.1
aattcggcacgagggttgcttcctgctatcgaggatgggatcttcagtgataattggcgtatccgacaaagttctgttgaacttcttggggatctcttatttaaggtcgctggaacttctgggaaggcaatccttgagggtggaagtgatgatgaaggtgctagtacagaggctcaggggcgtgctattattattctgcctgacctcttcttccgatccttgagatcgggttccatagcacgcaacctcgacaacccctgcaacccttccgttcgtcatcgttaagggtggagttgcacttatgcccccccatcctcaaagtcaaaccactgttggaaatacttggaagggagaaacgcaatgaagttcttgctgccatttatatgcttcgttctgatgtcagcttgactgtccggcaggctgcattacatgtctggaagacaattgtagcaaatactccaagaactctgaaagagataatgccagtacttatggacacacttatttcatctcttgcatcatcttcctcagaaaggcgtcaggttgctggaagatcacttggtgagcttgtaaggaagcttggtgaaagagttttgccctcgattattccaatcctgtcacaaggactcaaagacccaagtgctagcagaagacaaggagtttgcattggtttgagtgaggtcatgggcagtgcaggaaaacaccagctattaagttttatggatgaacttattcctaccattcgtactgctctatgtgacagcacccaagaggtccgtgaatctgctgggttagcgtttagtactctgtacaagagtgctggactgcaagccattgatgagattgtccccacattgctacgagctttggaagatgatgatacatctgcaacagctcttgacggtctaaagcagattttaagtgtcagaacagcagctgttttgccccatatattgcccaaattagtccagcctcccctctcttcattcaatgcacatgcattaggtgctctagcagaggttgctgggccaggtttgaattcacatatcggaactgttctcccagcattgattcttgctatggatgatgaagatgcggatgtacaaaactcagccaggaaagctgctgaaactgttctgttggttattgatgaggaaggagtggaaactttgatacctgagcttctaagagggatcaatgacagtcaggcatcaatgaggcggggttcagcctatctaattggtttcctctttaaaaacactaaactatatttggctgatgaggcttctgatatgatgtcaaccctaataattttgttgagtgatacagacaaggctactgtatcggctgctttagaagcattttcaagagttgttgcatctgttccaaaggaacagctcccgacgcatataaaactagtgcgcgatgctgtctctacagccagagataaagagcgtagaaggcgaaagggtgtgcctattcttgtgcctggcttatgtcttcctaaagcactgcagccttttcttcctatatatcagcagggtttaattagtgggtcggccgagacaaaagaacaggcagctgaaggtctaggagagttaattgacgtaacaagtgagaagactcttaaggaagttgtagtgccaattacaggacctcttattcgcatccttggtgatcggtttccatggcaagttaagtcagctatcctatcaaccctgacaatcatcatcatgaaaggtggaattgcacttaagcccttccttccacaacttcaaactacatttgtaaaatgtctacaggataataatagtgagagcagtgatgaggacaggagtgctttgggaaagcttagtgctctcagcacacgggtggatcctttagttagcgatcttctgtccatgttgcagtcaggagatgaatctgtcaaagaaagtgtgctttctgcgcttaaaggtgttatcaaacatgctggtaaaagtgtcagctctgcaataaggtcacgtggatgtgctcttcttgaagatctgctgcaggctgaagctgatgatgtccgcagttgtgctgcaaaagtgattggcacattgtctcagtacatggaggagacagagatttcagatttggtgcaaatcctattgaacatgagcacttcatcagactggtgtaccaggcatggtgctttgttatcgttctcatacatatcaatgcattctccatcaaaattgtgtcatttggcatcctttccatctctggtcgatcttttgaaaggttctctcaaagatgacaagttccctgttcgtgaagttgctacaagaactctgggaaagatactctgttttgagctgcagccagaagctggcaccttgcaacttgttcagctgcttatcttggccttgcgtgatgattcaagtgaagttaggagaagatctttgtcgtgtatcaaagctgctgcaaagacaaatcattcagctcttgctacacatcactctatattgggcccggcaattgctgaagctttgaaggactctagcatgcctgtacgtctagctgcggaacgctgcgcccttcatgttttccagttaacgaaagggccagataatgttacagcagcacaaaagtacctcgggatgactggcttggaagtgaagaaaatcgcaaagcttgacgtggacagtgatggtagtgagagcagcgatgatgacaagaggacatagactctactcaacagcaatcttttttcggttcagttgttatgatctttacatatagttagctacattgatagcggaatgtggggtcattttttctgtctggcccattttgtgtacatcctttttgacaacaaacaggtaaaagtgacaacgtttgcaaatcgacaaacaatggacacaagttgtattgcaaccaaggactgattcgttagtttgagcacagcacaaccacccagttcaacgataacgcatgtcaatgtaagccacgcataccatatagtatcatatcgtcgagtattgttcgtaccacatcttcctcccagttgatctccttgggcaaggtaggcccttccctggacagctcgttgggcatcttgttgagcatgctctctgctctgtacctgaacgctggagtccacgaacagactgctctgagcggcgtcaatgtggataggaatgtaatcggacgtatattactggttccatgtttgttttcatattttctcattggatattaatgcaaatattatcgagttgggcaaaaaaaaaaaaaaaaaagcggaaaaaaaaaaaaaaaaaaaaaaaaaaaaaaaaaaaaaaaaaaaaaaaaaaaaaaaaaaaaaaaaaaaaaaacattccctttaaaaaaaaaaaaggggggcacttattttgccaccaaatttttttttcctcaggg

SEQ ID NO: 1726 - DNA, 1916 bp, Zea mays
  Clone ID: PAT_MRT4577_185453C.1
gctcgaggccggccgggacaggtcaccagttcggtcctgcgctctcgagtcgagactccaccttccattcatttcatctgctccatctctctctttgttcgccggcgtataataagcttcccctttctgcaactgatctgatccgggctgccgtgagctctgctcgccctgatggagttcaagagggatgtatggagcctgctcctcgtgctgctcctcgggcagctcgtcgccttctccatggccgcctcaagctttgcctcctccctcattgctaatcttggagtcgatgccccactgacacagtctttcttagcctacctgttgctgaccttagtctatgtaccaatcgtcctgcgtcgacggcagaagctgcaaatagcttggtactggtacctagctctggccttctttgatgtacaggggaattatcttgttgtgaaggcgtaccagtactcatacattaccagtgtgactttgttggattgctggactgttgtatgggtcgtcatgctcacctggtacgcactgggcacaagatactcactctggcagttcgtgggggcagggacatgtgtggcagggctcgcccttgtgctgctttcagatgcaaaatctcaagatgagcaagatccgaaaaaaataccacttctgggggatgcccttgttattgctgggacagttggttttgcgtttagcaatgttggggaggaatactgtgtcaagaaaaaggatagagttgaagttgttgcaatgcttggtctctttgggttgctgatcagcacagtgcagatacttgtatttgaaaggaagggcctagaagcagttacatggtctccaacaatgataagtctgtttgcaggatttgcagtggcaattttcgtattctacacagttgctcctttcgttcttaagatgagtggagctacattgttcaacctttcactgctaacatctgacatgtgggcagtcgccattcgagttttattctatcagcaagagataaacaggttgtactacctagcattcgcagttgtggccattggattaatcatctattcgttgaatgatagatcttcagatgatgaaacagctggaagtacagaagcaccggcccaatatcagcaacttccaattgaagacaattcaacaagaattggttctagttcaggtagccaagaaaggacacataaggaagaagttcatatctgttagtgggataatgtattaatgtacgaagacacttcattgtcaatgcatggatttttaccaaatcaaatatggcatagagatatgcagagtaaaatgctggttgcttcatgtataggaaaatgtttaattggctcaagaagctaagcaagatgaggaagagaatcagaattaattttctttacaagtcagtccagcagattattcacaagagcagaaccattgctgaaggctcccgcatcagtgagatctaaggaagggataatacatcgggttaaaatgatctttgactagggattgtgaacaatcacagctggtctgcaaagcataatagcaacagtatgaacatgtaaagggagttactagtcactaaagctctttcaagaattgcctatgaaggaaaaaagatatttttagatagcatatggatagcttacatgctttactggaatgcagagtgctaaagcgccacaatattttcttgttaggagaattatgatttaatgatattttctatattactcattgtaaaattctatgagaagtatcatgccccgtgaattggaagctaaaaggggtaagtgaaaaatagggggggaatttggttgtgttagtgttagtgtatctggttaggccttagtgttagtgtatctggttaggtctatgtaccaggcccatgtaagactatattgctaccctctagggtt

SEQ ID NO: 1727 - DNA, 204 bp, Zea mays
  Clone ID: PAT_MRT4577_185609C.1
caagctcgcatatacatcctctgaagattggcatcaagacctgtggcactaccaagcttctgctcaccattccaagaatccttgagcttgctgaagagccgtctatgccacttgctgctgtgaagaactcccgtgggacgttcattttttctggggcacaggcaagcccccacaggaggctttttgaggaagatgctgcacttt

SEQ ID NO: 1728 - DNA, 440 bp, Zea mays
  Clone ID: PAT_MRT4577_185727C.1
gggacaaaaaaatcccccacattaaaatgggggcatgaacggacaaaggaaaaatactggactcctcggccgccactcaaaaaaggacaagcttattgcccttaactaagggatatcttacacaaacccaagcaaagcaaaccgggcttttaacggacgaaaaacacccaacccccgggaggggggggcccctaatactaaactaaaagcggggggggtatttgggctgggcctgggcctgggcccggatcttgggcccccttcccgggttaggacccaggcccgaccttattgacaagcgccagccccttgctggggacctgcccgaccttaacgaccttgccccggatgggggcccccgtgccggcttcaacggcgcgggacaaaaggccctcaaggcaggtgtcctcttcggggagcgcggcgctccaccaggtttt

SEQ ID NO: 1729 - DNA, 249 bp, Zea mays
  Clone ID: PAT_MRT4577_185754C.1
gtgaaaacccaattgttcaactcctactttaaccaacaggcaatcgcgacgggcatgtaaccattatcacccttgttcctccaacaaccgtcacccctattacagcaattacctttgtttcattagatggcacataacatcatggcacaacaactacaacaacttgtgctaacataccttgctgaatactcttatcaacatcagttatttccattcaacctactgtctgcattgaactctacttcttat

SEQ ID NO: 1730 - DNA, 359 bp, Zea mays
  Clone ID: PAT_MRT4577_185782C.1
acacctatagtgagtcgtattaaactacggcctgcaatggtgttcttcgcgttgaaatgaacagtggtgcctatggatgttaggtcactgcgggatcgacagccacggctcatagacctacatccacgaagttcaaagatggcatcacgatctcaactggacagcgattgtatcagtacatccactcagccgtgtgacaagtcctcatcagacagggtgttctggggaccaaggtcaagatcatgcttgactgagacccgaagcggcacgttgcgcctatcaaccctcatcccgacctggtgaccatccataatccgagacgatgatgacaagcatctctctccgtgtcttggcaactg

SEQ ID NO: 1731 - DNA, 309 bp, Zea mays
  Clone ID: PAT_MRT4577_185827C.1
acggttgtggaggctaatacctcatatactggtaatcattttcatgccaaatgccactttggggcggtagatatattcaaccggaagaagctctaatatattgttccttcttcacacaactgtgatattccgcatgtgaaccgcactgactatcagctgattgatatatcaccaaatggatttgcgagccttcttacttaagatggcaccactaaagatgatcttacactcccaactgatgaaacttttgttgcccatatcaaggaagggtttgaaagtggcaacgatcttcttgtgactgtccaccct

SEQ ID NO: 1732 - DNA, 322 bp, Zea mays
  Clone ID: PAT_MRT4577_185835C.1
ctgacgcgtggtcggacgcgtgggcaaagaattccctcccctagccgccgccggcgatcgtgtccctgttaggtgccgggaccgatgaactggccgagttctatgtagagaatcggatttgcttgtatcaacacggggtccgctgcgtctggtggtggtgaatgggagaaattcatgagatctgttcctgatcaggcgtgcgagctcgggaatcaagagtttcacacatagctcctgcgatttgaatttgacgtactaatggagcctcacggtggcaaaaaggctatcagtaatcgatccatgatgtatgaagctccccttg

SEQ ID NO: 1733 - DNA, 568 bp, Zea mays
  Clone ID: PAT_MRT4577_185846C.1
ggccgctttctcttttttttttttgttggggtttttttttttttttttttttttttttttttgtgggttttttttttttttttttaaacaactaaacatgtagaaatcagagttgcatacattttttgggccctggtcccacgatcatacacaagcacatgcttacacacacgtttacatacgggaaagaagggggccacgcttttttttgcatcacacgagcgcatacatacgttcgcgcgcacaaaacggggggcgctcgatttcacttttacacacgcccgcgttgcacacggggagggaccactattcgggagggatcaattagccgaaaaagtgggggtttttttcgccgccggcctcctcggggaccttgggggccttttttttttcggggggctcggggaaggcgaaacccccggaaccgacggccgccgccgccgaaacctccttcttaatcttggggcggggcgcgtgctccgggtccttttttgcctcgggcttctcgtaaagggcgaaggccccggcgggaatggccccggcctcaccgaggggctgcttgggctta

SEQ ID NO: 1734 - DNA, 1130 bp, Zea mays
  Clone ID: PAT_MRT4577_185876C.1
ctttaacgcccgaaacgaacacctgaaactacaacatggcggatctgatcaaggcagtcgatatccgaggcggtaaaggcgagcgagatgccctcttcatcaaccctcagacgccaaagccctcgcctactgaaggacaggccctcgtccgtgtcaaagcctttggcataaaccgcatggatatagtccagcgacgcggcttttacccgcttccgcctcaagcccccgcaacgctgggcgtcgagttcagcggcaccatcgagtcccttgggcctggtgaccacggtgcctttaagcaaggtgacgaagtctttgggcttgcctacggtggcgcctacgccgagtaccttgccgtcagcacacgcatgttgctgcacaagccgtcgtccatggactttgtgacatgcgctggcatcccggaaacctggatcacggcgacacaggcactgcaccttgtgcttggcttcaccaaaggtaagtcgatcttgtggcatgctggtgcctcgggcgtgtctattgctggcatccagctgtcaaagattgccggtgcatcccaggtctttgccacggccgggtcccaggaaaagtgcgactttattacctcgaagctcggagccaccgcggccttcaactacaagacgcaggactgggcggaggagatcaagaaacacaccgacggtaacggcgtcgactatatcgtggactttgttggtgcaagctacttccagcagaaccagacggccgctgcacgggacggacgtatcgtcctcctgggtacgctgggtggtgtcaagatccccgaagccgacatctcgcagatcctgtacaagaggctccgaatcgagggcagcacgctgaggagccgggacgaggagtaccagggaaagcttcgtgaccgcctcgaagagtatctcccagactttgagtcgggcaagttgaagatccttgtggacaaggttctgccatgggaggagatccaggaggctcacaagcacatggaagaggccaagaatctgggcaagatcatatgtactatctcgtaggtaccatccataactcgaaaataggagacaactcttgacgacgccacgcttgtgttcgtcaaagcaaagaaatccatcgctttcctc

SEQ ID NO: 1735 - DNA, 277 bp, Zea mays
  Clone ID: PAT_MRT4577_18590C.1
tcgttccagcactgaacacttgattgattcagtaggtagctaggtagctgaatcacaaatggatcctaccaagttccgtccgtgcagcagacacgacacgacggggacgacaacgaacgcgggcgctcctgtgtggaacgacaacgaggggctgactgtggggccttgcggtcccatcctggtggggggctaccacctgagcgagaaggtggcgcactttgcgctcgagggcattccggagcgcgtggtgcacgcccgcggggccaccggcaggggt

SEQ ID NO: 1736 - DNA, 911 bp, Zea mays
  Clone ID: PAT_MRT4577_18595C.1
caacaatatgggttttgttaagttgattaagactaaggcatacttcaagcgctaccaagtcaagttccgccgcaggagagagggcaaaactgactacagacaacgtacaagacttatcacccaagataagaacaagtacaacactccaaagtacagactcgttgtcagaaagaccaacaagaacatcatcgcccaaatcatctacgctaccgttcaaggcgatcgtgttgtgaacgctgcctactcctctgagctcccaaagttcggaatcaagctcggtctcaccaactacgcttccgcttacgctaccggtctcttggttgccagaagacacctcaccaagatcggtcttgccagcaagtaccaaggaaaggttgaagccgacggtaacgactacaccgtcgaaccagctgaaggaccacgcccattcaaggcccttctcgacatcggtctcgctcgtaccagcactggagctcgtatcttcgctgttgccaagggtgctctcgatggtggtattaacatcccacacagcgtcaagcgcttcgccggctacaacgctgaaaccaagaagcacaaccccgaggtcctcaagaagtacatctacggacaacacgttgccgaatacatgaagaagctccaaaaggaggagccacaagcctacgaaaagcaattctcccgcttcgtaaaggccggagtcaaggctggtgacattgaaggaatctacaagaacgcccacaaggctatccgcgctgacccaacaaagaaggccaacgagaagaaggcagtcgaacacaagagatacaaccccaagagacttacacacgcccaacgtgctgaacgtgttgctaagaagaaggccatcttgggactctaaatgtcttttcttaacttacaatataaaacctatgaac

SEQ ID NO: 1737 - DNA, 1245 bp, Zea mays
  Clone ID: PAT_MRT4577_186005C.1
ccggccggggcgccatcttttctccaccatccaaaaaaagggtcccgacgatacgcctaatagacattgggcggctagccctccccagcgcagcgcgcagcgcagcccacctatcaataaccgacgagcgaggcgcgagaaccgacttgccaccggctgctcgccgtctctctctctccctcggggcgcgcgcgcgggagacaggccaaccgatcgtcaggcggccagccatgggcaagcacgggcacggcaagtgccacgacgtggaggcgtgctacccgccgggggcagcgggcggcggcaagtacccgtacatgacggagaacccgcagctgcggtgggccttcatccgcaaggtgtacgtgatcgtgtgcctgcagctgctgctgacggtggccgtcgccgcgacggtgaacctggtgcgcgccatcggggacttcttcctctcccgcaccatgggcgccatgttcgccatcatcggcgtcatcgtcgcccccatcctcgtgatgatcccgatgatcatttaccggaagcggcacccggtgaacctcgcgctcctggcgctcttcaccgtctgcatcagcttcgccgtggggctgagctgcctgacggcgaacgggccagtgatactggaggcggtggtgatcacgatggtggtggtgctggggctcaccttctacaccttctgggcggcgaagaggggctacgagttcgagttcctggggccgttcctggtgtccgcctgcctcatcctcatgctcttctccctcctgcggatcatcttcccgctgggcaggacggggaccatggtgtacggctgcatcgccgcgctcgtcttctccggcttcatcatctacgacaccgacaacctcatcagggtctactcctacgacgagtacgtcgccgccgccatcgagctctacctcgacatcatcaacctcttccaggccatcctagcggtgctcgaaggcgtcgactgatagggtcatatatataacacggccggctgaggctcatgggctgtgagcatatatacataggatcatatatatgcaatctatacatgagctaccactaccactaccgagagatgggttccaagcttgctgggcaatctgtaatccatagacgatagatagggtcgaacggcaccgccgtgattgaacattattgctacaacgaaacattgcaaatgcaattcattatcttctcttgcaactaaaaaaaaaaaaaaaaaaaaaaaaa

SEQ ID NO: 1738 - DNA, 347 bp, Zea mays
  Clone ID: PAT_MRT4577_186057C.1
atattattatttattatgaaaaaccaagaagcaccatatattccttaggattaacagagaacaaatcctgacaggagtaacagtatacatcgatccacagaccatgctggatgatacatgggacagctgagaccgaggaatgaacacagcactaacaactgacacagaacgaccttgcaataaaaaacacaaatgggcaacaacaaacaagacgaacgaagataaaccctctggactagggaaaacatcacggaagcaaacaggataactgggacgcgcgggcccaaccggtcagaacctccagttgccggcagagttgcgcgaagcacgacagcacggatgccacc

SEQ ID NO: 1739 - DNA, 2275 bp, Zea mays
  Clone ID: PAT_MRT4577_186155C.1
agctcgaattccgttgctgtcggtccaggcgttcttgctgcctcccttagctcgtaggctgcgctctagccctcgctataggctgccctcctccccgtcttcgtccgctccatcgtcccagccccctgcgcgagtgtgaggggtgcgaagctcgagtcggccaggagcgaacttctcatcatcagccaagtgtaaagagtgcgaagaagcagtagcaaaaggattccattctcgtgttcttggagtggtccatcgatcgagctccgtgaaagagagagagagagagcaagcaatggcgacagcagggaaggtgatcaagtgcagagccgccgtggcgtgggaggccggcaaaccgctgtccatcgaggaggtggaggtagcgccgccgcaggccatggaggtgcgtatcaagatcctctacaccgcgctctgccacaccgacgtctacttctgggaggccaaggggcaaaccccggtgttcccgaggatcttaggacacgaagcgggaggcatcgtggagagcgtcggagagggcgtgaccgagctcgcgccaggcgaccacgttcctcccggtgttcaccggcgagtgcaaggagtgcgccgactgcaccgcggggccggccgggaccaacttctcatcatcagccaagtgtaaagagtgcgaagaagcagtagcaaaaggattccattctcgtgttcttggagtggtccatcgatcgagctccgtgagagagatagcaagcaatggcgacagcagggaaggtgatcaagtgcagagccgccgtggcgtgggaggccggcaagccgctgtccatcgaggaggtggaggtggcgccgccgcaggccatggaggtgcgtatcaagatcctctacaccgcgctctgccacaccgacgtctacttctgggaggccaaggggcaaaccccggtgttcccgaggatcttaggacacgaagcgggaggcatcgtggagagcgtcggagagggcgtgaccgagctcgcgccaggcgaccacgtcctcccggtgttcaccggcgagtgcaaggagtgcgcccactgcaagtcggaggagagcaacatgtgcgacctcctcaggatcaacgtcgaccgcggcgtgatgatcggcgacggtaagtcccgcttcaccatcagcgggcagcccatcttccacttcgtcgggacgtccaccttcagcgagtacaccgtcatccatgtcggctgcctggccaagatcaaccccgaggcgcctctcgacaaagtctgcatcctcagctgtggtatctcgaccggccttggcgcgacactgaatgtggcgaaaccagccaagggctcgacggtggcgattttcgggcttggggctgtaggccttgctgctatggaaggtgctagactggctggtgcatcacggatcatcggcgttggacatcaacccagcaaaatacgagcaagctaagaaatttggctgcactgaattcgttaacccacaggaccacgacaaacccgtgccagaggtgctgattgagctgaccaacggtggcgtcgaccgcagcgtggagtgcaccggtaacgtcaacgccatgatatccgccttcgaatgtgtccacgacggctggggtgtcgccgtgctggtgggtgtcccgcacaaggacgaccagttcaagacccaccccatgaacttcctcagtgagaagacactcaagggcaccttcttcggaaactacaagccccgcaccgacctgcccaacgtcgtcgagatgtacatgaagaaggagctggagctggagaagttcatcacgcacagcgtgcccttctcggagatcaacacggcgttcgacctgatgctcaagggggagagcctgcgctgcatcatgaggatggaggattagagcttcattgcaagcttgctcctcctgcagggcaggcatgtcgcacagcaaatgggcatgaaaagttgaaggcgctccagtcctccagcttgtgtagtacacagtagcaataaaacgttagtgtttgtcctgtgcccatcctgtattattctgttccagggtttcacctttatcgtcagtgtgtggtcaggtttcaacccttctcagaacaaccccctcccagaaaaaaaacaaaggaagaagtttgtgtccaggtttcagaatcccctgtctgtaattaccattttgcatgacaataatgagatactgtagatattaataatgttccagaccttcaaggccaaaaaaacaaaaaaaaaaacaaaaaaaaaagcggaaaaaaaaaagaac

SEQ ID NO: 1740 - DNA, 3014 bp, Zea mays
  unsure (1)..(3014): unsure at all n locations
  Clone ID: PAT_MRT4577_186156C.1
tgggccgcccggaggagccggccgggaccaacttctcatcatcagccaagtgtaaagggtgcgaagaagcagtagcaaaaaggattccattctcgtgttcttggagtggtccatcgatcgagctccgtgagagagagagagagagagagagagagagagagagagagagagagagagcaagcaatggcgacagcagggaaggtgatcaagtgcagagctgccgtggcgtgggaggccggcaagccgctgtccatcgaggaggtggaggtagcgccgccgcaggccatggaggtgcgtgtcaagatcctctacaccgcgctctgccacaccgacgtctacttctgggaggccaaggggcaaaccccggtgttcccgaggatcttaggacacgaagcgggaggcatcgtggagagcgtcggagagggcgtgaccgagctcgcgccaggcgaccacgtcctcccggtgttcaccggcgagtgcaaggagtgcgcccactgcaagtcggaggagagcaacatgtgcgacctcctcaggatcaacgtcgaccgcggcgtgatgatcggcgacggcaagtcccgcttcaccatcagcgggcagcccatcttccacttcgtcgggacgtccaccttcagcgacgcagcgctgcaggcaggcgaacggaggctggacacccctgtttcggccgccttgtccaagcaaaacaatgcaacttctttccctacttgcactccaagcatacccttaattactcgccgattcctccagaaccaggactatatatacacggctcgcctcgccttcgttcctcaccaaaatctacagccaacgaactgcagagcagaaacagcgacagagatccgtcttcttcctcttcgagttcttggagcttgcgaccgacagggacggggatggcgaccgccgggaaggtgatcaagtgcaaagcggcggtggcatgggaggccgggaagccgctgtcgatcgaggaggtggaggtggcgccgccgcaggccatggaggtgcgcgtcaagatcctctacaccgccctctgccacaccgacgtctacttctgggaagccaaggggcaaactccggttttccctaggatcttgggccatgaagctggaggcattgttgaaagtgtcggagagggtgttaccgaactcgtgccgggtgaccatgtcctcccggtgttcactggcgagtgcaaggactgtgcccactgcaagtcagaggagagcaacctctgtgacctcctcaggatcaacgtggatcgtggcgtgatgatcggtgatggggagtctcgcttcaccatcaatgggaaaccgatcttccacttcgtcgggacctccaccttcagcgagtacaccgtgatccatgtcgggtgcctcgccaagatcaacccagaggcgccccttgacaaagtttgtgttctcagctgtggtatctcaactggacttggtgctaccctcaatgttgcgaaaccgaaaaagggttcgacggtggccattttcggtcttggagctgtaggccttgctgccatggatggagccaagatgtctggggcatcaaggatcacgttttattgctactaaccatgcaaaatacgagaggaccagagcgccttcaacttttcatgcnccatntgctgtgcgacatgcctgccctgcaggaggagcaagcttgcaatgaagctctaatcctccatcctcatgatgcagcgcaggctctccgccttgagcatcaggtcgaacgccgtgttgatctccgagaagggcacgctgtgcgtgatgaacttctccagctccagctccttcttcatgtacatctcgacgacgttgggcaggtcggtgcggggcttgtagtttccgaagaaggtgcccttgagtgtcttctcgctgaggaagttcatggggtgggtcttgaactggtcgtccttgtgcgggacacccaccagcacggcgacaccccagccgtcgtggacacattcgaaggcggatatcatggcgttgacgttaccggtgcactccacgctgcggtcgacgccgccgttggtcagctcaatcagcacctcttgcactggcttgtcgtggtccttggggttaacgaattcagtgcagccaaatttcttagcttgctcgtattttgctgggttgatgtccacgccgatgatccttgatgcaccagccagtctagcaccttccatagcagcaaggcctacagccccaagcccgaaaatcgccaccgtcgagcccttggctggtttcgccacattcagtgtcgcgccaaggccgatcgagataccacagctgaggatgcagactttgtcgagaggcgcctcggggttgatcttggccaggcagccgacgtggatgacggtgtactcgctgaaggtggacgtcccgacgaagtggaagatgggctgcccgctgatggtgaagcgggacttgccgtcgccgatcatcacgccgcggtcgacgttgatcctgaggaggtcgcacatgttgctctcctccgacttgcagtgggcgcactccttgcactcgccggtgaacaccgggaggacgtggtcgcctggcgcgagctcggtcacgccctctccgacgctctccacgatgcctcccgcttcgtgtcctaagatcctcgggaacaccggggtttgccccttggcctcccagaagtagacgtcggtgtggcagagcgcggtgtagaggatcttgacacgcacctccatggcctgcggcggcgctacctccacctcctcgatggacagcggcttgccggcctcccacgccacggcagctctgcacttgatcaccttccctgctgtcgccattgcttgctctctctctctctctctctctctctctctctctctctctctctctctcacggagctcgatcgatggaccactccaagaacacgagaatggaatcctttttgctactgcttcttcgcaccctttacacttggctgatgatgagaagttgttccccgcccccctcgagggccccaa

SEQ ID NO: 1741 - DNA, 1812 bp, Zea mays
  Clone ID: PAT_MRT4577_186157C.1
attgggtacctcgaggccggccgggacttgcgccgctacggtccaggcgttcttgctgcctccctcgtagactagactctagaccactatatattcattgggtacctcgaggccgggcgggaccaacttctcatcatcagccaagtgtaaagagtgcgaagaagcagtagcaaaaggattccattctcgtgttcttggagtggtccatcgatcgagctccgtgaaagagagagagagagagcaagcaatggcgacagcagggaaggtgatcaagtgcagagccgccgtggcgtgggaggccggcaaaccgctgtccatcgaggaggtggaggtagcgccgccgcaggccatggaggtgcgtatcaagatcctctacaccgcgctctgccacaccgacgtctacttctgggaggccaaggggcaaaccccggtgttcccgaggatcttaggacacgaagcgggaggcatcgtggagagcgtcggagagggcgtgaccgagctcgcgccaggcgaccacgtcctcccggtgttcaccggcgagtgcaaggagtgcgcccactgcaagtcggaggagagcaacatgtgcgacctcctcaggatcaacgtcgaccgcggcgtgatgatcggcgacggtaagtcccgcttcaccatcagcgggcagcccatcttccacttcgtcgggacgtccaccttcagcgagtacaccgtcatccacgtcggctgcctggccaagatcaaccccgaggcgcctctcgacaaagtctgcatcctcagctgtggtatctcgaccggccttggcgcgacactgaatgtggcgaaaccagccaagggctcgacggtggcgattttcgggcttggcggctgtaggccttgctgctatgcgaaggtgctagactggctggtgcatcaaggatcatcggcgtggacatcaacccagcaaaatacgagcaagctaagaaatttggctgcactgaattcgttaaccccaaggaccacgacaagccagtgcaagaggtgctgattgagctgaccaacggcggcgtcgaccgcagcgtggagtgcaccggtaacatcaacgccatgatatccgccttcgaatgtgtccacgacggctggggtgtcgccgtgctggtgggtgtcccgcacaaggacgaccagttcaagacccaccccatgaacttcctcagcgagaagacactcaagggcaccttcttcggaaactacaagccccgcaccgacctgcccaacgtcgtcgagatgtacatgaagaaggagctggagctggagaagttcatcacgcacagcgtgcccttctcggagatcaacacggcgttcgacctgatgctcaagggggagagcctgcgctgcatcatgaggatggaggattagagcttcattgcaagcttgctcctcctgcagggcaggcatgtcgcacagcaaatgggcatgaaaagttgaaggcgctccagtcctccagcttgtgtagtacacagtagcaataaaacgttagtgtttgtcctgtgcccatcctgtattattctgttccagggtttcacctttatcgtcagtgtgtggtcaggtttcaacccttctcagaacaaccccctcccagaaaaaaaacaaaggaagaagtttgtgtccaggtttcagaatcccctgtctgtaattaccattttgcatgacaataatgagatactgtagatattaataatgttccagaccttcaaggccaaaaaaaaaaaaaaaaaagaaaaaaaaaaagggcggccgcgctcgaccaccatagaggatcacgcctgccgtacgcgtgca

SEQ ID NO: 1742 - DNA, 1960 bp, Zea mays
  Clone ID: PAT_MRT4577_186160C.1
gtaccctcgggatctggggatgccctccttgtcctggatcttggccttcacattgtcaatggtgtccgaggactccacctccaaagtgatggtcttccccgtcagagtcttcacaaagatctgcatcttggcggcgatggggggccgcctgcggcggcggctaggtaggttcttgctgcctcccttagctcgtagtctagactctagacctctatatatacagtactcgtccccgcggccggcgggaccaacttctcatcatcagccaagtgtaaagggtgcgaagaagcagtagcaaaaaggattccattctcgtgttcttggagtggtccatcgatcgagctccgtgagagagagagagagagagagagagagagagagagagagagagagagcaagcaatggcgacagcagggaaggtgatcaagtgcagagccgccgtggcgtgggaggccggcaagccgctgtccatcgaggaggtggaggtagcgccgccgcaggccatggaggtgcgtgtcaagatcctctacaccgcgctctgccacaccgacgtctacttctgggaggccaaggggcaaaccccggtgttcccgaggatcttaggacacgaagcgggaggcatcgtggagagcgtcggagagggcgtgaccgagctcgcgccaggcgaccacgtcctcccggtgttcaccggcgagtgcaaggagtgcgcccactgcaagtcggaggagagcaacatgtgcgacctcctcaggatcaacgtcgaccgcggcgtgatgatcggcgacggtaagtcccgcttcaccatcagcgggcagcccatcttccacttcgtcgggacgtccaccttcagcgagtacaccgtcatccatgtcggctgcctggccaagatcaaccccgaggcgcctctcgacaaagtctgcatcctcagctgtggtatctcgaccggccttggcgcgacactgaatgtggcgaaaccagccaagggctcgacggtggcgattttcgggcttggggctgtaggccttgctgctatggaaggtgctagactggctggtgcatcaaggatcatcggcgtggacatcaacccagcaaaatacgagcaagctaagaaatttggctgcactgaattcgttaaccccaaggaccacgacaagccagtgcaagaggtgctgattgagctgaccaacggcggcgtcgaccgcagcgtggagtgcaccggtaacgtcaacgccatgatatccgccttcgaatgtgtccacgacggctggggtgtcgccgtgctggtgggtgtcccgcacaaggacgaccagttcaagacccaccccatgaacttcctcagcgagaagacactcaagggcaccttcttcggaaactacaagccccgcaccgacctgcccaacgtcgtcgagatgtacatgaagaaggtaagccgccgcctgaagaaccttggagtacgtacctgacctgcttacggttcaaccgtatccctgactgacgatcaacatgcgatgtgtgtgtttgtgttgtgtacgtacgtaggagctggagctggagaagttcatcacgcacagcgtgcccttctcggagatcaacacggcgttcgacctgatgctcaagggggagagcctgcgctgcatcatgaggatggaggattagagcttcattgcaagcttgctcctcctgcagggcaggcatgtcgcacagcaaatgggcatgaaaagttgcaggcgctccagtcctccagcttgtgtagtacacagtagcaataaaacgttagtgtttgtcctgtgcccaccctgtattattctgttccagggtttcaccttaatcgtcagtgtgtggtcaggtttcaacccttctcaggacaaccccccgggaagaagtatgtgtccaggattcagaatcccctgtctgtaattaccattttgtatgacaataatgagatcctataggtgttaat

SEQ ID NO: 1743 - DNA, 596 bp, Zea mays
  Clone ID: PAT_MRT4577_186318C.1
cctcttgtttcattgattgttgcaatagatcgacttcttttgcaccacaaggtccacgatgtgttgcaactgcggttcaagctgcggctgaagctcaagctgcaagtgcggcaagaagtaccctgacctgtacgagaccagcaccgacgcgcacgccaccgtccacctcagcgtggccccggagaagaacgccgagcccaaggtcgtccaggccgtcgccgagtccggcgaggccgcccacgagtgcagctgcggttgcaactgcaagtgcgacccctgcaactgctgatcacattgatcgacaaccatggatatgatcattatctatataactagcgatggaggttgaacaataataagcaaagccaagctcgatgccatacatacgtatatacatgtgtgtgtgagagagagagaaacagagatcttaacatagctatctatctctgcatgtttggcgtcaggctttgtgctcatgtacgtacttgtgtacacctgcatgtcgaccgatccgattgcatctgctgtaaccatatattaatcggtccacgatgatatgatctgatacttaaaaagatactaaaaagggcggccgc

SEQ ID NO: 1744 - DNA, 873 bp, Zea mays
  Clone ID: PAT_MRT4577_1863C.1
accatgcgtacggtgattttctttcgagccctgccaaataaataaataaaaacaggatctttgagatcgcgccgggtgccaagcagatgttctccttcctgcgcgacgccggcgacgcagccgctggagaaacaccccaagctcaaggccgcggaaaagctaaaacattttataatttggaacggagtatttgacttccgcgagcagatgttctccttcctgcgcgacgccggcgacgcgccgctggagaaacaccccaagctcaaggcccacgccgtcaccgtcttcgttatggcatgcgagtcggcgacgcagctgagaagcaccggcgacgtgaaggtgagggaggccaccctgaagcggctgggcgcgacgcacgccagggcgggcgtcgccgacgcgcatttcgaggtcgtcaagacggcgctgctggacaccatcagggacgcggtcccggacatgtggacgccggagatgaaggcggcgtgggaggaggcctacgaccagctggccgccgtcatcaaggaggagatgaagaacgccgccgccgccgaggagcagacgaagaacgccgccaccgccgaggaggagattaagaacgccgcccccgccgaggagcagacgaagatcgccgccgcggctgttgatggttcctagctcccatactacgctcctctgctagcgaccgtggcacgcgcaccgctgcgttgatgggtgcttttggactgctgctgggcctgatacctaactacgaagctgttgctaatgctgctgcatttttgtttgtcgaccgcatcattgtgatgataaataaaatgttcagaaaatgcccgttaattttataaacatctaaatatatttccaattgatatc

SEQ ID NO: 1745 - DNA, 952 bp, Zea mays
  Clone ID: PAT_MRT4577_1864C.1
tacccttcgaagggccggccgggaggtccccggggaacacacagaacatactcccgctgaagcgctgagaagtagataagaataatatggggttcagtgaggcacaggaagagctcgtcctccgttcatggaaagccatgaagagcgactccgagtcgactgctcttaagttcttcctcaggatctttgagatcgcgccgggtgccaagcagatgttctccttcctgcgcgacgccggcgacgcgccgctggagaaacaccccaagctcaaggcccacgccgtcaccgtcttcgttatggcatgcgagtcggcgacgcagctgagaagcaccggcgacgtgaaggtgagggaggccaccctgaagcggctgggcgcgacgcacgccagggcgggcgtcgccgacgcgcatttcgaggtcgtcaagacggcgctgctggacaccatcagggacgcggtcccggacatgtggacgccggagatgaaggcggcgtgggaagaggcctacgaccagctggccgccgtcatcaaggaggagatgaagaacgccgccgccgccgaggagcagacgaagaacgccgccaccgccgaggaggagattaagaacgccgccgccgccgaggaggagacgacgaacgccgccgcggctgttgatggttcctagctcccactacgctcctctgctagcgaccgtggcacgcgcaccgctgcgttgatgggtgcttttggactgctgctggcctgatacctacctacgaagctgttgctaatgctgctgcatttttgtttgtcgaccgcatcattgtgatgataaataaaatgttcagaaaatgcccgttatgcgagtgccaatgctgctgcatttttgtttgtcgcccgcatcatttttgtgatgatgaataaaatattcagaaaaggccaaaaaaaaaaaaaaaaaaaaaaaaaaaagccagt

SEQ ID NO: 1746 - DNA, 155 bp, Zea mays
  Clone ID: PAT_MRT4577_186537C.1
cactcgctccatctccccgagggccgccagaggcaatttcgccctcgattcgactccgattcgtccgcccgcgaacgggattcactccgccaagcgcggatctgatacgctgcgctccgtgtcgccgctcgaatcagccatgaaggggccaaatc

SEQ ID NO: 1747 - DNA, 258 bp, Zea mays
  Clone ID: PAT_MRT4577_186561C.1
gtcagtttgtatggctcgacagcctcgacttcaagtgttagcagctagcagaaacaaaatatcaactttgaagggatttccacattttccttctctagagcatttgcgtgttgaggagaatccactacttgagatgccacacttggaagctgcttctatcctacttataggtcctactttgaagaagttcaatgaccgagatctgaaccccaacgaggctgaggtagctaagcaatatcctgctcatacagctatttg

SEQ ID NO: 1748 - DNA, 290 bp, Zea mays
  Clone ID: PAT_MRT4577_186651C.1
ctcccacattaataaaggttaatgatggcatgatcggacagaggaaaacttactgtcttcttgggctcgccactaataatagtacaagcttactgcctttaactaatgtatttcttacacaaccacaaggaaagcaagccgggctttaaacggccgaaaaacacccaacgccatgggggtgggggcgcctagttctatactagaagggggtgtggtacctgggttgtgcctgggcctggattttgggccccctcccggtgtgagtgcccagtcccgaccttattggccag

SEQ ID NO: 1749 - DNA, 1017 bp, Zea mays
  Clone ID: PAT_MRT4577_18668C.1
attagacttctggaccctcctctccacgagttccttccagagggaatgttgaggaaattgtgcgtgaattatgtgctgaaacgggagccaatgaggaagaagcccttgaacgagttgaaaagcttgcagaagtaaatcccatgcttggtttccgtgggtgcaggcttggtatctcgtaccctgaattaacagaaatgcaagcccgtgccatctttgaagctgctatagcaatgtccaaccagggtgttgaagttttcccagagatcatggttcctcttgttggaacaccacaggaattgggacatcaagtgaatgttatcaaacaaactgctgagaaagttttcgccaatgcgggtaaaactattggctacaaaattggaactatgattgaaattcccagggcagctctagtggctgatcagatagcagagcaggctgagttcttctcttttggaacgaacgacctcacacagatgacttttggctacagcagggatgatgtgggaaagtttattcccatttacctggctcagggtatcctccaacatgacccctttgaggttctcgaccagagaggagtgggcgaactggttaagtttgctacagagaggggccgccaaactaggcctaacttgaaggtgggcatttgtggagaacatggtggagagccttcatcagttgctttcttcgccaaggttgggctggattacgtttcttgctcccctttcagggttcccattgctaggctagctgcagctcaggtgcttgtctgagggtgctgagggtgcctcctcattcgcaaccggatgatcgcctgctgttggcgcatctggtgattaataatattgttacagagccatgatctgtgaagataattagtagcagggctcataaaagctacaattccatccctttttgcagttatgtaaaactttcaaactgtttatgctcaaaaactctgttcttcaatggatcatcaattatcgattatatatgtgtcaagggcttcttcttttc

SEQ ID NO: 1750 - DNA, 832 bp, Zea mays
  Clone ID: PAT_MRT4577_186916C.1
tcgaggggccggccgggcccgggaccaaaatcataagcaaccaaccaaccaactgcaaagcagaagcaggaacgagagatcaagatcgatctttctctttgagttcccggagcgatcgagtgggttaatggcgaccgccgggaaggtgatcaagtgcaaagcggcggtggcatgggaggccgggaagccgctgtcgatcgaggaggtggaggtggcgccgccgcaggccatggaggtgcgagtcaagatcctctacaccgccctctgccacactgacgtctacttctgggaagccaaggggcaaactccggtttttccaaggatcttgggccatgaggctggaggcattgttgagagcgtcggagagggcgtgaccgagcttgtgccaggtgaccatgtcctgccggtgttcactggcgagtgcaaggattgtgctcactgcaagtcagaggagagcaacctttgtgacctcctcaggatcaatgtcgaccgaggcgtgatgatcggtgatgggcagtcccgcttcaccatcagcgggaaaccgatattccacttcgtcgggacctctactttcagtgagtacacagtgatccatgttgggtgcctagcgaagatcaacccctcggcacccctcgacaaagtttgtgttctcagctgtggtatctcaactggtcttggtgcgacgctcaatgtcgcaaaaccgaaaaaagggttcgacggtggcaattttcggtcttggagctgtaggccttgctgccatgcaaagggccaagatggctggggcatcaaggatcatccgtgtggacttgaaccctgcaaataccaacaagcc

SEQ ID NO: 1751 - DNA, 830 bp, Zea mays
  Clone ID: PAT_MRT4577_186918C.1
caccatcctctgcaatcaaccaactgcaaagcagaaacagcaacaaagatccatctttctctctgagttttcggagcgatcgtgggagttgatggagaccgccgggaaggtgatcaagtgcaaagcggcggtggcatgggaggcagggaagccgctgtcgatcgaggaggtggaggtggcgccgccgcaggccatggaggtgcgcgtcaagatcctctacaccgccctctgccacactgacgtctacttctgggaagccaaggggcaaactccggttttcccaaggatcttgggccatgaggctggaggcattgttgagagcgtcggagagggcgtgaccgagcttgcgccaggtgaccatgtcctgccggtgttcactggcgagtgcaaggattgtgctcactgcaagtcagaggagagcaacctttgtgacctcctcaggatcaatgtcgaccggggtgtgatgatcggagatgggcagtcccgctttaccatcggtgggaaaccgatattccactttgttgggacctctaccttcagcgagtacacagtgatccatgttgggtgcctagcgaagatcaaccccgaggcacccctcgacaaagtttgtgttctcagctgtggtatctcgactggtcttggtgcgactctcaatgtcgcaaaaccgaagaagggttcgacggtggcaattttcggtcttggagctgtaggccttgctgccatggaaggggccaagatggctggggcatcaaggatcatcggtgtggacttgaaccctgcaaaatacgaacaagctaagaagtttggctgcaccgactttgtaaacccaa

SEQ ID NO: 1752 - DNA, 326 bp, Zea mays
  Clone ID: PAT_MRT4577_187123C.1
gccggctgctgtcaagttccatctgtttgctatcgcagacatgtatggccgcggcaagggaggcaaggacctgagtaacggcggcgcgaaacgccaccgcaaggtgctccgcgacaacatccaaagcatcacgaacccggccatccagaggctggttcgaaagggcagcgtgataagcatctccaggctcatctaccatgagacctacggcgtgctcaagatctatatcgagaacgtcatccgagacgccgtaaactacacggagcacgcccggcgcaagaccgtcacagccatggacgtcgactacgcgctcaagcactatggtc

SEQ ID NO: 1753 - DNA, 2082 bp, Zea mays
  Clone ID: PAT_MRT4577_187144C.1
ccggccgggaattccgattccacgagaggaatcgacgtaaataaataaaaaaaaaaaaatacttgcttgactacttgagcaaagcgcgtgcgtcttcggtcgtcgccgggcgccagcggccagccgcaacccacaagcagagcaaaatattccgccaaggatccgtggaccgagcagcatctggcactgagctacatatacccgttgttcagccaccaccactgtccccaagcatcaagctaggcaggcttggtcccgaagaacacccttctctggtcgtcgcatcgcagggcagctagctaggtagctaacatccgccatggcgcgcgggggagacggcctgcaggtgctgagcgcgctggacgcggcgaagacgcagtggtaccacttcacggccatcatcgtcgccggcatgggcttcttcacggacgcctacgacctcttctgcatctccctcgtcaccaagctgctgggccgcatctactacacggacaccagcaaggacagccccgggtcgctgccgcccaacgtcgcggcggcggtcaacggcgtggccttctgcggcacgctggccgggcagctcttcttcggctggctgggcgacaagctggggcgcaagagcgtgtacgggatgacgctcatggtcatggtcatctgctccgtcgcgtcgggcctctcgttcggccacacccccacgggggtcatggccacgctctgcttcttccgcttctggctcggcttcggcatcggcggcgactacccgctgtcggccaccatcatgtccgagtacgccaacaagaggacccgcggcgccttcatcgcggccgtcttcgccatgcagggcttcggcatcctcgccggcggcatcgtcacgctcgtcatctccgccgccttccgcgcggcgtacccgtccccggcgtacagggacgaccacttcacctccaccgtgccgcaggccgacttcgtgtggcgggtcatcctcatgctcggcgccgcgccggcgctgctcacctactactggcggatgaagatgcccgagacggcgcggtacacggcgctggtggccaagaacgccaagcaggccgcggccgacatgtccaaggtgctgcacacggagatcctggacgagcaggagaagctggacgggatggtcgccgccgagggcgccaacagcttcggcctcttctccagggagttcgcgcgccgccacggcctccacctcgtcggcaccgccaccacctggttcctgctcgacatcgccttctacagccagaacctgttccagaaggacatcttcaccagcatcaactggatccctaaggccaacaccatgagcgcgctggaggaggtgtaccgcatctcccgcgcgcagacgctcatcgcgctctgcggcaccgtcccgggctactggttcaccgtcgcgctcatcgacgtcgtcggccgcttcgccatccagctgctgggcttcttcatgatgaccgtcttcatgctcggcctcgccatcccctaccaccactggaccacgccgggcaaccacatcggcttcgtcgtcatgtacgccttcaccttcttcttcgccaacttcgggcccaacagcaccaccttcatcgtgcccgccgagatcttcccggcgcgactgcgctccacctgtcacggcatctccgccgcctcggggaaggccggggccatcatcggcgcgttcggcttcctgtacgcggcgcagaaccaggacaagagcaagacggacgccggctaccccgcgggcatcggcgtgcgcaactcgctcttcgtcctcgccgccagcaacatgctcggcttcgtcctcacgttcctcgtgccggagtccaagggcaagtcgctcgaggagatgtctggtgaggctgaagactcagaggaggagcccgtcggcgcccgtgcggtgcggccgtcggagacccagatggtgtagagaatcgatcgatcgacgcgtgttccttcctgcactgcacatggtgggctatcatgtcctcaattgtttttttccacgttaaagtcaaccctggctgtgttttgatgtgtaaaaaaaaaaaaaaaaaagcggcc

SEQ ID NO: 1754 - DNA, 2351 bp, Zea mays
  Clone ID: PAT_MRT4577_187145C.1
cgggaacggacagagtgaactcaatctcttgggtgatgatcccccctcgcctccccctgtgtaatttcgattccgacgagaggaatcgacgtaaataaaacaaaaccaaaatacttgcttgactacttgagcaagcgcgtgcgcgtcttcggtcatcgcagtcgtcgccgggcgccagcggccagccgcaacccacaagcagagcaaaatattccgccaaggatccgtggaccgagcagcatctggcactgagctacatatacccgttgttcagccaccaccactgtccccaagcatcaagctaggcaggcctggtcccgaagaacacccttctctggtcgtcgcatcgcagggcagctagctaggtagctaacatccgccatggcgcgcgggggagacggcctgcaggtgctgagcgcgctggacgcggcgaagacgcagtggtaccacttcacggccatcatcgtcgccggcatgggcttcttcacggacgcctacgacctcttctgcatctccctcgtcaccaagctgctgggccgcatctactacacggacaccagcaaggacagccccgggtcgctgccgcccaacgtcgcggcggcggtcaacggcgtggccttctgcggcacgctggcggggcagctcttcttcggctggctgggcgacaagctggggcgcaagagcgtgtacgggatgacgctcatggtcatggtcatctgctccgtcgcgtcgggcctctcgttcggccacacccccacgggggtcatggccacgctctgcttcttccgcttctggctcggcttcggcatcggcggcgactaccctctgtcggccaccatcatgtccgagtacgccaacaagaggacccgcggcgccttcatcgccgccgtcttcgccatgcagggcttcggcatcctcgccggcggcttcgtcacgctcgtcatctccgccgccttccgcgcggcgtacccgtccccggcgtacagggacgaccacttcacctccaccgtgccgcaggccgacttcgtgtggcgggtcatcctcatgctcggcgccgcgccggcgctgctcacctactactggcggatgaagatgcccgagacggcgcggtacacggcggtggtggccaagaacgccaagcaggccgcggccgacatgtccaaggtggtgcagactgagatcgtggacgagcaggagaagctggacgccgctgagggcgccaacagcttcggcctcttctccagggagttcgcgcgccgccacggcctccacctcgtcggcaccgccaccacctggttcctgctcgacatcgccttctacagccagaacctgttccagaaggacatcttcaccagcatcaactggatccccaaggccaacaccatgagcgcgctggaggaggtgtaccgcatctcccgcgcgcagacgctcatcgcgctctgcggcacagtcccgggctactggttcaccgtcgcgctcatcgacgtcgtcggccgcttcgccatccagctgctgggcttcttcatgatgaccgtcttcatgctcggcctcgccatcccctaccaccactggaccacgccgggcaaccacatcggcttcgtcgtcatgtacgccttcaccttcttcttcgccaacttcgggcccaacagcaccaccttcatcgtgcccgccgagatcttcccggcgcgcctgcgctccacctgccacggcatctccgccgcctcggggaaggccggggccatcatcggcgcgttcggcttcctgtacgcggcgcagaaccaggacaagagcaagacggacgccggctaccccgcgggcatcggcgtgcgcaactcgctcttcgtcctcgccgccagcaacatgctcggcttcgtcctcacgttcctcgtgccggagtccaagggcaaatcgctcgaggagatgtccggtgaggctgaagactcagaggaggagcccgtcggcgcccgtgcggtgcggccgtcggagacccagatggtgtagagaatcgatcgatcgacgcgtgttccttcctgcactgcacatggtgggctatcatgtcctcaattgttttttttccacgttaagtcaaacctggctgtgttttgatgtgcacaagtcgttcgcatacgtagtacgtgtgtgatggtagagcaggtgaatcgcatcgcatgtggcagtctggtagaggtccacgtgtgataatatataggcgggaaagtagctaggtgaactttacactcgtatatccaaccatatataatcggttacgcgcgtttagcaactccactactccagcaaataatctaaatcctaactcactagtttaaattcatttcttaatttagttctag

SEQ ID NO: 1755 - DNA, 2042 bp, Zea mays
  Clone ID: PAT_MRT4577_187147C.1
gtgcacaccaccaccactgcctccaagcttcaacaagctaggcagctgcaagcatctcccaaatcccagcctgctgccccgcgcgaacacacttctcttgtcgttgcattgcagggcagctagccggctacagcatccgccatggcgcgcggcggggacggcctgcaggtgctcagcgcgctggacgcggcgaagacgcagtggtaccacttcacggccatcatcgtcgccggcatgggcttcttcacggacgcctacgacctcttctgcatctccctcgtcaccaagctgctggggcgcatctactacacggacaccagcaaggacaacccgggctcgctcccgcccaacgtcgccgcggcggtcaacggcgtcgccttctgcggcacgctggccggccagctcttcttcggctggctcggggacaagctcgggcgcaagagcgtgtacgggatgacgctcatgctcatggtcatctgctccgtcgcgtcgggcctctcgttcggccacacgcccacggggggtcatggccacgctctgcttcttccgcttctggctcgggttcggcatcggcggggactacccgctgtcggcgaccatcatgtccgagtacgccaacaagaagacccgcggcgccttcatcgcggccgtcttcgccatgcagggcttcggcatcctcgccggcggcattgtcacgctcgtcatctccgccgccttccgcgcggggtacccggccccggcgtacagggacgaccacttcaactccaccgtgccgcaggccgactacgtgtggcgcatcatcctcatcctgggcgccgcgccggcgatgctcacctactactggcggatgaagatgcccgagacggcgcgctacaccgcgctcgtggccaagaacgccaagcaggccgcggccgacatgtccagggtgctccagacggagatcgtcgacgagcaggagaagctggacgagatggtcaccgccgagagcaacaccttcggcctcttctccagggagttcgcgcgccgccacgggctccacctcgtcggcacctccaccacgtggttcctgctcgacatcgccttctacagccagaacctgttccagaaggacatcttcaccagcatcaactggatccccaaggccaacaccatgagcgcgctggaggaggtgttccgcatctcccgcgcccagacgctcatcgcgctctgcggcaccgtcccgggctactggttcaccgtcgcgctcatcgacgtcgtcggccgcttcgccatccagctgctcggcttcttcatgatgaccgtcttcatgctcggcctcgccatcccctaccaccactggaccacgcccggcaaccacatcggcttcgtcgtcatgtacgccttcaccttcttcttcgcaaacttcggccccaacagcaccaccttcatcgtgccggccgagatcttcccggcgcggctgcggtccacatgccacggcatctccgccgcctcggggaaggccggcgccatcatcggggcctttgggttcctgtacgcggcgcagaaccaggacaagagcaaggcggacgccgggtaccccgcgggcatcggcgtgcgcaattcgctcttcgtcctcgctgcctccaacttgcttggctttatcctcaccttcctcgtgccggagtccaagggtaagtcgctcgaggagatgtccggggaggctgacgacgccgaggacgacgccgtcggcacccgcgcggtgcggccgtcggggacccagatggtgtagaatcgaacatggcgacgcgtgcacacgggtcctccatcctggggcccgactgggaagacaaggcgcgccggttcaagcctgccgatgctttgctgtgcagaagtagttcgtacaggtgcatgtgtgttataggcgggaaagtaagtgaacttacatgcttgtatttattatatccaaccttacgtacagcaactccagctccattgcatcatctagtccacaaatattatatatattagcagttcatatgaaaaaaaaaaaaaaaaaagcggcc

SEQ ID NO: 1756 - DNA, 2317 bp, Zea mays
  Clone ID: PAT_MRT4577_187148C.1
ccattcgtccgcgtaaataaaacaaaaccaaaatgcttgcttgactacttgagcaagcgcgtgcgcgtcttcggtcatcgcagtcgtcgccgggcgccagcggccagccgcaacccacaagcagagcaaaatattccgccaaggatccgtggaccgagcagcatctggcactgagctacatatacccgttgttcagccaccaccactgtcccccaagcatcaagctaggcaggcctggtcccgaagaacacccttctctggtcgtcgcagggcagctaacatccgccatggcgcgcgggggagacggcctgcaggtgctgagcgcgctggacgcggcgaagacgcagtggtaccacttcacggccatcatcgtcgccggcatgggcttcttcacggacgcctacgacctcttctgcatctccctcgtcaccaagctgctgggccgcatctactacacggacaccagcaaggacagccccgggtcgctgccgcccaacgtcgcggcggcggtcaacggcgtggccttctgcggcacgctggcggggcagctcttcttcggctggctgggcgacaagctggggcgcaagagcgtgtacgggatgacgctcatggtcatggtcatctgctccgtcgcgtcgggcctctcgttcggccacacccccacgggggtcatggccacgctctgcttcttccgcttctggctcggcttcggcatcggcggcgactacccgctgtcggccaccatcatgtccgagtacgccaacaagaggacccgcggcgccttcatcgccgccgtcttcgccatgcagggcttcggcatcctcgccggcggcatcgtcacgctcgtcatctccgccgccttccgcgcggcgtacccgtccccggcgtacagggacgaccacttcacctccaccgtgccgcaggccgacttcgtgtggcgggtcatcctcatgctcggcgccgcgccggcgctgctcacctactactggcggatgaagatgcccgagacggcgcggtacacggcgctggtggccaagaacgccaagcaggccgcggccgacatgtccaaggtgctgcacacggagatcctggacgagcaggagaagctggacgccgccgagggcgccaacagcttcggcctcttctccagggagttcgcgcgccgccacggcctccacctcgtgggcaccgccaccacctggttcctgctcgacatcgccttctacagccagaacctgttccagaaggacatcttcaccagcatcaactggatccccaaggccaacaccatgagcgcgctggaggaggtgtaccgcatctcccgcgcgcagaccctcatcgcgctctgcggcaccgtccccatcggcttcgtcgtcatgtacgcgggctactggttcaccgtcgcgctcatcgacgtcgtcggccgcttcgccatacagctgctgggcttcttcatgatgaccgtcttcatgctcggcctcgccatcccctaccaccactggaccacgccgggcaaccacatcggcttcgtcgtcatgtacgccttcaccttcttcttcgccaacttcgggcccaacagcaccaccttcatcgtgcccgccgagatcttcccggcgcgcctgcgctccacctgccacggcatctccgccgcctcggggaaggccggggccatcatcggcgcgttcggcttcctgtacgcggcgcagaaccaggacaggagcaagacggacgccggctaccccgcgggcatcggcgtgcgcaactcgctcttcgtcctcgccgccagcaacatgctcggcttcgtcctcacgttcctcgtgccggagtccaagggcaagtcgctcgaggagatgtccggtgaggctgaagactcagaggaggagcccgtcggcgcccgtgcggtgcggccgtcggagacccagatggtgtagagaatcgatcgatcgacgcgtgttccttcctgcactgcacatggtgggctatcatgtcctcaattgtttttttccacgttaaagtcaaccctggctgtgttttgatgtgcacaagtcgttcgcatacgtagtacgtgtgtgatagtctggtagagcaggtgaatcgcatcgcatgtggcagtctggtagaggtccacgtgtgataataaataggcgggaaagtagctaggtgaactttacactcgtatatccaaccatatataatcggttacgcgcgtttagcaactccaccactccagcaaataatctaaatcctaactcactagtttaaaaaaaaaaaaaaaaaaaaaaaaaaaaaaaataaaaaaaaaaaaaaaaaagcggcc

SEQ ID NO: 1757 - DNA, 406 bp, Zea mays
  Clone ID: PAT_MRT4577_187161C.1
tcgcaactagcaacaagaaagacacaatttttttttttataatggcaagccaaaatatttcgcctcatgatgctccttggtctggctgcaagtcctcgctactgcaagccatttcacccaatgctcacaagctctctataactttccttcttaccccatacctctcaccatcgatgtcttcagtatgtgaaaatccaattcttctaccctacaggatccaacaggcaatcgcagcaggcatcttacctttatcacccttgttccttcaacaatcatcatccctattacaagagctacctttgcggcatttattggcacaaaacattagggcacaacaactacaacaactcgtgcttgctaaccttgctgcctactctcaacaacaagcagttacctttggggcatt

SEQ ID NO: 1758 - DNA, 739 bp, Zea mays
  unsure (1)..(739): unsure at all n locations
  Clone ID: PAT_MRT4577_18853C.1
gggtacccccgngagccggccgggnactcactcacccgccgcccccgccgacgacatgcccctccttgccgactccggacacggactcgtgaatacctttgctcctacctccgccgcagccgctgccatggactcacacgccggcgcccgaggcggctcccggagcctcctcttccgccaccgccagcctgacgaggatctggaggggggcgagggggcgatgaccctggatgagcgagtcactctgctagcgacggatcgaggaggagagcatgcagcaggactagctcaggcgcctggttgagaacaagcccgggcccatctgttactacggcctagagccctcctaacgcatgcacagtcgacaaggcattgcgaagaccatcaacaagacaagatggtacaacaccgagcgcaaggggaaaatcaggattgccgactggttcgagcagctcaacaacaagatgagaggcgacctcaagaaaatccacacagtgatgcagctacatgagacaatatttgcaaggcggtcgagatgaaccaaaacaggtgtggaggtcctgtggctacccgaggagatcaaacggagcgcctacaagcactggacaatcgccatggacattgaccagaaaaacagcgagaaacggacaacgagatgctggcaaaatatgagcagaagtgaccaggactacatgactgctggccagattttctacccttgcatgcaatgtgctgatat

SEQ ID NO: 1759 - DNA, 447 bp, Zea mays
  Clone ID: PAT_MRT4577_18938C.1
aagaatctagaaatgtctttcttatttctgggtatgcccaggcatcacacacaaaatttatggttgaactataactcactaagaaatctaaaagagggcacctccaatcatcggctgttggttgaacgctgctggggttgggaaagcaagttggttcaatggcagcggttgttgctgttgttagagggtgccagcgttaggcgcagcgtgctggtccaacggtgacaactgtggctgtttcaagaaggtggcagggctcacaccagctagctggctgaatgggagtggatggagctgctgtaaataagcaggagagttcaatgctgccagttggctgaatggaagatattgctggcggttggcaccacggagctggctgaatggtagttgctgttgccgcaaataaagaagcagattaaatgcatcttgtttgttgaatggaagaaa

SEQ ID NO: 1760 - DNA, 359 bp, Zea mays
  Clone ID: PAT_MRT4577_19019C.1
gcaacactctatagtgagtcgtattaatgcctgggccagcctgcatcttctacggccggaacatcggtctacacggacaagctgacggagatcggcgtcgtcgtggacgcgatgtggaagctgctcgacgcctggcctaacgagctgcccgcggtcgcttaagtcatccgagtttgtttttttgcaggattcttaaaagttggaccgtcctgctagtactccatgtgtcgtgttttcacattggaggacgtctgtatatgtaagaaaatcctctggcgcttgtgctcagcttgatgaaatatccttgtacggttggtacctggacccgctagagctggctggttcgtcaaattgtgttc

SEQ ID NO: 1761 - DNA, 539 bp, Zea mays
  Clone ID: PAT_MRT4577_1903C.1
accatattatagagaccaactagcaacatcgagagcacaatagtgcaccaacaatggcagccaaaatattttgcctcctatatgctccttggtctttctgcaagtgctgctctcggtgaccatttacccacaatgctcacaagttcctatagctagcctttttcccccgtcacctctcaccagcgctgtctatggattgtgaaaacccaattctacaaccctataggatccaacaggcaattcgaactggcatcttacctttatcacccttgttcctccaacaatcatcaacacctattacagcagatcacctttggtgcatttattgcaacaaaacatgaggacacaacaactacaacaacttgcgctagcaaaccttgctgcctactctcaacaacaacagttccttctcatacaaccaactagctgtattgtactctgctttttatttctaacaacaacaactaccattcaaccagctatttgctgcctacccccaagctatctcttgcatacaaccaactgcacagatttgaact

SEQ ID NO: 1762 - DNA, 365 bp, Zea mays
  Clone ID: PAT_MRT4577_19079C.1
cccgggaacgacactaattttttttttattctaatggcagggcccgaacgtaaggggacgggattacagcaaatcccgggggaaaaaaatactccacacccaaaatacgggaccaaacccaacattaacatccattattgggggttccgggaccctgaacatttgcaaactgaaaacaacaccttgttaaaaaacgcggaactggaccaacgcatccaagcgccctgaacaaacacaaacaagcacgcgacaaataaacaaagctaccatgggaaaacctcccagtctccgacccacgacgcataaacagacccccgttttttttttgttcacggggttcctccagcgcgcgcctgctgccttcc

SEQ ID NO: 1763 - DNA, 110 bp, Zea mays
  Clone ID: PAT_MRT4577_19105C.1
caagcagctggccgtcgacatgctcgctaacaagctcctctttgaggcttcggagtactcacatgtatgtaagcatgcctgctccaaggaagtcccccagcaccagcaca

SEQ ID NO: 1764 - DNA, 385 bp, Zea mays
  Clone ID: PAT_MRT4577_19228C.1
ggtttctcctccctctcttacaagtcctcctcgggttaggtatccttagcctcttgcggaggggcgatgtcggcgcttgatgtggagtaccgttgcttcgcccccggacttggctgggccaccagcaacgagtcgcttgagaatgtcttcgtctcctacggcgagatcctcgactccaaggtcatcgcctagcggtagacggggaggtcccacggcttcggattcgataccttctcctccgagaactgcatgctccacgctatcgagaacatgaacggtaaggaggtagacggccgtaacatcaccggtagccaggccgactcccgtggcgatggtgtcgatggtggtggctacggcggcgttctcgacgctgacgggcggtaat

SEQ ID NO: 1765 - DNA, 2936 bp, Zea mays
  Clone ID: PAT_MRT4577_19439C.1
ccctcttctccccccacccctccctcccccaccaaatcctcgttcattttttttccaagcgacttcgcgtgtgagggcgggagagcgcgcggggctagggtttccacgggtgatggaagcagaggctgccgcggcggtagtggcgtcgtccgcatctgcctcggcttccgcgggccggtctcgcccatctagcagcgccgcccaggtcaccagtaattcggctgtgcgagctggagaagaaaatgctgcctccctctatgttttatctgttattgactcgttaaaaaagaggattaccgcagatcgtttgacttacattaagaataggataggggagaacaagactaatatcagcagctatacacagaggacttacaatttatcaaaaaataggcaaattagtacatcaaagggtactgattcagcatcaaatttgctcacaaaaaggcaagatgatgcgctatgcaccctgcatagtcttgatattattccggttgacaaagatggtggtacttttcaagacgaaagtcctttctcttcatctaatgttatgtttggtggaaatcttggtcccaagaatgctattattagaccaattaaactaccagaagtgccaaagcttccaccttatacaacatggatatttttggacaggaaccaaaggatgacagaagaccaatctgtacttggtcgacggaggatttactatgataccagttgtggtgaagctctaatttgcagtgatagtgaagatgaagccattgaagatgaggaggaaaaaaaggaatttaaacattctgaagatcacattattcggatgacagttcaagaatgtggcatgtctgatgctgtactgcaaacgctagctcgacacatggagcgggctgctgatgacataaaggccaggacctgtgtgctgatggacatttctgctcattggtgatgctgataggtgtttgattgcaagctacatgggtgttctcaagatttagtatttcctacagaaaaacaaccagcttggagtggcgttgatgacagtgtaccctgtggtattcattgccataaactggcatctgaaccagatgctgctgctggtgctgatcacatgctttttgatgttgaggagccaactcactcatcagacaatgtgatgaaccagccaggttcaaataggaaaaagaacggctccagtggaaggaagactaaatctcaacaaagtgaaagctcttcaactgcaagagttatctcagaaagcagtgattcggaagtacatccaataagcaataaatctccacaacactcccctagtccctcaaaagttaaaattgggccgaaaggtggaatcagaaagattaccaatagacgaatcgctgagagaattcttatgagtgtgaagaaaggacaaagggaaatggcatcatctgattctaattttgttagtggatatcttttggcaagggacatgaagcttaggtctgatacacgaaatggaaataaggaattaattgtatcctcacaacagagttctccaagcacaagaagttccaaaaagaagagtacacctcaaattgggaacagctcagcttttgctgaggctcataatgattcaacagaggaagcaaataaccgtcattcagcaacagatggttacgatagttcaaggaaagaagaattcgtcaatgagaatttatgcaagcaggaggtgtacttgagatcatggaaggcaattgagcagggacttcttgtgaaaggattagagatttttggaaggaacagttgtttaattgctcggaaccttcttggtggaatgaagacgtgcaaagatgtttttcaatatatgaattatattgaaaacaacagtgcctctggagctcttagtggtgttgattctcttgttaaaggatatattaagggtactgagttgcgcacaagatcaagatattttagaaggcgaggtaaagtccgtcgtttgaagtacacctggaaatctgcaggttacaatttcaaaaggattaccgaaaggaaggatcagccttgtcgacaatataatccttgtggttgtcaatctacatgcggaaagcagtgtccatgtctttcaaatgggacatgttgtgagaaatactgtgggtgtccaaaaatttgcaagaatcgttttcgaggatgtcactgtgcaaagagccagtgtcgcagccgccaatgtccatgttttgcagctgacagggaatgcgatccggatgtttgcagaaactgttgggttgggtgtggtgatggtacattgggagttccaaaccagagaggagataattatgaatgccggaacatgaaactgcttcttaaacaacaacaaagggtcttacttggaagatcagatgtctctggctggggagcattcctcaagaatagtgttagcaaacatgaataccttggtgagtacactggggaactaatctcacacaaagaagcagataagcgtggaaagatatatgatcgtgagaactcatcgttccttttcaacctgaacaatgagtatgttcttgacgcatacagaatgggtgacaagctgaaatttgccaaccatgcccctgacccgaattgctatgccaaggttatcatggtaactggtgatcatagagtgggcatattcgccaaagaaagaatcctcgctggtgaagagttattctacgattaccgctatgagcctgacagagctcctgcttgggcccgtaagcctgaggcgtcgggagcaaaggatgatgggcaaccgttcaatgggcgtgcaaagaagctcgcccaaaacaaccgaggctgaatctgatttgattctttcattgttaggacaaatttggcagccattcaactaatacaaggaacctgtcattcataggccccaatttatttgaactcgtcattgtaactcgtatgtgcttgaattctcc

SEQ ID NO: 1766 - DNA, 3568 bp, Zea mays
  Clone ID: PAT_MRT4577_19440C.1
ccctcttctccccccactcctcccccaccaaatcctcgttcatttttttttccaagcgacttcgcgtgtgagggcgggagagcgcgcggggctagggtttccgcgggtgatggaagcagaggctgccgcggcggtagtggcgtcgtccgcatctgcctcggcttccgcgggccggtctcgcccatctagcagcgccgcccaggtcaccagtaattcggctgtgcgagctggagaagaaaatgctgcctccctctatgttttatctgttattgactcgttaaaaaagaggattaccgcagatcgtttgacttacattaagaataggataggggagaacaagactaatatcagcagctatacacagaggacttacaatttatcaaaaaataggcaaattagtacatcaaagggtactgattcagcatcaaatttgctcacaaaaaggcaagatgatgcgctatgcaccctgcatagtcttgatattattccggttgacaaagatggtggcacttttcaagacgaaagtcctttctcttcatctaatgttatgtttggtggaaatcttggtcccaagaatgctattattagaccaattaaactaccagaagtgccaaagcttccaccttatacaacatggatatttttggacaggaaccaaaggatgacagaagaccaatctgtacttggtcgacggaggatttactatgataccagttgtggtgaagctctaatttgcagtgatagtgaagatgaagccattgaagatgaggaggaaaaaaaggaatttaaacattctgaagatcacattattcggatgacagttcaagaatgtggcatgtctgatgctgtactgcaaacgctagctcgacacatggagcgggctgctgatgacataaaggccaggtatgaaattctgcatggtgagaaaactaaggattcttgcaagaaagggactgagcataatgtcaaagtggaagatttgtactgtgacaaagatttggatgcagcattggattcttttgacaatctcttctgtcgacgatgtctagtacgcttgactgtaactttcagatattcttttctaggacctgtgtgctgatggacatttctgctcattggtgatgctgataggtgtttgattgcaagctacatgggtgttctcaagatttagtatttcctgtaagttttcacaagttgaaagagttatttataaaattgtgtgtttacttgatttgtgtcttctttgtacagacagaaaaacaaccagcttggagtggcgttgatgacagtgtaccctgtggtattcattgccttttgctggcatctgaaccagattctgctgctggtgctgatcacatgctttttgatgttgaggagccaactcactcatcagacaatgtgatgaaccagccaggttcaaataggaaaaagaacggctccagtggaaggaagactaaatctcaacaaagtgaaagctcttcaactgcaagagttatctcagaaagcagtgattcggaagtacatccaataagcaataaatctccacaacactcccctagtccctcaaaagttaaaattgggccaaaaggtggaatcagaaagattaccaatagacgaatcgctgagagaattcttatgagtgtgaagaaaggacaaagggaaatggcatcatctgattctaattttgttagtggatatcttttggcaagggacatgaagcttaggtctgatacacgaaatggaaataaggaattaattgtatcctcacaacagagttctccaagcacaagaagttccaaaaagaagagtacacctcaaattgggaacagctcagcttttgctgaggctcataatgattcaacagaggaagcaaataaccgtcattcagcaacagatggttacgatagttcaaggaaagaagaattcgtcaatgagaatttatgcaagcaggaggtgtacttgagatcatggaaggcaattgagcagggacttcttgtgaaaggattagagatttttggaaggaacagttgtttaattgctcggaaccttcttggtggaatgaagacgtgcaaagatgtttttcaatatatgaattatattgaaaacaacagtgcctctggagctcttagtggtgttgattctcttgttaaaggatatattaagggtactgagttgcgcacaagatcaagatattttagaaggcgaggtaaagtccgtcgtttgaagtacacctggaaatctgcaggttacaatttcaaaaggattaccgaaaggaaggatcagccttgtcgacaatataatccttgtggttgtcaatctacatgcggaaagcagtgtccatgtctttcaaatgggacatgttgtgagaaatactgtgggtgtccaaaaatttgcaagaatcgttttcgaggatgtcactgtgcaaagagccagtgtcgcagccgccaatgtccatgttttgcagctgacagggaatgcgatccggatgtttgcagaaactgttgggttgggtgtggtgatggtacattgggagttccaaaccagagaggagataattatgaatgccggaacatgaaactgcttcttaaacaacaacaaagggtcttacttggaagatcagatgtctctggctggggagcattcctcaagaatagtgttagcaaacatgaataccttggtgagtacactggggaactaatctcacacaaagaagcagataagcgtggaaagatatatgatcgtgagaactcatcgttccttttcaacctgaacaatgagtatgttcttgacgcatacagaatgggtgacaagctgaaatttgccaaccatgcccctgacccgaattgctatgccaaggttatcatggtaactggtgatcatagagtgggcatattcgccaaagaaagaatcctcgctggtgaagagttattctacgattaccgctatgagcctgacagagctcctgcttgggcccgtaagcctgaggcgtcgggagcaaaggatgatgggcaaccgttcaatgggcgtgcaaagaagctcgcccaaaacaaccgaggctgaatctgatttgattctttcattgttaggacaaatttggcagccattcaactaatacaaggaacctgtcattcataggccccaatttatttgaactcgtcattgtaactcgtatgtgcttgaattctccatggcagctggtcctgccatccgtagagttaggtcccgtttgttttgaggaactaaaaattaatccctctattttagtcacattgagtctctagattgtcaaacggcgggactaaaacaaagactaaactatttgtctctagttcctcaagccatgacttaaagggaataaatcatataaattttatttttatccttcctttatttcagttacactaatgatgtaataattgtatgaggtattttggtcctcttagagcatctccaagtgactcttcattttttgctctctatttgactatctatttacgatttcatcaagccatgacttaaagggaataaatcacataaattttatttttatcaaaaaaaaaaaaaaaaa

SEQ ID NO: 1767 - DNA, 316 bp, Zea mays
  Clone ID: PAT_MRT4577_19480C.1
cggacgcactttccactcgagacactaccacaacaatgccaatactgtaccaacaatggcagccaaatattctgcctccttatgctccttgacctttctgcaagcgctgctacggcgaccattttcccgcaatgctcgcaacctcctatagcttcacttcttcccccgcacctctcaccaccggcgtcttcaccatgcgaaaaccccattcttcaaccctacaggatccaataggcaatgggacctgcaatcttacctttatcaccctcgtacctccaccaaccatcaatcctattactacagattagttttggag

SEQ ID NO: 1768 - DNA, 1592 bp, Zea mays
  Clone ID: PAT_MRT4577_19502C.1
gcgtgatgtatggcattgggtacctcgaggccggccgggagcgagtgatgcggtgacgtgctgctgctgttgtagtaggtggtggagcaagcccagtccccaatcccaccctgccacccaaccttgcttcttctccgatagctatttctctgctttctctccaatcttcccgggtttccctgattaaagatggctgaatcctttgttctcaataccggctcgaggatcccatcggttgggcttggcgtatggcaaatacaacctgacgctgccaacgacgccatctacgctgctgtcaaggctgggtatcggcatattgactgtgcagcagcatacaacaatgaggaggaggtgggcctggctttgaagaaattatttgaagatggtgtggttaagcgtgatgatttgtttatcacctctaagctatgggctgctaatcatgcacctgaagatgtggaagagggaatcgacaccacacttcaagatttgcagcttgactacttggacttgtacctcatccatggtccaatccgcatcaaaaaaggaactagcacgatgacccctgaaaactttctccctacagatatccctgctacatgggcagcgatggagaagttatacgactctggcaaagctcgtgcaatcggcgtgagtaacttctcttgtaagaagctgcatgatttgcttgccgttgcacgagtgcctccagcagtcaaccaggttgagtgtcatccggtttggcagcaagacaagctccggaagctatgccaatccaatggtgttcatctttctgcattctcgcctttaggctcacctggatctccttggatcaatgggccaagtgtcctcaagaaccccattgtggtctctgttgcagacaagttgcagaaaacgcctgcccaggtcgctctacgctggggaatccaaatgggccatagtgtactcccgaaaagcgccaatgagtccaggattaaggagaacattgacatatttggctggtctattcctgaagatttgatggccaagttctctgaaatcaaacaggtcaggctgctgacagctgagtttgtagttcaccctcaggccggctacaatacattggaggacttttgggatggtgaaatataaaagcatacaaatttgttcagaataaaagagccaggcgaggaaacaaccacaaaaaaggggagatcgaatgcataggccccaatacgatgaatttgggggtttacgtgattgctgaacacaagtattgtgtgactaatctgtgttttgatgtggtaaatgtaattgggttagtcacaataagagataagtgtctttgccacaagacttttggttcattggttgaagcatgatgtaaaccgtaaaggatattcatgaaaactaaggacgctatagagcaaatgtaggttgtgtgcatgcgcacagcaggcaactgcctcaagaactccgccgccggcgtcaacggcctcaacgccggtaacgccgccagcatcccctccaagtgcggcgtcagcatcccatacaccatcagcacctccaccgactgctccagggtgaactgaaccctaaaaaacaaccacggcccc

SEQ ID NO: 1769 - DNA, 810 bp, Zea mays
  Clone ID: PAT_MRT4577_19600C.1
cctcgaggccggccgggaacgaagtcgaagaagaggagtcgtaagggagcttgtactcgcggggtcagtggttggtatagtctgagtgagagtgagtcgatctagctagctgagctccgatcctcgatagctagctaggataccgccataccacaagtcttcttcacaagtgtaggagtgacagcaacaagagatcgatggcctctgccaccgggctcaaggcctgcttccttcgcaagaagtccagaatggggcgccaccaggcaggacgccgcgcctaagacgcccaccggctccatggtcgtccgcgcctacgactacgacgatgagctcgagaatgaccgctaaaatgattgttttgtcggggcggtgcatcctggagatggacgagtccaacgccacgtgcgggaagcggctggagaccatcgggatggacaacacggaggacaacagggaggcgtaccgcaagctgctggtcacggggccgggcctgggccagtacatctccagcgtcatcctcttcgaggagacgatggaccaggccgccgtcgacggacgcaagagcgtggacatcctggcggagcagggcatcgagacagggatcaaggaggacaagggccttgtcccgatcgccggctccaacaacgagtagtggtgccagggcctggacggcctggtgtaccgcgaggacgtctactaccagcagggcgcgcggatcgacaagtggcacaccgacgacagcatccctaacggtccctccgagctcgacgtcaatgaagccgcgagggggctcgcacgctacgacggcat

SEQ ID NO: 1770 - DNA, 286 bp, Zea mays
  unsure (1)..(286): unsure at all n locations
  Clone ID: PAT_MRT4577_19611C.1
gcggcaaatcccgccgcttcctccccacgcacccattaccatccttcccgtagcacgaggcgagccgggccgccggatatggcgccggctggcccgtacggcatagccgagtctcagcggctcgcggacctactgctgctggagggcaacgcctttgtgcggacggaacgcctgagcgccgtcatggtcgccttcaccggggccctaactctttgcccaaatggtgcagatagtggaccaaccaagcactctgctatanaacagcgagatgagtggactacagttg

SEQ ID NO: 1771 - DNA, 1538 bp, Zea mays
  Clone ID: PAT_MRT4577_19712C.1
ccacgcgtcccattgggtacctcgaggccgtccgggggtcggcctctctctctccaccacacttttttctccggacgcgctcgttcgttcgcgaaggcgccccttcctgccctcacatccgctcctccctccccgacaccgaccgacccctcgtccgctcgcctccctccccgatccccaccgccatggccgccgccgccgccgccgcgtcctcctcttcctcctccgaggttccgatcgccgcccgcacctgcgtctccgtcggcgaggtggcggtgggcgcggtggctacaggcagcggcgaccgggtggcggcggattgcggggtgtgcgccatctgcctcgacaggatagcgctccaggagacggccctcgtcaagggttgcgaccacgcctactgtgtgacctgtattttgaggtgggcatcctacaaggagaaccctctctgcccacagtgcaagcatccattcgaattcctcagcgtgcaccgctctctcgacggctgcctacatgactacctgtttgaggagagtgtttgcctccttctgagggcagcttggtttgaacctctgatcgtagaggctcacgaggaggctctggaagaagaagagtttctccaccagcagtaccaatacgatgatgacgaagatgatcttgacgaggaatcttattacatgaacaggtccccaagcatccgtattggtaacaggagatggggtgacaatgggtacatcaggggaggcaggaaagaggcgaggccagtgaatactgatgtggctgctggtccatccaggactccgaagaagaaagagaaagccgcatcctcttcggcgtcggtgtcagtgtctggttcggggtcaggatcggggtctgtatccaaggatgtcgctggaaggcgggcgaagagggcgcagaagcgagaagctgcagacaaggcagctgcagagaagcacctgaagcacctgcagaggttggggctgagaaaatcgccagagcctgtagtgcccgaggaggttgggccacaggtgaatgagtgacttaagccgccgcctagtgctatatggtgctgctaaaaacactgcagccctttgggccacaaaataatcttccactgtgaagagcttgagcgtggccttgtatcatggcagcttttcgcctcgttgtacatagtctagtttctcatcactgttttagattcagcacagaaatgcagctgctgtctgcacgactgttgcagctatgaagctgtatgtacctcactgttggtgcactattttagttattgctaatcacaggggatgcaatcggcatctgtgttgattactatggggacaaatgaggcgtggaaccaattctacaacgcaaacttgtaaccatatggaatcactcgccgttgacatgatactaatcctgttaactagaaaaaaccttgcttgctgaaccttgaaagtaatcatcgaattttgtccccaaatcgaagaatctgtgttgttgcccaaaaaaaaaaaaaaaaaaaaaaaaaaaaaaaacacccacac

SEQ ID NO: 1772 - DNA, 972 bp, Zea mays
  Clone ID: PAT_MRT4577_19785C.1
cgctcatcaacgccgacggcatcatcgaggagtccttctggcccgggaagtacgccgtcgagctcagctccgtggcgtacggcgcgacgtggcagttcgacacggaggcgctgcccaacgacctcgtcaagcgagggctcgccgtgcgccgggacggcgacggcgagctggagctcaccatcaaggactacccctacgcccacgacgggctcatgatctggaactccatcaagcagtgggtgaccgactacgtcggcgtctactacaagtccgacgaggccgtcgccggcgacgcggagctgaaggcgttctgggacgaggtgcggaacgtggggcacggcgacaagaaggacgagccgtggtggcccgtgctcaacacccgggacagcctcgtggagacgctcaccaccatcatgtgggtcacctccggccaccactcggccgtcaacttcgggcagtaccactacggcggctacttcccgaaccggccgaccaccatacggaagaacatgccggtggagtagggccgggacgaggagatgaggaaattcctctcgcagccggagacgacgctgctggacatgatgccgacgcagatgcaggccatcaggatcatgacgacgctggacatcctgtcgtcgcactcgcccgacgaggagtacatgggggagttcgcggagccgtcgtggctggtggaacccatggtgaaggcggcgttcgagaagttcagcggcaggatgaaggagatcgagggattcatcgacgagtgcaacaacaacccggagaacaagaaccggtttggagccgggatcgtgccgtacgagctgctcaagcccttctccaagccgggagtcaccgggaggggcatcccctacagcatctctatctgatgtcatcgagacctcatcctcagcattagtttcttggtatcaggctcaacagtctctcagctccatccccaataagttcaaa

SEQ ID NO: 1773 - DNA, 3094 bp, Zea mays
  Clone ID: PAT_MRT4577_19793C.1
gccggccgggtcgggaccgcgcgctcggtcgactactggctagcttgtttcagtcgtccgatctgatctacagaaaaagcaggggcagggcagctagccatgattcagatgaacatgaagcagcctctcgtgctgcccgcgcaccggggcaatgtcatcggctcgcgcctggcgtcgtcgccctctccggtggcggcggcggcggcggcggccagcaggcggaggggcgtcgtgtcctccccccgctcccggctccagcgccacatgcggctgccgaggatcagctgcagcgccaccgaggaggccagcggcgccgtgtcggccgtcaccgtggagaagatgctgacggtgacggcctcggtgcaggcggcgccggccatcggtcagatgtacttccagcgcgccctcgacgacgccggcgacttcttcggcaagacgctgctgatggaactcgtcagctccgaggtcgacgcaagtgagtagtaagacgggtctggagaagccgcgggtgacggcgttcgctcacaagacgctgcgggagggccactacgaggcggagttcaaggtgccggcgtcgttcgggcccgtgggcgcggtgctgctggagaacgagcaccacaaggagatcttcatcagggagatcaagctcgtcacgggcagcgacagcagcaccgccgtcaccttcggctgcaactcctgggtgcactccaagttcgacaacccggagaagcgcatcttcttcaccctcaagtcctacctgccgtccgacacgcccaagggcctggaggacctgaggaagaaggacctgcaggcgcttcggggcgacggccacggcgagcgcaaggcgtccgagcgcgtctacgactacgacgtgtacaacgacctgggcgacccggacaagaaccccgcccaccagcggcccgtgctgggcggcagcaagcggtacccgtacccgcgccgctgccgcaccggtcgccccaggaccaggaaggaccccgaggcggaggtgcgccatgggcacaactacgtgccccgcgacgagcagttctcggaggtcaagcagctcacgttcggggccacgacgctgcgctcgggcctgcacgcgctgctcccggccatcaggccgatgctcatcaagagggagctgcgcttcccgcacttcccggccatcgacgacctctacagcgacggcatcccgctgccggcgcagaccgggttgggcgccatccgcagcatcgtcccgcgcgtggtcaagctggtggaggacaccaccgagcacgtcctccgcttcgagctgccggacatgatagagagagaccgcttctcgtggttcaaagacgaggagttcgcgaggcagacgatcgcggggctcaacccgctgtgcatccagctcctgacggagttccccatcaggagcaagctggacccggaggtgtacggcccggcggagtccgccatcaccaaggagatcctggagaagcacatgagcggcggcgccgccatgaccgtggagcaggcgctcgcggcgaagcgtctgttcatcctggactaccacgacgtgttcctgccctacgtgcacagggtgcgcgagctgccggacacgacgctctacggctcccgcaccgtcttcttcctcacggacctgggcacgctgatgccgctggccatcgagctggtgcggcccaaatcgccgacgcagccgcagtggaagcgggtgttcacgcacgggcccgacgccaccgacgcctggctgtggaagcttgccaaggcgcacgtggtgacccacgacacggggtaccaccagctggtgagccactggctgcgcacgcactgctgcgtggagccctacatcattgccgcgaaccggcagctcagccggctgcacccggtgtaccgcctcctgcacccgcacttccgctacaccatggagatcaacgcgctggccagggaggcgctcatcaacgccgacggcatcatcgaggagtccttctggccgggcaggtacgccgtcgagctcagctcagcggcgtacggcgccacgtggcagttcgacacggaggcgctgcccaacgacctcgtcaagcgtgggctcgccgtgcgccgggacgacggcgagctggagctcaccatcaaggactacccctacgcgcacgacgggctcatggtctggaacaccataaggcagtgggcggccgactacgtcaacgtctactacaagtccgacgaggccgtcgccgccgaccccgagctgaaggcgttctgggacgaggtgcgcaacgtgggccacggcgacaagaaggacgagccgtggtggcccgtgctcgacacccgcgacagcctcgcggagacgctcaccaccatcatgtgggtcacctccggccaccactcggcggtcaacttcgggcagtaccacttcggcggatacttcccgaaccgcccgaccaccatccggaagagcatgcccgtggaggaggaggcgggccgggacgaagagatgaagaagttcctgaagcagccggagacgaccctgctggacatgctgccgacgcagatgcaggccatcagggtgatgacgacgctggacatcctctcgtcgcactcgcccgacgaggagtacatgggagagttggcggagccgtcgtggctggaggagcccatggtgaaggcggcgttcgagaagttcggcggcaggatgaaggagatcgagggattcatcgacgagtgcaacaacaacccggagctcaggaaccggtgcggagcagggatcgtgccgtacgaactgctcaagcccttctccaagccgggagtcaccgggaggggcatccccaacagcatctccatttgacccgtccgtcctctccatccaatgggggtttgccttattgcgtgcacgctagctagctgcttggaaataaaaataattaaaataaaaggtctcgtctgtactattgtattgtaccatggatcatatcgtacatgttgtgtcaatgcaaagaggcacgtttgagttaccattaggatgacattactagcagatcctttttatgttatcgtctttagaactttggatgaccaagaaatactgccagattat

SEQ ID NO: 1774 - DNA, 317 bp, Zea mays
  unsure (1)..(317): unsure at all n locations
  Clone ID: PAT_MRT4577_19842C.1
gttgcncncccgaaccagaacaaccagagagcggancaagaagaagaggcgcggcgccgcaacgggcggcgggagcgncgcancgaggagcggcgagcggagaaagccggcggacaaccccngcagcgagcggaagccgacgggcaacgangggnggagcgccggcccgaggacgcgggcggcggancncgccggccacgagaaggccaacccgcgcggcggcggcggggggcaccnccgcgcgagcccgcgcgacgggcgccagcaagccacggcggcagnggaccccgaagacaccccacgggagaaaggcacaa

SEQ ID NO: 1775 - DNA, 334 bp, Zea mays
  Clone ID: PAT_MRT4577_19845C.1
gctgcagcaccacaaagcaccattttttgcttaggattaacttataacaaatcctgacaggcgtaacagcatccatcgatccacagtgcatgctggctgatgcatgggtctgctggagccgaggatgaacacagcactaacaactgacacagagcgaccttgcaatcaaaaacacagatgggcaccaccaaacgtgacgacacgaagatataccctctggactagggtgaacatcactgttgcgaacgggatcacttgtcccgtcgggccccagcggtcaattgctaccgtttccgtaggagttgcccgaccccccgtcacggatggcaactgc

SEQ ID NO: 1776 - DNA, 1568 bp, Zea mays
  Clone ID: PAT_MRT4577_20026C.1
ggtaccctcggtgtcggccggggatgcgatcataccagcactaaagcccggattctcatagaactccgaagttaagcgtgcttgggcgagagtagtactaggatgggtgacctcctgggaagtcctcgtgttgcattccaccacagcatccgcagttccccgaccacaccgttcctccgaggtccgagcccaggagcagccccgcgccaggaggaagtttgttcttttaacaatatgtcgagggaggagaatgtttacatggccaagttggctgagcaggctgaaaggtatgaggagatggttgagtatatggagaaggtggctaagactgtagatgtggaagagctcactgttgaggagcgtaaccttctgtctgttgcatacaagaatgtgattggggctcgccgcgcttcatggcgcattgtttcttccattgaacaaaaggaggagtcccgtaagaacgaggagcatgtgaatcttatcaaggaatatcgtggcaagatcgaggctgaactgagcaatatctgtgatggcatcttgaagctgcttgactcccacctagtgccttcttctactgctgctgaatcaaaggtcttctacctcaagatgaagggtgactatcacaggtatcttgcggaatttaagactggtgctgagaggaaggaatctgctgagagcacaatggtggcctataaggctgctcaggacattgctctggctgagctggcacctacccatccgataaggctgggacttgctcttaatttttcagtgttctattatgagattctgaactccccagacaaagcttgcaacctggcaaagcaggcgtttgatgaagctatctctgagttagacagccttggtgaggagtcatacaaggatagcactctgatcatgcaactcctgagggataacttgaccctttggacatccgacctcacggaggatggtgctgatgagggcaaagatgcccagaaaggcgatgcaggcgagggacagtaatcttcggagggggtgcaaagttgttcgagccccaatgttttagatgctctatgctgtcgaagttgtgctgtgccattattgtagctgatttcgtctccattcacttctttttccttgttagtaggctggtattggtcgaattagtaccccattgctttgtgttgccgctagtccatgtggactggtattgttcccctggatttatttggcaagcgtgtccgtgctcgctctagcgttttattgagcttttaaagtcatcgcattcttttttgattgcaatcagttattggctggatatgcggtggctgtttggatcagaagtacagccggagtttcctcaccggagcgtgtaacatgtggaaattggaaaccacgcaaacgtctctcttatttgtacccctgagtacatagggctttttttaacagcttttcaaaaaaaaaaaaaaaaaaaaaaaaatggccatacaaaaaaaaaaaataaaaaaaaaaaaaaaacaaaaaaaaaaacaatacaaataccatacctcaaactgccataacgaaagaaaaaataaaacaggggg

SEQ ID NO: 1777 - DNA, 569 bp, Zea mays
  Clone ID: PAT_MRT4577_2019C.1
aagggaaaggattttaagttcctttttcccacgttccttttttttacccccccttaaaaaacagggccttttcacacttggggccgggttttaacatttaaggtttcaccaccaaaattttttttaacacagacaacattaatcaacatttgggcccaaaataaagttaacctaccccccccgtttaaaatccgggggcaaaagcccaaatgcgaaataaacagaggaaacccgctttaggcaggcaacccacgtttgcaacaccaaaaacacttccgccggggaacaaaagcagttgaccgaggggaaatcaacaaataatcgggttgcaattgttggggttgacggtctcggttcctccaacaaaggggtcgattttgccccacaggagggaaaaaacgggggcgaggaggacggaccaaagcaccacaatggtcggggggctgttttgggggcccatgaaacccttgaggaacgggtccaggggcttgatcacccacatggggaaaaaaccttaccgaaaagggggccccagaactcgtaaccgttgttgagcgcggccgaaaacc

SEQ ID NO: 1778 - DNA, 1039 bp, Zea mays
  unsure (1)..(1039): unsure at all n locations
  Clone ID: PAT_MRT4577_20206C.1
attgggtacctcgaggccggccgggacacggccccacacacttcacttcataggcgccccagcagagctcatctctgcctcctgtgtccttctccatgacagagaatctccactccaggaaaatggtacagccaaagaagtttcgtggagtccggcagcgccactggggctcctgggtctctgagatcaggcatcccctccttaagaggagggtctggctgggtacctttgagacggctgaggaggcagcgagagcatatgatgaggctgctgtgctgatgagcggacgcaacgccaagaccaacttcccaatccaaagaagcagcacaggggagcctaccccagctgcgggaagggacgcccgcagcaacttcagcagcggctcctctaccaccaacctgtcccagattctcagtgcgaagctccgcaaatgctgcaaggcgccatcaccgtccctgacctgtctccgccttgaccctgagaagtcccacattggtgtttggcagaagcgtgcaggagcccgtgctgactccaactgggtcatgacagtggagctcaacaaagatgcagcatccactgatgctgcatcacagtccacatcagcaacaactgctccaccagccacgccgatggatgaggaggagaggatcgcactgcaaatgatcgaagagttgctgagcagcagcagcccagcttcaccctcaaacggagatgaccaaggtcgcttcatcatctgaaaagcatggatcaaacagcacaagtcaccatcccagatcagagtttcgctaggtcggttggtacacaagcagttcaggttgcttcagtaatatagatatatgtctattactaaatccaacttacaagaactataaagtttgcaattgtgtgcagttctatgtacgtgaaaagctctacatacacatgttcctatcaagatactttgttacacatcaatgtcagtgatataattgcttataaaagaaataaatagattatgattgtgttactgctaaaaaaaaaaaaaaaaaaaaaccctant

SEQ ID NO: 1779 - DNA, 129 bp, Zea mays
  Clone ID: PAT_MRT4577_20284C.1
actaactacctgaggccggacatcaagcgcggccgcttctccttcgacgaggaggaggctatcatccagctccacagcatcctcggcaacaagtggtcagcgatcgcggcgcggctgcccgggcggacg

SEQ ID NO: 1780 - DNA, 244 bp, Zea mays
  Clone ID: PAT_MRT4577_20295C.1
ttttctattttcctcgcgccgccaccaacgcggccgtggcagtctcaatccctgacgggaaccatggctgtctcgcaggagtccctctctttggtgggcacgatgcgcggccacaacggcgaggtgactggttaacgcgaccccgatcgacaacttgccgttcattgtctcctcctctcgcgacaagtacctgctggtgtgggacctgactaacttggtccactccacctcggaaatacggcgc

SEQ ID NO: 1781 - DNA, 377 bp, Zea mays
  Clone ID: PAT_MRT4577_20297C.1
gtactcttcttatcttctggcgaagccacgaaacatcacaacgaaaaaactttattattcgaactataactgataaggaaatctaaaagagggcaccaccaatgatgggttgttggtagaatgctgctgggtttgtcaaagcaagttgtatgaatggcagcatgtgttgcagcttgtaagagggcgccagcgttaggcgcagcgtgctggctagaacggcaacaattgtggccgtgtcaagaaggtagcagggctcacaccagctagctggctgaatggcatcagttagttgctgctgtaaataagcacgataggtcaaagctgccagttgcttgactggaagaaactgctgtacgttggcacgcaatagctggctg

SEQ ID NO: 1782 - DNA, 378 bp, Zea mays
  Clone ID: PAT_MRT4577_20794C.1
gatggcttttcctcccccttcggttcgggttcgggttcgtgaggatctgcggggttcggaggcgtgggtgagcggatcgagatggccgcgtcagatgttgagtaccgatgcttcgtctgcgggctaggctgggccacggacgatcacttgcttcacaacgtcttgagcacctacggcgaggtcctcgagtacaagatcatcctcgatcggcagacgcataagtaccgcggattatgattcgacaccttctgcacggatgatgcgatgcagaacgccatcgagggcatgaacggtaaagagctgtactgctcgaacatcaccgtgaacgagggccagtcccgcggaggtcgtggaagcgagcgcggcggagggtactga

SEQ ID NO: 1783 - DNA, 246 bp, Zea mays
  Clone ID: PAT_MRT4577_20797C.1
cccccttctcgccttctccttctcttccctagtctagaggcgtgggctgcccaatcccttcggcccgcccgctcgacgtgatcccaccggcagccctggatccatacaagcaccgcccgtctagtgggagcaactccagcttctggaccaccaactttggtgcccgcgtctggaacaacaactctgcccttatcgtcggacggcgaggttcaatccttctcgcggactattatctattcgaaaagt

SEQ ID NO: 1784 - DNA, 249 bp, Zea mays
  Clone ID: PAT_MRT4577_20809C.1
gcgatggcggcggctgatgtggagtaccgttgctacgtcggcgggcttgcctgggccaccaggaacgagtcgctggagaaggccggcgcctcctacggcgagatcctcgactccaaggtcatcaccgaccggtagacggagaggacccgtggcttcggttatgttaccttctcctccgataactccatgctctacgctattgagaacatgaacggcaaggtgctagactgtcgtaacatcatcgttaac

SEQ ID NO: 1785 - DNA, 1915 bp, Zea mays
  Clone ID: PAT_MRT4577_21027C.1
cttggcagaaagaggggccggcacgcggccggcggcttttcaagacaccaaaaggggtttcggcatggatggatagcacacagcgagcgagcgagagcggtgagcccggccaccagcgccggaggccgtcgtcgtcttactagccgacgctcgacttgggcatgaattgctagccgcgcgggtgagagattgctaggtagccagctaggtacggtgtggggagttgaatcggaggtctgccgctcgaggcggcggcggcagaaggccggtaggatgaagaagctccactggctggtgcggttcctgttcgggccggtgccggtctacttctcggcgctggccatcctcatcgtgctcaccaacgcgcagtacttcgggctggtgggcgtcggcgtggcgccgcgcaccgcgaagctggcctcctcggcgcccgtggtcagcgtcatgaagtactgcgacatcttccgcggcgagtgggtgccggacgcggaggcgccctactacaaccacaagacgtgccacatgatccaggagcaccagaactgcctcaagtacggccgccccgacctgggcttcctcaagtggcggtggcggccctccggatgcgagctgccgcgcttcgacccgctgcagttcctgcagttcgcccgcgggaagtcgctggccttcgtcggggactcgctggcgcggaaccacatgcagtcgctgctctgcctcctgtcccaggtggcgtatcccaaggacctgtcggcgaacccgtcggaccagaacaaggtgtaccactaccgggcgtacaacttcaccatcagcatgttctggtcgccgttcctggtgcgcgcccgggagcccgaccacgacggccccgcgcacacgggccactggagcctctacctggacgagcccgacgacaagtgggtgtcccagatgccccgcttcgactacgtgctggtgtcggcggccaactggttctcccgcccctccctcttctacgagcggcggcgcctcgtcgggtgcagcttctgcagccgccagtacggcgtgcccgacctgacgctctactactcgcagcgccgcgcgtggcgcgtggcgctgcgcgccatcaacgacctggagcgcctgcgagggcgcgtcatcgtgcgcatgctctccccgatgtcgcacttcgagaacgggacctgggaccacggcggcgactgcaggcgcacgcagccgctgcgggcgaaccagaccgccatggagggccgcgacctgcacttctacaccgcgcagatggaggagttccgcgccgcggagaaggccgccgccgagaaggggcggcgcctgatgctcatggacgccacggcggcgatgctgatgcggcccgacggccaccccagccgctacgggcactggcccaacgagaaggtgcagctctacaacgactgcatccactggtgcctcccgggacccatcgacatctggaacgacatgctcttccagatgctcctcgcctagcagcaagcagcaaagattaaaaaaaaaactcagcaattcggtcgccggtaaccgtgcacagattggccttcttttttttgccttgtttcgtttttttaaaaaaagaagaaaatggtgcaattttgacaagcaaggattcgaaattcgccggtaaccctccgagatcatccgttccctcctctgcttgttctgtggtgtcgaaattgctccctgtctgtcggtcggcgccgtggaaaggggcaaagcaaacaaccaaaaagggccgctcgcagtcgcagcggtggcgcctttgattctgttgtagagtagtatatggctggcgcatgcaagctgtcgaaaaaaaaaggtcacggccgtcctctgatcttcgaaccgaattgaaatgaaagttcactccaaaaaaaaaaaaaaaaaagcggcc

SEQ ID NO: 1786 - DNA, 772 bp, Zea mays
  Clone ID: PAT_MRT4577_21028C.1
ccttccgggacgcggccaccggcttattcaagagcagcaaaaggggtttcggcatggatggatagcactagctagacatcacacagcgagcgagcgagagcggtgagcccggccaccagcgccggaggccgtcgtcgtcttactagccgacgctcgacttgggcatgaattgctagccgggtgagagattgctaggtagccagctaggtacggtgtggggagttgaatcggaggtctgccgctcgaggcgggaggcggcggcggcagaaggccggtaggatgaagaagctccactggctggtgcggttcctgttcgggccggtgccggtctacttctcggcgctggccatcctcatcgtgctcaccaacgcgcagtacttcgggctggtgggcgtcggcgtggcgccgcgcaccgcgaagctggcctcctcggcgcccgtggtcagcgtcatgaagtactgcgacatcttccgcggcgagtgggtgccggacgcggaggcgccctactacaaccacaagacgtgccacatgatccaggagcaccagaactgcctcaagtacggccgccccgacctgggcttcctcaagtggcggtggcggccctccggatgcgagctgccgcgcttcgacccgctgcagttcctgcagttcgcccgcgggaagtcgctcgccttcgtcggggactcgctggcgcggaaccacatgcagtcgctgctctgcctcctgtcccaggtggcgtatcccaaggacctgtcggggaacccgtcggacc

SEQ ID NO: 1787 - DNA, 253 bp, Zea mays
  Clone ID: PAT_MRT4577_21080C.1
cccggagcgcgtggtgcacgcgcgcggggcctccgccaagggcttcttctagtgcacccactacgtgacgtcggtgaggtgcgcctacttgctgcgcgcgcccgacatgcgtacgcccgtgatcgtgcgcttctagactgtgatccacgagcggtggtgcttgaagacgatgcgcgacccgcgcggtttcggcgtgaagttctacacgcgatagggcaactggaacctgctgggcaacaactgtcgggtgttc

SEQ ID NO: 1788 - DNA, 494 bp, Zea mays
  Clone ID: PAT_MRT4577_21176C.1
taatggagtctaagggtggcatactgtctagcagtagtcgttccatgatgtatgaagctccccttggctactgcattgaggacggtcgacctgccggaggcgcgaagaagttccagtctgctgcttactccaactgcgcgaagaaggcgtgctgatgtcccttttggcttcctcattctagcagtttaggatttgctttctgccactgtgattgtgaccaatgctctctggcctgctgcttgctgatcatcgaccagttccccaggcttgctccttgcgctcctccctcctccatctccagccttgcgttctgattcacctgctccaatggctgttctttctgctgctggtgcgtccccggtctccgctagtcgggccgagggctctgagacgcgccttgtgatcacattgtctgagggccctgtctttgtggaccctcatgggcgcggtttgcgtgccctctccgggggcccgtttgactgtgggccgggtct

SEQ ID NO: 1789 - DNA, 238 bp, Zea mays
  Clone ID: PAT_MRT4577_21206C.1
gaagaacaacccatgcgaatcagcctgcacttcaggggccgtgaactgagatggagggaacgctgctgcaagcggcagggatgcataaagtactatccacaatgaacattaccattccgatagccgtatcatctctgctctgagcacactctactctgatccgagctcatcccactattatgaatgtgattcacactttgactataactaactcgtctgacacatgcgagtaatattc

SEQ ID NO: 1790 - DNA, 487 bp, Zea mays
  Clone ID: PAT_MRT4577_21269C.1
agaacgcaggcccaagctttttttttttctttgttcttttttttttttgttcacattcaaccaactgtctacactgaaccctgctgctaatttgcagcaacaactattaccattaagcccgctatctgctgcctacccccagcaatttcttccattcaaccaactgacagcattgaactctcctgcttatttacagcagcaacaactactaccattcagccagctagctggtgtgagccctgctaccttgttgacacaaccacaggggttgccgttttaccagaacgctgcgcctaacgctggcacccttttacaactgtcaaaatcgctgccgttcaaccaacttgctttgacaaacccaacaaatttctaccaacaaccaataattggcggggcccttttttaaattgctgattacaaatagctcaataataaagtttttacagtgaggttagtggcttcccagaaataagaaagtacctcggcc

SEQ ID NO: 1791 - DNA, 463 bp, Zea mays
  Clone ID: PAT_MRT4577_21270C.1
agaacgcaggcacaagctttttttttttctttgttcttttttttttttgttcacattcaaccaactggctacactgaaccctgctggtaatttgcagcaacaactattaccattaagccagctatctgctggctacccccacaatttcttccgttcaaccaactgacagcattgaactctcctgcttatttacagcagcaacaactactaccattcagccagctagctggtgtgagccctgctaccttgttgacacaaccacaatggttgccgttttaccagaacgctgtgcctaaaggtggcaccctgttacaactgcaaaaatggctggcattcaaccaacttggtttgacaaacccagcgaatttctaccaacaaccaataaatggtggggcccttttttagattgctgatgagtataagctcaatagtacagtttttacactgaggttagtggcttccc

SEQ ID NO: 1792 - DNA, 271 bp, Zea mays
  unsure (1)..(271): unsure at all n locations
  Clone ID: PAT_MRT4577_2141C.1
ggaagtttcatttgatatgccanagtacgattgcatgcccgtttgtcgagggatgcatttgctgcactttgcccctggtggctacccggcagctgcaaaaatgctgaatctaagtagctctgctgtatctgggccatcaagaactcatgtggatcatgccgctcttaccggtgcctctcatccagcttctacggtcaagacacgcatgtgcaccatgtacaacactacagaagtgctgcagttcggggatacgtgccatttcgctcatagc

SEQ ID NO: 1793 - DNA, 1917 bp, Zea mays
  Clone ID: PAT_MRT4577_21539C.1
tttttttttcgcaaatcaggatccgtctttgggaatgctcttgaggaaagcaagttattcataaacgacaaataacttgagcaaatcgcttacaaatgataatcagataagtagagtcaacaagacaaaactgtatctggcaacgcacatcgcctcaccccagccgactacaccattattcttcagcaaaagcaaacagctccttccctcccccctcagctcaagcgataaccataagaaaacctgctacgcgactgcgtataatgcatatgcatgcaaaagataactgacaggccagtgtagcgaacttcatagcacacaacggcccgagtgagctgcaagccgtgtgctggctgcctagtaccggtagtgggcaggcttgtagggaccctcgatcggcacgctgatgtagtcggcctgagacttggtgagcttggtcagcttggcaccaagcttgcccaagtggagagcagcaaccttctcatcaaggtgcttggggagcacatacaccttcttctcatacttgccagagctcttctccttccacagttcaagttgggcaatgacctggttagtgaatgagcaggacatgacaaagctaggatggccagtagcacacccaaggttcatcaggcgaccctcagcaaggacaatgatgccagtgttgatctcggggaacacccagcggtcagtctggggcttgatggtgatgcgcttgacgccagggtaggtctcaaggccgagcatatcaatttcattgtcaaagtggccaatgttgcagacaatggcattgttcttcatcttcctcatgtggtcaaccatgatgatatccttgttgccagtggtggtcacgaagatgtcagcttcagagacaacgtcctccaagggaaggacctgaagaccctccatcagagcctggagggcacagatggggtcgatctcggtcacaatgacacgggcaccagcctgcttgagtgcagcggcacaacccttgccgacatcaccgtatccgcagaccacggcaacctttccggcgatcataacgtcagtggccctcatcagaccatcagggagcgagtggcggcaaccatacaggttgtcaaacttgctcttggtgacggaatcgttgacgttaatggcagggaagaggagggcgccggtctcctgcatctggtagagcctcttgacacccgtggtggtctcctcagagacgccgacaagcctctccttcatcttgcggtacttcttggggtcagccttgagcccgtcgcggatgatggtgagcacgatcttgaactcagcgttgtcggtggactccggatcggggatcttgccggtcttctcgtagtcctcctcggccttgacaccctcgtggatgagcagcgtggcgtcgccgccgtcgtcgacgatgaggtcggggccgcccgcctcgccccagtcgaggcagcgctcggtgcaccaccagtactcctcgagggtctcccccttccaggcgaacacggcggcggagtcgcgggcgatggcggcggcggcgtggtcctgggtggagaagatgttgcaggagcaccagcggacctcggcgccgagggcggtgagggtctcgatgagcacggcggtctggatggtcatgtggagggagccggagatcctagcgccggcgaagggcttggacgggccgaactcggtgcggcaggccatgaggccgggcatttcgacctcggcgaggtcgagctcgaggcgcccgaagtcggcctgcgagagatccttgaccttgtactcccggcccgacgaggtcttctccacggagagcgccatggcggcagaggagggagaactcgcgaattggatctgggagatggggaaatggaacgggagtgagggagaagacggccccggccggcctcgagggtcccaatg

SEQ ID NO: 1794 - DNA, 466 bp, Zea mays
  Clone ID: PAT_MRT4577_21542C.1
gaccctcgaggcctgccggggcgccgtctcctgcctactgtcgttcatttccccatctcccagatccaattcgcgagttctccctcctctgccgtcatggggctctctgtggagaagacctcgtctggacgggagtacaaggtcaaggatctctcgcaggcggacttcggccgactcgagattgagctggccgaggtcgaaatgcccgggctcatggcgtgccgcgccgagttcggcccgtcgaagcccttcgctggcgctaggatctaggggtctctccacatgaccatccagaccggcgtcctcatcgagaccctcaccgcgctcggcgccgaggtccgctgatgatactgcaacatcttctacacgcaagaccacgccgccgccgacatggcgcgcgactcggccgccgcgttcggctggaaagctgagaccctcgaatgagactggtggtgcaacgagcgct

SEQ ID NO: 1795 - DNA, 418 bp, Zea mays
  Clone ID: PAT_MRT4577_21544C.1
tgaattcggcacgaggatttccgcatgggccagatccaattcgcgagttctccctcctctgccgccatggcgctctctgtggagaagacctcgtctggacgggagtacaaggtcaaggatctctcgcaggcggacttcggtcgtctcgagattgatctggccgaggtcaaaatgcccgggcgcatggcgtgcctcgtcgtgttcggcccgtccaagcccttcgccggcgctaggatctcggggtctcttcacatgaccatccataccgccgttctcatcgagaccctcaccgcgctcggcgccgaggtccgctggtgctcctgcaacatcttctccacgcaggaccactccgccgcctgcatctcgcgcgactcggccgacgtgttcgacatggaaggagagaccctggacgaatact

SEQ ID NO: 1796 - DNA, 1941 bp, Zea mays
  Clone ID: PAT_MRT4577_21545C.1
ggccgcttttttttttttttttttcgtcaaactcggtactcaagcaaccaaaatcaacgcaaatcaggatccgtctttaagtatgctcttgaggaaagcaagttattcataaacgacaaataacttgagcaaatcgcttacaaatgataatcagataagtagagtcaacaagacaaaactgtatctggcaacgcacatcgcctcaccccagccgactacaccattattcttcagcaaaagcaaacagctccttccctccccctcagctcaagcgataaccataaggaaacctgctacgcgactgcgtatatgataatgcatatgcatgcaaaagataactgacaggccagtgtagcgaacttcatagcacacaacggcccgagtgagctgcaagccgtgtgctggctgcctagtaccggtagtgggcaggcttgtagggaccctcgatcggcacgctgatgtagtcggcctgagacttggtgagcttggtcagcttggcaccaagcttgcccaagtggagagcagcaaccttctcatcaaggtgcttggggagcacatacaccttcttctcatacttgccagagctcttctccttccacagttcaagttgggcaatgacctggttagtgaatgagcaggacatgacaaagctaggatggccagtagcacacccaaggttcatcaggcgaccctcagcaaggacaatgatgccagtgttggtctcggggaacacccagcggtcagtctggggcttgatggtgatgcgcttgacgccagggtaggtctcaaggccgagcatatcaatttcattgtcaaagtggccaatgttgcagacaatggcattgttcttcatcttcctcatgtggtcaaccatgatgatatccttgttgccagtggtggtcacgaagatgtcagcttccgagacaacgtcctccaagggaaggacctgaagaccctccatcagagcctggagggcgcagatggggtcgatctcggtcacaatgacacgggcaccagcctgcttgagtgcagcggcacaacccttgccaacatcaccgtatccgcagaccacggcaaccttaccggcgatcataacgtcggtggccctcatcagaccatcagggagtgagtggcggcaaccatacaggttgtcaaacttgctcttggtgacggaatcgttgacgttaatggcagggaagaggagggcgccggtctcctgcatctggtagagcctcttgacacccgtggtggtctcctcagagacgccgacaagcctctccttcatcttgcggtacttcttggggtcagccttgagcccgtcgcggatgatggtgagcacgatcttgaactcagcgttgtcggtggactccgggtcggggatcttgccggtcttctcgtactcctcctcggccttgacaccctcgtggatgagcagcgtggcgtcgccgccgtcgtcgacgatgaggtcggggccgcccgccggcgccccagtcgaggcagcgctcggtgcaccaccagtactcctcgagggtctcccccttccaggcgaagacggcggccgagtcgcgcgcgatggcggcggcggcgtggtcctgggtggagaagatgttgcaggagcaccagcggacctcggcgccgagggcggtgagggtctcgatgaggacggcggtctggatggtcatgtggagggagccggagatccgggcgcccttgaagggctgcgagggcccgaactcggcgcggcaggccatgaggccgggcatctcgacctcggcgagctcgagctcgaggcggccgaagtcggcctgggagaggtccttcaccttgtactcccggccggacgcggtcttctccacggagagcgccatggaggaggttggtggattggatctgccgaggagggagaggagtggtggggggaggcggcgatggagagggttt

SEQ ID NO: 1797 - DNA, 678 bp, Zea mays
  Clone ID: PAT_MRT4577_21546C.1
ggtcgtgccggggtcgtcttctccctcactcccgttccatttccccatctcccagatccaattcgcgagttctccctcctctgccgccatggcgctctctgtggagaagacctcgtctggacgggagtacaaggtcaaggatctctcgcaggcggacttcggtcgcctcgagattgatctggccgaggtcgaaatgcccggtctcatggcgtgtcgcgctcgagttcggcccgtccaagcccttcgccggcgctaggatctcggggtctctccacatgaccattccagaccgccgtccttcagtcgagacccttcaccgcgcttctgcgccgaggtccgctggtgctcctgcaacatcttctccacgcaggaccacgctctccgctcgtcatcgcgcgcgactcggtctccgtgttcgcctgggaagggggagaccctcgaggagtactggtggtgcaccgagcgctgcctcgactggggcgaggcgggcggtcccgacctcattcgacgacgacggcggcgacgccacgctgctcatccacgagggtgttcaagccgaggaggactacgaagaagaccggcaagatcccccgatccggagtccaccgacaacgcccgagttcaaagatcgggctcaccatcatccgcgaagggctcaaaggtgaccccaagaagtac

SEQ ID NO: 1798 - DNA, 447 bp, Zea mays
  Clone ID: PAT_MRT4577_21551C.1
ttccgttcgacccacgcgtgcgcctactctcgtccatttccccatctcccagatccaattcgcgagttcttcctcctctgccgccatggcgctctctgtggagaagacctcgtctggacgggagtacaaggtcaaggatctctcgcaggcggacttcggtcgcctcgagattgagctggccgaggtcgaaatgcccggcctcatggcgtgccgcgccgagttcggcccgtccaagcccttcgccggcgctaggatctcggggtctcttcacatgaccatccagaccgtcgtcctcatcgagaccctcaccgcgctcggcgccgaggtccgctggtgctcctgcaacatcttctccacgcaggaccacgccgtcggcgtcatcgcgcgcgacttggtcggcgggttcgcctggaaaggggagacccttgaggagtactggtggtgcac

SEQ ID NO: 1799 - DNA, 305 bp, Zea mays
  Clone ID: PAT_MRT4577_21705C.1
ctcggtccggaattccggcggcgcacgcatccgagatacatttccactgcaaccaatatgtttgcatagatggcgctcctagctctttgtacatccgccactagtgcgacccatatcccagggcacttgtcaccactactgataccattggctaccatgaacccatcgatgcagtactgcatgcagcaacacgtggttgcccacttgctagcctagccgaccctgatgctgcatcaactgctggcctaaccgcttcagccatgccagatgccaatcatgatgccaggtatgatgccaccgatgac

SEQ ID NO: 1800 - DNA, 1431 bp, Zea mays
  Clone ID: PAT_MRT4577_2185C.1
cattgggtacctcgaggccggccgggatagatttcattggaatcctcgaggccggccagtcatatctcccaagagcggcaagcctagcaatcaacaattcccccggtcgttttcacttgacatcccccgtcccatagatcgccggcgatggctccggccgttgccgcggcggcgtcggcggcgatgaggcaggcactgcgggaccggcagatcctcgatgccgtgggcactggcgctgcggcgctctcgctggcaggctcttccttcatcgtgatctgctacctcctcttccgcgagctccgcaagttctccttcaagctcgtcttctacctagccgtctcggatatgttttgcagcttattcactatattgggggggccatcgaatgcattttactgctttgcacatgactacagtgctcatttcttctgtgtggcttcttttctatggacaaccaccatatcattcactctgcatcgcacagttgtaaaacacaaaactgatgttgaagaatttggatctattttccacttatatgtgtggggaacttcactatctaccactgtattacgttcgataggaagtgactacggaagaccaggcacctggtgctggattcagcagggaagcatggcaaaggtcctacatttaataaccttttatcttccactttggggtgccattttgtacaatgggtttacatactatgaagtaaaccgcatgctgaataatgcaacgcagatggctgctggcataagtgatcaatcaaatcagtctgacattagggcaggcaggaaggcatttaaccgatggggttattaccctctaattctaatcggttcatgggcttttgcaactatcaatcgtctttatgactttgccaatccagggcacaggatagtctggctctcctttcttgatgttgggttcgctggacttatgggcctattcaattccattgcttatgggctaaactcttctgtgcgccgagctatttcagagagaatcgacacgttcctacctgagagaataaaaaggagcctccctgctttgtcaaggctgaggagtcaacaggaaaatgaactcacttctcttatcgttgagggtaactgatatgtaatggattttccatgcacacgaagctttttttttgtttatctgttcgttcttcaatctccaacaagggaatgcaacatcactgtaggagcagtgggttagtaacacgtcgaattggttccgctgtgtccattgttgatcgtcttaacacgagacctggggtttggggttcaccgctccggccggagtacataggagggctagagtaggaacagtcggtagatagactgatgttcatctgtagctaggtaagcagagtctgtttgttcagatgtacgagtataaccacctctgtacaatgcacattctagcgcc

SEQ ID NO: 1801 - DNA, 888 bp, Zea mays
  Clone ID: PAT_MRT4577_21869C.1
gggtactcaggccggcggggccgggcggatacccctccattctcctaccaaaaatcgcagcgccgcccgcaccaatctcgaagtgttcgaaggtttccagacccccaaaaggcgaagcggcgatgagttccaccggaggcggcggccgcgggaaggcgaagccagcgaccaagtcggtgtcgcggtcctccaaggctgggcttcagttccccgtcggtcgcatcgcgcggtacctcaaggccggcaaatatgcggagcgcgtcggcgccggggcccccgtgtacctctccgccgttctcgagtatctcgccgccgaggtgctcgagctggccgggaacgctgctcgggacaacaagaagaaccgtatcgtgccgcgccacatccagctggcggtgcggaacgacgaggagctgagcaagctgctgggcactgtgacgatcgcggccggcggcgtgatgccgaacatccatcagaccctgctgcccaagaaagctggtcagaagggggacatcggctctgcctcccaggagttctaatctaagcgtttcggcggaatgaggagagggaccgcccctgtttctgtctcgtccgcgtggttgtgtttcagctctgcggtttttgggggagtgctgtcgatgagttgggattgatatgggttgtggggatgtaaacaaacgcagcgcgttgtttcatgaatgaatgatggatagaaggaacatatctatcatgatttctaccctggttgcatttggatccgatttgctcctatcgtttggtccattgtatcagacctgatgatggaactttttctatcggttctatgaactctgcatcatatgatcaaaaaaaaaaaaaaaaaaaaaaaaaaaaaaaaaaaaaaaaaaaaaa

SEQ ID NO: 1802 - DNA, 224 bp, Zea mays
  Clone ID: PAT_MRT4577_22005C.1
cccacgcgtccgctccaaacgcaggagagcctctagcgccgccggtctctggagcctcggagcacaccggcgccggcgctagtgaccgatgcagcctacggattccggcggcgatggcatgtaagggagggaagggtctgctggcagccaagacgacggcggccaagagcaccgacttggacaaggacaggaagaaggccctcgtgtcacgctcctgccgaacc

SEQ ID NO: 1803 - DNA, 454 bp, Zea mays
  unsure (1)..(454): unsure at all n locations
  Clone ID: PAT_MRT4577_22008C.1
ctttgcccttccctccctccctctccccgtttgccgacagaggcaatttcgccctggattgggccccgattcgtccgaccgcgaccgggattacctccggcaagcgcggatctgaacgctgcgctccgtgttctcgctcgaatccgccatgaatggggccaaattcaatggcgccgtcaaagccgatgccaagctggcggcgaaaagcaagggggcggagaaacccgccaagggcatgaaggggaaagccagcaaggaccccaacaagcctaaaagggctcccaccgctttctttgtgttcatggaggaatttcgcatggaagttcatggagaagaaccctaagaacaagtctgccgctgncgtgggaaagctgctggcgacaggcggaaatccctgagcgagtcggacaaggctccctatgtagccaaggctaacaagctcaagctagagtac

SEQ ID NO: 1804 - DNA, 415 bp, Zea mays
  Clone ID: PAT_MRT4577_22068C.1
ccgacgcgtacggacaccaactacaacatacaaagcacaatattttaccaacaatcgcagccaaaatattctgctcgacttatactcctggggcgttctgcaaatattgctaccgcaaccattttcccacaatgctcacaaactcctataacttcccttcttcccccatacctctcaccaacggtgtcttcaatgtgtgaaaacccaattattcaaccctacaagatccaacatgcaatctcaacaagcatcttaccattattacccttgttccttcaacaaccgtcagccctattacagcacttaccttttgtccatttggtggcacaaaacatcagtgcacaacaactacaacaacttgtgctaacaaacctttcttcatactctcatcaacataattttttttcattcaacc

SEQ ID NO: 1805 - DNA, 1716 bp, Zea mays
  Clone ID: PAT_MRT4577_22093C.1
cctcgaggcaggcagggccgagccaagtcgggaaggcagaggcacagggagggagccgacagccgagagcaccttccgattccgcccaagaaatctccacccaatctctctgtcctctcctcccttctcatcatttcgccatgctgccatcgcacctcaacggccactccgccctcgggcgccgtcgcccgcgcctctccgccgccgccggggagtctccggcggcagcgggggtagaggcggcggctccgctggaggagcacgaccgcatctacttccaggcctactcccatctcggcatccacgagactatgatcaaggaccgcgtaaggaccgatgcttaccatgcagcgatcatgcgccaccagaaatttatcgaggggaaggttgtgctggatgtggggtgtggtactggaatactctctgtgttctgtgctcgtgctggcgcaaagcgagtgtatgctgtcgaagcctgtgaaattgttgtccaggctcgtgaaattgtaaaagcaaacaacctaactgatcagattgtggtcatccatggacgtgttgaggatgttgaccttgaggaaaaggttgatgttataatatcagaatggatgggctatatgcttctctatgagagtatgctgccaagcgtcctatttgcaagagataaatggcttaagcccgggggtcttattcttccttctcatgctacgctcttcatggcccccgtaacaaatcgtgagagatatgaagacagcgtcgatttctggcgtgacgtctatggcataaacatgtctgctcttgtgccacttgccaaaaagtttacatctgaggaaccctccattgaaacaattggtggagagaatgttataagttggccatctgtgttcaagcgcttcgattgctataattttacagctgaggaattcaaatctatcacttcaaaatacaaagtttcatcaatgatgttagctcccattcatggctttggtttctggtttgaggtggagttcaacgagcctatagagtcctctcataattttccttccagtttggatccacttgagattatacagaagaaaaggagacgatcctcagaagatatagttctgtccacagccccagaggatgagccaacccactggcaacagaccattttgtatttcccggatcctatagaggtgaagcaggaccaaattatagaaggttctgtaacagtgtcccaaagcgaggagaacccacgttttctgaatattcatctagagtgcttcacaggaggacagacattggttaaggactgcgccatgcgatgaactggtgtttttatgcttctagtggcttgatttcaggcgcgcaatggggtgttggcagggaggagctgacaatatttcagatttctttaatggaagtggagaatttgtactatttatgccaattatccgtctaatacgaaggcaggattttagtaattgtactccgtcttattctatagagtatatactggttgttgattttggatccgcacgctgtgacctaagtctcgcatccaagggtccctttggaacaaaggaaacatgaaggatttttttatgatcctatcattccattctcctgatagcgaaagaatctcctcacgtgaagagactaagcgcaaacagagttaatagtggcggcctgcctctagaaggaatccataggcttacggttacggcggtggcagtgcga

SEQ ID NO: 1806 - DNA, 611 bp, Zea mays
  Clone ID: PAT_MRT4577_22265C.1
gggtacccttttggtccggccgggctccccatatatccccactcttcgcctcctttctggagcagctagggttccgtcctcgatccgatccgccgagtgcacaccacctttccccactccgatcgaatcgatggctgccgagggcgagaagaagatgataaccctcaaaagctccgatggcgaggagttcgaggtggaagaggcggtggcgatggagtcgcagaccatccgccacatgatcgaggatgactgcgccgacaacggtatccctcttcctaacgtcaactccaagatcctacccaaggtaatcgagtactggaacaagcacgtacatgccggcggcggcggcggcggcggcttgaaaggcgggtccgacgacgtgggtggcggcttcggcaacaggaccggcggcttcggggaggacctcaagaactgggatgcggacttcgtcaaaggcgaccaagccacgcttttcgacctcatcttgggtggaaactatctgaacatcaaagggctggtcgacctgacctggcagactggtggtggcatgatcaagggccagacaccagaagagattcgcaagaccctcaacatcaagaatgacttcaccc

SEQ ID NO: 1807 - DNA, 1012 bp, Zea mays
  unsure (1)..(1012): unsure at all n locations
  Clone ID: PAT_MRT4577_22268C.1
caatctttcgccctcttcgcgcagcagctacagagctagggttccgtcctcgatccgatccggcgagtgctcaccacctttccccacttccctccgatcgaatcgatggcggccgagggcgaaaagaaaatgataaccctcaaaagctcagatggtgaggagttcgaggtggaggaggcggtggcgatggagtcgcagaccatccgccacatgatcgaagatgactgcgccgacaacggcatcccgctccctaacgtcaactccaagatcctatccaaggtaatcgagtactgcaacaagcacgtacatgccgccgctgccgctgccgcagcctccaaggccggttccgacgacgtgggtgccgccgccgccaacagcaccgccgcctccggtgaggacctcaagaattgggatgctgacttcgtcaaggtcgaccaggccacgctcttcgacctcatcttggctgcaaactatctcaacatcaagggtctgctggacctgacctgccagactgttgctgacatgatcaagggcaaaaccccagaggagatccgcaagaccttcaacatcaagaatgacttcacccctgaggaggaagaggagatccgcagggagaaccagtgggcctttgagtaaggaggtgctggatctcttatgcctaggtttcgtcatatctactaccttgcaatgctctgcttttaaatgtcatcgtaatggttgtaagtattttgggagtcactttgcttgagaatgtgttgggtaaaactgatgtggtcaatggtcggttattactatgaaaggacatcggctgctgccctaagaggtctttaaagtcccatttgcccattaataaccaattnncaatccttgnntggatgattnntgtgtgattcnnncatcgtgaatcnntcatggtaaaatatnntttcattgttgtgatactgcctatnntcgcagtccagnnttgtattttttgttttttaaacaaaaaaaaaaaaaaaaaggggcggcc

SEQ ID NO: 1808 - DNA, 674 bp, Zea mays
  Clone ID: PAT_MRT4577_22270C.1
gccggccgggtcgggagctagggttccgtcctcgatccgatccgccgagtgcacaccacctttccccactccgatcgaatcgatggccgccgagggcgagaagaagatgataactctcaaaagctccgatggcgaggagttcgaggtggaagaggcggtggcgatggagtcgcagaccatccgccacatgatcgaggatgactgcgccgacaacggcatccctcttcctaacgttaactccaagatcctatcccagggaatcgagtactggaacaagcacgtacatggcggcgccgccgccgccgccggctcgaaaggcggttcccacgacgtgggtggcgcctccgccaaaaggaacggcggctccgggggggacctccagaactgggatggggacttcgtcaagggcgaccaaggcacgcttttccacctcctcttgggtggaaactatctgaacatcaaggggctggtcgacctgacctggcagaatggtggtggcatggtccagggcaagacaccagaagagattcgcaagaacttccacatccagaatggcttcacccctgaggaggaagaggagatccgcagggagaaccagtgggccttccagtaaggaagtggtggatctattgatgcctaaggttcgtgggggctactactatgtctactttatg

SEQ ID NO: 1809 - DNA, 587 bp, Zea mays
  Clone ID: PAT_MRT4577_22271C.1
ccggccgggatatatccacccgacaccccaccccgccgcaatccccaatatatcccccatctcttcgactcctttctggagcagctagggttccgtcctcgatcgcgatccgccgagtgcacaccacctttccccactccgatcgaatcgatggccgccgagggcgagaagaagatgataaccctcaaaagctccgatggcgaggagttcgaggtggaagaggcggtggcgatggagtcgcagtaccatccgccacatgatcgaggatgactgtgccgacaacggcattcctcttcctaacgataactccaagatcctattcaagggaatcgagtactggaacaagcacgtacatgccgccggcggcggaaccggcggcttgaagggcggttccgacgacgtgggtggcggcttcggcaacaggaacggcggcttcggtgaggacctcaagaactgggatgcggacttcgtcaagggcgaccaggccacgcttttcgacctcatcttggctggaaactatctgaacattaagggtgtggtcgaactgacctgtgagactggtggtggcatgatcaagggccagacac

SEQ ID NO: 1810 - DNA, 2293 bp, Zea mays
  unsure (1)..(2293): unsure at all n locations
  Clone ID: PAT_MRT4577_22272C.1
gggggacaactgaatcagggcaggccggtatggatcgctacgtatcgcgcgaaaaccgtggttgggcacctcgaggccggccgggccggcctaaataacttatgaggccaaactaaagagggcagggcaggcgaatcgaaggaaaagtagtcaggagaggcgtttccctcgcaatcgaccatcacagatcaaatcgctgcaactagctagggtttcgtcgcctcatctctcgtggacaacggcataatgaagcaaaaaggtcggctagatataaaaaatgggagcgagcttcacaaagcagggttcaatgttagaaattagctcgtgttgccttcgaagtctatccgtgagatgcctgcccctatacatatatatttacatccacatatgtatgtgtgtggccgccgcgtggcttggctggatcaagtcatgccgggtcggggcggatcgggcccctcgctcggctaccgagaaggtgaacgggccttccgggaaaaaaacttcgaacatattgatatgttccgcattgggtacctcgaggccggccgggccggggatccccaatatatcccccactcttcgcctcctttctggagcagctagggttccgtcctcgatccgatccgccgagtgcacaccacctttccccactccgatcgaatcgatggccgccgagggcgagaagaagatgataaccctcaaaagctccgatggcgaggagttcgaggtggaagaggcggtggcgatggagtcgcagaccatccgccacatgatcgaggatgactgcgccgacaacggcatccctcttcctaacgtcaactccaagatcctatccaaggtaatcgagtactgcaacaagcacgtacatgccgccgccgccgccgccgccgcctcgaaggccggttccgacgacgtgggtgccgcctccgccaacagcaccgccgcctccggtgaggacctcaagaactgggatgcggacttcgtcaaggtcgaccaggccacgcttttcgacctcatcttggctgcaaactatctgaacatcaagggtctgctcgacctgacctgtcagactgttgctgacatgatcaagggcaagacaccagaagagattcgcaagaccttcaacatcaagaatgacttcacccctgaggaggaagaggagatccgcagggagaaccagtgggccttcgagtaaggaggtgctggatctattgatgcctaagtttcgtggtgtctactactatgtctactttatgttgtcctaatggttgtaagtattttgggagtcactttgcttgcgaatgtctcgcgtaagacttatgttggtcaatggtcggttattaacttattaccatgaaagcacttcgtctgctgccctaagaggtttagtcccatttgcattataaccaattcaatccttgtggatgatttgtgtgattccatcgtgaatctcatggtaaaatattttcattgttgtgatactgccaaaaaaaaaaaaaaaaaaaaaaaaaaaaaagcggccgccccctgctctggtaatcgggaaactgcggggtccgcggctgtggcgcgggtgcccgcggttctgtacacctaccggaggtcgctctcggtcagctcgtcgtcctgtcctggtccttctcctcctcctcgtcggaggaggacgagtcactgattgccgacgaggaataatgaagtgtacaccataggtccctctcggtcagctcgtcgtcgtcgttcttctcctcgccggaggaggacgactgattcccgacgaggaataaataaagtgtacaggttgctgaatgcaacagcctttgtgcaggagaatcgattaggtgtgtgtggtttgtacgccaattctttttgtgacctctgtatatatccaatcattgcattgcatataaaaaaaaaaaaaaaaaaaaaagttgttttcctttccctggtgatgggggtggtttttttacaaaaacaaatggatgtctgcactgccctttacaatgctagtctatctactttcgaaatagtagttaaatagtagtataatggtcgtgatggttgtaccctttttggattggatgtatgtcaagctggtgggtgctagttcgtctgtctggacttgttactagttaatatctcataatacatatataaaagtggatcttttaaaaatttgcctcccaaaaaaaaaaaaaaaaaaaaaaaaaaaaaaaaaaaaaaaaaaaaaaaaaaaaaaaaaaaaaaaaaaaaaaaaaaaaaaaaggcggccgccaccgcggtggagtnccagttt

SEQ ID NO: 1811 - DNA, 253 bp, Zea mays
  Clone ID: PAT_MRT4577_22369C.1
tgctacccatatccaggcacttgtaccactactgatgccattggcttcatgaatcctggatgcagttctgcatgaaacaacaaggggttgcaacttgtatgcgtggcgccctgatgctgacaactgtggccttaccgttatccgtgcctgatgcaatgatgatgccaagtttgatgccaccgatgacaatgatgccgatgccgtaatgatgccatcgatatggtgccgctatgatgtcaccaataacgatagc

SEQ ID NO: 1812 - DNA, 366 bp, Zea mays
  Clone ID: PAT_MRT4577_22410C.1
gtacagttgtactgagctgagctgccggaggcagaatacgagaggctggcgatgacgatggcgacgaaggcggcgtgcgtgctgtcggtgtgggtgctcgtcgcatcggtcctgtactacatgggctcagcgcgcgcgcccatgtgcagctagccgtagctggagttcgactacttcgcgctctccatgcagtggcccggcaacatctgcgcctccatcagcgactgctgcgacaccaactgctgctgcagctcggagcctctccagacgtatacgatccacgggctatggccggactacgactacgggacctggccgtcgtgctgtcacggaacccaattcgagatggacaagatattgccactg

SEQ ID NO: 1813 - DNA, 640 bp, Zea mays
  Clone ID: PAT_MRT4577_22488C.1
ccgaggtggcgacaatcagaccatcaaaaagtgccagcggcctctcgcagtcgccgcaatggatagcaccttcatcatgatcaagactgacggtgtccagaggtgcctcattgatgagatcatcagccgttttgagaagaagggcttctacctcaaggacttgaagcttgtgaacgtggagaggtcgcttgatgacaagcactacaacaatctcgtctccaagtccttcttccaggggctcgagtgctacatcatctctgagcctgaggtgtgcatggtctgggaggataagagcgtcgtcacgactgtgcgcaagatcattggagccaccaaccccctgacttctgagaccgggaccatccgtggcgactttgctggcgacattggcaggaatgtcattcatggaagtgacagcattgatagtgctaataaggagattgccctgtgtgtccccgagggacctggtgattgtcagagcattcagcacccctgcatctactataatcaaacatgcatagcttcacatcacatcttgacagacagaggaagtatgtcaccacttgtgctctcacaatgatgtcgagaagattatgatctgtatcctggaaccttagttcaatgcaccgcatttctttctttg

SEQ ID NO: 1814 - DNA, 1255 bp, Zea mays
  Clone ID: PAT_MRT4577_22672C.1
agcttcgatccggactagctgcccctgccttaaatacaagtatgttgcttagttggatcatcttgatacaagtactgtgtgttgaagggcgggcctggtgcagcggtagagcctaccgtttgtaactggaaggtcccgggttcgagccccagcctctgcatattatgcgggtaaggcttggcgtttaaagatacccttccccagataccgcacagtgcgggaagcctacggcactgggtacgcccttagttagcacaagggtatttttattattgaagtccttacaaggtcatgtcgttctagtgtttctatttctttgctaccagtaggaccctctcctgatatacagcgtatcttggcaggcatagcatacaattggccaattcttcttggtggacaagctcactggacagttggacttgtagcaaccttgatggctattagtagcatcattgctgctgatacatctgctttcctttgtggaagggcatttggtcgtacccctttgactaacataagccctaagaagaccttggagggtgctttagctggcctagctggctgcgtactgaccactgtgctgctgtcgactgccttacgctggccaaggtcgcttttgagtgccacagcttatggaatcctgatcttcctgggttcgttattcggggatcttgttgaatctctgatcaagcgcgacgctggtgtgaaggactccggatcgctcattcctggtcatggtgggattcttgaccgagttgacagctacgttttcacgggggcactttgctactcttttgtcagagtggctctacccctgtacggggtctgattagagcaccggccttcttgttgttttgcctttctccttccatcagcaatgcggtcagtcaccatacattttaacatgcaacgatgagtatttgctgggatgccctagatcagttcttcatctcaagacaacgtggtcttccctccaagcgaatttggtggccactagctcgtcatcgacattgcttcttgctttgggtttgagatggcctttccagctcaaccagtttcttgcaagccttgtaactctgtgtgtacatagtttattttttcatatagagagagagtaaaaaggaaaggctaattattcatcacaaaagctgttaacagtgcattgaggcagcttatgtcaatatgtaccaaactacacttgttttaataattcaaggcactaaattccctatcaaaaaaaacaccccccccacac

SEQ ID NO: 1815 - DNA, 1517 bp, Zea mays
  Clone ID: PAT_MRT4577_22699C.1
cgttgctgtcgcgccgacacgcaagcagacccaccgacgcgtccgccgggcgggagagcagaagcaaagcgagcaacagagcagaagcaaagcgcagagctagcaagtgaccgaccgagagcaaataggcaaggcaacgcaggcaagatggtgcagcaagccgcgaaggaggtgatcccgctgctgacgccttacaagatggggcagttcgagctctctcaccgggtggtgctggcgccgctgacgaggtgccgctcctacggcaacgtgccgcagccacacgccgccgtgtactactcgcagcgcgccaccaggggtggcctgctcatcgcggaggccacgggggtgtcggccaccgcgcaggggttcccggagtctcctggcatctggacgcaggagcaggtcgaggcgtggaagcccatcgtcgacgccgtccaccgcaagggcgccatcttcgtctgccagatctggcatgtgggcagggtctccaccaacgagctccagcccaacggcgacgcgcctatctcgagcacggacaagcagatctcccccgacgccaagtccggaacggcgtactcgaagccgcgccggctgcggaccgacgaggtccccgggatcgtcgacgacttcaggcgggccgcacggaacgcgatccaggctggtttcgacgccgtcgagatccacggcgcgcacgggtacctcctggagcagttcatgaaggacagctgcaacgaccgcacggaccagtacggcggcagcctggagaaccggtgccgtctcgccgtggaggtcgtggacgccgtcgtccgcgaggtgggcgcgcgccgcgtcggcatcaggctgtcgcccttcgtcgacttcgtggactgcgtggactcggacccggtggcgctcggccactacatggtgcagcagctcaacaggcatagcggcttgctctactgccacatggtggagccccgcattaccgcccacgggcgcaggcagatccctcacgggctcttgccgttccgaaaggcgtttcatggaacgttcatcgccgccggtggcggtgggtacgatcgggaggaaggcaacaaggtggtggcagaagggtatgctgacctcgtcgcgtatgggaggctgttcttggctaacccagacctgcctaggaggttcgagctggatgtggcactcaacaaatacgaccgctccaccttctacacgcaagatcctattgttggctacacagattaccctttctttgaagaagaagatggcaagaatgaggagtcagtctgatcacaactaataatgtggagggttcatcaagtttgagttcatcattatttccaccatttattattggccattatggcggagtcattgcgtcgtgttgtttcattatgtactagtgtggtgtgaagtgaaataaatctatttggtgaaattgttataaaataaattatagacttgtcggatttacctctaaaaaaaaaaaaaaaaaaaaaaagaaaaaaaaaaaaaaaaaagcggcc

SEQ ID NO: 1816 - DNA, 241 bp, Zea mays
  Clone ID: PAT_MRT4577_22775C.1
tcacgggtacataaagcttataaattgtcagggtgaaaagatgtcagttctctttcaagggtacatgtacaaatgattgatattcccaggataaatgtgcctggttctaggtgctctcgcacgcaccttttgctattgcatcaatggcattttaggctgttttaagagctgcatgctcctaaaattcttggaactgtgttttgagctttacagttgaattgttaagcacaaggttatcata

SEQ ID NO: 1817 - DNA, 444 bp, Zea mays
  Clone ID: PAT_MRT4577_22776C.1
atttagaccaactagcaacatagaaagcacaatagtgtaccaacaatggcagccaaaatatgttgcctccttatgctccttggtatttctgcaagtgctgctacggcgaccattttcccgcaatgctcacaagctcctatagcttcccttcttcccccgtacctctcaccagcggtgtcttcggtatgtgaaaacccaattcttcaaccctacaggatccaacaggcaatcgcagctggcatcttaaccttaataaccctggttcttccaccaataataacccttttaccagaagtacctttggggcctttattggcaccaaacattaagggacaaccacttccacaacttgggcttacaaaacttggtggctacttttaacaacaacaggttctttcattcaaccaactaactgcattgaactctgcttcttatttgcaacaa

SEQ ID NO: 1818 - DNA, 1931 bp, Zea mays
  Clone ID: PAT_MRT4577_22832C.1
aagtcgcattccagatctcccctgcctccgctgtataaatagaccctcaagctccctgcaacatccaccggccgggatcaaggcccaagctcagcgaccaccaagcagagcaagccagtgaggtctctcagagcgtagccagccagctacaatggcggggaacgcgctagccaactatgtccaggtctacgtcatgctcccgctggatgtcatcactgtcgacaacacgttcgagaaggaggacgagacgagggcgcagctgaagaagctgacggaggcgggcgccgacggggtcatgatcgacgtctggtgggggctggtggaagggaaggagccgggagtctacgactggagcgcctacaggcaggtgttcaagctggtgcaggaggccgggctgaagctgcaggccatcatgtcgtgccaccagtgcggcggcaacgtcggcgacgtcgtcaacatcccgatcccgcagtgggtgcgggacgtcggcaaaagcaaccccgacatcttctacaccaaccggagtgggctgacgaacatcgagtatctcacgcttggagtggacgaccagcctctcttccatgggagaactgccattcagctgtatgctgattacatgaagagcttcagggagaacatggcagacttcttggatgctggtgtcgttgtggacattgaggtgggacttggccctgctggcgagatgaggtacccatcgtatccccagagtcagggatgggtgttcccaggcgttggagaattcatatgctatgataagtacctgcaagcagacttcaaagcagcagcagaagaggctgggcatcctgagtgggatttgcctgatgatgctgggacgtacaatgacactcctgagaagacccagttcttcgcggataacggaacataccagaccgacaaggggaagttcttcctcacatggtactcaaacaaactgatcaagcacggtgataagatcttggacgaagcaaacaaggtcttcctgggatgcaaggtgcagctggcaatcaaagtctctggcatacactggtggtacaacgttccaaaccatgcagctgagctcactgccggatactacaacttagatgacagagatggctacagaaccatagcacacatgctcacaaggcatcgtgctagcatgaacttcacttgtgctgagatgagggacagtgaacagagttcagaggcgaaaagtgcacctgaggaactggttcaacaggtgctgagtgctggatggagagagggcctaaatttggcatgtgaaaatgcactcaaccgatatgatgcaacagcttacaacaccatcctcaggaatgcaagacctcaaggcatcaacaagaatggccctccagaacacaagttgcacggattcacctacctccgagtatctgatgaactgttccaggaacagaactacaccactttcaaaacttttgtcaggagaatgcatgctaacctggattataatccaaatgtcgatccagttgcaccattggaaagatcaaaggcagagataccaattgaagaaatcctagaagtagcacagccaaaattggagccatttcccttcgacaaggacaccgacctaccagtttaaacactccaatgatgcaaactacaggaagaatcacgagacacttaaaaaatcaagacaaatagtaagcctattgtcgagcagtagtctattaactaaataaaatgctgtgtggagcatattataatcgcatattgccctaataatattgtgttgttaaacctgaggcttgatggttatctgatgagttgtaataatagccttggtcttcctgttgtatgtatgtatttgagctaaggaataaaaattgtggctttgtgggttaaaaaaaaaaaaaaataaaaaaaaaaaaagcggccgtcgcgtctagaactat

SEQ ID NO: 1819 - DNA, 747 bp, Zea mays
  unsure (1)..(747): unsure at all n locations
  Clone ID: PAT_MRT4577_23014C.1
ggccgggnaacgcacatattattgagaccaactagcaacatacaaagcacaatggcgtaccaacaatggcagctcaaatattacgcctacttatgctcctcgggctctctgcgagcgctgctacagcgaccattatgccacaatgctcgcacgctgctatagctctccttcttcccccgtacctctcaccaacggagcattcggtatgagaaaacccaatcattcaaccctacaggatccaacaggcaatcgcaggtgggatgttacctttatcacccttgctcctgcaacaatgatcaaccctatcacagcacataccttcggagcatccattggcacaaaacatcacggcacaacacctacaacaacgtgcgctagcaaaccttgctgcctactctcataatcagcagatccttccattcaaccaactacgctcattgaactctgcttattatttgccacaacaccacctaccattcagccagctatctgctggctacccccagtaatcacttccattcaaccaactgacagtattgaactctcctgcttattaacagcagcgacaactactaccattgaaccagcttgctggcgtgagccctgctaccttcttgacacaccacagttgctgacgtactaccagcacgctgtgcctaacgctggcaccatctgacaactgcaacacaagctgccgtgcaacccactggctttgacatacccaggagccttctaccaacaacccat

SEQ ID NO: 1820 - DNA, 1227 bp, Zea mays
  unsure (1)..(1227): unsure at all n locations
  Clone ID: PAT_MRT4577_23077C.1
cccacgcgtccgcccacgcgtccgaggtaatctggctcgggcctggtcctcgatggctggcaggcacatgacacatcgccccagccccaagtccaaagccgcgagaggcaggggcgcagcaaaaccctagccgccttcccgtccttttcctttcataaaccccaagccgcgccgcaatagctcgccccctcgttcgccgcctctcctgctcctaccgcagctctccctcaggtttagtgttcgcaatggcggccttcaacaagcttggtggccttctaaggcacagtgctctggtgagcggtatcactggtggctcttctcctgcagtgttcaatgctgcacggctcatgtctaccaagctatttattggtggtcttgactggggtgttgatgacgtgaaactaagagaagcatttagcagctttggagaggttactgaagcgagggtgatcacagacagggagactgggaggtcaagaggctttggctttgtgaactactccgacagtgatgctgccaaggaagctatttctgcaatggatggcaaggaaattgatgggcggcaggtacgtgtcaacatggctaatgagagacctgctgggaaccgtggtggtggtggctatggtggcggcggctatggaggtggtggctacggaggtggtggcggctacggaggtggtggctatggtggtggcagccaaagctatgatgcttgaggggggcaggatcctattaagtgcattatcaaccaagatatttgaaataatgaactttaggacttggtatgacgttttatgttaagcattgtcaggttttgctattcgtgttatgctgaattgttggaactcctagatgcagaatcttacgtattggttttggttccttcgagaagtgcaaatgcaagacgcatctatggcaattaccggtgtggtacttgtgtggacctctcctaatagtgtggcacagagccagtnnctgatcatacagcctgaagaggggtcccgagtcggtcacatggtccggttctacctccaggtgattacctagatcatatgcatagaagggnntcaattagaccaagcagggtaaagtctgttggattgtcccctgagtgttgttatgcgtcaaatcttccaaccagtggtggtgtctgtaagcccttcgaaactgcanaaagggttgagaacaatagaagatccagtcgctcctgttaaggagatcctaagt

SEQ ID NO: 1821 - DNA, 2230 bp, Zea mays
  Clone ID: PAT_MRT4577_23359C.1
gccggccgggctggggaattcagatgtgcaaccaccggaaatccccatcaaaccccaagcgcgcacccatcttctggcctttccagccgccaagccttctagaagcttcaagagctcgattcgatcggaaccctcgccatggccgacgaggcgaaggcgaagggtaacgcggcgttctcggccggccgcttcgaggaggcggcgcggcacttcacggacgccatcgcgcttgccccagacaaccacgtcctctactccaaccggtcggcggcgctcgcctcgctccaccgctactccgatgctctcgccgacgcgcagaagaccgtcgagctcaagcccgactgggccaagggctactcccgcctcggcgcggcgcacctcggcctcggcgacgcggccagcgccgtcgccgcctacgagaagggcctcgagctcgaccccagcaacgagggcctcaaagcggggctccaggacgccaagaaagccgccgccgcccctccgcgccgcgggtcgtccggccccgacgccatcggccagatgttccagggccccgagctgtggagcaagatcgcgtccgacccctccacgcgcgcctaccttaacgagcccgattttatgcatatgatgcgcgaagtgcagaggaaccccagcagcatcagtatgtatctctccgatccccgcatgatgcaggtgctcagcctcatgcttaatgtcaagatccagagacccgaggcctccgagccgtcgcagtctaccccgccgccgccgaagcagcagcagcagcagcagacgccgccttctgagacgaaggctagggatgtggagcccgagcccgaggcagagccgatggatttgactgatgaggaaaaggaccgcaagcagacgaaagctgctgctcagaaagagaaggagttaggtaacgcagcttacaagaagaaggacttcgaggtggcaatccagcattacaccaaagccttggaacttgacgacgaggatatttcctatctgactaaccgagcagcagtctacattgagatgggaaagtacgatgaatgcatcaaggactgtgataaggctgtggagaggggaagagaacttcgtgctgatttcaagatgatttcaagggcactgacaagaaaaggaacagctctggtcaaacttgctaagacctctaaggattttgatattgctatcgagaccttccagaaggctctgactgagcatcggaacccagacactcttaaaaagttaaatgaggctgagaaagcaaagaaagagttagagcaacaagagtattatgatccaaaattggcagatgaggagagagagaaaggcaacgagttcttcaaggagcaaaaatacccagaagcaataaaacactacacggaggctctcaagagaaacccgaaggatcctagggtttatagcaatagggccgcctgctacaccaagttaggagccatgcctgaaggtcttaaagacgcagaaaagtgtcttgaacttgaccccaccttcaccaaagggtatacgaggaaaggtgcaattcagttcttcatgaaagaatatgacaaggccgtggaaacctaccaggctggcttgaagcatgacccgaacaaccaggaactgcttgatggtgttaagaggtgtgttgaacagatcaacaaggccaacagaggtgaaataagccaggacgaattgcaagaaagacagaacaaagctatgcaagacccagagatccagaacattcttaccgaccctatcatgcgacaggttctaatagatttccaggagaacccaagtgcggcccaggagcacctgaagaaccccggggttatgcagaagattcagaagcttgtaagtgctgggatagttcagatgagatgatcgagcgatgcgatgattggctttgttcgttcacgtgcaccctggtcatacatatgttttaacaagcagcagcggcataagaatgaacctgttcgggggctaatcttatcccatttggattgtaagtgcattgacattggataattcatgtttgtggcactgagtttcgagtatacgctactttctaatctttgagatgtgcgcacgctacatgaactatgcgtgcgctacgaactgatcaaaaaaaaaaaaaaaaaattctaatttgtggcacttaagccagttctgcggcagaatgcggccgggacttgtatcggttgaatgaagctctaaaaacaaagataac

SEQ ID NO: 1822 - DNA, 2815 bp, Zea mays
  unsure (1)..(2815): unsure at all n locations
  Clone ID: PAT_MRT4577_23360C.1
gccggccgggtccaaaaatggtgatcggctattccgtggattacaccttcgagaactgggatgcaactatgcaagcacgcagctgggctcctctcggttttataaaaacctcaaagcttttcgccttaatccccatcaaacccccggacatttctggtcgcaccctcctccggccctcccagccgccaagccctctggaaccttcgagagctcgatcggatcggagcccctgccatggccgacgaggcgaaggcgaagggtaatgcggcgttctcagccggccgcttcgaggaggcggcgcggcacttcacggacgccatcgcgctcgccccgggcaaccacgtcctctactccaaccggtcggcggcgctcgcctcactccaccgctactccgacgctctcgccgacgcgcagaagaccgtcgagctcaagcctgactgggccaagggctactcccgcctcggcgcggcgcacctcggcctcggcgacgcggccagcgccgtcgccgcctacgagaagggcctcgagctcgaccccagcaacgagggcctcaaagcggggctccaggacgccaagaaagccgccgccgcccctccgcgccgcgggtcgtccggccccgacgccatcggccagatgttccagggccccgagctgtggagcaagatcgcgtccgacccctccacgcgcgcctaccttaacgagcccgattttatgcatatgatgcgcgaagtgcagaggaaccccagcagcatcagtatgtatctctccgatccccgcatgatgcaggtgctcagcctcatgcttaatgtcaagatccagagacccgaggcctccgagccgtcgcagtctaccccgccgccgccgaagcagcagcagcagcagcagacgccgccttctgagacgaaggctagggatgtggagcccgagcccgaggcagagccgatggatttgactgatgaggaaaaggaccgcaagcagacgaaagctgctgctcagaaagagaaggagttaggtaacgcagcttacaagaagaaggacttcgaggtggcaatccagcattacaccaaagccttggaacttgacgacgaggatatttcctatctgactaaccgagcagcagtctacattgagatgggaaagtacgatgaatgcatcaaggactgtgataaggctgtggagaggggaagagaacttcgtgctgatttcaagatgatctcaagggcactgacaagaaaaggaacagctctggtcaagcttgctaagacctctaaggattttgatattgctatcgagaccttccagaaggctctgactgagcatcggaacccagacactcttaaaaagttaaatgaggctgagaaagcaaagaaagagttagagcaacaagagtattatgatccaaaattggcagatgaggagagagagaaaggcaacgagttcttcaaggagcaaaaatacccagaagcaataaaacactacacggaggctctcaagagaaacccgaaggatcctagggtttatagcaatagggccgcctgctacaccaagttaggagccatgcctgaaggtcttaaagacgcagaaaagtgtcttgaacttgaccccaccttcaccaaagggtatacgaggaaaggtgcaattcagttcttcatgaaagaatatgacaaggccatggaaacctatcaggctggcctgaagcatgacccgaaaaaccaggaactgcttgatggtgttaggaggtgcattgaacaaattaacaaggctaacagaggtgaaataagccaggacgaattgcaagaaagacagaacaaagctatgcaagacccagagatccagaacattcttaccgaccctatcatgagacaggtgctaaatgatttccaggagaacccaagggcggcccaggagcacctgaagaaccctggagttatgcaaaagattcagaagcttgtaagtgctgggatagtccaaatgagatgatcaggcacacgatgcgattgtacctgcttgttcgtcccttgtgcttggctttgttagttaacgtgccctttaacaagcagcgacggcaaaagaatgaggggctaatcttttttcccaattggattgtaagtgcagttaacattggattattcatgtttgtggcactgagtctgagtataggcgccgtcttgctttattgatgctggactttgcgtgcttgtgggtgggggttggttccctagctaaagtttagttcatgtcccattaaatatttgaatataatatatatttaattaggtttcataaaaaaaaaaaaaaaagtcccctaacaaagacaagaaaagctgcctcactgctcgtacccgttgatttaaggcttgaggacttggttaaagccaaccctcccctcagcaaactggtctacgtgctcctccagtcaaactggtaaaaactgttcctttggcggtaaaacctgntacttctccgtccgtcaatttttcaatccaaaggagtctaaattagatgtttcattaccactcgccattggatctgtctgcaatgtggaatgtaaaatgacaaaggcctctttagaatgtaggcattttcgaagaagcatacagaaatttcattggaatctagggtggtcgactgtcgagggagcgtcttattcctatgaaatttcttctttattttataatatttctactttctaaatagacccttggctattgaaagctcgattgaaggattattttctgaatcctgtttttttttctatgtttttgaactaattcatgtaaaatctatgtactatttttgtgaccccctgcgttcc

SEQ ID NO: 1823 - DNA, 804 bp, Zea mays
  Clone ID: PAT_MRT4577_23412C.1
gaagaagagaaacaacaagaagtagtaatggcttcctctatgttctcctccgccgctgtggttacctccccggctcaggccaccatggtcgctccattcaccggcttgaagtcatccgctgcattcccggtcacccgcaaggccaacaacgacattacttccatcacaagcaacgggggaagagttagctgcatgaaggtgtggccaccaattggaaagaagaagtttgagactctatcttaccttcctgaccttagtgattccgaattggctaaggaagttgactaccttctccgcaacaagtggattccttgtgttgaattcgagttggagcacggatttgtgtaccgtgagcacggtaactcacccggatactatgatggacggtactggacaatgtggaagcttccctttcggttgcaccgactccgctcaagtgttgaaggaagttgaagagtgcaagaaggagtaccccaatgccttcattaggatcatcggattcgacaacacccgtcaagtccagtgcatcagtttcgttgcctacaagccaccaagcttcaccggttaatttccctttgcttttgtgtaaacctcaaaactttatcccccatctttgattttatcccttgtttttctgctttttccttctttcttgggttttaatttccggacttaacgtttgttttccggtttgcgagacatattctatcggattctcaactgtctgatgaaataaatatgtaatgttctataagtctttcaatttgatatgcatatcaacaaaaaaaaaaaaaaaaagcggcc

SEQ ID NO: 1824 - DNA, 389 bp, Zea mays
  Clone ID: PAT_MRT4577_23507C.1
acaacgtggtgctggagatccaggccaccatggggggcactcccgtgatgccgtccaagaagcccatgtggaagggcgtcgtcgtcgcctacctcgttgtcgcgctctgctacttccccgtctcgttcgtcggctactgggccttcggcgacagcgtcgacggcgacatcctcgtcacccttaacagacccaggtggctcatcgccctcgccaacatgatggtcgtcatccatgtcattggcagctaccagatctatgcgatgcccgtgttcgacatgatagagacggtgctggtgaagaagctgcgcttccctacatgcctcacgctgcgtctcattgcccgtactgtctacgttgcgttcacgatgttcatagccatcacgttttcc

SEQ ID NO: 1825 - DNA, 785 bp, Zea mays
  unsure (1)..(785): unsure at all n locations
  Clone ID: PAT_MRT4577_23568C.1
attgttttctatatatcccttttcaccccctccttccctgtcgcctgccttccgttctagactccttctcccctccccaaacccagagcaagcaccatggctccgattggcatgggcagcaccctccccgacggccagctcgcgtggttcgacgagagcgaccagatgcagcaggtctccatccactccttggccgccggcaagaaggtcatcctcttcggcgtccctggcgccttcacccccacctgcagcaatcagcatgtaccaggcttcattactcaggccgaggagctcaaagccaagggtgtagatgagatcctgcttgtcagcgttaatgacccctttgtcatgaaagcatgggcgaagacatacccagataacaagcatgtgaagttccttgctgatggagcggctgcatacacaaaagcacttggtcttgagcttgatcttacggagaaaggattgggtcttcgttcgaggcggtttgctctccttgctgacgacctcaaggtcaccgtcgcaaacgtcgaggaaggtggccagttcacaatctctggtgccgaggagatcctcaaggcactgtaggggcttcagcgcttcggaatcgcagcgatcacccaaaccttgtgtcatatcgatgtagtttgaacttgtctgccaaactgctagtgggaataaattgtcgatgtgcatttcttcatgtactttatgtgcggtgcaagtgacttcagagttttccggtcaaattgntggttgtgttgcaaacatctgagattgntcaggtt

SEQ ID NO: 1826 - DNA, 402 bp, Zea mays
  Clone ID: PAT_MRT4577_23569C.1
aaaaaaactaaaaatgtccttttttatttttgggaagccacaaacattatccaaaaaacttcatttttgaactataacccataagcaatctaaaaagagggcccccccaatgatgggttgttggtaaaacctttttgggtttgtcaaaacaagttggttgaatggcaacaattgttgcagttgtaaaagggtgccaccgttaggcccaacgtgcaggtaaaaccgcaacaactgttgttgtgtcaaaaaggcaacagggctcacataaactaactggctaaatgggggtaactgttgcttttttaaataaacagcaaaattcaatgctcccagttggttgaatgaaaaaaaatgctgggggtaggcaacacctacctaactgaaagggaattgttgttgcaa

SEQ ID NO: 1827 - DNA, 305 bp, Zea mays
  Clone ID: PAT_MRT4577_23653C.1
cccacgcgtgcgtccagaccatcaaacaagtgccagcgcgctttggcagacgccgagagggagagcaccttcatcatgatcaagcctgacgagatccagaggcgcctcattggtgagatcatcagccgttgtgagaagaaggtcttgtacctaaaggactcgaaccttgctaacgtggagaggtcgttcgctgagaagcactactccgatctcgagtgcaagcccttcttccagggggtggtggactacatcatctctgaccctgtggaggtcatggtctgtgagggtaagagcaggatcacaac

SEQ ID NO: 1828 - DNA, 320 bp, Zea mays
  Clone ID: PAT_MRT4577_2365C.1
cccacgcgtccgaaaaaaaatataaaaaaaaaaaaaaaaaaaaaaaaaaaaaaaaaaaggaaaaaaaaaaaaaaaaataaaaaaaaaaaaaaaaaaaaaaaaaaaaaaaaaaaaaaaaaaaaaaaaggggggggccgttttagaggatcaaagtttacttccgcgtgtttgcaaagtattaattttttttttgggtcaataaaattaaattaattggccgatgttttaaaacttgggaattgaaaaaaccctgcttttaccaaattaaatggctttgaaacaaatccccttttgaccagttggctaaatagcaaaaaggc

SEQ ID NO: 1829 - DNA, 290 bp, Zea mays
  Clone ID: PAT_MRT4577_23760C.1
gagctgagctgccggaggcagaataggagaggcaggctatgaccatggcgacgaaggcggcgtgcgtgctggcggtgtgggtgctcatatcatccggcctgtccgacctgagctcagcgcgcgcgcccatgggcagtaagccttagtgggagttggactacttgctgctctcacttcagtggcgcggcatcatatgagcatccacacggcactgatgcacgaccaacggctgctgacggtcggagcctgtctatacgattacgattcacggactatagctggactaccac

SEQ ID NO: 1830 - DNA, 353 bp, Zea mays
  Clone ID: PAT_MRT4577_23824C.1
ctgcagcaccaacaaccaggattgtgttcttacgattaactgagaacaaatcctgtccggattaacatcatccatcaatccacagtccatgctggttgacagcaatggcctgctggagccgaagatgaacaccacactaacaactgacacatagcgaccttcccatcaaaaacacacatgggccacaacaaacgagacgaacgaagataaaccctttggactagggtaaacatcacggtagcgaacaggataacttggccgcgcgggccccaccgttcagttcctccagttcccgtcggaagttccgtagccgccgccacagttgccaccgacgttatcggcaccaccaccac

SEQ ID NO: 1831 - DNA, 2185 bp, Zea mays
  unsure (1)..(2185): unsure at all n locations
  Clone ID: PAT_MRT4577_2386C.1
cctcgaggccggccggggcttgcggcctttttaaccgctttttaaagctcccccgcctctcccacggcccggacttcgccttcgccctcccccgcctgcgagcgcgaggcgcggaggggctagcgcgctagcggcgccatggccctgaccgacgccaccgcgttcccctacggcctgcgggtcctcgtcgtcgacgacgaccccacctggctcaagatcctcgagaagatgctccgcaagtgttcatacgaagtcaccacatgcggtttagccagtgttgctatccaaattctccgggagaggagaaacaagtttgacattgtaatcagtgatgtcaacatgcctgacatggatggtttcaagcttctcgaactcattgggcttgagatggatctacctgttataatgatgtccatagacggagagacaagtagggtgatgaaaggtgtccagcatggtgcatgtgactacctcctcaagcctgttcggatgaaggaactccgaaacatttggcaacatgtgtataggaaaaaaatgcatgaggtgaaagagattgaaggtaatgacagctatgatgatctccaaatgtttagaaatggtgtagagggattcgacgagagggacctatttatgagagctgactctgatactatgaggaagagaaaagacgtgaataaggaccatgcagatcaggactcaagtgatggagctactgttaagaaggctagagttgtctggtctgttgaccttcaccagaaatttgtaaatgctgtcaaccaaattggatttgacaaagtcgggccgaagaaaatactggatcttatgaatgttcctggcctgacaagagagaatgtggccagtcatcttcagaaataccgcctctacttgagtaggttgcaaaagcagaacgaggaaaggataatgggtgctgctaggcaagatttcaatcaaaagggaccatcggatcatcttaacctccgaagttccttccaagagcaaccaggcaacctttccaatggatgtcagcatagttctcagaaggtcgaagctcagaccaacattctcgatcctcatctggacgacacgaagacttcaatgcccttgaaggtgccagataaaaatggaatttcagcaagtgatgctgttgaccctcacaatatcaccactgcttcacctttaagtggggtgttctcttttgaaagaatgccagtgaatcaggacaggaagctatcagaaaccatgatcttggaatgtgagtcctggagtggaagtgtgccaccaaagcagttcatgcagtatccaaagcataaccatgagcgctgcgaccttctaggagactattcttgcttgcctaaaccggacttggagcacccaattgcccctggtcatctgtatgccccaccgccagtaatttcgatgagttacaatgtggagaaagatgtcagagacttctcagatgtaaaaccagatcttcttggctgtatgaagtccttatcaccagcactgacatgtacagttgagtcggtttctgctcaacttagtgacagtgttgtgacctcaactaacactgacgtccggttttccagcgtggaggggttgtccagcattaaagattgtgactttgatcaggaaaggaacggagctattttgtttacttcagaagaggcaagtatattatgcggcactgattttacttgtctacctgaagacctgtccggctatcaacttcaaggtgtctccttcgggaataaaggattgaacagcatcgatttatatcagtgcaatgatacaatgttaatacctggactgcagaataattggtatgatgatgatgtagagtttagcagtgaaaccgtggagttcccattgctagacggaggcctgtttgcataaatgcctcatctggccctatctttcaaccatgcccttatgtcagcagggatgatgttcattggtatgttcccctatagcgcctcctgtagggctatatttaacctaacttgatcctgtggtggaaggatttaatttgtagtctcgccacttttgataattgtctgtattatagactgtgccatggcacaatgactgcaatatatactcttcacggtgatcaaaattacatatgaagactgtcaaaaaannnaaaaaaaaaaaaaanaaaaaaanaaaannnaaaaaanagggg

SEQ ID NO: 1832 - DNA, 185 bp, Zea mays
  Clone ID: PAT_MRT4577_24024C.1
tcgtctcacgcgtgcgactacttgcgccaactggcaaggacgatcgccgagtacaaccaggcctgcactgacccgttcatgaacctcaagggaatccttgtgggcaaacgggcgaccgacatctactacgacaacatggtgacggtcacctactggaggacgcacaccatgatctccgaccgcac

SEQ ID NO: 1833 - DNA, 2234 bp, Zea mays
  Clone ID: PAT_MRT4577_24055C.1
ttaagataaagtcgaagaccatagatgttatgccaaccaaggcaactctcaggtcagacaaccaggagatgtcgaaggaagagctcaggagacagcaccaggctgaacttgctcgccagaagaatgaagagactgctagaaggcttgctggggttggtactggatctggtgacggacgtggtcctgcgagggcttcaaatgagcttgttgcatataagaatgttaatgatgtaccatttgtaagagatttggtgatccaagtagatcagaagaatgaagctgtcctcttacctatttatggtagtatggttcctttccatgtttctactgtcaagagtgtgacaagtcaccaggacaaccgcacctgcactatccgtatcttcttcaatgtgcctggcatgccattctcaaatgatagcaagtttaattctcaaggtgctatctatctgaaagaaattacattccgctcaaaagatccacggcatagcagtgaagttgttcagcagatcaaaacattgaggaggcaagtggcatcaagggagtcagagagagctgaaagggcaactcttgttacccaggagaaacttcagattggaagcaacagaatgaagatgatgaggctttctgatgtgtggatacgacctgcatttggtggtcgtgggaggaagctcacaggaaatcttgaggctcatttcaatggtttcagatattctacttcaaggtctgatgagcgtgtggacatcatgtttggaaatataaagcatgcctttttccagcctgcagagaaagaaatgattactctccttcacttccatttgcacaaccatatcatggttggaaacaagaagacaaaggatgttcagttctatgttgaagttatggatgttgtacagacgcttgggggcagtagaagatcggcacttgatcctgatgagattgaagaagagcagcgtgagagggataggaagaacagaataaacatggatttccagaactttgtgaacaaggttaacgaccactggtcgcaaccacagttcaaggggcttgacctggagtttgatgtcccccttagagagcttgggttccatggtgtcccatataaagcttctgctttcattattccaacttctacatgtttggttgagctgattgagacccccttccttgtggtgagcctgagcgagatagagattgttaacctggagagggtgggctttgggacaaagaacttcgacatggctatcgtgttcaaggatttcaagaaagacgttctccgcattgactccatcccttcagcatcgcttgacgcgataaaggaatggctggacacaactgacctcaagtactatgagagcaggctgaatctgaactggcgccctatcctgaaaactataatcgatgatcctcagaagttcattgacgatggcggctgggagttcctgaacatggaggcgagtgactcagagactgaggacacagaggaatcagaccaaggctatgtgccttcagacgctgagcccgaatccgagtcagaagatgatgactctgacagtgagtccttggtggaatctgatgatgacgatgaggagtcagacgaggactcagaggaggagaagggcaagacctgggaggagctggagcgtgaggcaagcaacgcggaccgtgagcacggtgcggagtcggacagcgaggaggagaggaggcgccgcaaggcaaagaccttcggcaagtcgcgtgcgccggagcgcagcagcttcaagggagcgccgccctccaagaagccaaagttcaggtgaatgctgccttcggcaattcgctcgtgccaaagtgcagcagcttcaagggagcaccacctccaagaaggcagctctggttaatgggactccttgaagctttggcccccggagtagacgtgtctgtaggagtgtggtttgttatatctagattatctgcagtagcttagtccatctaaatgaaatgtgacagctgaactttggaagtcgcatcattggggaaacgaaatttaagtcgattgatttgttaatgccctcgttgatgtaatatttcccttgttcggtggatttccggtctgtataatatttatgcacgcttgcactttatccatggtatttgtatacccgtataaggcagcatggaggatgtttcttgcatgtggacgcattgattgatatatatatatatttaaggttcttttttttttaaaaaaatccgta

SEQ ID NO: 1834 - DNA, 455 bp, Zea mays
  Clone ID: PAT_MRT4577_24378C.1
aagggaacaagccgaggtcctttcatagaaaaaaccgaccatggaccaaaacagttttacccaaaaaattctaaagcaaaggggctcccaaaatacttacaaccattacgaggacatttaaaagcaaagcattgcaagggagtaaatatgacgaaacctaggcataaaagatcaaagggcttagcacctccttactcaaaggcccaatgggtctccctggggatctccttttcctcctaaggggggaagccattcttgatgttaaaaggcttgcggatctcctctggggttttgcccttgatcatgtcaacaacagtctggcaggaaaggtccaacaaacccttgatgttgaaatagtttgaaaccaaaatgaggtcaaaaagcggggcctggtccaccttgacaaagtcagcatcccaattcttgagggcctcaccgaaggcgggggttctttt

SEQ ID NO: 1835 - DNA, 308 bp, Zea mays
  Clone ID: PAT_MRT4577_24381C.1
tcttcagatttagggtctcaaatcatcatggctcaacttctacaacaacttgttctatcaaacctggcttggatctctcatcaacagcgggtggttccattcaacctactaggttcattgaactctgcttcttatttgcaacaacaacaactaccattcacccagctacctgctgcctaccctcagcaatttcttccattcaaccaactatcagcattgaactctcctgcttatctacagcagcaacaactactaccattcagccatcttgctggtgtaaacccttctaccttctttacacaaccaca

SEQ ID NO: 1836 - DNA, 408 bp, Zea mays
  Clone ID: PAT_MRT4577_24661C.1
cggcagccgccctttcttttttttttttttttcttatacataattttctctttttggcaacaccaaaaaccgccattttttccttaaaaataaccgaaaacaaaccctgacgggggtaacagcatccatccaaccgcagaccatgctgtttgatgcaagggtctgctgaaacccaggatgaacacaacactaacaactgacacaaaacgaccttgcaatcaaaaacacaaatgggcaacaacaaacaccacacgaaccaagataaaccccctggactagggaaaacaacacggtagcgaacaagaaaacttggccgcccgggccccacccgtcaattactccacttcccgacggaaatgccgcaacccccgccacggttgccacccccgtaaccccccccaccaccac

SEQ ID NO: 1837 - DNA, 415 bp, Zea mays
  Clone ID: PAT_MRT4577_24765C.1
gcaacatagaaagcacaatagggcaccaacaatggcagccaaaatatcgcgcctccaaatgctccttggcctttctgcaagtgctgctacggcgaccatttctccgcaatgctcgcaagctcctatagcttgccttctttccccgaacctgttaacagcggtgtattgcgtatgtgaaaacgcaattcttcaaccctacaggatccaacaggcaacagcaacttgcataagacctctatcaccatcgttccttcaacaataatcagccatattacaacagtgaccaattgtgcattcattggttgaaaacatcaaggaacaacaactacaaaaactagtgctagcacaccttgctaccaactctgagccacataagcatcgtgaacccaaccaactacgtgcattaaactctgct

SEQ ID NO: 1838 - DNA, 2277 bp, Zea mays
  unsure (1)..(2277): unsure at all n locations
  Clone ID: PAT_MRT4577_24964C.1
tcgaggccggncgcgaccggcccgggccggccaccttctgccggtccggatcaccactgagtcacgactccagatctcgcaccgctcgccatggacctcctcgacgcgaggcaccgccacacgccggatttgagctcctcccaagatgccgcctccaacatggggctcccgctcgccggtgccgcctaccagccctacgtttctgagcttctttccttctccatcgagcgcctccacaaggagccggagcttttgagggtcgacgcggagcgggtgcggcgtcagatgcaggaggtggcggtggaaaactacgctgcgttcatcgccgcctccgaggcgctctccttcgtccgcgcgcagcttgagagcttcgacggccacctcgaggccatgatagaggagataccaaacttaacatctggctgcactgagtttgttgaatccgcacaacaaattttggaggagaggaagcttaatcaaacattactagccaaccacactacattgcttgacttgcttgaaattccacaattgatggacacgtgtatacggaatgggaactatgatgaagcacttgacctagaagcttttgtgagcaaaatctggaagttgcaccctgatttacctgttgtccaaggattagccactgaagtcaagaagacagtgcaatcattagtttcacagcttctccagaaacttcgatcaaatattcagttacctgagtgcctacgaattgtagcacatctgcgccgaattggagttttcagcgagtcagaattgcgcttacagttcctgaggtgcagggaagcttggctttctggaattcttgaagatctggaccaaaggaatgtttatgattacctgaaaggcatggtgacttgccacagggtacatctatttgatgttgttaatcaatatcgagcaatattcaacaatgataaatctggaaatgatgagaactatgacggcgggctgcttttcagctgggcaatgcaacaagttagtaatcacctcactactcttcaagttatgttaccaaacataacagaaggtggttctctgtccaacattcttgaacaatgcatgtattgtgcaatgggtcttggcttagtcggattggattttcgtggccttcttccaccgatctttgagaatgcggttctaaatttattctcaaagaatatgagtacggcggtcgaaaattttcaggtcattttggattcacactgttgggttccgatgccatctgttggttttgtagcaaatggtgttgtcgatgagacttctgatgatgtgactccaccttccgttttaatggagcatccacctcttgcagtgtttgtcaacggtgtttcagcagcaatgaatgagctaagaccgtgcgcaccattgagcttgaaagttgtccttgctcaggaggtggtcaagggactacatgcagtctctgactccctagtaagatacaaagctatgcggatgcttcgtggaaatgagtccgcccttttcctttcactatgccagacattcatcgaggttgcatatccttattgtgccgcatgttttggccgatgctacccggacggggcaacattgatctcagagtgtcaaggcacatttgacgctgtccgtcagttattgaccgtgccggcaagatctaacagttccagcatcgaaagaaggcagtcaggaggcatcgaacgaaggcagtcaggagccattgaaagaaagcagtctgttgagagcactgggacagcggtcactgataacgggctctcagccgatggacctgggctagagacgaacagttctgctgcaaccaccacctcaccggtagacgacggtgggagtacccatccaccagcgagtaagtagcttggacatccgtttgaatcgtcaaagtccttcatcaaggcctggtttagtcaaccagagaaaaaaatgctgcaaagttatattaatagagaattatttatagttttgttctcagtcttacagtgtacacaagatctcactggatatctgtatctcacttttttttgactcgaacaattaaacttttagctgttcattgctatagtcgatacctagagtttctaacctgaacattcaataatctgattagtagtaaaaaaaaaaaaaaaaaaggcccctagggccgtgttcatgttgactacacttttgaagtcaaagaactgattcatgagtcatatatgtaatcgacattactggacatatatttctgtctgaatctatccggctctagattaaattgagcag

SEQ ID NO: 1839 - DNA, 554 bp, Zea mays
  unsure (1)..(554): unsure at all n locations
  Clone ID: PAT_MRT4577_24965C.1
cagctagaagtttaattgttcgagtgatnnnnnngtgagatacaggtatccagtggtacactgtaagactgagaacaaaactatgaattattatcgatgaatataatgtttgcagcaatttcttctctggttgactaaaccaggccttgataaagagctttaacaaattcaaacggaggtccaagctacttacttcctggtggatgggtactcacgtcgtcctctaccggtggggtggtggttgtagcagcatcgttgatctctagcccaggtccatcggctgacagctcgttatccgtgactgctgtcccagagctctcaacagattgctttctttcaatggctcctgactgctttctttcgatactggaactgttagatcttgccggtatggtcaatagctgacggacagcgtccagtgtgccttgacactctgagatcaatgttgccccattcgagtagcatcgaccaaaacatgcggcacaataaggatgtacaacctcgataaatgcctggcagagtgacaggaaaagagcggactcatttccacgaag

SEQ ID NO: 1840 - DNA, 836 bp, Zea mays
  Clone ID: PAT_MRT4577_24969C.1
aactgctaaaaccacccaccttctcagtgactcacgaactcacgactccagatctcccaccgctcgccatggacctcgacgcgaggcaccgccacacgccggattcgagctcctccccacatgccgcctctgacatgggtctcccgctcgccggggctgcctaccagccctacgtctctgagctcctctccttctccatcgagcgcctccacaaggagccggagcttctgagggtcgacgcggagcgagtgcggcggcagatgcaggaggtggcggtggagaactacggcgccttcatcgccgcctccgaggcgctctccttcgtccgcgcgcagctcgagagcttcgatggccacctcgaggccatgatagaggagataccaaacttaacatctggctgcactgagtttgttgagtctgcacaacaaattctggaggagaggaagcttaaccaaacattactagccaaccacactacattgcttgacttgcttgaaatcccaccattgatggacacgtgtatacggaatgggaactatgatgaagcacttgatctagaagcttttgtgagcaaaatatcgaagctgcacccagatttacctgttgtccaaggattagctgctgaagtcaagaagacagtacaatcattaatttcccagcttctccagaaactccgatcaaatattcagttacctgagtgcctccgtattgtagcacatctgcgtcgaattggagttttcagtgagtcagaattgcgcttacagttcctgaggtgcagggaaagctggctttctggaatccttgaagatctggacaaaggaatgtttttgattacc

SEQ ID NO: 1841 - DNA, 833 bp, Zea mays
  Clone ID: PAT_MRT4577_25003C.1
aaagacggagagaacagaacaggaaacagcccgcaggcgcagctctccacctccctcctctctctctccgatccacccgctcccctcccctctccgatagctgctcgccgcgctcaatcatggcggccgacccctccgcggctgcggcgcccgccgaccccgatggcccggacgcggttcgcttcacatggaacgcctggccccggtccaaggttgaagccagccgctgcgtcgtcccgctcgccgccgccatctccccggtccgctcccccgagtccctcgcgtcgccgccccttccctacccgccactccgctgcaagccgccttgctctgcgctcctcaaccccttcgcccgtgtcgacttcaccgccaagatctggatctgcccgctctgcttctcgcgcaaccacttccccccgcactacgccggcatctccgagaacaacgtgcccgccgagctcttcacacaatgctccaccgtcgagtacctcgtcgccggacccccgggatctcctgcaccgctgccgccagtgttcctgttcgtcatcgacacctgcgtcatcgaggaagaactggagtacgtcaagctgtccatgcggaaggcggtcgcgcttctgccggagcacgcacttgttggcctggtgaccttcgggacgcaggtgcatctgcacgagcttgggttctccgagctcagcaagatctacgtgttcccggggagcaaggagatctccaaagagcagattttggatcagcttgggttatcaggcggggggcggccagggttcccaaagatgacacagcagccaggcgtgcaacaggtcaatgggatgcat

SEQ ID NO: 1842 - DNA, 1362 bp, Zea mays
  unsure (1)..(1362): unsure at all n locations
  Clone ID: PAT_MRT4577_25022C.1
ttgggtacctcgaggccggccggggaaaaaatacaaaaagggggaaaaaaaaaaaaaaaatataaaaaaaaaaaaaaaaaaaaaaaaaaaaaaaaaaaaaaaaaaaaaaaaaaaaaaaaaaaaaaagggcctcggcctggggtttctctctttttcctccccatgtcattgggaccctcgagggcggccgggacgaggcgctgcggcacggaaccagcgccattagaggccacaagcccacgccacgcctccctcgttctcgcgcgcgcgcacgcatgcacgagggggcctgtcgatttgattgaacttttcaaattcagattcagaagctggccaagatgactgccggtttccagctcggcgtgatcgggtctctcacgctctccgtcgcgtcgtcggttgccattgtcatctgcaacaaagccctcatcagcaccctaggctttccattcgctacgactctgacaagctggcacctgatggtgaccttctgcaccctccacgtggcgcagcgcctgcgctttttcgagcccaaggcgatcgacgggcagacggtagttctgtttggcttgctcaacgggacctcgattggccttctgaaccttagtttagggttcaactccatcggattctaccagatgacgaagttggccataatacccttcacggtgctgttggagactatattcctgaagaaaagattcagtgagacgatcaagttttctctgctggtcttgctgctcggagttggcatcgcctcagttaccgacctcaagctaaactgcctcgggtccgttctttccggactcgccatcgccaccacttgtgtcggccaaattctcacgaatacgatacagaggaagctgaaggtctcgtcaacgcagctcctgtaccagtcagcgccttaccaagcagccattctgttcgccactggccccttcgtggaccatctcctcaccggccgcagcgtcttcgcccacagatacactttcccggttgtgggcttcatcgtcctgtcgtgcttgatcgctcgaacatatgcccatatgtattatgggaggaaaggagattngccacaaggaactacatgacccaaaacctttgaagcccttcaatgtctgatagcggngcaatcaatgacccaatgatgcaaacccccctctgtaactaatgctcctgcttagaaaggaggcaagaactttatgattgatttcatgatgggcagtgtttaagctttttgttcaaaaactgctgctgcttccatcgagcgtttgattctcgcttattctcaaccaactatggaatgatttagttcggtctggctatcccagccgtccaagggtattagttggcttgtttaaa

SEQ ID NO: 1843 - DNA, 1469 bp, Zea mays
  Clone ID: PAT_MRT4577_25025C.1
cctcgaggccggccgggacatgcggtacttcccggccccgccgggggccccaccccacgaggcgctcgctgcggcacggaaccagcgccattagaggccacaagcccgcaccacgcctccctcgttctcgcgcgcgcgcacgcatgcacgaggagctgctgcagagaagaggaggcctgtcgatttgattgaactttccaaattcagattcagaagctggccaagatgactgccggtttccagctcggcgtgatcgggtctctcacgctctccgtcgcgtcgtcggttgccattgtcatctgcaacaaagccctcatcagcaccctaggctttccattcgctacgactctgacaagctggcacctgatggtgaccttctgcaccctccacgtggcgcagcgcctgcgctttttcgagcccaaggcgatcgacgggcagacggtagttctgtttggcttgctcaacgggacctcgattggccttctgaaccttagtttagggttcaactccatcggattctaccagatgacgaagttggccataatacccttcacggtgctgttggagactatattcctgaagaaaagattcagtgagacgatcaagttttctctgctggtcttgctgctcggagttggcatcgcctcagttacggacctcaagttaaactgcctcgggtccgttctttccggcctcgccatcgccaccacttgtgtcggccaaattctcacgaatacgatacagaggaagctgaaggtctcgtcaacgcagctcctgtaccagtcagcgccttaccaagcagccattctgttcgccactggccccttcgtggaccatctcctcaccggccgcagcgtcttcgcccatagatacactttcccggttgtgggcttcatcgtcctgtcgtgcttgatcgcggtgtcggtgaacttcagcacgttcctggtgatcgggacgacgtcgccggtgacgtaccaggtgctgggccacctcaagacgtgcctggtgctgtcgttcgggtacacgctgctgcacgatcctttcaccgtgcggaacatcctgggcatcctcgtcgccatcttcgggatggcgctctactccatcttctcggtgcgtgagggcaagaagaagtccgcaggcgacgccctcccggtgtcacagatgcctgacaaggagacggagccgctgttggcgaccaaggacaacagcgacaccaaaaaggcgaacggggttgctcacgactgctaagatgttcccgtttgccgttgcttatagcctaattagtccagctctagtgttactacgacgcactgttctgaatctcagaaagtcagggaagaagtcattcctttttgtttcttataatattgtatatgtaatattcctctattgcgaattataagccgtttcaatttttttgaagagcaaaaaaaaaaaaaaaaaagcggccaaaaaaaaaaaaagcccct

SEQ ID NO: 1844 - DNA, 357 bp, Zea mays
  Clone ID: PAT_MRT4577_2505C.1
atattatcgagaccaactagcaacatagaatgtacattagtgtaccaacaatggcagccaaaatgttctggctacttatgctccttgggctttctgcaagtgctgctacagcgaccattttcccgcaatgctcacaagctcccatagctatccttttttccccgtacctctaaccagcggtgtctctccgcatgtgaaaacccaattctctaaccctacaggatccaacaggctatcacagctggcatcttacctttataaccctctggtcttccacatatcattatccctattacatcaggtacccttggggcatttattgacacacaacattagggcacaacaaactcaacaacc

SEQ ID NO: 1845 - DNA, 280 bp, Zea mays
  Clone ID: PAT_MRT4577_25172C.1
ctcacgcgtaactccacgcgtcgggtttgccagtgaataaaaccctcaaggtgaagggttatatgggagacttgtgtcgcatggacttcagtaaaactgatttctatgcctttgctcctccagatttctatactaggtttgggatcgtaggtgtgaaggccgacagtgtgatgaataagacaaagtctgattgaggaccatcaggctgcctatgttggatgaggagttcacgttccttttgtctgttccagagctgtccttcctgtgggtagaggtccag

SEQ ID NO: 1846 - DNA, 213 bp, Zea mays
  unsure (1)..(213): unsure at all n locations
  Clone ID: PAT_MRT4577_25345C.1
nctcgcgatggcgcgcatgcggtgccgtcaccggagcgcggcgagatggacgaggtggtatacgcggacccggatacggaagcggaagatcaggatgagaggtgggcgaggctgctgccggagctgctctgcgacgtggtgcggcgcgtctaggcgtccggcggcgagcggtggccggcgcggaaagacgtagactcctgcgcctgcctgtgc

SEQ ID NO: 1847 - DNA, 277 bp, Zea mays
  Clone ID: PAT_MRT4577_25349C.1
gccacatcgagagcaacgctcgagcacacatgcacgaagactctgtcttaggagcaactacaaaccaccgagccgcgcaagcatcatggagtaccggtcagcaggcgcagcgccgccacggcgccaggctccatgtcgaccagtgccggcaacccactccgcggcctcgagcacggccccggcggcatgaggcaccggcacgcgaactcaccggctgcatgggccctcttgatgagcacggcggcgctggcatggcaggcccgcagttccagcctgc

SEQ ID NO: 1848 - DNA, 921 bp, Zea mays
  Clone ID: PAT_MRT4577_25500C.1
ccggggagtatagcgtctgcttcgcaccaaccgaatagtcacagaaaattccgtttgcccaaacctagagctacctccgccgccgccgccggcaatcaagacagctgatggatcctatgcagtcatcggtgagaggccgcaggtcttcgttgcatgctgatgctgtcataactattggaggagtccgacctgcaccacccccacaaacatccacacaacatgtatgtcaagatgaggcaatggtcagcagcggggatccctcttggatgtctggttacagcactgattcctgccggggtggttattacacttctgcactcaacctggagggtgcatcaattagagaactgaagctgaaatatcagaagctgaaatatcggaataaacctaacaattgtaatgcggacgatcatgtcaatgctgaaagatcacccggaagaaaagctgaggagaaaaaagtgctggcgagaaagcatgaagattgtgatgatgaccctttcattgaagaagttaaaaagacgagagaagcacatcaagaaatagagagagatcgaaaggcccgtgatgataagttctatgagctagagaagattaagcttgacttgaagcgagaccgactggatacaatgataatgcaaactgacacgagtgcaatggacagtgaagcaaaacaatactttaagctgatgaaagaagagattttggctcgtcgattcaagagtaggaaagcataggtgtttccatttaatggattttagactgaagttgtttttcgttctttttaatggagttagtatttggtttgtatcttcaataatgctataatacttgtggatgctctgcattagggccagaaaaaaagctcgagctggctcgggctcgtagcagttcggctcgaaaaaaaaaaaaaaaaaagcggcc

SEQ ID NO: 1849 - DNA, 2047 bp, Zea mays
  Clone ID: PAT_MRT4577_25719C.1
cctcgaggccggccgggaaacaaaaaaaaaccacgcgtatgcgcccgcttgcgcgaaggcaaagcgtccaagcaaccacttctgctctgcatcccgtctgggcctctgcatttgcttggctgctgctcccttctcccaccgaccaactcgatcccgcgccatggatcgcgccgaccccgcgcggggccgccttgccgtgctctcctcccacctccgtggtgcaggggccgaggaggcggcggggctggagaggtcgccggtatccgcgccggcgcccgggccccgcgccggcgcgcttgccgtggtggacgggaggaccgggaagcggcacgaggtcaaggtctccgaagacggcaccgtgcgcgccaccgacttcaagaagattaccactggaaaggacgacaagggtcttaagatttatgatcctggttaccttaacactgcccctgttcgctcgtccatctgctacatcgatggagatgagggaatccttcgctataggggttatccaatcgaagaattggctgaaagcagctcgtttgttgaggtggcctaccttttaatgtatgggaacttgcctactcagagtcaattggcaggctgggaatttgctatttctcagcattctgctgttccccaaggactgttggatatcatacaatcaatgccccatgatgctcaccccatgggtgttcttgccagtgcaatgagcaccctttctgtctttcatccagatgcaaaccctgctctacaaggtcaagatctttataaatcgaagcaggtgagggataaacaaattgtgcgagtacttgggaaggcaccaacaatagcagctgctgcctacttgagattagcaggaagacctcccgtccttcctttaaatactctatcttattcagagaacttcttgtacatgctggactctttgggtgacagaacatataaaccaaatcctcgacttgctcgagctctagatattctttttattctgcatgctgaacatgaaatgaactgctccactgctgctgttaggcaccttgcttcaagtggtgtggatgtatttactgctctttctggtggtgttggagctctatatggtcctctgcatggcggcgcaaacgaggcagtacttaaaatgttaaatgagattggaagcatggaaaatattccagatttcattgtaggagtgaagaacaggaagaggaagatgtccggttttgggcaccgtgtgtataaaaactatgaccctcgtgctaaagtcataaggaaattggcagatgaggtgttctcaattgttggacgggatccacttattgaggtggccattgccctagaaaaggcagcgctgtcagacgaatattttatcaagaggaagctgtatccaaatgtggatttctactctgggctaatttatagggcaatgggattccctacagaattttttcctgtgctgtttgctattcctcgcatgggtggctggctagcgcattggaaagagtcactcgatgatcctgacactaagattataaggccccaacaggtatacaccggcttctggcttaggcactatacccccgtcagagaacgagtgctatcaagccagagtgaggaacttggtcaggttgccacctcaaacgcaactaggcgccgccgtgctggttctgccctgtagaagctgcagcgtataaacgcaccggcatactcaataaacatcgaccacttttgtgcttgaaaaggccacaaatgctttttagcttggttggagttgtaggccttttgttgtcgagtatataggcaataatgcagtgagaacaccacaccgttacaatgtaaaactgtcacgaggcatcacttgctggtgtacaccccttgcgttctctatgacttaatcacttaacttcccaaaagatgaattaagaggtacgatcgagtacccgtgttcttgcgttgacaccatgtgctcattttggtgaaattttgttgttcatttgcatggagattagtggaaacaaagatcgctgttggcgtaaaaaaaaaaaaaaaaaaa

SEQ ID NO: 1850 - DNA, 639 bp, Zea mays
  unsure (1)..(639): unsure at all n locations
  Clone ID: PAT_MRT4577_25837C.1
aatttgttctcgaggtgaggaatgtgataggagatagagggctagaggttgtcggcgatacatgcaagaagctacgaagacttcgaattgagcgaggggatgatgatccaggtctacaagaagagcaaggaggagtttctcagttaggcctgacagcggtagctgttggttgccgtgacctggagtacatagctgcctatgtatctgatatcaccaacggtgctctcgaatccatcgggaccttctgcaaaaatctctacgacttccggcttgtcctgctcgacagacaaaagcaggtaaccgatctgccgctcgacaacggtgtccgtgctctgttaaggagctgcaccaagctccggagatttgctctctacctgagacctggagggctctcagacacaggcctcgactacatcgggcagtacagcggcaacatccagtacatgctactgggcaacgttggtgaatccgaccacggattgatccgctttgcaatcgggtgcaccaacctgcggaagcttgagcttcggagctgctgcttcagcgagcaagcccgntccctcgcggtgctccacatgccgtcgctcaggtacatatgggtgcaaggctacaaagcctctccagcaggcctcgagctcc

SEQ ID NO: 1851 - DNA, 165 bp, Zea mays
  Clone ID: PAT_MRT4577_25961C.1
gcgggacaatcatacaacatgaactctcttgagtcacgagtttggtggaggtttggatatgccctctaacccattaaaagaactgcaccaacccccacctggacctttgtacggggggctaggggggaaaccgaaaaaagccgaggttggtcacatgtttctcag

SEQ ID NO: 1852 - DNA, 291 bp, Zea mays
  Clone ID: PAT_MRT4577_25984C.1
cgtatgaaaggtccgtaatcgcggagttcggctcaagctagcctcatagaacgcacgatagtgtaccaactatggcagctaaaatatgttggctccttgtgctccttggtctttctgtaagtgctgctacggcgacgcattttcccagaatgctcacaagctcctatagcttcgcatcttcgcccgtagctctcaacaacggtgtcttcggtatgtgagaacccagatctccaaggctacaggatccaacaggcaatcgagtctggcatgttacctttatcagccttgttc

SEQ ID NO: 1853 - DNA, 296 bp, Zea mays
  Clone ID: PAT_MRT4577_26014C.1
ggtcacaatctggatcagcttgctccagggagaaggagaaaaagggggcggtctctgaaaccctggcggacgggacgggaagatacccaaacagacagggggggaacccacaacgcgatatcacattgctgggcggggatctcgatccccacactaccaaagatctaaaaaaaattctcagctagctagcttgcgttgattgggcctgtgcggggctgagggagccgctagcctgacctgaccgccactgccgccttggctttgcttgagcggcaggccctgccgggcaatcctat

SEQ ID NO: 1854 - DNA, 352 bp, Zea mays
  Clone ID: PAT_MRT4577_26151C.1
tccccacttctcatcattcagtcagcactcgccacccacacgcctcctctcctcccgcggggccactccaactctccgatctccattaatcctcggctgatgctccgtctatggctgctcccatggtctactcctaatacctgctccaggtctacaggtctcgccttctccttcgcgcccttatctccaacaagggatgctcccctatcatgctcctcctcgcatgtcatgatgctgaaacttattacctgaatacaaaaactggtggtgcaaatggttctattagatattaagaatagtacactcatggttcatatgctggtttatagatagctatcgatcttcttgatcc

SEQ ID NO: 1855 - DNA, 308 bp, Zea mays
  Clone ID: PAT_MRT4577_26217C.1
gtgggttggcttctcctccccctccggttcgggttcgggttcgtgagagttctgcggggttcggtttcgtagggtgagcgcatcgagatggcctcgtaggatgttgagtaccgctgcttcttcagctgcctcgcctggaccacggacgaccactccatgcacaatgccttcagcacctacagcgaggtgctggactccaagatcatcatcgatcgggagacgcataggtcccgcggcttcggctttggcacacttctccacgcaggaggtacattcagaacgccatccaggtcctgaacatgacagaa

SEQ ID NO: 1856 - DNA, 373 bp, Zea mays
  unsure (1)..(373): unsure at all n locations
  Clone ID: PAT_MRT4577_26254C.1
ctcgagtccaagatcatcctcgatcgttagacacagaggtcccgcggctncggggttggcaccttctctacttaggaggccatgccgaacgccatcgagggcatgaacagcaaggagctggacggccgcaacatcaccgtcaacgaggcccagtcccgcggctatcgtggaggcgaccgctgcggccgatacggtggtcgacgtggaggcggccgctacggcgatggctggcgccatgatagcggcgacggctacagcggtggcggcggctaccgtgatggctgcggcggctacggtggtggtggccgcgtctacatgagcaacaaccgtggcggcgggtaccgcaactccaactggaactggaggaactgag

SEQ ID NO: 1857 - DNA, 2923 bp, Zea mays
  Clone ID: PAT_MRT4577_26256C.1
aattcggggccacgaggcgactctcggacccacgacgagttaagcccggagggaaaaaggacaaatcacacaaaggcacagggaatcgcgccaccgtgggacgcgtacggcgcaccgcccgcccgccggatctgcgccggcgacgcgcccggacgtcggatctacgccgccgcaggaggggggaggcggcgctgtggccgttctctgcccgcgagcgcccggatccgtcccgccggtgacttcatctccgctaatccaacggataggcaaaactctaatctttgtcaaccatcaagttgatgcagaggtggtgaaaacatcttctcttctccaaagactgctgactgcaagttgcaaaagtttgtcttcagcttgctgtgttctttcttccctctctggcggagtacacgagaagtttgtagatataggcactaggcagctcctttcagctcttctatgtccagggatttggactgtcctgttcagacacagatggctgtggcagtcctggaccggagcttcagcagtgaatatcctggaggcagcagaactgaggggaggcaactgagctggaagagagtctttgtgcaaactgacaatggttctgtccttggcattgagctggagagaggagaaaatgtgcaaactgtgaaaaagaagctgcagatagctctcaatgtgcccactgatgagagttcattgacctttggtgacctggttctgaatgatgatcttagcagcattcgcaatgactcaccgttgcttctcaaaaggaatcagattcaccgaagcaattccacaccttgcctctcccctactggccaggatgtttggcaaagagaccggagtggacccattgaaatacttggctgttcaagcccttcatctcggatgaagcagattgcgaaggatgtcattaaggccataatgaatggtgtcgacccagttgctattaacagtgggatgggtggtgcctactacttcaagaacatttggggagagcgtgttgcaatcgtgaagccaactgacgaggaaccatttgccccaaacaacccaaaaggttttgttgggaaggctctggggcagccaggcctgaaaagatctgtacgagttggtgagacaggcttcagggaggttgctgcgtacctcctcgactatgatcactttgcaaatgttcctcccaccatgctggtcaagataacacacaccatcttcaacgtgaatgactgtgttggctgcaaaagcaaagtattctgcaacaaatcagagtctgtgagcaagattgcatcactgcaggagttcattcctcatgattttgatgccagtgaccatgggacctcaagcttccctgtatctgcggtgcataggatcggaatacttgacattaggatcttcaacactgacaggcatgctggaaatcttctgatcaagaaggttggtcctggggctgacaatttcggagagcagacagaactcattcctattgaccacggtctttgtcttccagaatgcctagaagacccctacttcgagtggatccactggccgcagtcgtctgttcccttctccgtcgaggagctcgaatacattgcaaaacttgaccctataaaggacgcagagatgctacgcgtggagctacctatgatacgggaggcgtgtctcagggtgctggtgctgtcgacagtgtttctcaaggaagctgcagcgttcggcctctgcctgtctgagataggagacatgatgagcaggcagttcacagcaaaggaagaggaaccaagccagctcgagcttctctgcatggagacgaggaagtgggtcgaggaaagagagttatttcttcccgacgaagccggagttgaagacggcgatgatgacttcacccagttccctctcgacagcgatgccttcgaaccgccagctttctgcaagtttggcagcgtgaagacaagttccaggaatccactatccaagctggacgagtgtgacgaggaagacggagacttgtcggaagaggagggcgagcacggtgacgtcctgaccagtggtgcattgccccagaaggttcctcccatctccaagctgtcgtcgtccatgaaggggcttggcttcatcgggaaatccaaaccctaccgtacaggtggcgtccccaagggtaaggtgacaggtagaactaactacagtggcaaagccagcgagcatcagtccgggagccggagcgccaacgagctgctcccgcccagcgcgagtttcgtgaagctgtcggacatgagccgcaaggagtggagcgcgttcctcgagaagttccaggagctgctcccgagcgccctccgcacccggaagcacagcgccggcgtcggccagcgcccgatgccgaggctgggcacgtcttgccagttttgaaggtgtagaggagaagccaccaaggtaaaaaaaaatggatgtatacctccgttttagctctggtgtcgtgcaggtgcagcagtcagcaggtattatataaaaatgcttgtaggtgtatggagccagtagaagaggttgtccgagaataagatcgtcgatggcacagttgagatgagcttggcttgcaggagagtggtgtgtttgtgcatagtgttttgacatatgagatgcgttgttcttttctttttttttctttttcttttttgtatatagtgagtactcctgccgcctcgcaacaccgggctcgatctcggccgttacctgatggtggtgagtgtgcttggcatcgcctgtgttctgtctttgccgctgtaccattttggagacgcttaccataatatgaacagctgtgatatgatatcgctacagatatatgcataaataacacctgatagtctgcttcagtaaaaaaaaaaaaaaaaaaaaaaaaaaaaaaaaaaaaaaaaaaaaaaaaaaaaaataa

SEQ ID NO: 1858 - DNA, 1645 bp, Zea mays
  Clone ID: PAT_MRT4577_26477C.1
cattgggtacctcgaggccggccgggaaaaaggtgtggggctgtgggcattcaattgcttttgcttcctccgttcccccatctggccatctccccttcccctgctcccccgaagcagcaagccagcctgcccacccgcagccatcacctccgccgctctccaccatgaatcccatccaccagcacggcatcgtacccaatccttcgtgactgttgcctccgcgcatctccgggagcaatggaaggaggccgagatgtgttcttaggtgcggcggcaagggcgccgccgccgccgccgtcttgcccgtttcacggatccgctaccgccacccgctccggtggagcgcagatgctcagcttctcctccaatggcgtagcagggttgggtctgtgctcaggtgccagcaagatgcagggtgtgttgtcgagggtgaggaggcccttcactccgacgcagtggatggagctggagcaccaggccctgatctacaagcacttcgctgtgaatgcccctgtgccgtccagcttgctcctccctatcaaaagaagcctcaatccatggagcagccttggctccagctcattgggatgggcaccatttcgttccggctctgctgatgcagaaccaggaagatgccgccgcacagatggcaagaagtggcggtgctctagagatgctgtcggggaccaaaaatactgtgagcgacacataaaacgtggttgccaccgttcaagaaagcatgtggaaggccgaaaggcaacaccgaccactgcagatccaaccatggctgtttctggtggttcattgttgcacagccatgctgttgcttggcagcagcagggcaaaagctcagctgctaatgtgactgatccattctcactagggtccaacaggaatttgctggataagcagaatctaggtgaccagttctctgtatccacttccatggactcctttgacttctcatcatcacattcttccccaaaccaagccaaagttgcattttcaccggtggccatgcagcacgaacatgatcagctgtatcttgtgcatggagccggcagctcagcagaaaacgttaacaagtctcaggatggtcagctgctagtctcgagggaaacaattgacgacggacctctgggcgaggtgttcaagggcaagagttgccagtcagcatccgcagacatcttaactgaccattggacttcgactcgtgacttgcgtcctccaaccggagtcctacaaatgtctagcagcaacacagtgccagcagagaatcacacgagtaacagtagctatctcatggcgaggatggcgaattctcagaccgtcccaacactccactgagtgttcatcaggctggtctttgttgggaccacaaaataactgaagccatgttgatgtcctgagtttgctgatactaggttttcagtcgagtcttgtaactcctgttttagagctgttatatgttcacgtcatgttgcctttcattttcggttcattcagatgggtgttctaataatttctttccttcttacctgtgaaggatttgagttccaatctgagacgtgggtttgttctaacttggaggtatttatgaatattaggcacttctgatttccattgaagcgagatttctttaaaa

SEQ ID NO: 1859 - DNA, 1744 bp, Zea mays
  Clone ID: PAT_MRT4577_2654C.1
ccggccgggccgggaattcggcacgagagccaagggctagccgatcaacaacaccacactagcctctcctagtctcctatcctatctagcttccaccggccggaagaaaaaaaaaatggtggcgagcaaggccgccccgttcgacgaggtgtcctcggtggaggcgggggcctacgggggccgcgacgacgacgggcggccgcgccggacgggcacggtgtggacggccagcgcccacattatcacggccgtcatcggctccggggtgctctcgctggcgtgggccatcgcgcagctgggctgggccgcgggccccgccgtcatgctgctcttcgccgtcgtcatctactacacctccacgctgctcgccgagtgctaccgctccggcgacccagtggcggggaagcgcaactacacctacatggacgccgtccgcgcaagcctcggcggcgccaaggtcaggctctgcggcgccatccagtacgccaacctcttcggcgtcgcaatcggatacacaatcgccgcatccatcagcatgctcgccatcaagagggcggactgcttccacgccaagggccacaagcacgcgtgccgcagctccagcaacccctacatgatcctcttcggcgtcgccgaggtcgtcttctcgcagataccggacttcgaccagatttggtggctctccatcgtcgccgccgtcatgtccttcacctacgccaccatcggcctcgtcctcggcatcatgcagaccgtcgccaacgggggcttccagggcagcctcaccgggatcagcatcggcgccggcgtcaccccgacggagaaggtctggcggagcctgcaggccttcggcaacatcgccttcgcctattcctactccatcatcctcatcgagatccaggacacggtcaaggcgccgccgccatccgaggccaaggtgatgaagagggcgaccatggtgagcgtggccaccacaacggtgttctacatgctgtgcgggtgcatgggctacgccgccttcggcgacgccgcgccggacaacctcctcaccggcttcggcttctacgagcccttctggctgctggacatcgccaacgtcgccatcgtcgtgcacctcgtcggcgcctaccaggtcttctgccagccgctcttcgccttcgtcgagaagtgggcagcggccacgtggcccgacagcgccttcatcgcccgggagttccgcgtgggccccttcgcgctcagcctgttccgcctcacctggcgcacggcgttcgtgtgcctcaccaccgtcgccgccatgctgctccccttcttcggcgacgtcgtcggcctgctcggcgccgtctccttctggccgctcaccgtctacttccccatcgagatgtacgtcgtgcagcgcgccgtgcgcaggtggagcacgcactggatctgcctccagatgctcagcgctgcgtgcctcctcgtgtccgtcgccgccgcagcgggctccatcgccgacgtcatcggcgcgctcaaggtgtaccgcccgttcagcggctagttcagataggggcccaacgaggcgtgtgccgtgcacatgagtagtgccagtggtatctctactggtcggggtgctacattgactgtggggtcccgggttgttgtaacttgtaagatatagccaaatgaaaaacaaagctactgaactcgtgtggagttttgtcatgtagcaacttaaaaaaaaaaaaaaaaaaaaaaacaactcgagggg

SEQ ID NO: 1860 - DNA, 168 bp, Zea mays
  Clone ID: PAT_MRT4577_2657C.1
ggcaagtgcgatttcgatctcgcagccaccttctatcagttctgttgtgtatctagtagttgaaatgagatatgcagtttgcacttgcattggagacgaactcaggtcctcaccagataagatcttgtgatggtgatgggattgacaggttcgacaacttaactattg

SEQ ID NO: 1861 - DNA, 577 bp, Zea mays
  Clone ID: PAT_MRT4577_26641C.1
acctcgaggccggccgggatctctatgctaccatcgaccttcaagtctcgctatgtagcatcgtcaatataaatagcagccgaaatggcgagtagcactatggccctctcttccacggccttcgtgggctaggtcgtgaacgtgtcgtcgtcgttcgtcttcggggaggcccgcgtgtacgatgcgcaagacgggggtgtaggcctagctagcgttgtcgtccgggaggccgtggtatcggccccgaccgcgtgctgtacctgggaccactgtgcgaggatgctgcgagctacctgacggacgagttcccgggcgactacggctgggacaccgcggtgctgtcggtggacccggagacgttcgccaagaaccgggagctggaggtgatccactcgcgctgggccatgctgggcgcgatcggctgcgtcttccccgagatgctcgtccgcaacggcgtcaagttcggcgagggcgtgtggttcaaggccggatcccagatcttcagagagggagggctggactacctcgggaacactaacctcatccacgcggataatatccttgctatctgggcctg

SEQ ID NO: 1862 - DNA, 428 bp, Zea mays
  Clone ID: PAT_MRT4577_26783C.1
gggagcaccaaaaagcaccattttttccttaggattaacttaaaaaaaatcctgacaggggtaacagggtccatcgatccaaaatccatgctgggtgaggcatgggtctggtggagccggggatgaacacagaactaacaacggacaaaaagggaccttgcaatcaaaaacacagaggggcaacaacaaacgagacgaacgaagataaacccttgggactaggggaaacatcacgggaggaaaaaagaaaacttgggcgggcgggccccaccggtaagttcctccaattcccgtgggaattgccgaaacccccgccacggttgccaccgccgaaacccccaccaccaccaccggaaccaccggcgccaccggaagcgccgccgccaccgccgaaaccgccgccgacataaaggggcccgccaccgccg

SEQ ID NO: 1863 - DNA, 276 bp, Zea mays
  Clone ID: PAT_MRT4577_2697C.1
gattgagatctttttttttttttgcaggaccaaggggcaccattttttcctgaggagtaacttagaataaagcctggcgggggtaacagcatccatcgatccgcagtccatgctgtttgatgcatgggtcttctgaaaccgaggatgaacacagttctatcaactgacacagagggaccttgcaatcaaaaacacagatggggaacatcaaacacgacacgagcgaagataaaccctcttggctagggtaaacatttttgttgcgaacaggataac

SEQ ID NO: 1864 - DNA, 2286 bp, Zea mays
  Clone ID: PAT_MRT4577_26995C.1
atggacggatgcgattgcatagagccactatggcctaccgatgatcttctcgtcaagtatcagtacatctcagacttcttcatagcccttgcgtacttctcgattccattggagctcatatattttgtgaagaagtcgtccttcttcccatacagatgggtcctgatccagtttggtgcgtttatagttctttgtggggcaacccatctgataaacctgtggacgttcaccacacatacaaagaccgttgcgatggtcatgaccatagcgaagatttctacagcagtcgtgtcctgtgcaactgctttgatgctcgttcatatcattcccgacttgttgagcgtgaaaactagggagttgttcttgaagaataaagctgaggagcttgatagagagatgggacttataaggacgcaagaggagactggtagacatgttaggatgcttacacatgaaatcagaagtactcttgatagacatacaattttgaagactactctcgttgagctaggaaggaccttgggtctggaagaatgtgcattgtggatgccatctcgaagtggctcaagccttcagctttctcatactttgcgccaccagattactgttggatcatcggtgccaatgaatcttcctgtcgtcaatcaagtgttcagtagcaaccgggcaatcataataccccacacatcttctttggcgcgggttcgacctcttgcagggcgatatgttccaccagaagtggccgcagtccgtgtacctcttctacatctttcaaactttcaaataaatgattggcctgagctctcagcaaaaagctttgcaatcatggttttgatgcttccatctgatagtgctagaaaatggcatgtgcatgaattggagctggttgaggtcgttgctgatcaggttcgtgctgtatcttttgctatggttactataacatactacttccatccagagaaggatgtagcagttgcactatctcatgcagctattctcgaagagtccatgcgggcacgtgatttactaatggagcagaatgttgccctggatttagctcgaagagaggctgagatggctatccgtgctcgcaatgatttcctagctgttatgaatcacgaaatgagaacacccatgaatgcaataatagccctttcctccttgcttttggaaactgagcttactcctgagcagcgtctaatggtggaaacagtactgaaaagcagcaatttgttagcaacactcatcaatgatgttctggatctttccaaactcgaggatggaagccttgaactggagattaaagcattcaatcttcatgctgttttcaaagaagtgatgggtttcattaaaccaattgcatctatcaagaggctatctgtatcggttatgttggcaccagatctgccgttatgtgcaattggtgatgaaaagagactcatgcaaactattctgaacatctctggcaatgctgtaaagtttaccaaggagggacacatcacgcttgtagcttccattgtgaaggctgactctttgagagagttcagaaccccagaatttcatccaactgcaagtgatgaacatttctatttgaaagttcaggtaaaagatacaggctgtggagttagtcctcaggatctacctcatgtattcacaaagtttgctcatcctcaaagtggaggaaaccgagggtttaatggtagtggtcttggccttgccatatgcaagaggtttgttagtcttatgggagggcacatctggatcgacagcgaaggaaccggaagaggttgcaccgcaacattcgtcatcaagctcggcgtgtgtgacaacacaaacacctaccagcagcagctgatccctctagtatggccaagcagcgcagactccgatttgcgtgctccgaaagctcttccggacgggagaggatctactcccttgaaatctcggtaccaaaggagcgtatgagcctagtgtaaatgattgacggcatagtgccaagtaggggaccgattagtgccaccgtctaattttgtttgtaaccctgtcatagcaggcatatgatgtacaaatactgtaaagcaaatggagactgcggccgtgtatctgggtggcaacgctgacttgctgcattgagtggtatatacatatgctaccagcggattgaattgcttattctggggtgtgccgagcgcgcccgtgtgcgaccaccgtagctcgttgcttgttctattgtgacttgaattccatattcatcgtgtaatatgaaatccagtgcaaatacacggt

SEQ ID NO: 1865 - DNA, 3260 bp, Zea mays
  Clone ID: PAT_MRT4577_26996C.1
ttgcggctcctgccacgcccccgcctgctcaccggagcccaccccttccatcccccctccagaccaccgggccatttacactcccacccccgcgccttccaggcgcaggaaaaaaatagccagcgcatgcttagacgacttacagaacagcgccggactgccggcaccctgcctattctttctcccgttcaccccgccgtgcacgctctttttgtccctcgtgccgacgaccgaccgaccgccgccgccgccgccgccgccaaggtcttcgtaaagccactcgccggcaacgagcagccaccaggaagatgttgtgaggactgatgcaataactaagcttgctggatggacggatgcgattgcatcgagccactatggcctaccgatgatcttctcgtcaagtatcagtacatctcagacttcttcatagcccttgcgtacttctcgattccattggagctcatatattttgtgaagaagtcgtccttcttcccatacagatgggtcctgatccagtttggtgcgtttatagttctttgtggggcaacccatctgataaacctgtggacgttcaccacacatacaaagaccgttgcgatggtcatgaccatagcgaagatttctacagcagtcgtgtcctgtgcaactgctttgatgctcgttcatatcattcccgacttgttgagcgtgaaaactagggagttgttcttgaagaataaagctgaggagcttgatagagagatgggacttataaggacgcaggaggagactggtagacatgttaggatgcttacacatgaaatcagaagtactcttgatagacatacaattttgaagactactctcgttgagctaggaaggaccttgggtctggaagaatgtgcattgtggatgccatctcgaagtggctcaagccttcagctttctcatactttgcgccaccagattactgttggatcatcggtgccaatgaatcttcctgtcgtcaatcaagtgttcagtagcaaccgggcaattataataccccacacatctcctttggcgcggattcgacctcttacagggcgatatgttccaccagaagtggctgcagtccgtgtacctcttctccacctttcaaacttccaaataaatgattggcctgagctttcagcaaaaagctttgcaatcatggttttgatgcttccatctgatagtgcaagaaaatggcatgtacatgaattggagctggttgaggtcgttgctgatcaggtagcagttgcactatctcatgcggctattcttgaagagtccatgcgggcacgtgatttactaatggagcagaatgttgccctggatttagctcgaagagaggctgagatggctatccgtgctcgcaatgatttcctagctgttatgaatcacgaaatgagaacacccatgaatgcaataatagccctttcctccttgcttttggaaactgagcttactcctgagcagcgtctaatggtggaaacagtactgaaaagcagcaatctgttagcaacactcatcaatgatgtgctagatctttccaaactcgaggatggaagccttgaactggagattaaagcattcaatcttcatgctgttttcaaagaagtgatgggtttcattaaaccaattgcatctatcaagaggctatctgtatcggttatgttggcaccagatttgccgttatgtgccattggtgatgaaaagagactcatgcaaactattctgaacatctctggcaacgctgtaaagtttaccaaggagggacacatcacacttgtagcttccattgtgaaggctgactctttgagagagttcagaaccccagaatttcatccaactgcaagtgatgaccatttctatttgaaagttcaggtaaaagatacaggctgtggaattggtccacaggatctacctcatgtatttacaaagtttgctcatcctcaaagcggaggaaaccgagggtttaatggtagtggtcttggccttgccatatgcaagaggtttgttagtctcatgggagggcacatctggattgacagcgaaggaaccggaagaggttgcaccgcaacattcgtcgtcaagctcggcgtgtgtgacaacacaaacacctaccagcagcagctgatccctctagtatggccaagcagcgcagactccgatttgcgtgctccgaaacctcttccggacgggagaggatctactcccttgaaatctcggtaccaaaggagcgtatgagcctagtgtaaatgattgacggcatagtgccaagtaggggaccgattagtgccaccgtctaattttgtttgtaaccctgtcatagcaggcatatgatgtacaaatactgtaaagcaaatggagactgcggccgtgtatctgggtggcaacgctgacttgctgcattgagtggtatatactaccaaaggattgaattgaaaaaaaaaaaaaaaaaaaaaaaaaaaaaacccgcacttccgcacaggtactgccgcaggcgcgtctcgcactcgcacgaccgctggccgctcggcagacggcagtcccgctccggctccggcgctccgctgctcgctcggccagctggcctgctcatgcagacagcaggctgcagtcctacctgctttgctgcttgtcccacccggcggccggctgatgtaggctgtttgtcccggcccgccgaggtgccgacccgcccggctgccgcagtgccgctgcttccagtttgcttcctgcttgctttatttagatcattgcttcattacttgcttgactgcagactgcttgagtttaagtgcttgactgcttgttaactacacaaatgcaattggctagatctcctacaactagattcaactaaaggtacaaggtgttttaaatcgtgttataaatttttagtcttcaccgcgttagccacacctaaattttttggcgtcctcggccagtaaaagcttactagttgctgactgagggagataaccggatactatcgtctcgggatctaacctacgtagtactatttttttcaggccaactagcgaatttcctcatccttttttctcagcctgctggatatagaggaagtctgcattgttttacttgtatgctttatgaaaaaagatagaattattccttgacattcgctcagctcccaaatgatctatattattggagagtttgcgcgagaggcgagtatatacataacaatcgcttgcatggcttatcaacatgcaaatttctttgagactgac

SEQ ID NO: 1866 - DNA, 427 bp, Zea mays
  Clone ID: PAT_MRT4577_27161C.1
acgcgttcataactagcaacatagaacgcacaatattgtaccaacaatggcagccaaaatggtttggctccttatgctccttggtctttctgcaagtgctgctacagccaccattataccgccatgctcgcatgctcctatagcttctcttctttccccgcacctcttaccagcggggcacttcagcatgtgaaaacccaattacttaaccactacaggatccaacaggcaatctcagatggcatcttaactttatgaccctcgatcatccaacaatcatcaaccctattacaacagatacctttggtgcatttattggcacaaaacatcagagcacaactactacaacaacttgtgctagcaaaccttgctgcctactctcaacaacagcagtttcttccattcaaccaactaagttcattgaact

SEQ ID NO: 1867 - DNA, 306 bp, Zea mays
  Clone ID: PAT_MRT4577_27290C.1
cggacgcgtgggctggcttctccttccccttttaccaagacctcctcgggatagggggcctgagggttatgtggaggggcgatggcaacaactgatgtgaagtaccgttgcttcgacggcgggcttgcctgggccaccagcaacgaggcgctggataatgccttcgcctcctacggcgagatccttgactccaaggtcatcaccgaccggtagacggggaggtcccgcggctacagctacgttaccttcacctccgagaacttcatgctcgacgctatagagaacatgaacggcaaggagctcgac

SEQ ID NO: 1868 - DNA, 306 bp, Zea mays
  Clone ID: PAT_MRT4577_27305C.1
caactagcaacatacatagcacaatagtttaccaacaatggcagccaaaatatcctgcctggttaggctcctcggtctttctgcaagtcctactacctcgaccattttaccgcaatgctcgcaagctactataactaaccttcttcccccgtacctctcaccaactgtatcttcagtatatgaaaacccaattcttcaaccatacacgatccaacactcaatcgcaacttgcatcttacctttatcaccctagttcctccaacaatcatcaatcctattacaacatttacattcgtatcatttatt

SEQ ID NO: 1869 - DNA, 302 bp, Zea mays
  Clone ID: PAT_MRT4577_27312C.1
cggacgcttgggcggactcgtgttcttttccctaactcccgtccgcagttggccatctcccaaatccatttcgcaagtccaccctcctttgccgccatggccctttttgtgaaaaaaacctcttctggacgggattccaaggtcaaggatctttcccaggcggacttcgtccgcctcaaaattgacctgccctaggtcaaaatgcccgccctaatggcttgccgccccaagttcggcccgtccaagccttttgccggccctaggatctcgggttctttccacatgaccatccaaaccgcctt

SEQ ID NO: 1870 - DNA, 128 bp, Zea mays
  Clone ID: PAT_MRT4577_27575C.1
gtaacgcgaataccacccccgtgacttcccgatctccggcgatggtcgcgcggtgcctcggatcccccgtatctaggtggttgcgcccgtctgcgctgatcctcctggtcgcctctgatctcctctcg

SEQ ID NO: 1871 - DNA, 1917 bp, Zea mays
  Clone ID: PAT_MRT4577_27638C.1
tcgtagcccgctcgctgttgtaggtaggcggcagggttcaccatggctagttgactgagcgctggcagaaactgttgcagctgttgttgtggctggtttgcaactacgtttgccagagcaagtgggtttgatgcaagcaactgctgttgcaagtaggcggcagggttcaccatggctaggtggctcagtgctggtaggaattgttgttgctgttgcgttgcgatggtttgtattgttagatgtgccaaggattgttgtggcaacttccagcttgcgcatcgctgggtcaacaacccacatggccggcgtagccctttgaatcttgttcgcagccgtgattttatcactgtgggtgaaacgtaatcacatacctactgtaatcagccggccggccgcgcccatgacgtcgctactcttccgggatggaccaataacattttatatctggacgccccttatcgccctcgttatttacatcgctgccaccctcctctccgccgtcgccgccgccgccggggatggggggagcgcaattccccggcgacaacgacgtcgcggaagtagacgcggcccgcgacggagaggtggaccgccgtgacgtgggcaagatgaagcacgggtgcgagcattaccggcggaggtgcaagatcgtggcaccgtgctgcaaccaggtgttcccctgccgccactgccacaacgaggctacggcttccggagatcggcatacaatatgtcgtcaggatgttgaaaaagtagtttgcctactctgtgaaacaaaacagccggtgtcacaagtgtgcataagctgtggagtcaatatgggagagtacttttgtgatatatgcaaattttatgatgatgatacagacaaagggcagtaccattgcatcgattgtggcatatgcagggttggtggcaaggaaaacttcttccactgtgtgaagtgtgggtcctgctattctgttatactccgtgataaccatcagtgtgtggagaactcaatgaggcagaattgccccaatctgttatgagtatctatttgactcattacaaggaacaagagttctgaactgtggacacacaatgcacttgacatgttttgaagaaatggtggcgcataacaaatacacttgtccaatatgctctaaaaacagctcttgatttgacacatcattgggaaatgttggatcaagagatcgaagccacgatcatggcctcttgtgtatcgctacaagatttgggtgctttgcaacgattgcaacaaggtctcagaggtgaactttcacgtgattggccacaagtgcagccactgcagatcgtacaacacccgaacaacatcgcgccctgcagatttatccggaagcagctcaccttcaacagactcatccgacaacaacatatagagaagaaaccattgacagagccaatatgattgaagaaccggaggaggaaacattgtttcggggcgtgcgtgcttgccaaacttgaagactcccagccgtttattggccctcatcttgtctagattcagttcattccatgagtctttgctgttgtggcaacttccagcttgcgcatcgctgggtcaacaacccacatggccggcgtagctgtccctttgaatcttgttcgcagccgtgattttatcactgtggatgaaacgtaatcacatacttactgtaatctactatggttgaagatgtgtgcccccctgactcatgccttgtgtgcttgtgctgaactgtttatgaattcccatgctgttccgtaacactatattgccatttgtgtttccttatctgtcaagtaccgccaagtgtgcggtgaaattgtaattatttgcaatgaatagaatcttatatctatacctaataataaagactcaacatttctgccgtgttaccaacaaacccacac

SEQ ID NO: 1872 - DNA, 672 bp, Zea mays
  Clone ID: PAT_MRT4577_27663C.1
atccacatattattcgcgaccaactagcaacatacaaagcacaatactgtaccaccaatggcagataagatactcggcctacttaggctccttgtacctttctgcgagcgctgctacggccaccattttcccacaatgctaacaagctactatagctttccttcttcccccgggcctctaaccaacggtggattaggtatgtgaaaacccaaatcttcaaccgtacaggatccaacaggcacatcaaaggtggcgtgatacctttatcacgcttgtgcctccaacaaacatgaaccctatgacagcagatacctttggggcatttattgcaacacaacatcagggcacagcaactacagcaacttgtgctagcaaaccttgctgcctactctcagcaacagcagattcttgcattcaaccaactagcctgactggactctgcttcttattttcaacaacaacaactacgattcagcctggtatctgctgtctacccccagctatttcttgcattgaaccgactgaccgcattgaactctcgtgcttatttacaggaacagcgactactaccactcagccagataggtggcgtgagccctgctaccttcttgacacaaccacagctgatgtcgttctagcagcacgctgagcctaacgctggcaccctgttac

SEQ ID NO: 1873 - DNA, 2075 bp, Zea mays
  Clone ID: PAT_MRT4577_27700C.1
aaatcaggcccacgcttttgttaacaaagaattccctcatagccgccgccgccgccgccgccgccgccgctcatctcgccgagaggtgacgggaccgaggaactcgccgagttctaagatagagaatcgcttttcacagcctggggtctgctgcgtagggtggtgttgaaggggagaagtttaagatctgttccacagatcacgcgtgcgcgctggcgaatcgggggttccacacatagcttcgtcgttttgaatttgatgtactaatggagtctaagggtggcaagaagtctagcagtagtcgttccatgatgtatgaagctccccttggctacagcattgaggacgttcgacctgccggaggcgtgaagaagttccagtctgctgcttactccaactgcgcgaagaagccatcctgatatcccttttggcttcctcattctagtagtttaggatttcttttctgacactttgattctgaccaatctctctggcctgctgcttcctgataatcgaccagttccccagtcttgctccttgcactccttcctccatctccagcattgtgttctgattcacctgctccaatggctgttctttctgctgctgatgcttccccggtctcagctatcgggtttgagggctatgagaagcgccttgagatcacattctctgaggcacctgtctttgtggaccctcatgggcgtggcttgcgtgccctctccagggcccagattgactctgttctggatcttgcacggtgcacaatcgtgtccgagctctccaacaaggatttcgactcatatgtcctttctgagtcaagcttgtttatctatcctctgaagattgtcatcaagacctgtggcactaccaagctcctgctcaccattccaagaatccttgagcttgctgaagagctgtctatgccacttgctgctgtgaagtactcccgtgggacgttcatctttcctggcgcacagccagccccccacaggagcttttctgaggaagttgctgcacttaactgctactttggcgttctgaaatctggtggtaatgcttatgtgattggagatccagcaagacctggacagaagtggcacgtcttctacgccactgagtacccagagcaaccaatggttaaccttgaaatgtgcatgactggtctggacaagaagaaagcttctgtctttttcaagactaatgctgatgggaacacaacatgtgccaaggaaatgacaaagctctctggcatctctgaaatcatccccgagatggagatctgcgattttgactttgaaccctgtggctactccatgaatgcgatccatggctctgcattctccacaatccatgtgacgcccgaggacggtttcagctatgccagttacgaggttatgggcttggatgccactgctctgtcttatggtgaccttgtcaagagggtcctccggtgctttggcccctcggagttttccgttgccgtgaccatctttggtgggcgtggccatgccgggacatggggaaaggcacttggtgcagaggtctatgactgcaacaacatggtggagcaggagctgcctggaggcgggctcctcgtgtaccagagcttctgtgctgctgaagacgctgttgctacctcgcccaaatctgttttccactgctttgacggcgagaacgtggagagtgctcctcctcctatgaagaaggactacaagctggctaatcttctctgctgggaggaggaagcggatgccatggaggagaaggcgagagtgcttgatgagtaagacgggcttctggggtcgatttgcttctgagttgtttattttatatcgtcgcaatttcgtggttgtcgtttggttattctgtgaagcagccaagccaagctattgttatgaaaatttgtcgtctgtaagcatgtgaacttccgacgttgccacatgctggatcagtctgaataagtaagtatgcagctctaggtggtcagctgcgtctaccacaatgagcatgtacgtatggagaaatatctgtgaacccattttgtttatgaataagatttgttttttcgagtt

SEQ ID NO: 1874 - DNA, 2932 bp, Zea mays
  Clone ID: PAT_MRT4577_27701C.1
ccggccggtaatggtctgtgatgaagtcgcccgatttggttgaggctgctgtcgtcaccaagttcctgcttgtcaggaagaacctacttggtgccgctgctctcgcatgatatctccgggtaaatctgaggccattgagagagaaaaaaaagaaaaaaaaaagccgcacgcttcttgttgccaaagaattccctcccctagccgccgccgccgccgctcgtctccctgagaggtgccgggaccgaggaactggccgagttctaggtagagaatcggttttgcttgtctcagcccggggtctgctgcgtctggtggtggtgaaggggagaaattcgtgagatctgttccggatcaggcgtgcgagctcgggaatcaggggtttcacacatagcttcgtcgatttgaatttgatgtactaatggagtctaagggtggcaaaaagtctagcagtagtcgttccatgatgtatgaagctccccttggctacagcattgaggacgttcgacctgccggaggcgtgaagaagttccagtctgctgcttactccaactgcgcgaagaagccatcctgatatcccttttggcttcctcattctagtagtttaggatttcttttctgacactttgattctgaccaatctctctggcctgctgcttcctgataatcgaccagttccccagtcttgctccttgcactcctccctcctccatctccagcattgtgttctgattcacctgctccaatggctgttctttctgctgctgatgcttccccggtctcagctatcgggtttgagggctatgagaagcgccttgagatcacattctctgaggcacctgtctttgtggaccctcatgggcgtggtttgcgtgccctctccagggcccagattgactctgttctggatcttgcacggtgcacaattgtgtccgagctctccaacaaggatttcgactcatatgtcctctctgagtcaagcttgtttatctatcctctgaagattgtcatcaagacctgtggcactaccaagctcctgctcaccattccaagaatccttgagcttgctgaagagctgtctatgccacttgctgctgtgaagtactcccgtgggacgttcatctttcctggtgcacagccagccccccacaggagcttctctgaggaagttgctgcacttaaccgctactttggcggcctgaaatctggtggtaatgcttatgtgattggagatccagcaagacctggacagaagtggcacgtcttctacgccactgagtacccagagcaaccaatggttaaccttgagatgtgcatgactggtctggacaagaagaaagcttctgtctttttcaagactaatgctgatgggaacacagcatgtgccaaggaaatgacaaagctctctggcatctctgaaatcatccccgagatggagatctgcgattttgactttgaaccctgtggctactccatgaatgcgatccatggctctgcattctccacaatccatgtgacgcccgaggacggtttcagctacgccagttacgaggttatgggcttggatgccactgctctgtcttatggtgaccttgtcaagagggtcctccggtgctttggcccctcagagttttccgttgccgtgaccatcttcggcgggcgtggccatgccgggacatggggaaaggcacttggtgcagaggtctatgactgcaacaacatggtggagcaggagctgcctggaggcgggctcctcgtgtaccagagcttctgtgctgctgaagacgctgttgctacctcgcccaaatctgttttccactgctttgacggcgagaacgtggagagtgctcctcctcctatgaagaaggactacaagctggctaatcttctctgctgggaggaggaagcggatgccatggaggagaaggcgggagtgcttgatgagtaagacgggcttctggggtcgatttgcttctgagttgtttattttatatcgtcgcaatttcgtggttgtcgtttggttattctgtgaagcagccaagccaggctattgttatgaaaatttgtcgtctgtaagcatgtgaacttccgatgttgccacatgctggatcagtctgaataagtaagtatgcagctctaggtggtcagctgcgtctaccacaatgagcatgaacgtatggagaaatatctgtgaacccattttgtttatgaataagatttgtttttttcgagttaaaaaaaaaaaaaaaatattcattcatacgcattccagagtccagactcatttcgaactaccccgccgctccgcctcgaccctcccctcctccccaatcccgcgcccttccaccctcccgccgaaagcccagccccgatggcgtctctagaaggcgaccggtggtcggagatcgtggccagcggccgtgcccggccgccccgcgtcggcgtcgtgtacggtcgtcgcctggtcgaggaatcgtccggcagggctaacatggagacgagggccagcttcagtggcctgcggcgcccgagcttcgtgccgcgcaagcgaaccagctgaaaccggtcgctttccatcagagggagagagagtatcttcgtcgcacctggtgcaaatcttcaacagaaaccatgtgaagcaatgaaacgaccaccgaaaccgtgcaaccgaaagaaacgtctgggtggccctcctgatttgagcaaggagaaggcatattttgaagagatcgatgcctttgatcttatggaagaaagtccttctcctaagaactttgcctcgtggaccaaaggaatggagcagaatcacataattcatgatctgcctgcaatattggagagatggaaaatttctactcttgcaagacgtgtgtcatctgaccccttgattgacattgcggagacgccaatcttacctcagtcctcagtaacagca

SEQ ID NO: 1875 - DNA, 282 bp, Zea mays
  unsure (1)..(282): unsure at all n locations
  Clone ID: PAT_MRT4577_27715C.1
gcggtggtttctcctccccctcttaccaagtcctgctaggattanggttccttagggctttgaggaggggcaatggggggagatgatgtggagtaccggtgcttcctcagcagccttgcctgggccaccagcaacgaatcgctggataatgccttcggatgctacggcgagatccttgactccaaggtcatcactgatcggcagacgagcaggtcccgcggcttcggccttcataacttctatttcgagaactccatgctcgacgctattgagaacatgaac

SEQ ID NO: 1876 - DNA, 1781 bp, Zea mays
  Clone ID: PAT_MRT4577_27770C.1
ggcaagcgagcaggaagagggcggggatcccgtcctcccagtctagaagatgggcgagacgagggccaaggagggggtgtcgcttagactagcgaatccatccgccaagattccgtgcacctcgaccgccgccgccgctatctgtttgtccccgcccccgcgaccgcggcagcctagcaggaggggaggatccatgtctagtttctagagcagctgcttgcgtcccttgcaaatcacatcgaccgatggggatacccagcgacgacgtggtgcaaatttcgccacgccgacgccgctggcgagcccaccgtcgtcaccgtcagctgccccgacgtgttctggctgttgccgcgcgggcggcggcccgtggccgtgccgtgggacctcctcaaggaccggttgcttcagctctgccccgtcgcgccgccattcggcttcgggtcccacgacgcgtacctcgcggcggcggctggcctgcaggacgttccgcctcccgcgccacagctcttcctgctcaagctatgctgcttcgaccggatgggactcttgcacgatgtgacacgcgttttgtgtgagctagagctcacgatccggagggtgaaggtctctaccacgcctgatgggagtgtgctggaccttttcttcatcacagatgccagggggcttctgcacacaaagagcaggagagaagaaacccaggacagactcgagagcgtcttaggcgactccttgacatgttgcgaaatagatcctgctggcgaagacatggtgtcttgctgcctccagtcctgggcctgggcttcgctgacgcctgctgttatagcacagatgtttagcacagctgatcgcgtggaggagcaaccgatcggcacaaggggtggtggtggtggtaccatcatctccgtgacgatggacaactcgcttagccctgcccacactcttattcagattcagtgtggcgaccataagggcctcctgtatgatgtcatgaggatagtcaaagactgcaacattcagatttcatatggccgattctacgcgagccaaaacggaaggtgcgagatcgatctgttcgcggtgcagtcggacgggaagaagatccttgatcagcacaggcagagagcactgtgctgtcgcctgaggatggagctccgccgaccactccatgtggcgttggtgaaccgaggtcctgacacggagctgctggtagcgaacccggtcgaggtttctgggaagggtaggccgctggtgttctacgacatcacccttgctctcaagaatcttcagagacgaatcttcttggctgagattgggaggcacgttgtggaaggcagggagtgggaggtctacagattgcacttcggtgaggagcacgagctctcgtctgcgctgcggaagaagattgtggatgcagtcaccaacatgctgatggggtgggactgatggcactgctgctgctgccgtgcctcggtctgaaacattatgcttagtgttcttccagaaactaacctatttggtgcaagcaaagaagaaacaactgatctctatctcttagatgcagcggttttcagctaatgcagagaccatgaaacctttggttatctaaacatgcactaggaaccggggtcctactacttagtgggcaccagacctgatgtatatgcatatactgaagcatgatcaagagtcatgtgtggcatatatataccattttgtctttgtcagaaaaaaaaaaaaaaaaaaaaaaaaaaaaaaaaaaactcgaagagggggcccggtac

SEQ ID NO: 1877 - DNA, 276 bp, Zea mays
  Clone ID: PAT_MRT4577_2779C.1
gatgtatgacgctcccattggctacagcattgttgacgctcgacctgcctgaggcgtgaaggggtttcagtctgctgcttactccaactgcgcgaagaagccatcctgatatctcttttggcttgctcattctaccaatttaggacttcttttctgacactttgattatgaccaatctctctggactgatgcttactgatgatcgaccagttccccagtcttgctccttgcactacttcctactccatctgcaacattgtgttctgatttaccttc

SEQ ID NO: 1878 - DNA, 844 bp, Zea mays
  Clone ID: PAT_MRT4577_28038C.1
aaaaaaaaaaaaaaaaaaaaaaaaaaaaaaaaaaaccccacccattcactcgccttgcgcttcctcgccgccccagttccccaccccctgctcacccacccgtcccctcctgctcgcccatggctcccatcgctgtcggcgacgccctccccgacggccagctcgggtggttcgacgagaacgaccagctgcagcaggtctccgtccacgcgctcgccgccggcaagaaggtcatcctcttcggcgtccccggcgccttcaccccgacctgcagcaaccagcatgtgccaggcttcatcacacaggctgagcagctcaaagccaagggtgtagacgagatcctgcttatcagcgttaacgaccccttcgtcatgaaggcgtgggcgaagacctaccccgagaacaagcacgtgaagttcctcgccgacggatctggagcgtacaccaaggcgctcgacctcgagctcgatctcacggacaaaggtctgggcgtgcgctcgaagaggttcgctctcctggccgacgacctcacggtcaccgtcgcaaacatcgaggaaggcgggcagttcacgatctctggcgctgaggagatcctgaaggcgctttagaagccgcagcaacgatcggtctagtttgaactcgcctttgaataacttgtcgttggacaaggtctagttcggtgttgtgtatggaacggtcgtcactgagtcatgcacgatttggtatccgtgtgtttatgttcgccggtttgaggaactctctgatccgtcgtgacacaaagttgatgctgagagaacgaccgagtattttttttttcctgccaaaaaaaaaaaaaaaagcggcc

SEQ ID NO: 1879 - DNA, 1190 bp, Zea mays
  Clone ID: PAT_MRT4577_28039C.1
caaaaaaaaaaaaaaaaaaaaaaaaaaaaaaaaaaaaaaaaaaaaaaaaaatacctcgccccggccggggaccggccgggaaccattgcccggcccggggcgggccgggaccccacccattcactcgcctgcgctccctcgccgccccagttccccaccccctgctcacccacccgtcccctcctgctcgcccatggctcccatcgctgtcggcgacgccctccccgacggccagctcgggtggttcgacgagaacgaccagctgcagcaggtctccgtccacgcgctcgccgccggcaagaaggtcatcctcttcggcgtccccggcgccttcaccccgacctgcagcaaccagcatgtgccaggcttcatcacacaggctgagcagctcaaagccaagggtgtagacgagatcctgcttatcagcgttaacgaccccttcgtcatgaaggcgtgggcgaagacctaccccgagaacaagcacgtgaagttcctcgccgacggatctggagcgtacaccaaggcgctcgacctcgagctcgatctcacggacaaagggctgggcgtgcgctcgaagaggttcgctctcctggccgacgacctcacggtcaccgtcgcaaacatcgaggaaggcgggcagttcacgatctccggcgctgaggagatcctgaaggcgctttagaagctccgtctcctctagaagccgcagcaacgatcggtctatagtttgaactcgcctttgaataacttgtcgttgggcaaggtctagttcggtgttgtgtatggaacggtcgtcactgagtcatgcacgatttggtatccgtgttgtttatgttcaccggtttgaggaactctctgatccgccgtgacacaaagttgatcctgagagaacgaccgagtatttttttttcctgcaatttgctgcagtcgtgcagagtgcagctttgcgcgctcctttagatgctaaaacatgagcggccatggtgggatgcgtggcaacgacgggttatgtgctcgccggccgtgcagcggtttctggtagcagccgtgctcagatgcatgcgatcagtaataaatttggagaaaaaaaaaaaaaaaaaaggcccctacagcaacgcgtgttccgagaaaaaaaaaaaaaaaaaaaaaaaaaaaaaaaaaaaaaaaaaaaaaaaaaaaaaaagcggccg

SEQ ID NO: 1880 - DNA, 454 bp, Zea mays
  Clone ID: PAT_MRT4577_28064C.1
gaccaactagcaacatatcaaagcacaatagtgtaccaacaatggcagccaaaatgttctgcctgcttatgctgcttggcttttgtgcaagtgctgctacggcgaccattcacccgcaatgctcggaagctacaatacctcgccttctttccccgctcctctcacaatcgcggcttcgggcatgcgaaaacccaagtgttcaaccctacaggatccaacaggcaattacagctggcatctaacctttatcacccttgttcctatcaacaatgatcaggcctattacataagctacctttggtgcattgattggaacaaaacatgaggcaacaacaactacaacaacatgtgctagcaaaccttgctggctactctcatgaacagcaggtgctttccattaaaccaactagctgaattgaactatgcttactattcgaaataacaacaactacca

SEQ ID NO: 1881 - DNA, 1656 bp, Zea mays
  unsure (1)..(1656): unsure at all n locations
  Clone ID: PAT_MRT4577_28160C.1
ggccctctcccctgcccattcggcccgccgtcgcgtccgttcctcccttcctttccgtgtcggtctccggcgcgcccgacgtagcgcccgcatccgacggccgtgggggcatcgacggccgggcgacgcgacgcgatgtgaccatgacccgtcagtcagcagtacaaaatggcgatgatggtggatcctccgaatggaatcgggaaccaaggaaagcattactactctatgtggcagaccttatttgagatagacaccaaatatgtgccgatcaagcccattggtcgaggagcttatgggatagtttgttcatccattaatcgtgaaacaaatgagaaagtagcaataaagaagatacacaacgttttcgacaaccgtgtggatgcactacggaccttgcgggagctgaaactccttcgccatctccggcatgagaatgtcattgctttgaaggatataatgatgccaatacacaggagaagctttaaggatgtgtacttggtatacgaactcatggatactgatttgcaccagataatcaaatcacctcagggcctttccaatgaccactgccagtattttctttttcagttgctccgaggactcaaatatctccattcagcagaaatactccacagagacctaaaacctggaaacctgctggtgaatgcaaattgtgatctgaagatatgtgattttggtctcgcacgtacaaacagtagcaaaggccagttcatgactgaatacgtcgtcacccgctggtacagagctcctgagctgctcctctgctgcgacaactacggcacatccatagacgtctggtctgttgggtgcatctttgctgagctccttggccgcaagccaatatttccaggaactgaatgcctgaatcaactcaagctcatagtgaacgtcctcggcaccatgagtgaggctgacctagagttcatcgacaacccaaaggctcggagatacatcaagtcccttccctatacccctggtgttcctctcgtaagtatgtacccacatgcgcaccctcttgccattgatctgttgcagaagatgctcatcttcgaccccaccaaaaggatcagtgtcaccgaagctctcgagcacccttacatgtcccctctgtatgatccaagcgcaaatcccccagcccaagtgcccatcgatctggatatagacgaaaacatcagctcagagatgatccgggaaatgatgtggcaggagatgcttcactaccaccctgaagttgccacagcaataagcatgtcatgagagattccacagcccccaggacatcagcgggggctcacctcttctttttttgtctttgataaaagcctactgcgagtagccgattattgcggcacctagctgttatagtacacttaatgtctgcttggaaccaattatggcgcctagctgttgtagtacccttaatgtctgcttggacacttccgctgtgtaaatacgcgcccaataagagcggcgtccgccctagatgttgtcactatggaccattacttgttgtatgccctgtatatctgtggactgttgtggtgttgtattagttcatgacccatgaagctttgaagtnnnnnnnnnnnnnnnnnnnnnnnnnnnnnnnnnnnnnnnnnnnnnnnnnnnnnn

SEQ ID NO: 1882 - DNA, 847 bp, Zea mays
  Clone ID: PAT_MRT4577_28161C.1
catcctcctcacggcacgggactcccctcccccacctcctcttcctcccctcccgcccacggctggaggtgctcacagcgagcggagcggaggcgagggattcggccgcgcgcatggcgacgcctctctgaccgaagctgctccacccacttggccagtacaaaatggcgatgatggtggatcctccgaatggaatcgggaaccaaggaaagcattactactctatgtggcagaccttatttgagatagacaccaaatatgtgccgatcaagcccattggtcgaggagcttatgggatagtttgttcatccattaatcgtgaaacaaatgagaaagtagcaataaagaagatacacaacgttttcgacaaccgtgtggatgcactacggaccttgcgggagctgaaactccttcgccatctccggcatgagaatgtcattgctttgaaggatataatgatgccaatacacaggagaagctttaaggatgtgtacttggtatacgaactcatggatactgatttgcaccagataatcaaatcacctcagggcctttccaatgaccactgccagtattttctttttcagttgctccgaggactcaaatatctccattcagcagaaatactccacagagacctaaaacctggaaacctgctggtgaatgcaaattgtgatctgaagatatgcgattttggtctcgcacgtacaaacagtagcaaaggccagttcatgactgaatacgtcgtcacccgctggtacagagctcctgagctgctcctctgctgcgacactacggcacatccatagacgtctggtctggttggtgcatctttgctgagctcctt

SEQ ID NO: 1883 - DNA, 1853 bp, Zea mays
  Clone ID: PAT_MRT4577_28162C.1
gcccacggctggaggtgctcacagcgagcggagcggaggcgagggattcggccgcgcgcatggcgacgcctctctgaccgaagctgctccacccacgcggccgcgcgcgccgcgccctcccggtcctccccacccccatccctcctcacggcacgggactcccctcccccacctcctcttcctcccctcccgcccacggctggaggtgctcacagcgagcggagcggaggcgagggattcggccgcgcgcatggcgacgcctctctgaccgaagctgctccacccacttggccaggcgcgccgtcctctcctctcccctccccttatcctctcgttacaagatggcgatgatggtggatcctccgaatggaatcgggaaccaaggaaaacattactactctatgtggcagaccttatttgagatagacaccaaatatgtgccgatcaagcccattggtcgaggagcttatgggatagtttgttcatccattaatcgtgaaacaaatgagaaagtagcaataaagaagatacacaacgttttcgacaaccgggtggatgcactacggaccttgcgggagctggaactcctttgccatttccggcatgagaatgtcattgctttgaaggatataatgatgccaatacacaggagaagctttaaggatgtgtacttggtatacgaactcatggatactgatttgcaccagataatcaaatcacctcagggcctttccaatgaccactgccagtattttctttttcagttgctccgaggactcaaatatctccattcagcagaaatactccacagagacctaaaacctggaaacctgctggtgaatgcaaattgtgatctgaagatatgtgattttggtctcgcacgtacaaacagtagcaaaggccagttcatgactgaatacgtcgtcacccgctggtacagagctcctgagctgctcctctgctgcgacaactacggcacatccatagacgtctggtctgttgggtgcatctttgctgagctccttggccgcaagccaatatttccaggaactgaatgcctgaatcaactcaagctcatagtgaacgtcctcggcaccatgagtgaggctgacctagagttcatcgacaacccaaaggctcggagatacatcaagtcccttccctatacccctggtgttcctctcgtaagtatgtacccacatgcgcaccctcttgccattgatctgttgcagaagatgctcatcttcgaccccaccaaaaggatcagtgtcaccgaagctctcgagcacccttacatgtcccctctgtatgatccaagcgcaaatcccccagcccaagtgcccatcgatctggacatagacgaaaacatcagctcagagatgatccgggaaatgatgtggcaggagatgcttcactaccaccctgaagttgccacagcaataagcatgtcatgagagattccacagcccccaggacatcagcgggggctcacctcttctttttttgtctttgataaaagcctactgcgagtagccgattattgcggcacctagctgttatagtacacttaatgtctgcttggaaccaattatggcgcctagctgttgtagtacccttaatgtctgcttggacacttccgcttgtgtaaatacgcgcccaataagagcggcgtatggatagatgttgtcactatggaccattacttgttgtatgcactgtatatctgtggactgttgtggtgttgtattagttcatgaaccatgaagctttgaagtaaaaatcccatgcatgttaagtttgtataaaaaaaaaaaaaaaaaaagcgccgactagtgagcgggggtcggtaccgg

SEQ ID NO: 1884 - DNA, 1777 bp, Zea mays
  Clone ID: PAT_MRT4577_2836C.1
cctcgaggcggccggaaaaaaatttccaaaaaaaaaaaaaaaaaaaaaaaaaaatttaaaaaaaaaaaaaaaaaaaaaaattcggccgggtttttggaagcccaagtccagagcgggccgagcccagttcatcctccacctgctccgccggctgctcttcttctcccctctcgctatatccccggggacctcacagccacatctctccactgctccgtccagcgcgtccacctcccaaacccctactcccccaggaagcaatggcttcccccacccagggccaggtcatcacctgcaaagcggcggtggcgtacgagccgaacaagccactcgtgatcgaggacgtgcaggtggcgccgccgcaggccggcgaggtccgcgtcaagatcctattcaccgcgctctgccacaccgaccactacacctggagcggcaaggatcctgagggtcttttcccttgcattcttggccacgaagctgccggaattgtggaaagtgtcggtgaaggagtaactgatgtgcagcctggggatcatgtcattccttgctaccaagcagaatgcaaagaatgcaagttttgcaagagcggaaagaccaacctctgtggtaaggtccggagtgccacaggcgtaggtgtcatgatgaatgatatgaagagcaggttctctgtaaatggaaagcccatttaccatttcatggggacatcaacattcagccagtacactgtggtgcatgatgtcagtgttgcaaagatcaacccacaggcacccttagataaagtctgcctgctcggttgtggtgttcctactggtcttggagcggtgtggaatactgcaaaggttgaatctggctcagttgttgctgtttttggccttggaacagttggacttgcagttgctgagggagcaaaagctgctggtgcttctcgagttattggcattgacatcgacaataaaaagtttgatgttgcaaagaactttggagttacagaatttgttaacccaaaagagcatgacaaaccgatacagcaggtcctggtcgatcttacagatggcggcgtggattacagctttgagtgcattggaaatgtttcggttatgagggctgcactggaatgctgccacaagggctggggaacctccgtcatcgtcggcgtcgccgcctctggccaggagatcgccacacgaccattccagctcgtgactgggcgtgtctggaagggaaccgctttcggtggcttcaagagccggacccaggtcccatggcttgttgacaagtacatgaaaaaggaaattaaggtggacgagtacattacgcacaacatgaacctggctgacatcaacgacgccttccacctgctgcacgaaggtggctgtctgcgttgtgtgctggcaatgcagatttgaaattcctaagctaagcagtttttggatgtgtcggcatagactgtcttttgttttggaactagaattcctttttgcctcgttaggcctggacccactgtataatgctatgttgctttggatggctgacgatggttaccgctgtgttgctagccatgtggtacttgatctgtatcacggttgcaaataagtgctgtttctaaaacactccctctcggtgaataaggggttgtttggtttgaggaatcattccatccaaattgaggtggtgcatcatagatctattcctcctccaaaaaaaaaaaaaaaaaaaaaaaaaccaaaaaaaaaaaaaaaaaaaaaaaaaaaaagtactctgcgttgttaccactgct

SEQ ID NO: 1885 - DNA, 642 bp, Zea mays
  unsure (1)..(642): unsure at all n locations
  Clone ID: PAT_MRT4577_28380C.1
tacctcgaggccggccgggccgggactccccacccattcactcgccttgcgcttcctcgccgccccagttccccaccccctgctcacccaacccgtcccctcctcgctcgcccatggactcccatcgactggtcggngacgcccatccccgacggccagcctccggtggatcgacgagaacgaccacctgcagcaggtctccgtccacgcgctcgccgccggaaagaaggtcatcctcttctgcgtccccggcgccttcaccccgacctgtagcaaccaacatgggccaggcttcgtcacacaggctgagcagctctgagccaaggtggtagacgagatcctgcttatcagcgttaagagacaccttcgtcatgaaggcgtgggcgaatacctaccccgagaacaagcacgtgaagttcctcgccgacggatctgtagcgtacaccaaggcgctcgacctcgagctcaatctcacggacaaagggctgggagcgcgctcgaagaggttcgctctcctggccgacgacctcacggtcatcggcgcaaacatctaggaaggtgcacaggactatatctccgacgctgaagagatcctgaaggcgctttacaggctacgactcctctagatgccgcgcaacgacc

SEQ ID NO: 1886 - DNA, 834 bp, Zea mays
  Clone ID: PAT_MRT4577_2855C.1
cggccgggccgggcctccctatccctcaccatctctaacaaccatccgtgggcggtgcaatctgtttgtatccgtcggtcgctcccgacgaccgagaagagctagcgccgttgctcggcggagatcacgcgccggtcgcagaggcggagtagagaagagaggatggaccacgcggcggaggcgcagcggacggacctgatgacgatcacgcggcacgcgctgaacgagcaggggcggcacccggagtcccggggcgacttcaccatcctcctctcccacatcgtcctcggctgcaagttcgtcgcctccgccgtcaacaaggccggcctcgccaagctcatcggcctcgccggcgagaccaacgtccagggggaggagcagaagaagctggacgtgctctccaacgaggtctttgtcaaggcgctcgtcagcagcggccgcacctgtgtcctcgtgtctgaagagaacgaggcggccatcttcgtcgacgcgcccctccgcgggaagtactgcgtgtgcttcgatccgctggacggctcctccaacatcgactgcggcgtctccatcgggacgatctttgggatctacatgatcaaagacaaggacaacgcgactctggaggacgtgctgcaacccgggactgacatgatcgccgctggctactgcatgtacgggagctcatgcacgcttgtgttgagcaccgggaacggtgttaatggcttcactcttgatccttcccttggggaagtcatacttacccatccccacataaagataccaaacaaagggaagatctattcggtcaatgaagggaacgccagaaactgggacgcg

SEQ ID NO: 1887 - DNA, 166 bp, Zea mays
  Clone ID: PAT_MRT4577_28783C.1
acacaacagcctatagtgagtcgtattaaactccgtagtagctagcgtacgtacgtgtgaccgattcagcgaggtcaccgtttgtgtgtcgatatatacggcgaagtcccagtttgttccgatggatcacgggaaacagcaaggcgccagacgacgagcggccggc

SEQ ID NO: 1888 - DNA, 521 bp, Zea mays
  Clone ID: PAT_MRT4577_28843C.1
atgaatgtgaacgttccttttttacacctatagcttcacaatttggttgcagcaacgctaacttcactattcacaagttgtttttcatttcccaaatctaacattgtttaaaccttgcgcatgtccacgacgcagcgaatgcagtctccggcgtgcatgtcgtggaaagcctcgttgatgccgccgagtggctgtcggtgtgtgatgaattcgtcgaccttgagcttgttgtccatgtaatcttgcacgagttgacccatttggctgcggcccttgacaccaccgaaagcgcatcctttccacacacggccagtgacgagttggaatggtcttgtggaaatctcctgtccggcagcagcgacaccgatgataatgctctcaccccagcccttgtggcaagcctcgagcgctgatctcatgacgtgaacgtttcctgtgcagtcgaatgtgtagtcgcatccaccatcggtcatgtcgatgagtctgctctgaatgttctcgccctccttgagatccttggc

SEQ ID NO: 1889 - DNA, 251 bp, Zea mays
  Clone ID: PAT_MRT4577_28858C.1
gaggaaaaacggggtttccccttaacttgcattggctggctggaaacaccaatcttttttttcgggtggtttataattccaaaaaaccccctccctgggttttgcaacaacgggaaaactgacacaggttggtttttttacaaaaaccccatttcttaattttgcaacagcggaaaaactgtcacaaggttgggtgcccaatttttttgtgttcaacaagggccatgcataggaatcccattattactttt

SEQ ID NO: 1890 - DNA, 334 bp, Zea mays
  unsure (1)..(334): unsure at all n locations
  Clone ID: PAT_MRT4577_28915C.1
cccgttctcgcattttccttctcccgcctagtttatatgcgttagctacccaatcacttcggaccggcggttctacgtgatcccaccggctgacatggatccatacatgcacgcggcgtctaacgagagcaactacagctagtggaccaccaactccggcgcccgcgtctggaacaacaactatgtcctcaccgtcggacagcgacgagcaatcctgcttgaggattatcatctaatcgaaaagctcgctcacgttcacagacaacgtatacctgaacgcgtcgtgcatgcacagngagacagcgccaatggcttctttgagggcactcatgat

SEQ ID NO: 1891 - DNA, 2211 bp, Zea mays
  Clone ID: PAT_MRT4577_29116C.1
cccgaggcaatttgagagattccctttgagaatttgtaaaaaaccacacctctggacataaacgacgtaccggccccctccgttttttttttttttttttttttttttttttttttttagtcccgaatcaatctgagagattccattagagaatataaaaaaaacacaacgctggacatcaacgacaatgactgactgactgaccgaccgaccacgagctttaagagttctaattaaaatgacttgagacagacacacactacatccatcaagttctaattaaaatgggctaagcaaaacgaccacgagcttttaggcctcctcgtccgcgtaggccggctccagtatggccgcctccgcctcctgcacctccttctccgtcttgcgccccttcttggacttgtagtacacgctcatgaacgtgcccaccgccccgtacttttggcggcagtgctcgtagtgcgacgcgtcgaacatgcgccagaagtccttctcgttcagctccgacaccgcgtactgcggctggtagctgtggttctcgatcagccactgctccagcctgtgcacagcctccgcgccgttgaactcctcccccctcagcaccgccccgggggcgtagtacacgcccacgtccgtgaacatctgtgcgtagctcgtgtcgccctgcctgtgctggtgctcgaacccaggctccgggtacaccatcgtcttcaccggcagcttgtacagccggtgagggcacagccacagaggatacacctccatctcgcggtgcacgaactccagcgcatccccaaccttgtacagcggcaccagcatgtcctggatcacatggttgtcgtggtagtagttcctgatagcctcgccctgggtcgccttcagcagggacaccttcggtggcatcagccagcccagcaggaacctgaaccagaactggtcgccgaagggcaggatcagcttcccctcccagtacaggcaccgggtgtgccggtggtagtactccctcgtcgggatgtactccacaaactcgcccctcttcagcgccgtctgagcgtgctggtagaaccagggcttaaaccaccaccccacgcagttgatcttgttgcccttcttcttcgcctcttctttggaagcgtacacgcccgtcatcatgacaccctcgctctctgtgtacaccatcccttcaacaaagtcagggacctttgccgggtcaccgtccctcggcgcgaaagaatccgcgtaggcctgcgcgatctcctttagaccccccttgactggagtgtaggtgagcttcatgtactccttgatggggatcagcttgatctccgcagagacaaggaaccccagtgttccctgggaccagggaatgccatagaaaaggtcagagtactcgttgtccttggtggctctgacgacccggccatctgcgagaacaacctccatcgcgacaaccgtgtcggagaaaaggccatagaggtgagagctcccctcgatgccgtaaccgttgatcagcccaccaacagtgaggtcgtcgagctcggcgacgaccgcaagggcaaggttcattgggcaggtagctctggttatctgacccatgttgacaaggggctcgaccttggcaaccatcctctctttgtcgatctcaaggatgttcctgaaggaagaaaggtcgacctcgaaatgcctcgcacgcttgtagtccacgttgcgcatgccaacagcgatccagggcttcctggccgtgcaaacaagaccgtccttcttcgggttcctctgcttgagccgcttcacgaccttctgcacgttctcgtcgtgctgcttctggcgcttcttctccgacttcatggcggaccacatgtcgcccaggaagatgttgaagtagatcagagttgaaataggaaggaccacgaagatcacgaggatccatcggaacttcaccaagtagtccaccaaaaccttcttcctcttacggcgcaccaaaggttcgtgcacgtccgccatgggtggtggttgctacggctctgatccggccggcgggcgggcgcaagggcctccttctccgcctccctaccaccagcagcagtaggcggagcggaggtgggcgagagatgcagatgctgcctgcggcttccctctttcccggcgcgggagagagggagatgctgtcaaaagcgaacaggcctcacatgcccccgtccggacgaaaagcga

SEQ ID NO: 1892 - DNA, 385 bp, Zea mays
  Clone ID: PAT_MRT4577_29121C.1
tgacgagagggggagagagagagtctaggaaggagggagagagcacgggggcttgatcgaagatggatggcggagcaaaggtggtgaaaaacgcctcggcggcgcgtggaggctggggcggtcccaaaaagaagccgggctctcgctccatgaaggcctgcctccacttccccgtacgccgtatcggacgatacctcaagcacggtcgctactaccagcgtgtccgcacccgcgcccgcgtatacctcgctgccgtacttgaatacctcggcgacgagctcctcgagttggcggcgaacgcaacgcgggacaacaagaagaaccggatcatgccgcgacacatactgatggcgatccgcaccgattactagctcgggaagctact

SEQ ID NO: 1893 - DNA, 1266 bp, Zea mays
  unsure (1)..(1266): unsure at all n locations
  Clone ID: PAT_MRT4577_29151C.1
tgggtncnncctcgaggcctggccggaaaaaaaaaaaaaaaaaaaaaaaaaaaaaaaaaaaaaaaaaaaaatcacccgcgtccgccaccgccgccgcctttcgtaccgcggcccctaaacccctttcctcgttcccctccgtctctcagttaggcacaatgatgctagctaataagcttgggggtctgctcaagaatgctacgagttcaaatatgtctgtgtaccaagcaatcagatgcatgtcatcatccaagctttttgttggagggctttcttatggaaccgatgatcacagtctcagagacgagtttgccaaatatggacaagttattgaagctaagattatccttgatcgtgagtctgggaggtccagaggttttggctttataacttacacgtcttctgaggaggcttcggctgccatcactgccatggatggaaagactctggatggacggaacatacgggttaatcatgctaacgggaggaccgaccaagcaagcagctgcatgtcatccaagctcttcggtggttggtatggtggtggtgggacggtggctatggtggtggtgggggctatggtggtggtgagagaatagagggtaaaatacggtggcggcgactatggtggcaaccgcaacaggggtggtggtggtgattatggagttgctggtggnaggtggaggcacctttactgctggaggtagcgacagctttgccaacagtaactnttggttctgacagtagttttgggggaaacggtgctggtggctttgatgcaaccggcggttccacaggcgatgatgggttctctggcacacctgatgataactttggtggtaacaagaatgaagaaaccatggatgatatcttcaaggacgatgagccggacagctacgccgacaagaggagctagtttgtgccctctccaaagagtgctcatcaatacgattccagaacgatatgtattggctagtgtttgctgttaacatcatagcggcctgtatgttcaaataatggagcgagtatttctgatgagtttgagttgtcgggggctgtggaactttcaaacatggcgatacgttataatgtcgttttgctagatgctatgctttcatcgtggcttggaaatcggggtcttgtcaagtttcagctcacagacggatctgtaaatggtactgaaccctacaaaaaaaaaaaaaaaaaaggcccctagggccgtgacaaaaaagcagtaaaaatgaagtgtgaaagtttaatttcagt

SEQ ID NO: 1894 - DNA, 1272 bp, Zea mays
  unsure (1)..(1272): unsure at all n locations
  Clone ID: PAT_MRT4577_29152C.1
ccggccgggtacctcgcgtccgcccccgccgccgcctttcgtccagcccctaaacattctcattcctctcatagctcggtgcttacggcttgcctggatccctgcgaggtggacctttttggtctgtgtcgctcggcttcgtgtctccgaacttctacgatggtttagcacaatgatgctagctaataagcttggtggtctgctcaagaatgctacgagttcaaagcaaatatgtctgtctaccaagcaatcagatgcatgtcatcatccaagctctttgttggagggatttcttatggaactgatgatcacagtctcagagacgagtttgccaaatatgggcaagtcattgaagctaagattatccttgaccgtgagtctgggaggtctagaggttttggctttgtaacttacacgtcttctgaggaggctgcagctgccattactgccttggatggaaagactctcgatggacggagcatacggattaatcatgctaacgagaagacaggtggcttccgtggcggcggtggctatggtggcggcggctatggtggtggtggaggctatggtggtggtggcggccactatggtggtggtggtggcagcggtggatacggtggcggcgactatggtggcaactacagcaacaggggcggtggtgatgattatgaagttgctggtggaggtggaggcacctttactgctggaggtagcgacagctttgccaacagtaactttggttctgacagtagttttggtggaaacggtgctggtggctttgatgcaaccggcggttccacaggcgatgatgggttctctggcacacctgatgataactttggtggtaacaagaatgaagaagccatggatgatatcttcaaggacgatgagccggacagctacgccgacaagaggagctagtttgtgccttctccaaagagtgctcatcaatacgattccagaacgatatgtattggctagtgtttgctgttaacatcatagcggcctgtatgttcaaataatggagcgagtatttctgatgagtttgagttgtcgggggctgtggaactttcaaacatggcgtgcatccacgttataatgtcgttttgctagatgctatgctttcatcgtggcttggaaatcggggtcttgtcaagcttcagctcagacggatctgtaaatggtactgaaccctacattttatgttttctgtggatgctctgcgtatgtgacnnnnnnnnnnnnnnnnnnnnnngtgagtttatttca

SEQ ID NO: 1895 - DNA, 513 bp, Zea mays
  Clone ID: PAT_MRT4577_29288C.1
cgaatgtcttttggttcttgcggaagcaggtcctgatgggatcgtttttgaaacaattcccaacaaattggaagctcaggcttacgttgaacttcttgacgaatgtaacatcagtatccctgcatggttctcatttaattcaaaagatggagttcacattgtgagtggagactcgttaattgaatgtgctactattgctaatgggtgttcgaaggttggtgcagttggaataaattgcacacctccaagatttatccatggcctgatactcttcattcgaaaggtcacagataagccaattctgatatattccaacagcggagaaagatatgatgctgagaaaaaggagtgggtggaatcaactggcgtgtcagacggtgattttgtttcctacgtaaacgaatggtgcaaagatggggctgtcctcattggcggctgctgcaggacaacttcaaacaccatcaaggccattagtagatcacttaaccaacgccactcttcgttgatttacct

SEQ ID NO: 1896 - DNA, 348 bp, Zea mays
  Clone ID: PAT_MRT4577_29321C.1
aggacgcgtgggactagttttagatcgctgcgcatgtaaaactagggcatcggcgcaagccgttcggcttgcccttcacgaacgcttggtccttcttcttgtatgtccactgcgacctttacagatccgctcctccagctagggttagcggtcctctgaagcgatggcgatcaagccgaccatggcggttgaacaagatcgggtacgacaagaagctgcgcagtctgctcgatgagtacaccaaggtgctcatagccctcgccgacaacgttggatccaagcaggtccataacatccggccgggccttatggacgactcggtggtgctcatggggaagaacacgctca

SEQ ID NO: 1897 - DNA, 331 bp, Zea mays
  Clone ID: PAT_MRT4577_29410C.1
gtcacccctgactgctcgacgacctctgcgtcctatcctaccccacccgtccatcgccccctccctccggtctgcgctcccacagcctcacctctgcgccccggtcgattcgcgtcgccactcgttggaaggaacgatggagcagaccttcatcatgatcaagcccgacggcgttcagctgagcctgatcgcggacatcatcagtctgcttactgaagaaagggttctaccttaaggggatgaagatcatgaacgtggagaggagcttcacgcaacaacagtacgctgacttggccgacaacgcctgtctttcgcgggttggtggagaaca

SEQ ID NO: 1898 - DNA, 380 bp, Zea mays
  Clone ID: PAT_MRT4577_29677C.1
cagctagcagcatacaaagcacactagtgtaccagcactggctgccgggccatattgcctgcatatgctcctcggtctaatctgcaagtgctgctacagcgaccatgttcccgcagtgcatcgcaagctcctatagctgcccttcgtgccccgtacctctcaccagcggagtcgttatctatgtgaaaacccagttgttgaaccctacaggatccatcacgcggtcacagctgtgcatattacctttatcacccttgttgctccgacaatcatcagtcctattacatcagttgcctttggtgcattgattggctcatatcatcaaggcacagcaactacgacatcttgtgctagcaaaccttgctgcctactgtcaagaa

SEQ ID NO: 1899 - DNA, 579 bp, Zea mays
  Clone ID: PAT_MRT4577_29685C.1
gagtgtgaagacgccgtcgctgtcatcgtccatagccaccgcacgagactgagatgcggagctttggcaagacccacaagagcaatggatacttcaagctttccaggagaagttcacgagaaggcgcgctggcaagacagactacaggttcaggataaggctgattaacctggacaaaaacaagtacaatacaccctaatacggatttgctgcgcgatttaccagacaaggacatcacagcacaaatcatctctgctagtatagcacgcgatatggctcttgcttctgcttactcgcatgaggtgccacgatatggtcttgaagttggactgaccaactatgcagctgcctactgtactgggcttctgatggctcgccgcgtgctcgagacccgtgggttagataaggaatatgagcgttatgttgaggacactggagaggatttctctgttgagccaactgatgagaggatgcctttccgtgctctcttgaatgatgatctgattaggactacgactgacaagcgtgactttgtggccctcaagggatgtttggatggaggtctgggtatttgtcaca

SEQ ID NO: 1900 - DNA, 871 bp, Zea mays
  Clone ID: PAT_MRT4577_29912C.1
cggccgctcaggcggcgggcgggagtctctccccgtactcccaacccacgctccaaatagccccttggagcgggggatctgctctgctctcctcctcctcctccttccctcctgaagtcagcctccagccatggcggatctgcagacgccgctggtgcgaccaaagaggaagaaggttctggtggactacctggtgcagttccgatggatcctcgtcatcttcgtggtgcttccggcctcggcgctcatctacttcaacatctacctgggcgacatgtggtccgccatgaagtcggagaagaagcggcagaaggagcacgaggacaacgtgcagaaggtcgtgaagcggctcaagcagcgcaaccccaagaaggacggcctcgtctgcacggccaggaagccgtggatcgccgtcggcatgcgcaacgtcgactacaagcgtgtcaggcacttcgaggtcgacctctctgccttcaggaacatccttgagatcgaccccgagaggatggtcgccaaggtcgagccgctcgtcaacatgggccagatatccagggccacctgccccatgaacctctccctcgccgtggtggcggagctcgacgacctcaccgtcggcggcctcatcaacggctacggcatcgaggggagctctcacatctacgggctcttctccgacacggtggtcgcgctggagatcgtcctggctgacggccgggtcgtccgagccaccaaggacaacgagtactccgacctcttctacggcgtgccctggtcgcagggcactctcgggttccttgtttcagctgagatcaagctcatccccatcagggagtacatgaggctcacctacaccccggtgaagggccccctg

SEQ ID NO: 1901 - DNA, 1802 bp, Zea mays
  Clone ID: PAT_MRT4577_29971C.1
ctcgaggccggccgggagctagcagcgtccctgctgctccgcgccacacctctccgcttcattcctatccgtctcccctgctctatcgtcgtcctcctccgtcgggccggaggagcgtctctttgtcggcgcagcgtgcagagcaccgcagattcagagacacgatgatgtcgcgacagtgtgcaaaccgcatctttcttaccggaggttccagcttcctccatggcctcaaatctagagttgcatccagtaggagtcacggcaccgtcagactcaactggcgctgcgtgagaactaatctctggagggccgagcgccttggtgtcaaggctactccgtctgagcatatcattgcagtactgcaagcgtcagatattttcagtggcatcaggaaatggagcaagttgcaattggtcgccatgacaggggtgatggcatgtgtagttctggtagtcccttcttctgatgcagtcgatgctctcaagacatgcacttgcctgctaaaggaatgcagaatagagctggctaaatgcatagcgaacccatcctgtgcagcaaacgtagcatgcttgaacacgtgcaacaatcgacctgatgaaactgaatgtcagataaaatgcggagacctgtttgagaacagtgtagtcgatgaattcaatgattgtgctgtttcacgcaagaaatgtgttccaaaaaaatccgacgtcggcgagttccccgtccccgatccatcttcgctggttaagagcttcaacatggcagattttaatggcaaatggtacatttcaagtggcttaaacccgacgtttgacacattcgattgtcagcttcacgagtttcatgtcgagggagacaaattgatcgcgaacatcacatggagagtccgcaccccagactctggcttctttaccaggtcaaccgtgcagcgttttgtgcaggacccatcgcagcccggcatactctacaaccatgacaatgagttcctgcactatcaagatgactggtacattatctcatccaaggttgagaacaaggatgacgactacatatttgtgtactatcgtgggcgaaatgacgcatgggatggttatggtggttctgtattgtacacaagaagtaaaactgtacctgaaacaataataccggagctggaaagagctgcaaagagcgtaggtcgggacttctcgacgttcatcatgaccgacaacacctgtggtcctgagcctcctcttgtggagagaatcgagaaaactgtggtggaaggagagaagaccatcgtcagggaggtgaaggagatcgaggaggaggttgaggagctggagaaggaggaggcgtcactgtttcagaagctggcagaaggtctcatggaggtgaaacaggatttcatgaacttcttgcaggggctgagcaaggaggagatggagctgttggatcagctcaacatggaagcgactgaagttgagcaagtcttcagccgtgcactaccgttgaggaagctaaggtagctgcagagcaaaggacttggagaaaacaagccatcaagtactggccgaaacggattctatttgccacagcagtacccacagtagagattgttgaacagatacaacaaacatttttaattttcttttctttttcttttcttttcttttcttttctttgtttacccttttctgtggtcaaaacacatgcctacgttagccctatttgtaaagcatcaagagacaacgtaactttttcttgccaaacagagaaaaaaaacaagtgtacttaagactaaaaaaaaaaaaaaaaaagcggcc

SEQ ID NO: 1902 - DNA, 327 bp, Zea mays
  unsure (1)..(327): unsure at all n locations
  Clone ID: PAT_MRT4577_29996C.1
gttggcttgatcttgccatgcccgacgaactcgaatcggtcaggctgcgcggccccgcgcgctggcggcggcgacggcatcctcgatatcgcgtgggccttcgacggaatgatcttcatcctcgactactgcaccgccggcatctcaggtgtgcacatcaacccgtccgtgaccttcggcctgttcctggccaggaaggtgtccctcgtccgcgcgctgctctacatcgtggcgcagtgcctgggcgccatctgcggcgtgtgcctcgtcaagggcttgcagagcgcctactacgtgcgctacggctgcnggcgcaacgagctcagc

SEQ ID NO: 1903 - DNA, 745 bp, Zea mays
  Clone ID: PAT_MRT4577_30206C.1
tgccccaacccatgtattaccagggtgtatttgcttcaacggcgtatacacaaatgcatacagaacaagattagaagctgcaagcccagctgccaagccattagccttccaggccaacaaagctgttcctgcaactccaacacttgtagcccacatcgcagcatgtgcaggactaatgcgaccagatggcagggggcgtcgcattgtccttttcattttagcatcattttttatctcaaacacctggttgagggtatttgcagatgctgcaaccatcattgtaccggcacatgtgcaacaaaggccggcaatgtccacgatgttgccactaccaagcacatagccagcccccgaagttgccacaacaagagcactgaggcgggctttcgagagctcccagtagcacttcccgtagtgccgcagcgagtcggagatggatccggtatgctgagaaacggataccgctgccgctgcttcttccacgatggtgttcgccgcggcggtagacggggtggaagaggaggaggtacgcgccgaagcgattggagcgagcgacgtggccgggtggtggatggggtcgaggaggaggcgcgagcggagagccctcgcggcggaggcggctgtagagccgcccctccacatggcggctgcaggtgcgggcggcggcagcgacgaaacccggtggtggccggtgggaatggaaacacggcgtgtgacgcccggccggtcccgacctaccccgagg

SEQ ID NO: 1904 - DNA, 2402 bp, Zea mays
  Clone ID: PAT_MRT4577_30207C.1
ccagcaggctacatatttacgatagtcaagttcactgttacaaaatataatatacatcaaagtcgttataggttactggttacataaatgtatgagcaccacagtttgcagccttgtagcatgaatatagaaggaccaaaataacatgcgatgcgatccgcaaacgcaaaatacacaagagcgggttgtggttgtgcagtcactgactacggttagacctagggggtaacagcacgcactggcaaagcatcctttcttccatcatttatatttcaggacatcgaattttacttgaaaagcgtaatgtttcgggacatcagcacatccgtgtcgattgaatcatcagaatgaacatcaacagcactttttacatttgtaggtgagccgcaaaaggctcaatccacacacacacaaaaagtattctataattttaacaacagatgcaccataccaaggactcttcttgatggcagaaaactcatgtaagccaaaaatgcatgaatacattgctccaactaccccacggctgcaggaagaaccagaggaggttttcaacttttcatgactcgtatatgggtaccggtaggaaagggaatggagccacagaagcataggaaactggagggcgtgattgcacacgagcgtgtcttggcgtttctgtcttgctctttcttcgtcctgcagatcagccccacagaactccgtccagctcatttttctcagccaggtcgtgcgccttgtgttcacttggtaggatgcagagagtccggacatgaaggcagggagatacagcaggctaccatagtcctcgcggtcttcgggcttggttccaggacgtcagaacaaatgaatagagctcgcgatggtaaggcctaatgttaggattgaagcttcaaaactgaaccactcggatgtgagcccccagttgtacgcaaataaccccaaaggtagcatgtacagacaatttcttagcgacacccatgcagttcttctaccggtagggtcagcaaaagaaaacattcgataccctccagcaaggtaatcatttcgacataagtacgcgagagccataaaatgaggtatttgccaaaagtacaatgcggcagggagtatcatcgcgtttagtgacagttcagttgaagctgctgcccaccccagaagtggtgggatggcaccaacgactgccccaacccatgtattaacagggtgtatttgcttcaacggcgtatacacaaatgcgtacagaacaagattagaagctgcaagcccagctgccaagccattagccttccaggccaacaaagctgttcctgcaactccaacacttgtagcccacattgcagcatgtgcaggactgatgcgaccagatggcaggggacgtcgcattgtccttttcattttagcatcattttttatctcaaacacctggttgagggtatttgcagatgctgcaaccatcattgtaccagcacatgtgcaacaaagtccagcaatatccacgatgttgccactaccaagcacataaccagcccccgaagttgccacaacaagagcactgaggcggactttcgagagctcccggtagcacttcccatagtgccgtagcgcgtcggagatggatccggtatgctgcgaaacggatacagccgccaccgccgccgcttcttccacgatggtgttcgccgcggcagtggacgaggtggaagaggaagaggtacgcgccgaagaaataggagcgagcgacgtgaccgggtggtggatggggtcgaggaggaggcgcgagcggagggccctagcgacgaaggcggtggtggcgccgcccctccacatggcggctgcaggtgcgggctgcggcgacgacgaggcacggtgggtggccgactggcccggtgggaatgggctcccggccggcccgcccagcgagcttacgtacgcgtgcatgcgacaaatacctccagttgctcgtgtagccgcttctgaacttccagttgcatctttagtgcctcattgatttgcaatcctctaaacacatttcagaatatggtacataatccatgttcgagagggaatcactcaaactttcttgtcgtccttaaaacctttagcatgagagtctggtatatactttgcaaggcgatacttctacacaagcaccaaagaaatgaaaatattggctgcaatcaagcatcttgtaatgaaaatgtaatcttgtaaagtgtgtacctgttgacactgcatagaatttcaaccaaatgtgcatacatatagataaagatgcaatactccgattgtcagaagttacttgttctgtcagttttagcaacccatctgctagtgaattctgaatagattccaatgaggtttgaaactcaccagcattatttccaaaacgaacgcgtggg

SEQ ID NO: 1905 - DNA, 599 bp, Zea mays
  unsure (1)..(599): unsure at all n locations
  Clone ID: PAT_MRT4577_30429C.1
cttgttgccaaaraattccctyccctagccgccgccgccgcycgtctcccttadargtgccgggacccaagaactggccgagttctaggtagaraatcggttttgcttgtctcarcacggggtytkytgcntctwgtggtggtgaaggggagaaawtcgttaaawctgttccsgatcargcgtkckadctccggaatyargggtktcacacatagcttcgtcgatttgaatttkatgtactaatggagtytaaaggtggcaaaaagtctagcagtagtcgttccatgawgtatgaagctccccttggctacagcatttaggacgtkcgacctgccggaggtttaagaagttccagtcttctgcytactccaacttcyccaagaagccatcctgatatcccttttggcttcctcattctagtagtttaggatttcttttcttacactttgattcttaccaatctctcttgccttctgcytcctgaaaaacgaccagttccccartcttkctccttgcacycctccctcctccatctccagcattnttttcttattyaccttctccaattgctgttctttcttctgctgaagcktccccgg

SEQ ID NO: 1906 - DNA, 833 bp, Zea mays
  Clone ID: PAT_MRT4577_30483C.1
cattgggtacctcgaggccggccgggggacgggagaaaatctccaaacgcagcagagcccctcgcgccgccggcctcttcagcctcgcagcacaccgccgccagcccgagtgaccgctgcagcctaggtttccggcgccgatggcgggtaagggagggaagggtctgctggcggccaagacgacggcggccaagagcaccgacaaggacaaggacaggaagaaggcccccgtgtcgcgctcttcccgcgccggcctccagttcccggtgggtcgtatccaccgccagctcaagtcgcgtgcctctgcgcacggccgcgtcggcgccaccgccgccgtctattccgccgccatcctcgagtacctcaccgccgaggtcctcgagctggccggcaacgccagcaaggacctcaaggtcaagcgcatcaccccgcgccacctgcagctcgccatccgcggggacgaggagctcgacaccctcatcaagggcaccatcgccgggggcggcgtcatcccgcacatccacaagtcgctcatcaacaagaccgccaaggagtgaatcaaggccgtgctgctgcttctgcctgactacagtcccatctcgttctgtacttgtgcaatctgagtttaagtgcatgttggcacagttctagtaaactcatcctgttcacctatgcttctatcttgttaatttaagctctattccgcgagctttttggattaaaaaaaaagagattaacgggttcgtaaaattagtacgtcgaaccttgcaattggccccgattgtttggttcaaaaaataaaaaaaaaaaaaaaagcggcctcgagctccagc

SEQ ID NO: 1907 - DNA, 289 bp, Zea mays
  Clone ID: PAT_MRT4577_3049C.1
ccttctccttctccccgctagactagaggcgtttgctccccaatcccttcgggccgaccgctcgacgtgatcccaccggcagccatggatccatacaagcaccgtccgtctagtgggagcaactacagcttctggaccaccaagtgcggcgcccccgtctggaacaacaactatgccctcaccgtctgacacttgaggaccaatcctgcttgaggattatcatatactccaaaagctggctcagttcgacagagaacgtatccctgaacgtgttgtgcatgcacggcga

SEQ ID NO: 1908 - DNA, 1766 bp, Zea mays
  Clone ID: PAT_MRT4577_30592C.1
cattgggtacctcgaggccggccgggctccgtccgcccacgccgccctgccgcgcgctaccgtgaccaccgcaccaccaccacaagcgctggacgcgagcggcccagcctgccgcagcgcggatagagggataggcctcgacgccgattccgttggagctccgcgacccttggctcccagcctcactttctcgctcgccgcgctaccctaccccgcagagacacgtcccgtcccgtcccgtcccaccctgtgccagccagctcccgaccggcgcccgacccgcgggatcttgtctaatataccgtgcgcgcgggagcagcagctggttcgtcgtgcccgcgcgctctctgcactccgtgtccgtgatcaccaccacaccgctatcctgctagctaggtagctgaattcggagccaggctcgagcgagggggggcggaggcgagatggaccacgcggcggacgcgcaccggacggacctgatgaccatcacgcggcacgtgctgaacgagcagagccggaaccccgagtcccgcggcgacttcaccatcctgctctcccacatcgtcctcggctgcaagttcgtcgcctccgccgtcaacaaggccgggctcgcccagctcatcgggctcgccggcgagaccaacgtgcagggagaggagcagaagaagctggacgtcctgtccaacgaggtgttcgtcaaggccctcgtcagcagcggtcgcacctgcgtccttgtgtccgaggaggacgaggaagcaacgttcgtggaccctaagctgcgtggaaggtactgcgtctgctttgatcccctcgacggctcctccaacatcgactgtggcgtctccatcggaacgatctttgggatttacatcatcaaggacaaggacaacgtcactctggaggacgtgctgcaacctggcaagaacatgctcgccgccggatactgcatgtacggcagttcctgcacgctcgttctgagcactggaactggtgtcaatggcttcacgctcgacccttcacttggggagttcatactaacccatccagacatcaagatacctaagaaggggaagatctattcagtcaacgaagggaacgccaagaactgggacgcgcctgttgccaagtttgtggagaagtgcaagtaccccaaagatggctcgccaccaagatctttgagatacattggaagtatggttgctgacgtgcaccgtaccttgctatacggcggtgtgtttttgtaccctgctgacgagaagaacccaaacggaaagctccgtatcctgtacgaagttttccccatgtcgttcctaatggagcaggcaggaggccagtccttcacaggcaaagaacgggctcttgatctggtcccaaccaagatccacgacaggtccccgatattcctcggaagctacgacgacgtggaggagatcaaagcgttgtacgccgagcaggcgaagtcgagctcggcttcatcctaagtgagggtgtaaatcgacttttcctggcttaatttgttgctgttacctgatccagacattccgttttcgtttcccttggtgtcgtcgtaagtgtgacattcagtgcaatatgtatagcaactaagggactccgtaaaagttacgtacgtacatacatacatgcatctctagcgcataaaaaaaaaaaaaaaaaagcggccaaaaaaaaaaaaaaaaaaaagcggccccactgcgattatatattgtccgtttgagttccgagagtgttctgctttctgactcggg

SEQ ID NO: 1909 - DNA, 182 bp, Zea mays
  Clone ID: PAT_MRT4577_30632C.1
cctatagtgagtcgtattaaaacgcagcacatccaagtgtcagcgatagacctcagccctcatgcattgccgatcgccgacgtaccatcgcgccaacgagagagagggatggagatgatgacgaggatcctcagcggtgcgcgccgcgctgtcggcatgtcgggaaccgcggtgggggcgtc

SEQ ID NO: 1910 - DNA, 940 bp, Zea mays
  Clone ID: PAT_MRT4577_30763C.1
aggagccctatatcacggtccttgcccaccgccccccctcatcacccgcgtccgccaccgccgccgcctttcgtaccgcggcccctaaacccctttcctcgttcccctccgtctctcagttaggcacaatgatgctagctaataagcttggtggtctgctcaagaatgctacgagttcaaatatgtctgtgtaccaagcaatcagatgcatgtcatcatccaagctttttgttggagggctttcttatggaaccgatgatcacagtctcagagacgagtttgccaaatatggacaagttattgaagctaagattatccttgatcgtgagtctgggaggtccagaggttttggctttataacttacacgtcttctgaggaggcttcggctgccatcactgccatggatggaaagactctggatggacggaacatacgggttaatcatgctaacgagaggacaggtggcttccgcagcagcggtggttatggtggtggcagctatggtggtggcggctatggtggtggtagcggtggctatggcggcggtggcagtggtgactatggtggcggcagcggtggatatggtggcaactacggcaacagggctggtggtggctatggtggtggtggtgattaatggaggtgcaggtggggtatataccagtttgtaattagcttcaaaataatgttcccctcgcctttatttgctgttcaagtccctgtaataaccgagaacgttaattgtagcagtgtgttttttatatgattaaataagtactatgttgtataaggctagtgcaactgtgcaggttactctatattcttactctatatcactatttatggtctactcatcaataaatagattggttgataatataaaaaaaccacctcccctcccagggcggccgccgacttagcgctgtcgacccaggaatt

SEQ ID NO: 1911 - DNA, 1046 bp, Zea mays
  unsure (1)..(1046): unsure at all n locations
  Clone ID: PAT_MRT4577_30764C.1
cctcgaggccggccgggctctaatactttctagtgtcaagttcaacatgatacatggttgtgggtttttatttgtgcatctagtgcatatttctacgtgtgaattgagatgatcttatgtgatgtgatgatgactagattaactttcttggatattagatgatatttaagttaaactttgttgtaaaaaaaaaaaaaaaaaaaactcatcacccgcgtccgccaccgccgccgcctttcgtaccgcggcccctaaacccctttcctcgttcccctccgtctctcagttaggcacaatgatgctagctaataagcttggtggtttgctcaagaatgctacgagttcaaagagttcaaatatgtctgtctaccaagcaatcagatgcatgtcatcatccaagctttttgttggagggctttcttatggaaccgatgatcacagtctcagagacgagtttgccaaatatggacaagttattgaagctaagattatccttgatcgtgagtctgggaggtccagaggttttggctttataacttacacgtcttctgaggaggcttcggctgccatcactgccatggatggaaagactctggatggacggaacatacgggttaatcatgctaacgagaggacaggtggcttccgcagcagcggtggttatggtggtggcggctatggtggtggtggtggcggctatggtggcggtggctatggcggcggctatggtggtggtagcggtggctatggcggcggcggcagcggtgactatggtggcggcagcggtggatatggtggcaactacggcaacagggctggtggtggctatggtggtggtggtgattatggagttgcaggtggggnnnnnnnnnnnnnnnnnnnnnnnnnnnnnnnnnnnnnnnnnnnnnnnnnnnnnnnnnnnnnnnnnnnnnnnnnnnnnnnnnnnnnnnnnnnnnnnnnnnnnnnnnnnnnnnnnnnnnnnnnnnnnnnnnnnnnnnnnnnnnnnnnnnnnnnnnnnnnnnnnnnnnnnnnnnnnnnnnnnnnnn

SEQ ID NO: 1912 - DNA, 931 bp, Zea mays
  Clone ID: PAT_MRT4577_30766C.1
cattgggtacctcgaggccggccgggaggagccctatacaccatccttgcccaccgcctcccctcatcaccagcgtccgccaccgccgccgcctttcgtaccgcggcccctaaacccctttcctcgttcccctccgtctctcagttaggcacaatgatgctagctaataagcttggtggtctgctcaagaatgctacgagttcaaatatgtctgtctaccaagcaatcagatgcatgtcatcatccaagctttttgttggagggctttcttatggaaccgatgatcacagtctcagagacgagtttgccaaatatggacaagttattgaagctaagattatccttgatcgtgagtctgggaggtccagaggttttggctttataacttacacgtcttctgaggaggcttcggctgccatcactgccatggatggaaagactctggatggacggaacatacgggttaatcatgctaacgagaggacaggtggcttccgcagcagcggtggttatggtggtggcggctatggtggtggtggtggtggctatggtggcggtggctatggtggcggctatggtggtggtagcggtggctatggcggcggcggcagtggtgactatggtggcggcagcggtggatatggtggcaactacggctacagggctggtggtggctatggtggtggtgaggacgtaagtagcttcagaataatgttcccctgccctttatttgctgttcaagtccctgtaataacccagaacgttaattgtagcagtgtgtttttcacatgattcaataagtactatgttgtataaggctagtgcagctgtgcaggtgactcgatattcttcctctatatcccaatttgtagtcgcctcatcaattaataaatagcattgcttgataataaaacgttagaaaaaaaagaaa

SEQ ID NO: 1913 - DNA, 285 bp, Zea mays
  Clone ID: PAT_MRT4577_30805C.1
cattggtcaaagatttcaacatcatcgccatcaagggactgggaaaatttgccagacctgcagggcaacagtttttttttacttggagctacagggattaagagtaaggctaacagtaacccctttagggggagggggcccaggggaaaattccaacaatgagacaaaaaaacagcagtgcaattaggcggttagcgcacaatacacatgaactggggatttggcaggagttttttgagatgtccacgggcgggcgtatatttctgctgggattgggggggccct

SEQ ID NO: 1914 - DNA, 607 bp, Zea mays
  Clone ID: PAT_MRT4577_30807C.1
caccccatccattcactcgccttgcgcttcctcgccgccccagttccccacccactgatcacccacccgacccctcctgctcacccatgactcccatcgctgacggcgacgccctccccgacgaccagctcgggtggttcgacgagaaccaccatctggagcatgtctccgtccacgcgcgtcgctcccggcaagaaggccatcctcttcggcgtccccgggagccttcaccccgacctgaagcaaccagaatgtgcgaggcttcatcacacaggctgaccagctatgaggcaatgctgtatacgagatcctgcttatcagggcataacgaccccttcaccatgaaagcgtgggcgaagcaccataccccgagaactagcacgtgaagatcactcccgacgggtctggagcgtacaccaaggcgctcgacctcgaggtcgatctcacggacaaacgtctgaccgtgccctcgaagaggatgggtctcctgggcgatgtctcacggtcacggcggcaaacatcgaggaaggcgggtagttcacgatctccggcgctgtggagatactgaaggagctttagaagctcggtctctgctagaaggcgtagc

SEQ ID NO: 1915 - DNA, 120 bp, Zea mays
  Clone ID: PAT_MRT4577_30836C.1
ggcagatgaaggatattacgtacacaagcgccgactagaactagacccaagtcggttacttcgtatatcactcaatagcggctagagcgtatatgcatggttgttgtagactgctcgtaa

SEQ ID NO: 1916 - DNA, 270 bp, Zea mays
  unsure (1)..(270): unsure at all n locations
  Clone ID: PAT_MRT4577_3100C.1
cggacntggggantggncnanaananacggcaaacgcgaccacagacagagcgcgttcaaaggctttttttnntgagantacacnggagganactgtgagatggcggtcacgatcacctgggtgaaggcgaggcagatcttcgacagccgcggcaaccccaccgtcgaggtggacgtgggcctcagcgacggcagctacgcnaggggggccgtacccagcggcgcatccactggaatatatgaggccttggagttgagggatggaggatc

SEQ ID NO: 1917 - DNA, 316 bp, Zea mays
  Clone ID: PAT_MRT4577_3101C.1
ggttggggtttttttttgtgggggaaaaatgcaggggtaaaacttgttttttcttttcttgaaaaccttggctggcatttaactaattcaaaatttggaaaacaaaaaagagggggggggttgctaccggctcaaaccttgtttgacaaacagcaccttgaattcctccagagctgtttcagtcccccctaaacgctggggaaacccgacatgggcatttgcttcttaaaaatgaacccacacattttggggggggcaattttttttttttacaagcaattttgtcgcaccttttttttttcatcatcatggggaa

SEQ ID NO: 1918 - DNA, 414 bp, Zea mays
  Clone ID: PAT_MRT4577_31081C.1
agaaatgtactttcttatttctgggaagccacaaacatcagacaaaaaactttattattgaactataactcataagaaatctaaaagagggccccacccatgatgggttgttggtaaaacactgctaggtttgtcaaaacaaggtggttgaatggcagcaattgttgcagttgtaagaaggtgcccacgttaggccccgcgtgctggtaaaaccgcaaccactggggttgggtcaagaaggtaacagggcttacaccaacttacttgcttaatggtagtagttggtggtggttgaaataaaccggaaaattcaatgcttgccattgggtgaatggaaaaaattggtggggggtagccaccaggtagctgcttaatgggaattggtggtggtgccaattaaaaaccaaattcaat

SEQ ID NO: 1919 - DNA, 1401 bp, Zea mays
  Clone ID: PAT_MRT4577_31087C.1
cacgcccgcgcccactcacgcccggccctgccccgcgccctcatcgtctcctcccggcctcccctcaaagcccaccgccgctgcccccacgccacccaccccacccccccgcccctaccgcgcggtgcccgagacccagaggccagacccctttcttcacctccttcccatcgcaatcgcaagcccccggctccggcgctcggcggtcggccaggttcgggagatcacttcgtcgcggcgaggagggagggggtcgccgttagcgcgcggcacttggatgagaagggcagcggtggaggaggatgcggaaggcgtacagggactccatcaaggtgctcgaagctgacatccagcacgccaacaccctggcctccgagtttccccgggactatgatggtgcgtgcctgcagatgcggctgtcgtacagtcccgcagctcatatattcctcttcctggtgcagtggacggactgcagcctcgcaggggctcttggtctgctgagaatcctcatatacaaggtttatgtggatggcacaacaaccatgtcgactcatgagaggaaagccagcatcaaagaattctatgctgtgatatttccttctttgctgcaactgcaaagggggatcactgatgtcgaggacaagaagcagaaggccgtatgcatggagaagtacagaaagaaagatgaggatggacgggacaccttatctgatattgatgttgagagggaagaggagtgtgggatttgcatggagatgaacagcaaagttgtgttgcccaactgcacccatgctatgtgtatcagatgttaccaggactggagttcaagatcgcagtcctgcccattctgccgtgacaacctgaagaagacctgtcctagtgacctgtggatctatgttgaggaccaagatgtggttgacatggagacggtgtcgagcgagaacctcagacggctgttcatgtacataagcaagctgcctctgattgtcccagacgtcatcttcagcgtgtatgattcccacatcaaatgacttccgacgcgaccttcccgacgaccttcagccagtgcccagctccagttaatcttatgcccccatgtcctccattttcatgctttgctcaagcttttggaagtgcctgaactgatttggaaccgcaagccttccggtggtgctttagaaacttgtttagtgcctgcatgcatccttaatcatatgcagccactctgtacatatctgacttggctcagttaataggggactgtgcttgccccaaatggaggcagggccgtttgtgtctttctcatgtttccattagcgaagcaacgcaaagttctggggggcaaaaaaaaaaaaaaaaaaacacaaaaacattggaaggtttcaaaaaaaaacccaaccc

SEQ ID NO: 1920 - DNA, 191 bp, Zea mays
  Clone ID: PAT_MRT4577_31117C.1
tgaaggtctgcagcagctggttgtcgtacttgcagtactgggggtctggggctactgcttattccgatacacctgcgggaagaacttctacacgaacgggttcatggacgtcacgcctccttacatacccattttatatacgcagatgacaccggctttgccaccaacccccactcttatcctactcagca

SEQ ID NO: 1921 - DNA, 321 bp, Zea mays
  Clone ID: PAT_MRT4577_31126C.1
ctggcttctactcccctttttactcaagtactcctcgggttagggctccttagggttatgtggaggggcgatggccgcagctgatgtcgagtaccgttgcttattcagcggccttgcctggggcaccagcaacgagtacctggtgaatgccttggactcctacggcgagatcctcaacttcaaggccattatcaaccggaacacagagaggtatggcggctatagctatattaccttctcctgcaagaactccatgctcgacgctatcgagaacatgaacagcatggagctcgactgccgctacattaccgataaccaggc

SEQ ID NO: 1922 - DNA, 406 bp, Zea mays
  Clone ID: PAT_MRT4577_31337C.1
aaaaatgttctttcttatttttggggagccacaaacatcagataaaaaactttatttttgaactttaactcataaaaaatttaaaagagggcaccaccaatgatgggttgttggtagaacactgctgggtttgtcaaaacaagttggttgaatggcaacaattgttgcagttgtaaaagggtgccaacgttaggcgcaaccggctggtagaacggcaacaactggggttgtgtcaaaaaggtaacagggctcacaccaactagctggctgaatgggagtagttgttgcttctgttaataaaccggaaagttcaaagcctctagttggttgaatggaaaaaattccttggggttggcagcaagtccctggctgaatgggaattttgttgtttccaataaaaaacaga

SEQ ID NO: 1923 - DNA, 1329 bp, Zea mays
  Clone ID: PAT_MRT4577_31410C.1
attcgcttctccgtcaacttcacttcctcgtcgacgcctccgtcccaccaaccatgccggcggccatggcggctgcggcggcgcagaggctcctcgcggcgagcacgaaaatcatcggcgttgggcgcaactacatagcccacgccaaggagctcggcaatccggtccccaaggagcccgtcctgttcctgaagccgacctcgtcgtttctccacgctggtgtggccaccgccgccgtcgagatcccggagccgctcgagtcgctacaccacgaggtcgagctcgccgtcgtcatctcccggcgcgggcgcgacgttcccgaggcgtccgccatggactttgttggaggttatgcacttgctttggacatgacagcaagggaccttcagtctgttgctaagtctgcaggccttccatggactttggctaaaggacaagacaccttcaccccaattagtgcagtagttccaaaatcagctgtcactaatcccgatgatctcgagctctggctgaaggtagatgatgaactaaggcagaaaggaccgacaagcgacatgctattcaagattccttttctgataagctatatcagttccatcatgacattaatggagggtgatgtgatactaacaggtactcctgagggtgtgggtcctgtccgagtaggtcagaagattacagctggtataactgacctaattgatgttgagttcgatgttcagaggcgcaatcggtcattttccacatgatgcaataagcaagaaagtaatggtgaatacaaagtgcagtactcgtcctcgaccttgaatcgcattactggacctggagccattgcagatagctcttgagccttaccttgatttaatttacctgggttttgagagactatctatgaatatgctaactcgttcgtaaacagcgacttgaaacagcttccgagtggggtgcacggccgatctatgtaacgtacgcgcataagaaatggtgtcctacaaaatgccttccacttgcttgaaacgatatgtagatggacagcgacgacgaacaccttaactccctctcgctagatatcgagccagcttagttcggttcgactgagcttgagctgactcgttaaggtaaagagatgacttggttcgttaaacaattgagtcagagaattagcttggctcgtttgcaagtttgggctggctcgtttacctcgcgagtaaaaaaatacatgtatatataaaatagtatagtcaattgctagttaattttatacaaatttaacattagaaaagagtaattatactcataatttcatatatattacatcttttaaaccct

SEQ ID NO: 1924 - DNA, 1075 bp, Zea mays
  Clone ID: PAT_MRT4577_31412C.1
cattgggtacctcgaggccggccgggccggaggcgaaaagaaccaactttcttctccgtcacctgactcacacctccactcacctccggtccaccaacctctgccggccatggcggctgcggcggcgcagaagctcctcgaggcgagcacgaagatcatcggcgtcgggcgcaactacatcgcccacgccgaggagctcggcaacccgatccccaaggagcccgtactattcctgaagccgacctcgtcgttcctccacgctggcgtggccaccgccgccgtcgagatcccggagccgctcgaatcgctacaccacgaagtcgagctcgccgtcgtcatctcccggcgtgggcgtgacattcctgaagcgtccgccatggacttcgtcggaggctatgcacttgctttggacatgacagcaaggggccttcaatctgttgctaagtctgcaggccttccatggactttggctaaagggcaagacaccttcactccaattagtgcagtagttccaaaatcatctgtcactaatcccgacgatctcgagctatggctaaaggtagatgatgaactaaggcagaaaggatcgacaagtgacatgatattcaagatcccttttctgatcagctatatcagctccatcatgacattaatggagggtgatgtgatactaacaggtactcctgagggtgtgggtcctgtgcgagtaggtcagaagatcaaagctggtataactgacctaattgatgtcgagttcgatgttcagaggcgcaaccggtcattttccacatgattcaataagcaagaaagtaacggtcaaccgcttgaagattgctgctcgtgtcacgcgttcctcttgggtattcattcttccttgcgttgcagcgagattgcttcggcccatgagatgcgagtttagcctgtgcccactcatggcttaagcaaaatacctactggccaatgttgtatacttgtactggtgatatattactatgtaaaatagaaacaaaagttttgtttttcaggtttttataaaccgaaattttaagataatttaaggcacttgttagccgtc

SEQ ID NO: 1925 - DNA, 1471 bp, Zea mays
  Clone ID: PAT_MRT4577_31418C.1
attgggtacctcgcggccggccgggcggctcaatcacctcattttcttaaaaaaaatctcaatcgcaacaacacaaaaaaggcccgcaatatcgattagcgagagtcgttcctccaccaaaccaattcgcttctccgtcaacttcacttcctcgtcgacgcctccggcccaccaaccatgccggcggccatggcggctgcggcggcgcagaggctcctcgcggcgagcacgaaaatcatcggcgttgggcgcaactacatagcccacgccaaggagctcggcaatccggtccccaaggagcccgtcctgttcctgaagccgacctcgtcgtttctccacgctggtgtggccaccgccgccgtcgagatcccggagccgctcgagtcgctacaccacgaggtcgagctcgccgtcgtcatctcccggcgcgggcgcgacgttcccgaggcgtccgccatggactttgttggaggttatgcacttgctttggacatgacagcaagggaccttcagtctgttgctaagtctgcaggccttccatggactttggctaaaggacaagacaccttcaccccaattagtgcagtagttccaaaatcagctgtcactaatcccgatgatctcgagctctggctgaaggtagatgatgaactaaggcagaaaggaccgacaagcgacatgctattcaagattccttttctgataagctatatcagttccatcatgacattaatggagggtgatgtgatactaacaggtactcctgagggtgtgggtcctgtccgagtaggtcagaagattacagctggtataactgacctaattgatgttgagttcgatgttcagaggcgcaatcggtcattttccacatgatgcaataagcaagaaagtaatggtgaatacaaagtgcagtactcgtcctcgaccttgaatcgcattactggacctggagccattgcagatagctcttgagccttaccttgatttaatttacctgggttttgagagactatctatgaatatgctaactcgttcgtaaagtatctttttgtcccaattttgattgatggagctttaagcttgcttttctgtatgcaataaaaaaacttatcacatttttctttcaaaaaaaaaaaaaaaaaaagcggccccgcttgaagattgctgctcgtgtcacgcgttcctcttgggtattcattcttccttgcgttgcagcgagattgcttcggcccatgagatgcgagtttagcctgtgcccccgcatggcttaagcaaaatacctgctggccaatgttgtatacttgtactggtgatatattactgtgtaaaatagaaaaaaagttttgtttttcaggtttttataaaccgtatcaaataattccaggccacttgttagccgtctccctttacagccatctgtcttgtcaccttttgtgagaaggttccttgtcaataaacaaataattcccct

SEQ ID NO: 1926 - DNA, 603 bp, Zea mays
  unsure (1)..(603): unsure at all n locations
  Clone ID: PAT_MRT4577_31447C.1
cagccagtgncaaaagaagtgacgaattccccgcagccagtaaaagaaagctgcaggnaagggggtcaaactaaaccaagggnaaatgttataactccgcgagtgaagccagagatcaacacacactcagcacccattctggcaggcaacttaccggatccgtccgagagatcttggcaaacgaagccatcttcagccaaactttcgtacaagcttccaatgccagttgatgacaaggatcccagatctgcaggtgctcagagaccacatcattcacagcagctggagagtaagcctcgtgtctcagcgaatccgtggcattcgtctccactgacgaaagacttcaggccgggtggccacgtgaaaacgccaccaagtgcggagggggcctcggcgttctcccagccggtctctgatttcaagaagatgaagaggcagttctattctggtccaatggcaagcggaccagggttaagcatgccatcttcgctgaacgatcgcagatcatccgcggcacaagcacagcatcttgtgatgccaggaaatttgcaaggcctcttctggcagccgtcatctgcgtccccaaaagttccccccaagatg

SEQ ID NO: 1927 - DNA, 349 bp, Zea mays
  Clone ID: PAT_MRT4577_31461C.1
attgagaccaactagcaacatagattgctctttcgtgtaccaacaatggccggggagagattttgcttccttatgctccttggtctttctgcaagtgctggtaccgcaaccatttttccacaatgctcacaagcttctatagcttcctttcttgccccatacctgtcaccagcggcgtcttcagcatgtgaaaacccaattcttcaaccgtacatgatccaacaggcaatcgtagcaggcatgttacatctatcaccctcggtccttctacaaccgtcagccctattacagcagttacctttggtgcatttttttgcacaaaacatgaatgcgcatcatctacaaccac

SEQ ID NO: 1928 - DNA, 352 bp, Zea mays
  Clone ID: PAT_MRT4577_31624C.1
cggacgcgtgggaaaaaaaaaaaaaaaaaaaaaaaaaaaaaaaaaaaaaaaaaaaaaaaaaaaaaaaaaaaaaaaaaaaaaaaaaaaaaaaccaaaaaaaaaaaaaaaaaaaaaaaaaaaaaaaattggggggggcctttttaaagaatcaaagttaactaccccttgcttgcaacttataactttttttttaggggaactaaaataaatttaattgccggcggtttaaaaacgtcggaattggaaaaaccttgccttaaccaaattaaatggcttggaaaaaaatccccttttggcaagttgggttattacaaaaaaggcccgaacgaatcgcctttccaaaaatttgcca

SEQ ID NO: 1929 - DNA, 2400 bp, Zea mays
  Clone ID: PAT_MRT4577_31653C.1
cctcgaggccggccgggggcccatttctaccaccaggcccgaggcccgaggtccgaggcccgagctcccttctcttacggtctctcctcctcgtctgtgactgtgcgccggcgccgccatcgcccgtcgaccagcgccgtccgcccgctcgaaaactgagacgcacgcgccgacggcacgctgcccgcgcatcgccgtggcctgctccagtctgtggaaaagtgacgaaccaactcggggaattctagtctcgaggccgccacctccgtctccgcctccgcctccagccctccaccgacttaactgtctggaactggaagtgtaccactactattcaattggccctagccctcgcatagcacgatgccgccgccgctgcttgagttcgcgatcctcgccactgcctgcaggttcagcaagccccttaccgttctcaggaggcttggcgttcttggcccaccaaccgttcgacgcaatgccgcagaggcgttcgtgccttcaccgtttcgccaggttgtcgttcagagtggaaagcttcttgggacaccaaggttctgccacaccactgccggcatgtcagaatgtctcccggacgtctacgccagtcaggtactgaaggttctcaagtccaccagtgctgacaacgcggatctcagcggtgctcttcatcagttcgcggtccacatggatgaggatattatcctcatggtcctccagaagcagcggtccaactggcaggtcgccctggcattcttcaactgggcggcaacccctgccggggtatgcccacgggtcaagggcctacaccgagatgctggacattcttgggcggatgaagaaggtcagacacatgaggcagctgtttgacgagattcctgaggagcgacgtcaggtggtcgtgacgaataagatgtttgccgtgctgttgaaccggtacgctggtgcgcacaaggtgcaggaggcgatagaggtgttctacttgaggaaggattacgggtttgagcttgacttggtcgggttccagatactactgatgtcgctgtgcaggtataagcatgtcgaggaggcggaggcgctgttccgtgagaagaaagatgagttcccgcatgtcacaaagagctggaacattatactaaatggttggtgtgtcaagggaagcctgagggacgctcaaaggatttggaatgatatcattgcatctaaggttgaacgagacctattcacctttggtacgttcataaacgcattggccaaaaatggcagaattagtgccgcggtgaagctgttcaaacagatgtgggagaaagggatcaatcctgatgttgcgatttgcaattgtatcatcgaccagctgtgcttcaagaaaaagattccagaagcacttgagatttttggtgagatgaatgaccggctttgtcaagccgatgtggctacctacaacactttgataaaatacatgtgtaagataaaaaggatggagaaagtttatgaacttttggatgacatggaagcaaagggctgccctccaaacaataggacatactcctacattctgaagacgactgagaaacccaaagatgtcattgccttgatgcagaggatggagcgaaccggctgcaaattggattctgatatatacaacttgatattgaacctttatatcaaatggaaatatgagaaggggatgcaacagatatgggatgagatggagagaagagggtcaggcccagatcagcggtcgtttactattatggttcatggtcttcattcccaaggcaagctcgatgaggctctgcagtattacacaacaatgaagtctagagggatgattccagaacctaggaccaagatactggtgaaagctatgcacatgaagaaggacggggctgccactgaagatgactcggcaagtatggcagggaagcatctaaaattggatcatcgttcaagactattcaatgttcatagatagtctgcttccaggtctttgttctataatctgagcaggggatgctgtccatataggtttatgggttgaaagaaagaaaaacagttcttttttctatgggtgtctaaatcacaatggctgcaccttgggctaaaaagaatcatcagcatagattcattggcaatatgatttctcagtaacttttgctcagactttcagtgccaggatcatcagtcagctgtgaaaacgttttcctagcaggtgaaattgggagttcaaggtgcgtaccgatatccaaatttatttaatgtgttgcgcaagaaacaaacaaatgtggtgggagcacttaaattctacaccttttaatgtggaatggcaaagttttatttattagattaaacaaggatatggatatttttatctagaacctaaataaaaacggcttgttctct

SEQ ID NO: 1930 - DNA, 366 bp, Zea mays
  Clone ID: PAT_MRT4577_32127C.1
ctagcaccatagaatgcacactagtgtaccaacaatggcagcccagtagggcgcctacttatgctccttggtccttctgcaagtactgctacggcgaccattttcccgcactgcttgcatgctcctataccttcccttctttcaccgtacctgtcaccagcgtggtctaccgaatgtgaaaacccatttcttaacccctacaggatccaacaggcaatcacacctggcatattacctttattacccttgttcctacaccaatcataagccctattacatcagctacctttggcgcatatattgacacaaaacatcaggccacaacatctactacaactcgtgctagcaaaccttgatgactactct

SEQ ID NO: 1931 - DNA, 347 bp, Zea mays
  Clone ID: PAT_MRT4577_32138C.1
ctttcccatcatttccattcttcaaatctaaggcagctccgatagacaggtgaacgtcccaatcattcaatcaaaaggaagataagttggtgcttaaaaacaagtcttctaagtggcacgaacaactgcagtgttggtgccttaatttccgtgggcgggtcactggtgccttggttaaaaacttccaattggtggcttcttaggaccattgaccaaaaaaccaagaaagtgacaaggtgattcttcaattccgaaagatccgaaaaaatttgttcaccatggactaccgttatccaatatcggcatttcaagctttttcaatttgtctgaacaatttttataccaaa

SEQ ID NO: 1932 - DNA, 181 bp, Zea mays
  Clone ID: PAT_MRT4577_32366C.1
cgcgctggacgtcgcaacaccctaaagtgagtcgtattaagcacttgacgatcagatcgaatcgcacgaattcctctctttgggggtagccgcgtagcgcccgctcagtcgccggcgaccacggcggagaaattgcggggtcacctcgcctgtgtgtcgtgattacgcgagggagcgagcg

SEQ ID NO: 1933 - DNA, 420 bp, Zea mays
  Clone ID: PAT_MRT4577_32400C.1
atctccctgctcctgcgcctgcttcttgatccagccaagtctgggatcgccatgtcggactctgaggaggagcactttgaatcgaaggccgacgccggagcgtgcaagacctatcctgaacatgctgacaccgtccgtaagaacggcttcatcgtcattaagaacctgccctgcaaggatgtggaggtttctacctctaagactggtaagcatggacttgcgacatgctactttggcgccatatacatattgaacggcaaaaagctggaagatattgaatcttcatcacacaactgagatattcctcatgtgaaccgtactgagtactagctgattgatatatcataggatggatttgtgagcctacttactgcacatggcaacactaaaggatgatcttagacttctaactgattagac

SEQ ID NO: 1934 - DNA, 224 bp, Zea mays
  Clone ID: PAT_MRT4577_3242C.1
tatgacattacaacagcctatagtgagtcgtattaacactctccgtaggagacgagcctgggtcacctgcgccgccgcactgagcccacgtctctatcagtcgcatagtcaggtcatgtgaagaccgagcggaggaagcgagcaacttttgtaagcggattccgcgacgtcgacggcgtgcgactaggaggaatggatgtggtgggcgtggagagtgagtcagg

SEQ ID NO: 1935 - DNA, 1460 bp, Zea mays
  Clone ID: PAT_MRT4577_32479C.1
ccggccgggagcccgtggttacgtcagcgcccgcgtactgctcccttcttcctcgttgctccgcccccttttgtcgtcgcgtcctcctctcgaggcctcggcagtcggcacgaggacgcgcgatcccgtcaccgctcacctccttctccaaacactgactccgcttcccgtccccatcccgctgcgcaagatcgggaggggacgaagagaggtcgaccgggaggagatgcaccgagaccgaggcgtctctgcggcagcgatacccggtgaccggaagcggatcggcgagcctatggacagatcgtctccatctacgtcgtgggggttctccggagggcgcgagaaggagcggatcggcgtgggcaagcagccggagatgcctcgctccggcggcggatccaccgccatgtccaagagcaagctctctgacgcagaatcagaaactgacagcgaagaatcagatgtgagtggttctgatggggaagatacttcgtggatttcatggttctgtagcttaaagggcaatgaatttttctgtgaggttgatgatgactacatacaagatgatttcaacctctgtgggctaagcaaccaagttccatattatgactatgcacttgatctgatattagatgttgaatcttcccatggtgatatgttgacagaagagcaaaatgaacttattgaatcagctgctgagatgctctatggattgattcatgttcggtatattattacaagtaaagggctgtccgcaatgctggataagtacaggaacgttgagttcggcagatgccctcgagtgaattgcagcggccaaccatgccttcctgttgggcaatcggatgttcctcgttcaagtacggtgaagatttactgccctagatgtgaagacatctacactccaagatccaaatatctaagcaacatcgacgggacttactttgggacaacattcccccacttgttcctgatgacatacccgcatttgaagccccagaagccgctgcagcaatacgttcccagggtatttgggttcaaaatccgtaagccatgacaaatttgaaggttgaatgtataaaaggttcaaatagcgccctgttatctgctggccccgcagtgttcacacgacacgtcatcggaatacacctgacccgcggctgacctccctagtctggtttcttgctctggcctgaaattctgattgatgcttgtggtttgtttagcctagtgaatcaatccatatttttttacgatcatacgtattatggctttaatggtttaacaaccatctatatttttgttggcacggttcatattcgttttttactctgattgtttactcgttaaaaaaaaaaaaaaaaactatggattgcatctgtaacaatccaagaacaaatcagttattgtgtgccgcatttacttagattgtcaaaataggagtatgatgatggcatctt

SEQ ID NO: 1936 - DNA, 290 bp, Zea mays
  Clone ID: PAT_MRT4577_32699C.1
acaaaattattcagagaatcttacacaatcatcatgccaagaagaaaaagcaggaatacaagcttatgagaatttcataccctaatttcttctattctggcatcctcataaaaaaatgtatgtatggttgttggataattgacttctatcaaaaaactaaaatgcctactttgaacctcaatgatcttcatactgctaaaattcaatttgaacgaataagaatagggcttgttatacgtccattttgatgaaaattgatcattgaatgcaactgtaataattaccttcca

SEQ ID NO: 1937 - DNA, 490 bp, Zea mays
  Clone ID: PAT_MRT4577_3269C.1
gtgggttggcttctcctccccctccggtatcgattcaggttcgtgaggatctccggggttcggcttcatggacgagcggatcgagatggctgagtgagatgttgagtaccgctgattcgtcggcggcctaacctgggccacggacgaccactccctccacaacgccttcagcacctacggcgaggtcctcaagtgcaagatcatcctctatcgcgagacgcagaggtcccgcggcttccgcttggacaccttctccaccgaggatgcgatgcggaacgccatcaagggcatgaacggcaaggagctggaccgccgcaacatcaccgtcaacgaggcccagtcccacagcggccgtggaggctgcggcggtgggtacggtggtggccgcggacgcggcggctacagtggtagcgggcgccgtgattgcagtggcggctacggccgtggcgactgctacggtggcggcagcggataccgtggtggtggccgc

SEQ ID NO: 1938 - DNA, 426 bp, Zea mays
  Clone ID: PAT_MRT4577_3282C.1
ggtccggggttccggcgacgacgtcacgcgcttcgcatgcgcctggagaactgttaaagcttccatgtgactgggcactgatatcagatccggaattgaggctctatgcgcagctctatgcataggatgaatatgcgttcctcaaagattatgctgaatcacacaagagactctgtgagcttggcttcactcattcgcagcacacgaccatccaaatcagatcttgcaaccgtcgtcgtgcttgcacagattgcctctggcgtagcagttgctgcaggcacagttatggctggctacttgtacgaggcttccaagatggtcaagtacagggcgacattcttctccacatagactctgctttagtaagtatgaagatcgaataacaggaccatatctgaggatcgaatagcgcatcatataaatgag

SEQ ID NO: 1939 - DNA, 732 bp, Zea mays
  Clone ID: PAT_MRT4577_32931C.1
cgcaaatgttgtaaagtaaaaccctgtgcattgcagtttctcaaacgatccacaagatcaatgatctgcttaaacaaatgcattttctcaaacttagtcattgtttgccgcccaggcttaatcagttccctcaggctagatccctcagagtgggattttgtaacatttccactagtactgaaaagcatgtccactctggccatagaatcatgaattgaggtaggaatagtcggaatcttgtccaaagggtctctgggtcttgcattagcttgcacttggatctcctcccgtgcacgttggcacacaacccctttaccttttgatttgcttttaagcggtgaccctagaaccccagatgggggtgccacagtcttacttctcatctgatcaagaatcctattcgagaagctgcttactttaagagcgttgtcctgattagaccaaggggacaagagaatctgctggctgtgaaatggcgtcttgaactcattattcacatatccgacacgactcgtaggtgcctcattgccagacacatcgttgttccttgagatgatattgttggcaaggctcgtcgccagattttccctgctagaagcatcaccagccctcgagcttgcaatgtcgccatagctcagtgcggcgttttccctgctggccaaatagctggttctccgggccatccgtgtgaagttaccccacaggcccttaataacagcctcgtgccgaatt

SEQ ID NO: 1940 - DNA, 242 bp, Zea mays
  Clone ID: PAT_MRT4577_33067C.1
atgcacctttcactctttggggggaagccacaaacatcagcaaaaaaactctatcacttgaactataactcataagcaatctaaaagagggcaccacccatgactgggtgctggtagaacgctgttgggtttgccaaagcatcgttgtttgaatggcagcacttgtctcagttgcaagagggtgccaacgctacgcgcagcgagcatgtataacggccacaactgttgctgtgtcaagaaag

SEQ ID NO: 1941 - DNA, 1892 bp, Zea mays
  Clone ID: PAT_MRT4577_33348C.1
cgccaaacggaccaagaatttccacgcagatttcaacagagatgatgggctcgcccgccggtgctggtgcactcgcccatgtctcgcgcgtcgcaccgccgaggacggcgccccgattcgtcctccttatttaggcaccgtcttttgtcccccccatccgccccgagccgaaccaaggcgccatgagctccccggccgtgcgccgcgtcgtactcctctcgtcactcctctgcgccggagcgctcggtttcttgccctgctcccatgccgccgcggtggcgcccggctacgtcgccgtctccgccgccagcttcgtgccgtcctcaacgtgcagctcccccgaccgagttccgccgcaccggcggaacggcacgtccgccgtgctgcggctgacgcacaggcacgggccgtgcgccccctcgcgggcgtcctcgctagcggccccgtcggtggctgacacgctgcgcgcggaccagcgccgggcggagtacatactgaggagggtgtcggggcgcgcgcctcagctgtgggactccaaggcggcggcggcggtggcgacggtgccggcgagctgggggtacgacatcggcacgctcaactacgtggtgacggcgagcctcggcacgccgggcgtggcgcagaccatggaggtggacaccggcagcgacctgtcgtgggtgcagtgcaagccgtgcgccgcggcgccgtcgtgctacagccagaaggacccgctcttcgaccccgcccagtcgtcgtcctacgccgccgtgccgtgcgggggccccgtgtgcgcggggctgggcatctacgccgcgtccgcctgctcggcggcgcagtgcgggtacgtggtcagctacggcgacgggtccaacaccacgggcgtgtacagctccgacacgctgaccctgtcggcgagcagcgcggtgcagggcttcttcttcggctgcgggcacgcgcagagcgggctgttcaacggcgtcgacgggctcctgggcctcggccgcgagcagccgtcgctcgtggagcagacggcgggcacctacggcggggtcttctcctactgcctcccgacgaagccgtccaccgcggggtacctcacgctgggcgtgggcgggccgtcgggcgccgcgccgggcttctccacgacgcagctgctgccgtcgccgaacgcgccgacctactacgtcgtcatgctgacggggatcagcgtcggcgggcagcagctcagcgtgcccgcgtcggcgttcgcgggcgggacggtggtggacaccggcacggtcgtcacccgcctgcccccgaccgcgtacgcggcgctgcggtccgcgttccgcagcggcatggcctcgtacgggtacccgacagcgccgtcgaacgggatcctggacacctgctacaacttcgccgggtacggcaccgtgacgctcccgaacgtggcgctcaccttcggcagcggcgcgaccgtgacgctgggcgccgacgggatcctgtcgttcgggtgcctcgcgttcgcacccagcggcagtgacggtggcatggccatcctcggcaacgtgcagcagcgctcgttcgaggtgcgcatcgacggcacctccgttggcttcaaacccagctcctgctaactcatggattaacagtcggcgacttgggatcactactagtagtagtatatgcacgtacgtagacgagagtgcagagatacatacaaagttactgtacatgatgatagtaaagataaacttgcaggagagcgtataccatacacagcacacagcagtagcggtggaagttctttcgttggtggaattaaggggctaactagagacgtaagcgtgacgcgttacaacgcgttcggcattgcccggcgagttattaaaaaaaaaaaaaaagcggcc

SEQ ID NO: 1942 - DNA, 857 bp, Zea mays
  Clone ID: PAT_MRT4577_33495C.1
ttgggtccctcgaggccggccgggcgacactcctcctctactgcatatcacaattcacagcgctcaagttctcgcgcccagagccaaatttttctccactcaatcactgcagccatggacgccagcggagccggtagcaaggcgaagaagggggcggctgggcgcaaggctggcggccccaggaagaagtcggtgtcgcggtccgtcaaggccgggctgcagttccccgtcggccggatcgggcgctacctcaagaagggccggtacgcgcagcgcgtgggcatcggcgcccccgtctatctcgccgccgtgcttgagtacctcgccgccgaggtgctggagctggccggcaacgcggcgaaggacaacaagaagacgcgcatcgtcccgcgccacgtgctcctggcgatccgcaacgacgttgagctcggcaagctgctggctggcgtcaccattgcgcacggcggtgtcctccccaacatcaacccggttctcctgcccaagaaggtggcggagaaggcgtctagcggcggcagcaaggagagcaagtcccctaagaaggccgccaagtccccaaagaaggcagccaagtccccgaagaaggcttagaaattagtcactccactagcgctctgctgtagcatgttcgtgtttagatctgtggatgttatgtgttccggcctaatttcctctttgccttgtggcttctgatatgttcatcggcatgtttgccgtgttgtgtttccttgttctgattttgcaattcatcatcttgttgaatgaacttactatcgggaaatgaagcataataacgatgcaaaatgattgttctgaaaaaaaaaaaaaaaaaactcttc

SEQ ID NO: 1943 - DNA, 911 bp, Zea mays
  Clone ID: PAT_MRT4577_33496C.1
acaaagcttgtctagctcagttggcagagcacaaggctcttaaccttaaggtcgtgggttcgagccccactgtgaacatattttttatcacaattcacagcgctcaagttctcgcgcccacagccaaatttttctccactcaatcgcggcataagctgcactgcagccatggacgccagcggagccggtagcaaggcgaagaagggggcggctgggcgcaaggctggcggccccaggaagaagtcggtgtcgcggtccgtcaaggccgggctgcagttccccgtcggccggatcgggcgctacctcaagaaggggcggtacgcgcagcgcgtgggcaccggcgcccccgtctatctcgccgccgtgcttgagtacctcgccgccgaggtgctggagctggccgggaacgcggcgaaggacaacaagaagacgcgcatcgtcccgcgacacttgctcctggcgattcgtaacgacgttgagctcggcaagctgctgtctggcgtcaccatcgcgcacggcggtgtcctccccaacatcaacccggttctcctgcccaagaaggtggcggagaaggcgtccagcggcggcagcaaggagagcaagtcccctaagaaggccgccaagtccccaaagaaggcagccaagtccccgaagaaggcttagaaattagtcacttcactagcgctctgctgtagcatgttcgtgtttagatctgtggaacttatgtgttccagcctaatttcctctttgccttgtggctcctgatatgttcactggcatgtttgccgtgttgtgttccttgttctgattttgcaattcatcatcttgttgaattaacttactatcgggaaatgaagcataataacgatgaaaaatgattgttcttaaaaaaaaaaaaaaaaaaagcggcc

SEQ ID NO: 1944 - DNA, 241 bp, Zea mays
  Clone ID: PAT_MRT4577_33565C.1
ccggattcccggtcgacccacgcgttcgaggaattccttcccctagccgccgtctccgttgctcgtctccctgagaggtgcctgtaccgaggaactggccgagtactaggtagagaatcggtttttcttgtctcagcccggggtctgctgcgtctggtggtggtgaacgggagaattttgtgagatctgttttggatcatgcgtaccatctcgggaatcacgggtgtcacacgtatcttcg

SEQ ID NO: 1945 - DNA, 229 bp, Zea mays
  Clone ID: PAT_MRT4577_33624C.1
gatctccaaatttctcaggggagccagtgctttactgtgctacacgcccttggtgcaagacctgaggggccaccatacattacaatcactggtctagatgactcaaattctggttatgccacaggaggcgggcttgatataatcgtgaggacgctgtgtgatgtagctcacacatgtggcctcaccttagagctcaatgccggtccagctggtagccatgaggctgagc

SEQ ID NO: 1946 - DNA, 1164 bp, Zea mays
  unsure (1)..(1164): unsure at all n locations
  Clone ID: PAT_MRT4577_33776C.1
gtcggtcgaggagtagggttctagcgcctatctggtttctccctgcgccgccgccgtggacaaccggagcgtagtgggaggggatgatggagggaggtagccgcgcggatgggcggaatccgaaccagctccggccgttcacctgcaccgggaacccgctccaccgcgcccacggctccgcgcggtgggcgcagggcgacaccgtcgtgctggccgctgtgtacgggcccaagccgggaacccggaagggcgagaaccccgagaaggcctccatcgaggtcgtgtggaagcccaagaccggccagatcggaaggcaagaaagggaatatgagatgacactcaagaggacgttgcagagcatctgcttgctcacagttcatcctaacaccaccacctctgtcgtgcttcaggttgtgggtgatgatggttctcttatgtcatgtgcaattaatgcttcttgtgctgctcttgcatttgctggaatccctatgaaacatcttgctgtcgcgattagctgtggagtgatggacaatggtgtggttatcttagacactagcagagcagaagagcagcaagctaggtcgtttgctcacctggtgtttccgaactcgcgcaagtcagtcgaatcgaaggacccgacacagcgagatgaggagtccgagcgaggattgataacttgcatcacgcatggagcaatgtctgaggatgactatttcaactgcatagagaggggtgtcatggcgtcctcgaggatctcggatttcatgaggaagacactgcagaaggaggtgtccagggatgcctgacctgagtagcaaatgtattagcatgaccgagaagctgaggcgatggcgatggcaatggtgtgtagacagcagctgggtctctagtttagacggcatgtagtcgtgttagaatgaaggaggcaagggtgcggtggagtggaggtcaatcggcgtgtgatgccacgcactagcttagctgcggatggtttggtggacttttgaggaacagataatgagattgtatgcacggcacgctgaaattttacttgaacgccgcccgattaaaacaatatccatactgtacgtgtgtcggtgagctgcnnnnnnnnnnnnnnnnnnnnnnnnnnnnnnnnnnnnnnnnnnnnnnnnnnnagggcca

SEQ ID NO: 1947 - DNA, 580 bp, Zea mays
  Clone ID: PAT_MRT4577_33813C.1
ggccgcccttttttttttttttttttttttttttttttttttttttttttttttttttttttttttttttttttttttttttttttatttttttcggaaaaacattatcaacattggatttataaggggcaaaaaaggcggcggcccacaggctataagcttgggtcagggccgggaaccgatcgacacatggacccacattattggccgcaagaacaattaagggccccattatgacatatcatcatatataaaataaaaccggcggggttattattccgccacgggaatttatatatagaggccaaacgggaatttgggggagtctgcaaaggcaatggcaatgcaaaggagggtcacagcgcaaagggcttgggggaaacgtcaaacatttcccagcaaaacagggtagggtcctgcccccccctgaagttgaccaccttgcgggcgggggcccaggccccctgcaactggtggttgcaacccccggcgttggtcaagaagggtttcatggaggggagcaggcggccctaggggaccccctggggctcgcattccacccccttgataaaactggggg

SEQ ID NO: 1948 - DNA, 2473 bp, Zea mays
  Clone ID: PAT_MRT4577_33820C.1
ggacgttttggactctgattagcatattgattttgccactgctcagacattagatttgggtgccacattgtgcaggagttctggctggacaagggcggtggaggtctatgtatgtcaatttcttcaagggcgctttcaataacaggcattgatgataggaggtattggaacttcattgccagtgatgaatcaagattccgcacggttgcgtacctctcgcaaatctggtggtttgaagtgagaggggaggttgaattcttcttcccagaaggcacgtacagcctattctaccgcattcatctcggccgaccattcaagcgtcttggccggcgagtctacagctcggagcacgtccacggctgggacatgaagccggtgcgtttccagatgtcgacctccgacggacagcatgttcagtccaagtgctacttgagcgatcccggtatctggatcaaccaccatgtcggggacttcgtcgtgaaggactcgagcaggccagtgaacatcatgttcgcgatgtaccctctttttcacctctacaccgcagcgtccccgtcaaccctgttcatgctccgctgcttgcaccagatactaggcttgctctcatcctttcaacccctcgtcttccacggcttctacgccttgccttgctgctgatgctactccatttcctcccccggtacagcctgacccaacaaacgcacccccaagctaccaacgcacgcaaagcacggacgggcgcatacagctttccctttcgcgagtgcgtgccccttctcttctctagttctcttctccgtcgcgtcagagatcagggagagaccagagcaaacaacaaccaccgcttgtttcatcaagaatcgtggaggagaaccgaaaggtgtagcctttttcggcagggcatctgctagagccggccggttgaagcaggggagcgagaggaggagggcagccgaacaggagcgtcgcagtggtggttaagcagcagcaacgacgacgacgacgacgacgctgagaggtttccccgttcccgacggcacgtccaccgaggcggcgccatcacgatgggtcctctggcgccgctgaggtgtaacccgccgccgccgttctccaagtcgccggggtccctgctgctgctgtccaagtcgctcaccctctactgctgagccgagccccctcctcgatcggttccatgggcgccgtggcctcgtcggcgggtggggcccggggaggcgatggcacggtgctgggcgacctgccggagaactgcgtcgcggaggtgctgctcaggctggacccgctggagatctgtcggttggcgcggctcagccgcacgttccgcggcgccgcgtccggggacggtgtctgggagtccaagctaccgaggaactacgcgcgcctcctcgccgttgctgcggccggcgatggggaaggtgggcaggccgccgcgtcggcgccgggggcagagctgctgcccatcagcgaacgtgtacgcgcggctttgccgtcggaaccgtttcgacggcggcaaaaaggagttctggctggacaagggcggtggaggtctatgtatgtcaatttcttcaagggcgctttcaataacaggcattgatgataggaggtattggaacttcattcccagtgatgaatcaagattccgcacggttgcgtacctctcgcaaatctggtggtttgaagtgagaggggaggttgaattcttcttcccagaaggcacgtacagcctattctaccgcattcatctcggccgaccattcaagcgtcttggccggcgagtctacagctcggagcacgtccacggctgggacatgaagccggtgcgtttccagatgtcgacctccgacggacagcatgttcagtccaagtgctacttgagcgatcccggtatctggatcaaccaccatgtcggggacttcgtcgtgaaggactcgagcaggccagtgaacatcaggttcgcgatgattcagatagactgcacgcacacgaaaggcggcctctgcgtggattcggtcgtggtgaaaccgcagcacctcgcgcagaaaaaagcgccctggacttacgtctagactcgtcgaacaagttgctgctgctgtctagggaggagggatatgatccatagtttccttttggattgttctactaccagatgtgcgttttgtttacagaagtgcggttttttacatttgcacttatacgcgtattttgcagtcatgtaatgtaattgaaggggtaagtgatttttttagttcctcttgtcccccctaggaacatgttggacctctgtaaattgttcgtttgaactttgaaatgtacatcggctgtgttctgcctatcacctggccccccaaacaaaaaaaataaaaaatataaataatataattataatataatttataaataatttaatttaatattatatttttttttattttatatttttatattttatgatatt

SEQ ID NO: 1949 - DNA, 363 bp, Zea mays
  Clone ID: PAT_MRT4577_33852C.1
cacacgccacgccagcgtcttgttccttatccaggattccaagctgagaccatgagaccacgacggggctcacactgtgcacgctctacggccatccatggcgccttatccagcattacacctgcagcagcaggtccacctccggcacgccagcaagccaacgaatccagctccggttcatcatcacgggcatggaaaccccaagcccgacgctgtggcggcgtcgctccggcgaggcgccccggccgacgctcgcggcctccgggcgctaatcaaggcgctgtcgtcgtctgcgtcctccaccagcaccgtggcggcagtgcacgcccacgcaaccaagatcgggctggaccgcgagcgtac

SEQ ID NO: 1950 - DNA, 1424 bp, Zea mays
  unsure (1)..(1424): unsure at all n locations
  Clone ID: PAT_MRT4577_33901C.1
taccctcgcggnccgtgccgggnaaaaaaaaaaaaaaaaaaaaaaaaatcgaggccggccggggcatatccaacgcgccggggcatatccactattctctaggaagcaagggaatcacatcgccatggcagccaagatgtttgcattgtttgcgctcctagctctttgtgcaaccgccactagtgctacccatatcccagggcacttgtcaccactactgatgccattggctaccatgaacccatggatgcagtactgcatgaagcaacagggggttgccaacttgctagcgtggccgaccctgatgctgcagcaactgttggcctcaccgcttcagccgtgccagatgccaatgatgatgccaggtatgatgccaccgatgacaatgatgccgatgccgaatatgatgccatcgatgatggtgccgactatgatgtcaccaataacgatagctagtatgatgccaccgatgatgatgccaaacatggtttcaccaatgatgatgccgagtatgatgccttcgacgatgacgccgagtatgatgccaccgataatgatgccaagtatgataccaccgatgatgatgccgagcatggtgtcatcaatgataatgccaaacatgatgacagtgccacaatgttactctgattccatctcgcacattatacaacaacaacaattaccattcatgttcagccccacagccgtggcgatctcacccatgtttttacagcagccctttgttggtgctgcattctagatataagcatttgtgttgtacccaataatgaagtcggcatgccatcgcatgcgactcattgtttaggaataaaacaagctaataatgacttttctctcattataatgtaaaaaaaaaaaaaaaaaaagcggccccacagccatggcgatctcacccatgtttttacagcagccctttgttggtgctgcattctagatataagcatttgtgttgtacccaataatgaagtcggcatgccatcgcatgcgactcattgtttaggaataaaacaagctaataatgacttttctctcattataatgtatatctctccctgtcgcggttcctgaacaattggtcctcctctaccttacaaaacatcagcccatacaacagttgtgcgctgctctcagctctctgattgctgcttcttattttcttccagcgctgcgtccccatnttttatttttttttttttttcnttttgtggggggggggggggnctttttttttttttttttttccttttttttttttcttntntttttgttttccctgcccgggcggcccttttttgggggggtttttgcggttttccctcccccttggggcccgctcgggcttccttttggggggcccttttccccctttttcgcgtcggcgggcctttccctggccgtctttt

SEQ ID NO: 1951 - DNA, 1220 bp, Zea mays
  Clone ID: PAT_MRT4577_33903C.1
acccaataatgaagtcggcatgccatcgcatgcgactcattgtttaggaataaaacaagctaataatgacttttctctcattataaaaaaaaaaaaaaaaaaaaaaaaaaaaaaaaaaaaaaaaaaaaaaaaaaaaaaaaaaaaaaaaaaaaaaaaaaaaaaaaaaaaaaaaaaaaaaaaaaaaaaaaaaagggatattattctctaggaagcaagggaacatcgccatggcaggatgtttgcattgtttgcgctcctagctctttgtgcaaccgccactagtgctacccatatcccagggcacttgtcaccactactgatgccattggctaccatgaacccatggatgcagtactgcatgatgcaacaggggcttgccagcttgatggcgtgtccgtccctgatgctgcagcaactgttggccttaccgcttcagacgatgccagtgatgatgccacagatgatgacgcctaacatgatgtcaccattgatgatgccgagcatgatgtcaccaatggtcttgccgagcatgatgtcgcaaatgatgatgccacaatgtcactgcgacgccgtctcgcagattatgctgcaacagcagttaccattcatgttcaacccaatggccgtggcgatctcacccatgtttttacagcagccctttgttggtgctgcattctagatagaagcatttgtgttgtacccaataatgaagtcggcatgccatcgcatgcgactcattgtttaggaataaaacaagctaataatgacttttctctcattataaaaaaaaaaaaaaaaaaaaaaaaaaaaaaaaaaaaaaaaaaaaaaaaaaaaaaaaaaaaaaaaaaaaaaaaaaaaaaaaaaaaaaaaaaaaaaaaaaaaaaaaaaaaaaaaaaaaaaaaaaaaaaaaaaaaaaaaaaaaaaaacaggggggcccccccgggggttgggaaattcccaccccccggggggcccttagattaaggggcccattccccccaaaaggggggggtttaaaaatactgaaggggcccgggttaaaaaacgggctggaaaaaccccgggggccaaattattttccttggaaaaaaacccccttggggaaaaaaaaaaaaaaggcccgaaaaaaaaccccgaccgctttccggggccccaaaggggaaaggaaccccccttaaaggggcccttaataacggggggggggggggttaccccccagg

SEQ ID NO: 1952 - DNA, 1729 bp, Zea mays
  unsure (1)..(1729): unsure at all n locations
  Clone ID: PAT_MRT4577_33904C.1
ccaaaaacaataaaatttaatatccgcaaaagaaataaattgagaatcgtacttaggcatccgaggtcaaaacattgtaatgattctttgcgttgaagcttatataacatcaaaatcccacactgaatctgtgctacatgtttagcaacagcaaaacctaagctcaaattacgactcttgtgataaccaaaggacatagccgatcatcccaaacaacatatgtaacagctgggcagctcaaggaccaaaccgctttttacagtagaaatataacaaaaagtattgatggacctgatcaacagccaatggctaacggtgtaagatacatttcaatgccccgggggaaacctacttcccagctgaatcaggtgagccatccccggaagaaaccaaaccttttttgcctccacgattagggctaccaaacaacgcgtgggcgcgtgggatcgccatggcagccaagatgtttgcattgtttgcgctcctagctctttatttgtgcaaccgccactagtgctacccatatcccagggcacttgtcaccactactgatgccattggctaccatgaacccatggatgcagtactgcatgaagcaacagggggttgccaacttgttagcgtggccgaccctgatgatgcagcaactgttggcctcaccgcttcagccgtgccagatgccaatgatgatgccgggtatgatgccaccgatgccgatgatgccgatgccgagtatgatgtcatcaatgatggtgccgactatgatgtcaccaatgacgatggctagtatgatgccaccgatgatgatgccaagcatgatttcaccaatgatgatgccgagtatgatgtcttcgatgataatgccttcgatgatgatgccgaccatgatgtcaccaatgatgatgacgagtatgataccaccgatgatgatgccgagcatggtgtcaccaatgatgatgccaaacatgatgacagtgccacaatgttactctgattccatctcgcacattatacaacaacaattaccattcatgttgagccccacagccatggcgatcccacccatgtttttacagcagccctttgttggtgctgcattctagatataagcatttgtgttgtacccaataatgaagtcggcatgccatcgcatgcgactcattgtttaggaataaaacaagctaataatgacttttctctcattataacttaaaaaaaaaaaaaaaaaaaaaaaaaaaaaaaaaaaaaaaaaaaaaaaaaaaaaaaaaaaaaaaaaaaaaaaaaaaaaaaaaaaaaaaaaaaaaaaaaaagttttgacatggggccgcccccccctaagggggaattttggggagctcccccccccctgggggccgttcgggccttcttttggggggcccaattggccctttaggggggggggtttccaattcattggccggggtttgaaaccctcttgcctgggaaaaaccttggggtcccccccccttaattccctttgggnccttcccccttttnggccggtgggccgttttccgaaagaggcccccccccggccgcccttccccccttgtggcgcccccctctttgggcctggggcccccccccctttcggggccccttttttccgcgggggggggggggggggtccccccccgngggggccccttccctttggccgggccccccgtggccccccctccgntnngnttttcttctcctttttttt

SEQ ID NO: 1953 - DNA, 725 bp, Zea mays
  Clone ID: PAT_MRT4577_33908C.1
gacccacgcgttcggcacacgttcggccacaccttcgctttatggagcaagggaatcacattggcattgcaggcgagaagtttgcattggttgggcttctaactttttgtgcaaacggcaattatggtaaccatattccaagggacctggtaacaattctggtggcaatgggttacaatgaacccatggatgcagtactgcatgaagcatcagggggttgccaacttgctagcatgaccgaccctgaagctgcatcaactgttggcctcaccgctacagccgtgccagatgccaatgatgatgccaggtatgatgccaccgatgacaatgatgccgatgccgaatatgatgccatcgatgatggtgccgactatgatgtcaccaataacgatagctagtatgatgccaccgatgatgatgccaaacatggtttcaccaatgatgatgccgagtatgatgccttcgacgatgacgccgagtatgatgccaccgataatgatgccaagtatgataccaccgatgatgatgccgagcatggtgtcatcaatgataatgcctaacatgatgacagtgccacaatgctactctgattccatcttgcacattatacaacaacaacaattaccattcatgttcagccccacagccgtggcgatctcacccatgtttttacagcagccctttgatggtgctgcattctagatataagcatttgtgttgtaccc

SEQ ID NO: 1954 - DNA, 371 bp, Zea mays
  Clone ID: PAT_MRT4577_33937C.1
gaaagaccggggcggaccacacccttcgggcccaactagcaacatacaaggcacattattgtaccaacaatggcagctaaaatattttgcctccttatgctccttggtctttctgcaagtgctgctacagcgaccattttcccacaatgctcacaagctcctatagcttcccttcttcccccgtacctctcaccaacggtgtcttcggtatgtgaaaacccaattctataactcctacaggatccaacaggcaatctcagatggcattttacctttatcaccctagaaccatctactatcatgaaacctattaccgtagttgcttttggtgcatctatgggcacagaacatcaacgcccaacaccttcgat

SEQ ID NO: 1955 - DNA, 1663 bp, Zea mays
  Clone ID: PAT_MRT4577_3398C.1
cattgggtacctcgaggccggccggggaatcccctcctccgccctccgcctcctcagtgctccggcgcctagcgacctgctcctgcccccgccgccgccgtgcacgcacagccggagcaggagcagcgctgcccgcctttaccgttgcccatggagaactctgccgccgccgccgccgaacggccgcgcctcacccgcgcagccgccaagcgctcagccgtcgtcacggctgtggccgtcgccgccaagcgcaagcgcgtcgcgctcagccagctgcccacgctccccaacgccgtgctcggcgcgcacgacgacgacgacgacaagcccgtcaggaagcagcgcctcctccccgccgccaagcccaagcgccgcctcgctgttgactacatcgcggcggtgcagatcgacgtcacgcccaacatgcgtggcatcctcatcgactggctcgtcgaggtcgccgaggagctcaagctcgtctccgacacgctctacctcaccgtctcctacatcgaccgcttcctctctgccaaagttctcaacaggcagaagctgcagctcctcggcgtctccgccatgctcatcgcatccaagtatgaggagatcagcccgcccaacgtggaggatttctgctacatcaccgataacacctacaccaagcaggaggtagttaagatggagagtgatatactgaatgtcctcaagtttgaggtgggcagtcctaccgccaagacgttcctgaggatgttcatcagatctgcccaagaagacaacaagaagtatcctagcctccagttggagttcctggggagctacctttctgagctgagcttgctggattatggcttgattcgctccttgccgtcacttgttgcagcctcagccgtctttgttgcaaggctgaccctggatccacacacccatccctggagcaagaagatgcaaacgctaacaggctataagccatctgagttgaaggactgtgttgctgccatacataatttgcagctcaaccggacatgtcaatccatggtggcgatccgggagaaatacaggcaacaccgattcaagggtgtatcagctttgctacctcctgttgagatccctgcatcatacttcaatacactgaaggagtaggtgttccttgataatctaagagagccaagcacacagctttcctcaagcaagatgtgcaatgctaaggttgttagggtactgaggttcttggatgctgcatctaggcttggcttggagcattcagagttgatttgtttgaagttcaaactcaatagaaagttcggtgtatcaaatcttgtacttgtgtatcataattatacattacaaccaggtgcctttatttattgggggcacaattccaaagttttcattcattgcctcttactacatattctccttttttattcatgtagttctagtacagaacacagtatttagtgttcagttatatcagagggtagcttagggatgtattagaccttgctaccttgtcttggtaaacacatgcagaaagccagaaagtgatatgttcttgacacaagaaatgtgtcctggaaagactagatacttggaacagttgtgaatgataattatagcacaatgtgcacctttaatgttaataggaaaattggccatgtgaatgatc

SEQ ID NO: 1956 - DNA, 445 bp, Zea mays
  Clone ID: PAT_MRT4577_34063C.1
ggttgacccacgcgtccgcgggttcgtgaggttctccggggttcgggttcatgggtgagcggattgagatggcggcgtcggacgtcgactaccggtgctgggtccgcggcctcacctgggccacggacgaccactctctccacaacggccttcagcacctacggcgaggccctcgagttcaagatcattctccatcgggagacgcataggttcctccggtttctaggtattgtcaccttctctacggtggaggcgatgcggaacgccatcgagggcatgacctgcaaggagctggacggccgctacatcccgtaacgaggcccagtcccgcggcggctcgtggaggcgtcggcggcgggtacggtggtggccgtggaggcggcggccaccggcggtggcgggctcccgagatggccgcggccgctaccgctgtggcggctggcta

SEQ ID NO: 1957 - DNA, 916 bp, Zea mays
  Clone ID: PAT_MRT4577_3412C.1
tcggtaaagcctgaactgaaataagaacgaagtggaataggacgaaggaaggttctgcatctcagattgaatgtcggaaggaaagaagtacttgattgtgttggctcaccatgagcccaagtcgctgaatcactctttcgctcaacgtgctcaacaggtgctcacggctgctggaaacgaggtcaagctgatcgatcttcatgccgtcaacttcaacccggtctcggatcgacgcaacttcaagacgacggccaacccggagtttctcaaacaacagatcgaggagcgacatgctaccgaacacgatgggttcgctgatgacatcaaggagtccctggaggcagtcgactggtgcgatgtattgattctccagtttcccttttggtggttcagcatgcccgccatcctcaaaggatggatcgacaaggtctgggccagtggaagagtctacggtccgaacaagaagttcaccgctggagtgtggaagggcaagaaggccttcctctccatcacaacgggctcttccgagccgacctacgcgggacctgactctcgcatgggagatatcaacagtctcctcttccccatcaaccatggcatcttagccttcgttgggttcacggtcttgcctcccttcatcgcctactcagcttcgcatgccaccgaagaccagaggaagcagttcctggatgagtacgaacagagacttctgaacctggagaacctcaccccgatctcctatcctcccaacgaagccttcgactccaccggaatcctgaaagcagactggaaggctgctcaagctcaccagaactcgaaccctgctccacgcgaaggctgaaagcctccctcattccctccttccatctgaatgaaaccagctgttggcataccgaggtagcaacttcgaaacatc

SEQ ID NO: 1958 - DNA, 630 bp, Zea mays
  Clone ID: PAT_MRT4577_34279C.1
cctcgaggccggccgggccgggatcatctccgcgagccactattagcagcacacttctcatcagccatgaagctcgtcctgtgcttctgcatctgtgtcgttctcgtcatcgcctcgtcgccggtcacgctctctgatagccgccctgcgatggggcgacgctggctgcgagacgaagttgtcattgccaggggccctgaagggaacacgacctctgcctcagcctctgcctggtcggaggaggcgccggggataccgtacgacgggtcgaagaggctcagccccggtggtcccaacccgcagcatcactaatcgtcgtccgatcttgttggcaagtgccactgcggacatcttgctacgggaatctgtggttgattactacactttggttctgatcagcttttcttttctgtcctttctgatcagcttttcttttctgtcaaggccgtgtgatcaaggagtaaacgtaacaaattattgccacgatttttctgaatgtatccaagtcatgtgagtgataataatgatatgctgtcattaactaaactaaagagtcgttgcagccctcgcaagttatctgtaacttttatttttggtatcagtgtttagtgctaatatgcagtcgcctcc

SEQ ID NO: 1959 - DNA, 351 bp, Zea mays
  Clone ID: PAT_MRT4577_35057C.1
ctcgatggaaccaaaaccaatacgtcagattctgcatataggagttccaacattccatcataacacgattagcaaaaccgggcaacgcttaacataaaacgttataccaagccctaaagctattatttcaaatttcttggttgataatgcacctaatcggatcctgccctcctaaagcattataattttggatggcaccaccatagcctccacctacgttgccatcgtcacctccggagccaccacctacatagcctgcgccgccatagccaccaccaccacggttccgagaaggtctttaattagccatgttgacacgtacctgtcgcccatcaattgccttgccatcca

SEQ ID NO: 1960 - DNA, 1988 bp, Zea mays
  Clone ID: PAT_MRT4577_35061C.1
caggtttatgatagtacttgcagtagccaggactctgttccaggtttctatgtctctaatctctatgaagcggtacatgtttttgtctgtgccttgttggctttcactgctctgctgctcatctcctaactacgcctgcctgtttcctcccccgcaggattgatgagctcggcgagcttgagcaccagcatgcagggggcaatgaccagggtgagggcccccttcacgccgccgcagtggatcgagctggagcaccaggccctgatctacaagtacctgtccgcgaacagccccgtacctcacagcctcctcgtccccatcaggaggagcgggagcctcgcatcgtctccctacccgcctccctacttcggcacgagcacatgtaagcgaagaaagagaggaggacgcaaaaagcaaaggcgaccgagagtgctgagtgctattgcctgggcgctagcttcagtagttcagttccatcatgcacatcgacatgataaaaaagccgcgtcggttctttccttttcggaatcttgattggcgctgctgcttgttgcctgttggcgcagtggggtggggctccttccagctgggctactccggcaatgcggatctggagcctgggcggtgccgccggacggacggcaagaagtggcggtgctccagggacgcggtcgccgaccagaagtactgcgagcgacacatgaaccggggacgccatcgttcaagaaagcatgtggaaggccagcctggccatgccgcgaaagccatgtccgcggtggccgtggcggctgcggcggctgctgctgctgctctggccggcgccggagctaccgctgctgctggccttgctgccaaccagcaccggcagccggggaagagctatgccacgggtgcgactgatccatgctctctgcaatatagcaggggactggcgaacaaactgtcgaacgagagcgaaaacatgcaggactctgacagtgtctcgatgctgacttccatgaacacaggaaacactgcaggcagcgtgtttccgttctcaaaacaaaacactgatcttttcgaagtgagcagctcaaggccagagtttggccttgttccatcggattcactgacgagttcacctcatagttccttgaagagtgtaaaaaatctgctcagctcacggagtctgagtgagcaccagagctccgcctccctgcaacactttgtggactggcccaggacgccacctgcccagggaggtctttcatggcccgaggcagaggacatgcccagagctcagacgtcacagctctcagtatccgctccaatggcatcctccgagctatcatcggcctccacatctcccatccacgaccacgagaagctgattctgtcacctctcaagctgggccgcgaccgcgagtatagcccatctggcctcgtcagcgctgcagcgaacagatacgaggttagccagctagaagcgacctgggcgacgacgttccgcgactcttcgacgggcggcccgttgggggaggttctggccaagaacaacagcaacgcggaagcaagaagttgcccgtcggcggcgccacctctaaccgactactactgctgggattcaggccacggcatgcagtcgtcccccgtgggagttctgcagaggacgaccgccttcggatcggtctccagcagcacgggcagcagccctagggtcgagagccacggcgcctgctgcgatggtaccagcaacctgatggatgatgatctcggctcagttgtagtgagccaccccagcatccgcctcttgtgagcccgctgagttctggccatggaaaaagcgtgaggggttttgtcatttgagactgatctgtcacttgagttcttcttttgtttccttttaacctggctttgtaactctcaccttctttggatcgtgaaaagcgctgcgatgtgtggtgtggctgggtttttggtgcgccgttgatgcgtagtaccattcatat

SEQ ID NO: 1961 - DNA, 1585 bp, Zea mays
  Clone ID: PAT_MRT4577_35063C.1
caaaagcaaagcgaccgagagtgtgctttttgggctagcttcagttccatcatgcacatcgatatgctaaaagccgtgtcgattgtttcttttccggatcttgatttggcgctgttgcgtgttgggcgcagtggggtggggctctttccagctgggctactctggcaatgcggatctggagcctgggcggtgccgccggacggacggcaagaaatggcggtgctccagggacgcggtcgccgaccagaagtactgcgagcgacacatgaaccggggacgccatcgttcaagaaagcatgtggaaggccagcctggccgtgccgcgaaagccatgtccgcggtggccgtggcggctgcggcggctgctgctgctctggccggcgccggagctaccgctgctgctggcctcgctgtcaaccagcaccggcagccggggaagagctatgccacgggtgcgactgatccatgctctctgcaatatagcaggggactggcgaacaaactgtcgaacgagagcgaaaacatgcaggactctgacaatgtctcgatgctgacttgcatgaacacaggaaacactgcaggcagcgtgtttccgttctcaaaacaaaacactgatcttttcgaagtgagcagctcaaggccagagtttggccttgttccatcggattcactgacgaggtcacctcatagttccttgaagagtgtcaaaaatctgctcagctcacggagtctgagtgagcaccagagctccacctccctgcaacactttgtggactggcccaggacgccacctgcccagggaggtctttcatggcccgaggcagaggacatgcccagagctcagaggtcccagctctcagtatccgctccgatggcatcctccgagctatcatcggcctccacatctcccatccacgaccacgagaagctgattctgtcacctctcaagctgggccgcgagtatagcccatctggcctcgtcagcgttgcaggagcgagcagagacgaggttagccagctagaagcgacctgggcgacgacgttccgcgactcttcgacgggcggcccgttgggggaggttctggccaagaacaacagtaacgcggaagcaagaagttgcccgtcggcggcgccacctctaactgaatactactgctgggattcaggccacgggatggagtcgtcccccgtgggagttctgcagaggacgaccgccttcggatcggtctccagcagcacgggcagcagccctagggtcgagaaccacggcgccagctgcgatggtaccagcaacctgatggatgatctcggctcagttgtagtgagccaccccagcatccgcctcttgtgagcccgctgggttctggccatggaaaaagcgtgaggggggagcatttaccacgtagtttgtcatttgagactgatctgtcacttgagttcttcttttgtttccttttaacctggctttgtaactctcaccttctttggatcgtgaaaagcgctgcgatgtgtggtgtggctggtttttttgtgcgccgttgatgcgtagtaccatcttataaaagtgagactgcacatttggatt

SEQ ID NO: 1962 - DNA, 2091 bp, Zea mays
  Clone ID: PAT_MRT4577_35068C.1
gagcaatgccgctagttccgtcccactccctcgcttcccatcccgcaccccatggaagggagcagcactagctagcgtgggacagggcggggtggtgtcgtggtgatggaagcgggcggcggcgcctcggaactcggcctgctcggcgccggatctggcaggctgctcaagcacgggcggggcgacgcggcggggggagaggaccacgggtgggtcgtcgtcgtcggcggcggcggcagggccaagcaggccaggaccgcgtccgtcggcaccggggacgcggcggccacggcggccgtgccgttcctgctgggctcctgcggcggccccggccacggcggggaacggatgctcagcttctcgtccgccgccgccgccgccccggatgatggcggtgccatgccgccgctgtactacgggaccccggcctcttgctcaggattgatgagctcggcgagggtgagaggccccttcacgccgccgcagtggatcgagctggagcaccaggccctgatctacaagtacctgtccgcgaacagccccgtacctcacagcctcctcgtccccatcaggaggagcgggagcctcgcatcgtctccctacccgcctccctacttcggcacgagcacattcgggtggggctccttccagctgggctactccggcaatgcggatctggagcctgggcggtgccgccggacggacggcaagaagtggcggtgctccagggacgcggtcgccgaccagaagtactgcgagcgacacatgaaccggggacgccatcgttcaagaaagcatgtggaagaccagcctggccatgccgcgaaagccatgtccgcggtggccgtggcggctgctgctgctgctgctacccagcatgctgctgctctggccggcgccggagctactgctgctgctggcctcgctgtcaatcggcaccggcagccggggaagagctatgccacgggtgcgactgatccatgctctctgcaatatagcagggaactggcgaacaaactgtcgaatgagagcgaaaacatgcaggactccgacaacctctcgatgctgacttccatgaacacaggaaacacaggcagcgtgttcccgttctcgaaacagaacactgctccttttgaagtgagcagctcaaggccagagttcggcctcgttccatcggattcactgacgagttcacctcacagttccttggagaacgtcaaaaacctgctcggctcacggagtatgaacgaacaccagaacccagcctccctgcaacacttcgtggactggcccaggacgcctgcccagggaggcctttcatggcccgaggcagaggacatgcaggctcagaggtcccagctctcgatatctgctccgatggcatcctcggagctatcatcggcctccacatctcccatccacgaccacgagaagctgattctgtcacctctgaagctgggccgcgagtataccccatctggcgtcgtcagcgctgcagcgaacagatacgaggttagccagctagaagcgacctgggcgacgatgttccgcgactcttcgacgggcggcccgttgggggaggttctggccaagaacaacagcaacgcggaagcaagaggttgcccgtcggcggcgccacctctaaccgactactactgctgggattcaggccacggcatgcagtcgtcccccgtgggagttctgcagaggacgaccgccttcggatcggtctccagcagcacgggcagcagccctagggtcgagagccacggcgcctgctgcgatggtaccagcaacctgatggatgatgatctcggctcagttgtagtgagccaccccagcatccgcctcttgtgagcccgctgagttctggccatggaaaaagcgtgaggggttttgtcatttgagactgatctgtcacttgagttcttcttttgtttccttttaacctggctttgtaactctcaccttctttggatcgtgaaaagcgctgcgatgtgtggtgtggctgggtttttggtgcgccgttgatgcgtagtaccattcatataaaagccagtatccgaccgatcggtctccgtctgtctgctg

SEQ ID NO: 1963 - DNA, 1811 bp, Zea mays
  Clone ID: PAT_MRT4577_35069C.1
ctcctcctaactacgcctgcctgtttcctcccccgcaggattgatgagctcggcgagggtgagaggccccttcacgccgccgcagtggatcgagctggagcaccaggccctgatctacaagtacctgtccgcgaacagccccgtacctcacagcctcctcgtccccatcaggaggagcgggagcctcgcatcgtctccctacccgcctccctacttcggcacgagcacattcgggtggggctccttccagctgggctactccggcaatgcggatctggagcctgggcggtgccgccggacggacggcaagaagtggcggtgctccagggacgcggtcgccgaccagaagtactgcgagcgacacatgaaccggggacgccatcgttcaagaaagcatgtggaagaccagcctggccatgccgcgaaagccatgtccgcggtggccgtggcggctgctgctgctgctgctacccagcatgctgctgctctggccggcgccggagctactgctgctgctggcctcgctgtcaatcggcaccggcagccggggaagagctatgccacgggtgcgactgatccatgctctctgcaatatagcagggaactggcgaacaaactgtcgaacgagagcgaaaacatgcaggactctgacaatgtctcgatgctgacttccatgaacacaggaaacactgcaggcagcgtgtttccgttctcaaaacaaaacactgatcttttcgaagtgagcagctcaaggccagagtttggccttgttccatcggattcactgacaagttcacctcatagttccttgaagagtgtaaaaaatctgctcagctcacggagtctgagtgagcaccagagctccgcctccctgcaacactttgtggactggcccaggacgccacctgcccagggaggtctttcatggccccaggcagaggacatgcccagagctcagaggtcacaactctcagtatccgctccaatggcatcctccgagctatcatcggcctccacatctcccatccacgaccacgagaagctgattctgtcacctctcaagctgggccgcgaccgcgagtatagcccatctggcctcgtcagcgttgcaggagcaagcagagacaaggttagccagctggaagcgacctgggcgacgatgttccgcgactcttcgacgggcggcccattgggggaggttctggccaagaacagcagcaacgcggaagcaagaagttgcccgtcggcggcgccacctctaaccgactactactgctgggattcaggccacggcatgcagtcgtcccccgtgggagttctgcagaggacgaccgccttcggatcggtctccagcagcacgggcagcagccctagggtcgagagccacggcgcctgctgcgatggtaccagcaacctgatggatgatgatctcggctcagttgtagtgagccaccccagcatccgcctcttgtgagcccgctgggttctggccatggaaaaagcgtgagggggagcatttacgacgtagtttgtcatttgagactgatctcctgtttctgtcacctgagttcttctttcgttgcccttatacctggctttgtaactctcaccttcgttggatcgtgataggcgccgtgatgtgtggtgtggctgggtttttggtgcgccgttgatgcgtagtaccatcatataaactagtggactggcgcgctccatcgcgcgcgtttgaatttagcaatacaaagttttgaaataacgattagtattaaatacaaagttttgaaataacgattaatattagcgcacgcgtt

SEQ ID NO: 1964 - DNA, 2450 bp, Zea mays
  Clone ID: PAT_MRT4577_35127C.1
cgtagctatagctggctagcttcctcctcctggctagctgctacccttcccggttctcaccgcgctgccattaaaacccccttccttgttaccacttcgaccttgagcaagcgcactcttcatgttgccgcctcgccgcagtagcagcttacatggatacgctgtttaggttggttagccttcaagcctccgaacagcagcagcagcagcaatcggcgtcctacaactcgaggagcaccacgtcgagcggctccaggtcgtcgtcgcaccagaccaacgcatcctacaactactactaccacagcaacagcagcggcggcggcggcggcgggcagtactactacggtcagcagcacccacagcagcaccagcaccagcagtactacctggagccgtaccagcaagaagaatgcggcaacacccaccacctttacatggatgaagacttctcctcctcgtcctcgtcgaggcagcatttccactcgcacggcgcggtggtgcagccgccgacgtcgtccacggccacgcccacggcgccgacgccctcgctgtccacgtcgtccacggccgctggggcggcgcacgcgctgttcgaggcggccgacctgtcgttcccgcctgacctcaacctcgacttctcatccccggcctcgtcgtccggcgggggcgcggcctcgtcggcggcggtcgggggaggtggcgggggaaggtgggcgagccagctgctgctggagtgcgcgcgcgcggtggcgggccgcgacagccagcgcgtgcagcagctgatgtggatgctcaacgagctggcctcgccgtacggggacgtcgagcagaagctggcgtcctacttcctccaggggctcttcgcgcgcctcacggcgtccggaccgcggacgctgcgcacgctcgcggcggcgtccgaccggaacacgtccttcgactccacgcggcgcacggcgctgcggttccaggagctcagcccgtggtcgtcgtttgggcacgtggccgccaacggcgccatcctggagtcgttcctggaggccgccgcggcgtcgccggagccccagaggctccacatcctcgacctcagcaacacgttctgcacgcagtggcccacgctgctggaggcgctcgccacgcggtccgccgacgacacgccgcacctgtcgatcaccacggtggtctcctccgcgccgtccgcgccgacggccgccgtgcagcgcgtgatgcgggagatcgggcagcggatggaaaagttcgcgcggctgatgggcgtgcccttcagcttccgcgcagtgcaccacgccggggaccttgcggggctcgacctcgacgcgctcgacctgcgcgacggcggcgccaccaccgcgctcgccatcaactgcgtcaactcgctgcgcggcgtggtgccgggcggtgcgcggagacgggacgcgttcgccgcgtccctccggcgtctcgatccgcgggttgttactgtcgtcgaggaggaggctgatctcgtggcttttgaccccggcgcgcccgatgaaagcggcgacacggaggcagcgttcctgaaggtgttcggcgagggcttgcggttcttctcggcttacatggactcgctggaagagagcttccccaagactagcaacgagaggctggcgctggagaggggagccggacgtgccattgtagacttggtctcgtgcccggcgtcggagtccatggagcggcgggagacggcggcttcatgggcccgccgcatgcggtcttccggcttctctccggtggcgttcagcgaggacgttgccgacgacgtgcggtcgttgctccgtcggtatcgggaaggctggtcgatgcgggacgccggtttagacgactcggaagccggagcaggcgtcttcctggcgtggaaggaacagcctctcgtgtgggcgagcgcgtggaggccatgatagagatccccgtcgacgcaagatgcaagctcggtgagtacgcctacgtggaacagcatgaaccacaggagaagcaagggcgccatccgccatacctagccggcgcgtggatgcaatgatccatgcagtggatcgggcgcacgtgcatgtgtgtatggcgagctgaatggctcacgcatctagggttttggagcagtagtagggattgctagttcacgcacacatggttgtatgcagcaaggtgatccaggaggaggtatggtcgatggttttaggttttagagttgcatctatttcaaatttggatcatcgatcgccacaagctcttggcgtgatgattccgattttcttgcttctttgtttttttgtcacatttctctgtgtttcttcatgtaattcaaggttaacaactttctgctccctctggagggatttacgtgcatggttttgtcatactttctctcattcctctgtttgcatttgcattgcatggttgttgagatgtcgcttcct

SEQ ID NO: 1965 - DNA, 1208 bp, Zea mays
  Clone ID: PAT_MRT4577_35131C.1
gccggccggccggccgggctcgtccgtttccgcatcggtgtatcttcgcccccggcgaaggcgctatcctcccgaccacccggcggtgccggtacgccggtaaggcaggtgaggaatccgtaggttgccagaccccgcgaccccgatcccgatcggtcgctggcgaggcggcgtgacctaccccggctcatcctctcaagccagacggtctggctgctgtgcatccccgttttggcggctaccttacctctggcaaggcaatcccccctcacccctggcaagcacgggagaacatggagagtgcttcagatgtacaaatgcaacatcgtgctgaagattccgagactacaattgagatcaaaatcaagacattggattcccagacatacaatttgcgtgtgaataaatgtgtgccagttcctctgttgaaagagaaaattgctactgtaactggaatattgtctgaacagcaacgcttgatttgtcgtgggagagtcttgaaggatgatgaactcttgtctgcttatcatgtcgaagatggtcatacattacatcttgttgttagacatccaggccagtcagctacatttggaaatgcagcaaccgaagctaacacatcaaattctggccgtcgtcatgggcccacagtggcaagaagtgtagtacttgaggctgttaatgtggatcctgggagcagtgaactcccagcttttgttgcgcagattctccaaagtgtgcttggaacaatcaatgcacaatctacgggtacaccaacatcttctgacaccggatctttagatccttcacaatcttccatcccaaatactataagagttgaactcgaccagcaacaagctcctctgctttttcagtctgaacccgcacatgagtcatctcaaccaaatgtcatccctgatgctttgacaactatgtctcagtacattaactttatgagggactcatttaggagggagggctttagtcttaatggacaaacagagggtaatgtggaaaacagaactgcagagcctgaatcagcttctgtgcttgggcttcataatgcatcattgctagctgaaaatatgcactctactaggcaaattattgttgaacaggctggtgcattgctgtctcaactctcaactcagctgggagatctagagaatgtaactgattctgcaatacgaagggacattcaaagtagtgca

SEQ ID NO: 1966 - DNA, 193 bp, Zea mays
  Clone ID: PAT_MRT4577_35394C.1
agctgcgaacaaaaaccttgctcattcttgtgtggtctcgtttcatagcgggagcaaacaaagggaacaacaggggtaccaacacctaattcaaaggttgaacggtcactaacacggtgacagaagctgacgggaacacgatactattgatagataagataactcggccgtagccaggatgggtccacaacat

SEQ ID NO: 1967 - DNA, 1276 bp, Zea mays
  unsure (1)..(1276): unsure at all n locations
  Clone ID: PAT_MRT4577_35583C.1
ctcgggcggcgggcgggggtcgctcgcctgctatagactacccacgcgtatgctaggcattcaccgtccacgttccatatggcttcctgcaggatggcactcctccttggcttgctgctgctagtagtagcttcgcccgcgatcgctgatgacgactccggtatctactaccagctggctcttatgtggccaggagcatactgcgagcagaccagcgctgggtgctgcaagccgaccaccggcgtctcgccggcgcgcgacttctacataacgggcttcaccgtccttaacgcgatcaccgacgctgcagtgacgggatgcagcaacaaagttccttacgaccctaacctgattaccggcatccaaggcctggatcagtactggagcaacatcaggtgccccagcaacaacgggcagagcagctggaaaacgncttgggaagaaggccggcgcctgctccggcctcagcgagaaagactacttcgagactgccctctccttccgtagccggataaacccactcgtacgcctcaaagccaaaggtatcgagccggacttcgggctctacggcctcaaggcgatcaccaaggtcttcaagagcggcatcaacgcgacgccggtgatccagtgcagcaagggccccttcgacaagtacatgctgttccagctctacttctgcgcggcggggaacggcacgttcatcgactgccccgcgccgcagcagtacacctgctccaaggagatcctcttccaccccttcaagaagtggatgctcaagcagcagctcaaccaggacgacgaccctttccagctgcctggcgtcgccatggacaactgatacaccgaccccttcaagaagtggatgctcaagcagcagctcaacgaggacgacgaccctttccagctgcctggcgtcgccatggacaactgatacaccgtaccgtcgtctcagtttgcgtttctgtcaagtgtgcatggaataatactgtaactgtgtttcctgccgggcaatgcactgtgatatgatgcccaacgaataaatgtcgcttttatttttattcgacttcccccctgtaccgtgtggaaataaacctattataagcatcgtgttgaaactcatgatatgcatgagcagctagtgaaaagtttgaattctagatgaattgaaacacactattatatgattgcgaaaaaaaaaaaaaaaaaagcggccaaaaaaaaaaaaaaaaaaaaaaaaaaaaaaaaaaaaaaaaaaaaaaaactcgagggggggccc

SEQ ID NO: 1968 - DNA, 2636 bp, Zea mays
  Clone ID: PAT_MRT4577_35585C.1
aattcggcacgaggcgttccatatggcttcctgcaggatggcactcctccttaattggcttgctgctgctagtagtagcttcgcccgcgatcgctgatgacgactccggtatctactaccagctggctcttatggtatgtataataataattattatatctaatctaattaagaagaaggcccggccgccggcctgactgcatgcatgggacgcccgcgtgcagtggccaggagcatactgcgagcagaccagcgctgggtgctgcaagccgaccaccggcgtctcgccgcggcgactggcacgcggcgcggccggccgggattcaccgtccacgttccatatggcttcctgcaggatggcactcctccttggcttgctgctgctagtagtagcttcgcccgcgatcgctgatgacgactccggtatctactaccagctggctcttatgtggccaggagcatactgcgagcagaccagcgctgggtgctgcaagccgaccaccggcgtctcgccggcgcgcgacttctacataacgggcttcaccgtccttaacgcgaccaccgacgctgcagtgacgggatgcagcaacaaagttccttacgaccctaacctgattaccggcatccaaggcctgaatcagtactggagcaacatcaggtgccccagcaacaacgggcagagcagctggaagaacgcctggaagaaggccggcgcctgctccggcctcagcgagaaagactacttcgagactgccctctccttccgtagccggatcaacccactcgttcgcctcaaagccaaaggtatcgagccggacttcgggctctacggcctcaaggcgatcaccaaggtcttcaagagcggcatcaacgcgacgccggtgatccagtgcagcaagggccccttcgacaagtacatgctgttccagctctacttctgcgcggcggggaacggcacgttcatcgactgccccgcgccgcagcagtacacctgctccaaggagatcctcttccaccccttcaagaagtggatgctcaagcagcagctcaaccaggacgacgaccctttccagctgcctggcgtcgccatggacaactgatacaccgaccccttcaagaagtggatgctcaagcagcagctcaacgaggacgtacgacgaccctttccagctgcctggcgtcgccatggacaactgatacaccgtaccgtcgtctctgtttgcgtttctgtcaagtgtgcatggaataatactgtatccctttcaaagccaaagtatcgagcccaaggcgatcacaacaagagcggcatcaacgcgacgcgtgatccagtgcagcaagggcctcgacaagtacatgttccagctagcgcggcggggaacggcacgttcatcgactgccccgcgccgaagtagtacacctgctccaaggagatcctcttccacccccccacgaagtggatgctcaagcagcagctcaaccaggacgacgaccctttccagctgcctggcgtcgccatggacaactgatacaccgtaccgtcgtctctgtttgcgtttctgtcaagtgtgcatggaataatactgtaactgtgtttcctgccgggcaatgcactgtgatatgatgcccaacgaataaatgtcgcttttatttttatcggaaaaaaaaaaaaaaaaaaaaaaaaaaaaaaaaaacttggcttctgcaggatggcactcctccttggcttgctgctgctagtagtagcttcgcccgcgatcgctgatgccggtatctactaccagctggctcttatgtggagcatactgcgagcagaccagcgctgggtgctgcaagccgaccaccggcgtctcgccggcgcgcgacttctacataacgggcttcaccgtccttaacgcgaccaccgacgctgcagtgacgggatgcagcaacaaagttccttacgaccctaacctgattaccggcatccaaggcctgaatcagtactggagcaacatcaggtgccccagcaacaacgggcagagcagctggaagaacgcctggaagaaggccggcgcctgctccggcctcagcgagaaagactacttcgagactgccctctccttccgtagccggatcaacccactcgttcgcctcaaagccaaaggtatcgagccggacttcgggctctacggcctcaaggcgatcaccaaggtcttcaagagcggcatcaacgcgacgccggtgatccagtgcagcaagggccccttcgacaagtacatgctgttccagctctacttctgcgcggcggggaacggcacgttcatcgactgccccgcgccgcagcagtacacctgctccaaggagatcctcttccaccccttcaagaagtggatgctcaagcagcagctcaaccaggacgacgaccctttccagctgcctggcgtcgccatggacaactgatacaccgtaccgtcgtctctgtttgcgtttctgtcaagtgtgcatggaataatactgtaactgtgtttcctgccgggcaatgcactgtgatatgatgcccaacgaataaatgtcgcttttatttttaaaaaaaaaaaaaaaaaaggcccctaaaaaataaaataaaaaaaaaaaaagtaaaaacatattgatattac

SEQ ID NO: 1969 - DNA, 389 bp, Zea mays
  Clone ID: PAT_MRT4577_35600C.1
ctggcttcttctccccctattaccaagtgcggttcggtttatggtaacttagggttttgtggatgggccatggcggcagctgatgtgaagtaccgatgcttcgtcggcgggcttgcctgggcacactcagcaacgagtcgctggagaatgccttcgcctgctaccgcgagatcctcgactacaaggacatcaccgaccgtgagacagggaggtctcgcggcttacgcttagataccttgtactacgagaactccatgctcgacgctatcgacaacatgaacggaaaggaactcgacggacgaaacatcaccgctaaccaagctcagacccgtgacggtggcggtggcggatgtagctacagtggctgtcgcggccgaggctgatatggt

SEQ ID NO: 1970 - DNA, 451 bp, Zea mays
  Clone ID: PAT_MRT4577_35623C.1
aaccgaaaattgatgatgttttgaaaaacaaagttttgaaccctggaccagtttggaagttttacctgcctggggaaaaaaaggacctgggattgtatctttgataagccctgctactaaaaatgttcacaaaacatggctttggaaaaatactggtgatccccacatcccccacccccaggcaatccggttgccaatgaggaggccgcctcaaacaaacccctgagctgggctttgcctatcaatcggaaccctgaaaggggagcaaaaaacgtaacccaccccaccctttccgaagaaggccacagaggaaggctctccaccgttttttccacaaatgcccaccttaaagttaggcctacctttgcggcccctctttttagaaggcttccccaggtggcccactccccttgggggccaagaccccgaaggggctctttttgaaaatccc

SEQ ID NO: 1971 - DNA, 343 bp, Zea mays
  Clone ID: PAT_MRT4577_35656C.1
gtttagaacctgtaaaatgttcactactggacagtcgcagtagaatctgtagcagccatggacgccagcggagccgtaagcaaggggaagaagggggcggccgggcgcaaggcaggcggacccaggaagaagtcggtgacgcgggccgtcaaggccgcgctggagttccccgtcgaacggatcgggcgctacctcaagaagggccggtacgcgcagcgcgtgtgcactggcgcccccgtctacctcgccgccgtactgtagtacctctgctgccaggttctagatttgccagggcacgcagcgaaagacaacatgaagacgcgcatcatctcgtgccacgtgc

SEQ ID NO: 1972 - DNA, 289 bp, Zea mays
  Clone ID: PAT_MRT4577_3574C.1
ggcgaaaaaaaacaaattttattcataaacaaaaggggttcacagatttttctccatacctacatgctcattgggggagacgcagttgaccacctaaagctggatacttacttattaaaactgatccagcatgggggaacatcggaagttcacatgcttacagacgacaaattttaataacaatagcctggcttggctgttttacagaataaccaaacgacacccccgaaattgcgccgttttaaaataaacaactcaaaagcaatattgccccagaagcccgttttac

SEQ ID NO: 1973 - DNA, 446 bp, Zea mays
  Clone ID: PAT_MRT4577_35832C.1
ataaatgtctttttttttttttgggaagccacatacattatacaaaaaattttttttttgaactataactcataagaaaactaaaagagggcaccaccaaagatgggggggggggggaacactgctaggtttgacaaagcaagttggttgaatggcagcaattgttgcagttgtaagagggtgccagcgttaggcccagcgccctggtagaacgccaacaactgtggttgcgtaaagaaggtagccgggctcacaccagctagctggctcaatggaagtagctgtagctgccgtaaataagcaagagagttcaatgctgccagttggatgaatggaaaaaattgctgggggtaggaaacaggtagctggctgaatggtagttcctgctcgtacaaaaaggaagcaaacttcaacgcagcttgatggtcgaacggaaaaaactgctt

SEQ ID NO: 1974 - DNA, 479 bp, Zea mays
  Clone ID: PAT_MRT4577_35964C.1
cggacgcttggtttccgctcgcggtcgcgggcggttcgagtcggaccccagagcccaatgcgccccgccgcgccgctctatgtcgcggaacggaagctaagtgcgtcacacgccagggccggtcgcgggcaccggaccggaagcacaggggcgccgtacgtgcagacatcggtcatgaaggtgctcgtcctcgccgtgctggcgctcgtctgcggcgtctccggcgctggtcagggcgaggaggatggcagaccgacgctgacggtcgcggtgggcgcggcgacggcgggctgagacgtctcgcagcgcgagaggatgcgacaagacaacgcacacccatggtaccagggatgggactgccactacatccatccgcacctgacgagccacatgcacggccgagccgacaaggttgaccagagatggggctggtaggcgcggggctgcacagtgaccaacttcgacgggacgctgatgct

SEQ ID NO: 1975 - DNA, 2626 bp, Zea mays
  Clone ID: PAT_MRT4577_360C.1
aaccaaagaaacttcatgcattggatgcaattcaaccattccaaaccaacttattgataattaatactagaaagtagagagacatgaaagcatagaaaatacagggtccagaatgtaaccacagataatgataagtcaggtaggtacgacacccagcaaccccttgcacgctatagcaaaagccagctcaagccaggtgaatgtctcggtagcaatcctttggtgatacacttcttttccgatttaagttgagatacagtagggttccgtctccaaagccaaggaagttacttggggccaacatccttcaacgcgcagatctgctcctcccccatcgcagactggacagtcacaacaagatccttcccgctttcgaacccttccttaatctgggccacaagagtctcatcagttgggagtctaagatcatccttagtgttgccatctgaagtaagaaggctcacaaatccatcctcagaaatatcaatcagctgatactcagtacggttcacatgcggaatgtcacagttgtgtgatgaaggaacaatatcttcaagctttttcccattgaatatgtctatggcgacaaagtggcatttggcgtggccatgcttaccagtcttggaggtagaaacctccacaaccttgcagggacggttcttgatgacgatgaagccgttcttacggacggtgccagcctgctgcgggtaggtcttggacgccccagcgtcggccttcgattcgaagtggtgctcctccgagtccgacatggcgatccctgtcttggatggatcaggcggaggcggaggagcagagagagaagaaatttttttttttttttcagagatcaagaaaacaataacgccaaacttaataacccagtagcaaagcgggggaataaagtcttacaacgtaagttgtaaaccacacaacgacagatagataagaaccgacagaaacataacacgataggagccactcagggcagatcacaggatagcagtggcacacaagcccgacgacgccgcgccagtagagcgtctagtactcgtcaccctcgtcgccgtcctcaccctcgtcaaactcagcaccgacctcctcgtagtccttctcaagcgccgccagatcctcacgagcctcggagaactcgccctcctccataccctcaccgacgtaccagtgcacgaaggcgcgcttggcgtacatgaggtcgaacttgtggtcaatgcgggagaagacctccacaacactggtggagttggagatcatacacacggcacgctgcaccttggccagatcaccgcctgggacgacgctgggaggctggtagttgattccgcacttgaagccagtcgggcaccagtccacgaactggatggggcgcttggtcttgattgtggccacagcagcgttcacgtccttgggaaccacatcaccacggtacatgaggcagcatgccatgtacttgccatggcgggggtcgcacttggccatcatggaggatggctcgaaggcgctgttggtgatttcggccacggacagctgctcgtggtaggccttctcagcagaaatgactggagcgtaggacgaaagcatgaagtggatcctcgggtagggcaccaggttggtctggaactcgttcacatcaacgttcagagcaccatcgaacctcagggaagccgtcagggatgagatgacctgggagacaagcctgttgaggttggtgtaggttgggcgctcaatgtcaagggagcggcggcagatgtcatagatggcctcattgtcgagcaggacagcaacatcagtgtgctcgaggagagagtgggtggacaggacactgttgtatggctcaaccacggatgtggacacctggggggatgggtacacggtgaaaccgagcttggacttcttgccatagtcaacagacaggcgctccaggaggagagaaccaagcccagagcccgttcctccaccaacagcgttgaagacgaggaagccctggagaccagtgcaattatctgcaagcttcctgatgcggtcaaggcacaggtcaacaatctccttgccaatggtgtagtgaccacgagcgaagttgttggctgcatcctccttgccactgatgagctgctcaggatggaagagctggcggtaggtgccagtcctcacctcatcgatgacagtgggctcaaggtcaacaaaaacagcacgggggacgtgcttcccagcgccagtctcactgaagaaggtgttgaaagcatcatcacctcccccaatggtcttgtcaccgggcatctggccatcagcctgaatgccatgctcgaggcagtacagctcccagcacgcgtttccgacctggataccagcctggccgatgtggatcgagatgcactccctcatggtgttgttgaacggggggagcggcggccggtggtgagaaatgggagaagggggggaattggggaaagctttgagtcgcggagataggcgagtacgaagacgcctgtctctgcggttctcagtgtagggttccaccggtttcctctcgacgccctttatagaacggaacgacagcctgggccacgatggacggatggagtgccggcgaagcgaaagcgcggacgcgtgg

SEQ ID NO: 1976 - DNA, 429 bp, Zea mays
  Clone ID: PAT_MRT4577_36122C.1
tacccgttccattaccccatatcccagatccaattcgtgtagtaattgctcctctgccgtcatgtgcctctctgaggagaagacctacactggacgcgagcacaagggcaaggatctctcgcacgcggacttcgtgcgactcgagattgagctcaccgcggtcgaaatgcccagcctcatggcctgccgcgccgcgttcgtccctgacagacccttcgccggcgctaggatctgggagcgtgtccacatgaccatccagaccgtcggactgattgagaccctcaccgcgctcggcgccgaggtccgctggcgctactgcaacatgttattgacgcaggaccacgccggcgtcgacatagcgcgcgactcggactgcgtgttcgtctggaagggggagaccctcgaggagtactggtggtgcaccgagcg

SEQ ID NO: 1977 - DNA, 268 bp, Zea mays
  Clone ID: PAT_MRT4577_36165C.1
ctctccgcctctgctcccacacccgtgcgtgtccgctccctccggtctgcgctcccacagcctcacccctgcgcccccgccgattcgcgtcgacctttgttggaaggaacgatggagcagaccttcatcatgatcaagcccgactgtgtccatcggggcctgatcgggggcatcatcagtcgcttcgagaagaaagggttctacctcaatgggatgaagttcatgaacgtggaggggtccttcgcgcacagcactacgctgacctttc

SEQ ID NO: 1978 - DNA, 3156 bp, Zea mays
  Clone ID: PAT_MRT4577_362C.1
aagtctgtccaccttccgcgtagactcggatcccacctagtcaatggagtgagcaacgagggttgggttcggcagcagcgagggaaaagccaaagccccccagggcagcaggaagcaatagaagcgagcgaggcagcggcgtggggcgaggagtggaggacaccgatccccgccggagagcgcgtccatcccaaatggcgactgcagcttcgcccgccgctgcctttccccacatcctctccctctcctcctaatcccctcccaatcccccccccctctctctctcttcctcgccagctggttcgttccgcacccgccgccgcattgggtgccgaggagggacgcaatggagcagtacgagaaggtggagaagatcggggagggcacgtacggggtggtgtacaaggcgctggacaaggccaccaacgagacgatcgcgctcaagaagatccgcctcgagcaggaggacgagggcgtcccgtccaccgccatccgcgagatctctctcctcaaggagatgaaccacggcaacatcgtcaggttacatgatgttgtccacagcgagaagcggatatacctcgtcttcgagtacctggatctggacctcaagaagttcatggactcttgcccggagtttgctaagaatcccactttgattaagtcatacctctaccagatactccgtggcgttgcgtactgccattctcatagagttcttcaccgagatttgaaacctcagaacttgttgatagatcggcgtaataatgcactgaagcttgcagactttggtttagccagggcatttggaattcctgtccgtacatttactcatgaggtagtgacattatggtacagagctccagaaattctgcttggagcgaggcagtattccacaccagttgacgtgtggtctgtgggctgtatctttgcggaaatggtgaaccaaaagccactattccctggtgattctgagatcgacgaactgtttaagatattcagggtgctaggtacaccgaatgaacaaagttggcctggagtcagttgtttgcctgacttcaagactgctttccccaggtggcaagctcaggacctggcaacaatagtcccaaatcttgaacctgctggcttggaccttctctctaaaatgcttcggtatgagccaagcaaaagaatcacagctaggcaagcacttgagcacgagtacttcaaggaccttgagatggtacagtgacctgctaaatgtgcttggcgttgctttggcatttgtaattgtatgagctgagtcgctcattcctttttatgggcgtctgtactctctcattctctctgcatttttgtcgttcagctggatattttgaatctggtgtgttttgagatgtattaaggaatatcaaatagattaccgccttggtctctatttactgaaagtaaatatcctccatgtttatttcccccgtagcaaaaaagaaaaaaaaaaaaaaaaaaaaaaaaaaataaaaaaaaaaaaaaaaaaaaaagggggcggccgccctgctgggagctgtactgccttgagcatggcattcaggctgacggtcagatgcccggtgacaagaccattgggggaggtgatgatgctttcaacaccttcttcagtgagactggtgctgggaagcacgtgccccgtgctgtttttgttgaccttgaacccactgtcatcgatgaggtgagaactggcacctaccgccagctcttccaccctgagcagctcatcagtgggaaggaggatgcagccaacaactttgcccgtggtcactacaccattggcaaggagattgttgacctgtgccttgatcgcatcaggaagcttgccgacaactgcactggtctccagggcttcctcgtcttcaacgctgttggtggaggaacgggctctggccttggttccctcctcctagagcgcctgtctgttgactacggcaagaaatccaagcttgggttcactgtgtacccttccccccaagtttctacttcggtagttgagccatacaacagtgtactgtccacccactccctcctcgagcacactgatgtggctatactgctggacaatgaggccatctacgacatctgccgccgatcccttgacattgagcgcccaacctacaccaacctcaacaggcttgtgtcccaggtcatctcatcccttactgcctccctgaggttcgatggtgctctgaacgtggatgttaacgagttccagaccaacctggtaccctacccgaggatccacttcatgctttcttcgtacgctccagtcatctctgctgagaaggcctaccacgagcagctctctgtggctgagatcaccaacagtgccttcgagccatcttccatgatggccaagtgcgacccacgccatggcaagtacatggcctgctgcctcatgtaccgtggtgatgtggtccccaaggatgtgaatgctgctgtggccaccatcaagaccaaacgcaccatccagttcgtggattggtgcccgactggcttcaagtgcggcatcaactaccagcctcctagcgttgtgcctggtggcgacctggccaaggtgcagcgtgccgtgtgcatgatctccaactccaccagtgttgtggaggtgttctcccgcatcgaccacaagttcgacctcatgtacgccaagcgtgccttcgtgcactggtacgtcggtgagggtatggaggaaggtgagttctctgaggcccgtgaggacctggcggcgctcgagaaggactacgaggaggtcggtgctgagttcgatgagggcgaggatggcgacgagggtgacgagtactagagaagtttgctgatgacgcagcatcaggccagtgtgctgcccttatcccgtgatctgccgagagttgctcctgctatcgtgttatgtgtgtctgttctgaagtattgtgtggtttacaacacctgatgttgtaagagttgttaattcccctgcattgctaccgggttattgagaataattatggctgtttacgttgttgcttcatctcggagatgctttacatttaccaccttgttcatcttttgtcatcagtaaaatcgagtcggcggatgattttcttgaaaaaaaaaaaaaaaaaaaaaaaaaaaaaaaaaaaaaaagcggcc

SEQ ID NO: 1979 - DNA, 284 bp, Zea mays
  Clone ID: PAT_MRT4577_36316C.1
ttttgggggatttttttatatgttcgtttttttttttttttgagacacatcaactccaatgacaagctcgctgcttaattggtcaattttagcagaatcctagcccaaacagtcggagaataaaaaaggtcactgtgccttggaattacggggggattagctgaaacaaccctccacttctaatctatgcacgtgttcatatagcgaaggcagtgacttagccccaccagcttgctttgtgcgagtagtattcggctagaacacatataccgacagacattttt

SEQ ID NO: 1980 - DNA, 421 bp, Zea mays
  Clone ID: PAT_MRT4577_36430C.1
aacggccggcatgtgctggcattcggccttgagctatctggaggattcggccttagcttatttctgggaagcgacaatctcacacaaaaactttattattgagactataacttattacaaactaaaagagggcaccaccaatgatgggttgttggtagaaacgctgctgggttggtcaaagaaagttggttgggggggtgaaattgttgaagttgtgagagggtgtcagcgttaggcgcagggtgctggtagaacggaaacaactgtggtatgtatacaagtaagggagtagggttaacaccagctagttgtttgaatggtagtagttgttggtgttgaaaataagtatgagagttaaatgctggcagttggatgaatggaagaaattggtggggtaaggtagtaggtagttggatgaatg

SEQ ID NO: 1981 - DNA, 1602 bp, Zea mays
  Clone ID: PAT_MRT4577_3650C.1
cattgggtacctcgaggccggccgggatatcggttaggttgtggtatttcattgctacaacatgggttattgtaaaataagacatgtcatttggataagactgttgtgcttgtatatatgtgtggaaccttcgcttgggtccgggctctacaccatagctgaagcctcagcttgcaggttgcagccgatgagaatcgagcgtgatctccacatggccacaggggacggagaaactagctacacgaaaaattctaggattcaagagaaaactatgtttcagatcaagcctgtccttgaggaggccacaagagcagtatacacagctctccaccctcaaaccatggttgttgctgacttaggctgctcatctgggcctaacacactacgcttcgtatccgaggtgattggcatcatagctcgccattgcaaagaatatggccgacaacatgaccacacacagcttcagttcttcctgaatgacctgcccggaaacgacttcaacaatctcttccagctgatccagcagttcaataagtcgacggcaataaaccacaagagtgaggcagctgaggcactacctcctccgtgctatatctctgggttgcctggctcctactacactaggatcttccctagcgaaagtgttcaccttttccattctttgttctgccttcagtggcgctctgaggcaccagagggcaacaaaaaaacatgcctagatatctacatcacaaagactatgtcaccgtcgatggtgaagttgtttcaacaacagtttcagaaggatttctccctcttcctcaggctacgctatgaggaactcgtgtccggtggccaaatggttctaacatttattggaaggaagcatgagaatgtgttcactggagagtctaaccatctttacggattgcttgcgcagtcactgaaatccctagttgatgagggtcttgtggagaaggaaaaacttgaatcattctatttaccaatgtattcaccatcggttggtgaagtggaggccatactaaagcaagttgggttgttcaacatgaatcatgtaaaagtattccagacaaattgggatccctacgatgacttggaaagtgatgttgtgcataacagtattaggagcggtgaaaatgttgctaagtgcctacgagcagttatgcagccgctagtcgcaagccaatttggagaacccattctcgataagttattcaaagagtacgctcgccgtgttgccaaacaccttgagaatgagaaaaccaagcatgctattattgtcctatccatcgagaaagcaattcacctgtgaagtgtattgtttctcactatctcgcttggcatgctactatttgtgtagaaaactttgtatgtatgtttttttgtgtgtttgtgtcactagtgtattgaattacatatggtgtttttgttgttttatttatcacttctcctgtattcctatattttatatgtctaagtttttaatgtgatttcatgcaacccttgtacaagcaattaatacaaataaattgcaccttttatgatcaaaaaaaaaaaaaaaaaaaaaaaaaaaaaaaaaaaaagggcgccctcgcgatctag

SEQ ID NO: 1982 - DNA, 409 bp, Zea mays
  Clone ID: PAT_MRT4577_36533C.1
gtgagcgatcaaggtatctgagctccagtcctcgatagctagctagtagaccgccctaccacaagtgttcttcacaaggtaaagagagaccacggcaagagatctcaatggcgtctgccaccgggctcaagtcctccttccgtcccaagaagtccgaatggggagccaccaagcagggcgccgagcccaggccgcccaccgtctccatgcgccgccgcgcctccgcctacgtcgatgagctcgggaagaccggtaaaacgatcgcgcaccggggaggggcatcctgccgatgcaccaatcgagcgcaactcgtggaaagcgtgtggcgtccatcggtctggagaacactgaggacaaccggcatgcagtagcgcacgatggtggttcacggagagcgcaccatgggcca

SEQ ID NO: 1983 - DNA, 1477 bp, Zea mays
  Clone ID: PAT_MRT4577_3653C.1
gccggcgggccggggaaggggattgtaaatgtgctagcttagcttgtatgtgctgagctttggctccccggcgcaccgctgaagcctcaactcgcagccagccatgccgatgagaatcgagcgtgatctccacatggccatagggaacggagaaactagctacacaaaaaattctaggattcaagagaaagctatgtttcagatgaagtcggtccttgaggaggccactagagcagtatgcacagctctcctcccacaaaccatggttgtggccgacttaggctgctcatccgggcctaacacactgcgcttcgtcactgaggtgactagaatcatagctcaccattgcaagctggagcacaaccgacgacatgaccacctgccgcagcttcagttctttctgaatgacctgcccggtaacgacttcaacaatctcttccagctcatcgagcagttcaataagtcgtcgacgacacacaagggagatgcagcaactgaggcactacagcctccttgctatatctccggattgccaggctcctactacactaggatcttccctagcgaaagcgttcatcttttccactctctgttctgccttcagtggcgctctcaggcaccagagcaactgaagggcacccaaaaatcatgcctagatatctacatcacaaagactatgtcaccatcgatggtgaagttgtttcaacagcagtttcagaaggacttctccctcttcctcaggctacgctatgaggaactcgtgtctggtggccaaatggttctaacatttattggaaggaagcatgaggatgtgttcactggagagtccaaccatctttacggattgcttgcgcagtcactgaaatccctagttgatgagggtcttgtggagaaagaaaaacttgagtcattctatcttccgatctactcaccgtcggttggtgaagtggaggcgatagtgaagcaacttgggttgttcaacatgaatcatgttaaagtatttgagataaattgggatccctacgatgactcagaaggtgatgatgtgcataacagtattgagagcggtgaaaatgttgctaagtgcctacgcgcagttatggagccgctggttgcaagccaatttggagaacgcatactcgacaagttattcaaagagtacgctcgccgtgttgccaaacaccttgagaatgagaaaaccaagcatgctgttcttgtcctatccatcgagaaagcaataattcatgtgtgaagtgtcttgtttctcactatatatctttccattattatcacatggtaatgtatgtttgttttgaatgtgcatgtttgtgtcactagctggtgtattgaatgtcatggtgtttttgttgttttctttatcgcttctcctatattttagatgcctgaattttaaggtgatttcaggcaacactcttgtacaaggaattaatacaaataaattgctccttttatgatc

SEQ ID NO: 1984 - DNA, 364 bp, Zea mays
  Clone ID: PAT_MRT4577_36578C.1
cccacgcgtacggccacgcgttcgggctgctcaagaatgctactagttcaaatatgtctggttaccaagcaatgagcatgcatgttatcatccacgctttttgtaggaggggcttcttatggaaccgcatgatcacagtctcagagacgagtctgccaaatatggacaaccatatcgaacgctgagattatcctcgatccgtagcctgggaggtccagaggatgagactctatcacttacacgtgtactgacgaggctactgctgccataacgggcatggctggatagactctggatggaccgaacatacggcttaatcactgctgcgagaggacaggtggcttccgccgcactggcggttata

SEQ ID NO: 1985 - DNA, 412 bp, Zea mays
  Clone ID: PAT_MRT4577_36609C.1
gcaacatataaagcacaatagtgttccaacaatggcagccaaaatatgatgcttgcttatgctcctaggtcttactgcaagtgctgctaccgcaaccattttattacaatgcttacaagctcctatagctgcctatcttactgcatacctctgaccagcggtgtctacagtatgtgaaaacctaattcttcaaccctacaggatccaacaggcaatcgcagcacgcattttacctgtatcacccttgttactccaacaactgtcagccctattacagcaggtacctatggtgcatttgatgacacatgacatcaaggtacaacaactacaacaacttgtgctaggaaaccttgctgcctactgtcagcaacagcacgattgttgcattcaaccgactggctgcatagaactc

SEQ ID NO: 1986 - DNA, 1280 bp, Zea mays
  Clone ID: PAT_MRT4577_36673C.1
ttcttatgcgtggccattgggctttgggctggtctcgccatcggcttcaccaccgagtacttcaccagcaacgcctacagcccggtccgggacgtcgctgactcatgcaggacgggcgctgcgaccaacgtcatcttcggcctcgccctcgggtacaagtccgtcatcgtgcccgtcttcgccatcgccgtgtccatctacgtcggcttcacgctggcatccatctacggcatcgcggtcgccgcgctcgggatgctgagcacggtcgccacggggctggccatcgacgcctacggccccatcagcgacaacgccggcgggatcgctgagatggcaggcatgagccgcaggatccggcaaagaaccgacgcgctcgacgccgccggcaacaccacggccgccattggcaagggattcgccatcggatcggctgcgctggtgtcgctggcgctgttcggcgcgttcgtgagccgcgcgggggtcgaggacgtgaacgtgctcaacccgaaggtgttcgtcggccttctcgtgggggcgatgctcccgtactggttctcggcgatgacgatgaagagcgtgggcagcgcagcactgaagatggtggaggaggtgcgccggcagttcatcaccatccctgggctcatggagggccgcgccgcgccggactacgcgcgctgcgtcaggatctccacggacgcgtcgctcaaggagatgatgccgccaggagcgctggtgctgctcgcgccgctggtcgccggcaccttcttcggagtcagcacgctcgcgggactactcgccggcgcactggtttccggtgtccagattgccatatctgcttcgaacagtggtggagcatgggacaatgccaagaaatatatagaggcaggtgcgtctgatcacgccaagtctctgggccccaaggggtcggacgctcacaaggctgccgtgatcggcgacaccatcggcgaccctctcaaggacacctccggaccgtccctcaacatcctgatcaagctcatggccgtcgagtctctagtatttgcgccattcttcgccgcccatggaggcctgatattcaagtagacagggcggaggattattgtacaacgtgattctgtagtaaaggcgcactggttgaacaaatgattctgcatcgtagattgagtagccatgacctgtgtattgttttcacatctcatgaatctgttttgcagacatgtgtaatttagtgaaagatattacaatcctaacaagagcaagaatgttttttgattgtggcc

SEQ ID NO: 1987 - DNA, 328 bp, Zea mays
  unsure (1)..(328): unsure at all n locations
  Clone ID: PAT_MRT4577_36721C.1
tcttcttcacaagtttttttttttttttttcnngaganncgaggcctttggggggggggtcaagtcctccttccttcccaagaagtccgaatggggcgccaccaggcacgccgccgcgcccaggccgcccaccgtctccatggtcgtccgcgcctccgcctacgccgatgagctcgtgaagaccgcgaaaacgatcgcttcgccgtggcggggcttcctggcgatggacgagtcgaacgcgacgtgcggtaagctggctggcgtccattcggctggggaacaccggtgccaaccgggtggctttcctgactgttggtggtcccggctc

SEQ ID NO: 1988 - DNA, 335 bp, Zea mays
  Clone ID: PAT_MRT4577_36948C.1
aaaaaaaaaaaaaaaaggaaacttgttttattgttaataaagaaacacgcgcgagggcttgtcaacttattattcggtacaacacaaatttttttttttaaaatgcaccccccacaaagggttgctgtaaaaacatggggggaatcgccatggccattgggttaaacatgaatggaaactggtgttgcaaaataatctgaaaaacggggtcccagggacattggggcattattttttgcaacattatgctcggaaagaccattggggacattatgctcggcattataaatggggacatcatgttaggcgtcatcatttggggcataatcactggc

SEQ ID NO: 1989 - DNA, 781 bp, Zea mays
  Clone ID: PAT_MRT4577_36961C.1
aggttaaagcgacgccgccgccgcaagccgtccgcctcgctcttctcccgagcctggtcctcatcctctcgcctctcctcctcaacacagatttaacaatctagagttagcgcctccgtccgtctcgtagctgctcagatggcgatcaagaggaccaaggccgagaagaagatcgcgtacgaccagaagctctgccagctgctcgaggagtacaccaaggtgctcatcgccgtcgccgacaatgtcggctccaagcagctccaggagatccgcaagggtctccgcggtgactccatcgtgctcatgggcaagaacaccctcatccgccgctgcatcaaggtgcactcggagaagaccagcaacaaggacttccttgagctcagcaacctcctcgtcggtaacgttggcctcatcttcaccaagggtgacctcaaggaggttcgcgaggaggtcgccaagtacaaggttggtgctcctgctcgtgttgggctagttgcacctgttgatgtggtggttccccctggcaacactggtctggatccctcccagacgtccttcttccaggtgcttaacattcccaccaagattaacaagggtactgtggaaattactatcccagtggagctaatcaagaaaggtgacaaggtgggctcctctgagtctgccctgcttgccaagcttggtatccgccccttctcatatggactggtcatctgcaatgtctatgacagtgggtcagtcttcagcccctgaggtcttgaccttactgaggaagacctga

SEQ ID NO: 1990 - DNA, 3641 bp, Zea mays
  unsure (1)..(3641): unsure at all n locations
  Clone ID: PAT_MRT4577_37056C.1
ggcgcccgcgctagaaaagagtccatctcctccctccctggctcggctgtcggctcccttcgccaccgccttcacctccttccctaattcggcatcggcccactgttccccggcggcggcggagatgagcgtgtggaactacgtcgtcacggcgcacaagcccacaagcgtcagccattcctgcgtcggcaactttaccagccccaaccagctcaaccttattatcgcgaaatgcacccggatcgaaatccatttgcttacccctcagggccttcagccgatgcttgatgtgcctatatatggaagaattgcaacgattgagctcttccggcctcataatgagactcaggactttcttttcattgctacggagaggtacaaattctgtgttctgcaatgggacacagaaaaatcagagctaatcaccagagccatgggtgacgtttctgatcgcattggccgccctactgacaatggacagattggaatcattgaccctgactgtagactcattggtcttcatctctatgatggcttatttaaggttataccatttgacaacaaagggcagctgaaggaagctttcaatatcagacttgaagaacttcaagtactggacatcaaatttctacatggttgtgctaaacctactattgttgtcctctaccaggataataaagatgtgaggcatgttaagacttatgaagttgcactgaaggacaaagattttgttgagggtccttggtcccagaataatgtagataatggtgctggtttattaataccagtaccagctccacttggcggtgtgataataattggcgaggaacaaatagtttactgcaatgccaattccacatttaaagcgataccaataaaacaatccatcatcagagcttatggacgggttgacccagatggttctcgatatttactcggtgataatactggaattttgcatttacttgtccttacccatgaacgagaaagggttactggtttgaaaattgaatacctgggagagacttcgattgcatcatcgatttcgtatcttgataatggtgttgtttatgttggttcacggtttggcgattcacagctggtgaagctgaacctccaagctgatgcaagtggttcatttgttgaaattcttgaacggtatgttaatcttggaccgattgtggacttctgcgtggttgaccttgataggcagggtcaaggtcaggtggtcacttgttctggggcgtttaaagatggttcccttcgggtggttcgtaatggtatagggattaatgagcaggcttcagtagaactccaaggcataaagggattatggtcattgaaatcttcgatcaatgatccatttgacatgtaccttgtcgtgagctttataggtgagacacgattcttggcaatgaacatggaagatgaactagaagagacggagatagaggggtttgatgcacaacctcagcctctctcttgtcaaaatgcgatcaatgatcttcttatacaggttactgctaattctgttcggttagtcagttgcacctcccgggagttagtgaatcaatggaatgcaccagcaggattctcagtcaatgttgcttcagctaatgccagccaggttctgttggcaaccggtggtggccatcttgtttacctggaaattagggatgctaaacttgttgaagtgaagcatgctcagctagaacatgagatttcttgtcttgatttgaacccaattggggagaatccacaatatagttccctagctgctgtggggatgtggacagatataagtgttagaatattttcgcttccagatcttgaattgataaggaaggaaaatttgggtggagaaattgttcctcggtctgttctgctgtgcaccttggagggggtttcgtatttgctttgtgctcttggggatggtaatttgttcagttttctactgaatgcaagtacaggtgaactgactgatagaaagaaggttaccctcgggacccaacccatcagccttcgtaccttctcatcaaagggtaccacccacgtgttcgcttcgtcagataggccaactgtcatctatagcagcaataagaagcttctctacagcaatgtcaatttgaaagaggttaatcatatgtgccctttcaatacagccgcttttccagacagtcttgcaattgctaaagagggtgaactttcaattggaactatcgatgatatacagaagcttcatatccgcacaatcccccttaatgaacaagcacgtcgcatttgtcaccaggagcaatcaaagacactagcattttgcagtttcaagtacaaccagagtgtggaggaaagtgagactcacttaatacgtctgctagatcatcagacttttgagtccctgtgtgtgtatcctctagaccaatatgaatgtggctgctccatcattagctgttcgtttgcggatgacagtaatgtttattactgtgtgggaactgcatatgttatacctgaagaaaatgaaccgaccaagggccgaatccttgtatttgcagttgaagatggaagtttgcaattgattgtggagaaagaaaccaaaggagcagtttattcgctgaatgcattcaatgggaaattgttggctgctatcaaccagaagattcaattgtataagtggatgtcacgcgaggatggttcacatgagctgcagtctgagtgtggccaccatgggcacatacttgccttgtatactcaaacacgtggtgacttcattgtggttggcgatctgatgaagtcaatttccttgctggtgtataagcatgaggaaagcgcgatcgaagagcgtgctagggattacaatgcaaactggatgactgcagttgagatgcttgatgatgaagtctatgttggggcggagaatggctataacttattcaccgtgcgcaagaacagtgatgctgccacagatgacgaaagggccaggcttgaggtggtgggagagtaccaccttggggagtttgtgaacagattccgccatggttcactggtgatgcgccttccagactcggatatagggcagatccctacggtcatctttggcacaataaacggggtgattggcattattgcctccctcccgcacgaccaatacatcttcctggagaagctccagtcgacccttgtgaagtacataaagggcgtcggaaacctgagccacgagcaatggcggtccttccataacgacaagaagacggcggaggctcggaacttcctcgacggtgacctgatcgagtctttccttgaccttagccggagcaagatggaggaggtgtccaaggcgatgggcgtccccgtggaggagctgtccaagagggtggaagagctgacgaggcttcactagtgtagatggaacatggaagcgttgcttgtaagcaagtagtaacttgttccctgagctgtagcctccgcggctcgcacgatcaaagtgttcggccgtggctgcagtctatcctatgctatatcctatcgtgatttgtttgtttgagctgtgccagtttcttttctttattattaatgcttaatgttaaaattaaaaaaaaaaaaaaaaaaaaaaaaaaaaaaaaaaaaaaaaaaaaaaaaaaaanaag

SEQ ID NO: 1991 - DNA, 109 bp, Zea mays
  Clone ID: PAT_MRT4577_3717C.1
agacatgttctgccatatgatggcgttgctgtatgggggctattctgtttggcaaccatcttggtgtcgtcaatagcgcacttgaatatctcgcgaaggatctagggat

SEQ ID NO: 1992 - DNA, 279 bp, Zea mays
  Clone ID: PAT_MRT4577_37192C.1
gttgcttagtcatgtctggccgtggtaaaggtggaaaaggtttgggtaagggaggggctaagcgtcatcgcaaggttttgcgcgataacatccagggcatcactaagccagctatccggcgccttgctcgtcgcggcggtgtcaagcgaatttctggccttatctatgaggagactcgcggtgttctgaaggtgttcctggagaacgtgattcgtgacgctgtcacttacacagagcacgccaaacgcaagaccgtgacagcaatggatgtggtctacg

SEQ ID NO: 1993 - DNA, 1127 bp, Zea mays
  Clone ID: PAT_MRT4577_37203C.1
aattcggcacgacggaggaaccagtctaagccaccacccaggccccagctcacctctttcctctcttctcatgcccacgcgctcgcctatctcatagtccttccccattccgcctctctagctggcctgtcgaggaccctcgccatcctccccaggcgcaccaccaaacggtccaaacccccagcggcggcgctaggatttgagtctcagcgcgccggcaccgccaccgccaccggcggtgatggcagggcaggagcgtaggacaatcgatctggaggagggatgggcgtttatgcagaagggtatcaccaagctgaagaacatcctcgagggcaagcccgagcctcagttcagctccgaggactacatgatgctctacacgacgatatacaacatgtgcacgcagaagccgccgcacgactactcgcagcagctctacgacaagtatcgggagtcgttcgaggagtatatcacctccatggtactaccttcgctaagggagaaacatgatgagtttatgctgagggagctagtgcaaaggtggtcaaaccataaagtcatggttcgttggctctcgcgtttctttcattaccttgaccggtacttcatatcaaggaggtcacttaccccacttaaagaagttggtcttacttgcttccgagagttgatatatcaagagattaaagggcaagttaaagatgcggtgatagctctgatagacaaagaacgcgagggtgaacagattgaccggggtctgttgaagaatgtattggatatttttgttgaaattgggctgggtcaaatggagtgttatgagaatgactttgaagatttcttgctcaaggatactacagagtactactctgtcaaggctcaaagctggattcttgaggactcatgtggtgatttgcgtgcttatgggtcctgccacagcaagggctgctcgcatttgtaaattggccgttaaaatagacaatcttgacctgcattagatgatatgatgatgatatgaggaataggagaggcactcaagtacttgtttgccatctatgccaatgttttacctatatgtctgtatcaatgtttcagttaactgagatgagattatgcttgggggttgctttgct

SEQ ID NO: 1994 - DNA, 1132 bp, Zea mays
  Clone ID: PAT_MRT4577_37333C.1
gccttctcttctccagcgtccgatctctcccactcgccttcctcaccgcagctctcccggctcggtcccttcccacctccgccctccccccgcgctcggtcgctcgccacttgctctcccccccctccacgttgctcgcgcccgcgcttatataagcaggaggagctcatggcggacgctccggcgagccctgggggcggaggcgggagccacgagagcgggagccccaggggaggcggaggtggaggcggtggcagcgtcagggagcaggacaggttcctgcccatcgccaacatcagtcgcatcatgaagaaggccatcccggctaacgggaagatcgccaaggacgctaaggagaccgtgcaggagtgcgtctcggagttcatctccttcatcactagcgaggcgagtgacaagtgccagcacgagaagcggaagaccatcaatggcgacgacctgctgtgggccatggccacgctggggtttgaggactatattgaacccctcaaggtgtacctgcagaagtacagagagatggagggtgatagtaagttaacttcaaaatccagcgatggctccattaaaaaggatgcccttggtcatgtgggagcaagtagctcagctgtacaagggatgggtcagcaaggaacatacaaccaaggaatgggttatatgcaacctcagtaccataacggagatatctcgaactaatgaagacatggaccttttctgcaacagctgctcttccccgaggcgggtttttggtcgcagttatttactaagtaagacaccttgcggtgaccattaaagagtaaccaatcaccctgggtaggtcaatttttatctgcaagaactgatgaggccgcttggtaggagtaaatcgcttttcctgggaacgattgttggttagcgccgctactgtatgtatattgagataccttaacgattggtcttttggctgccatttggttacatgtatttgtatttggaggcataagtatcgtgtaatttgtgttatgactagtgtattgactattgaattatgagaagagctgctttagttgtaagatcaaaaaaaaaaaaaaaaaaaaaaaactcgagactagttctctctctctctctctcctcgtgc

SEQ ID NO: 1995 - DNA, 185 bp, Zea mays
  unsure (1)..(185): unsure at all n locations
  Clone ID: PAT_MRT4577_37451C.1
cggggacaacgcgcaacaccgtcaagcgccggctgcagctacgcgttacaaacatgacncaccggcgggntcctcgctcaccttcgngatcgngtcctngagnncgacctctaccttcttangcccggnctcgccgctactgctcacccggnacagacatcaaccggagntgctaccaccccgtg

SEQ ID NO: 1996 - DNA, 1072 bp, Zea mays
  Clone ID: PAT_MRT4577_37519C.1
tttttttttttgttttttttttttttttttttttttttttttttttttttttttttgggctttttaagcaactcctgttgcaccacccttgcgttttgccgcgcctacacgagggacagagcgtaagccacggtcctggcattttttttaaagggggagacacggggcccatcgccctgtatggaaacccattcgcgtggagcgtctcgtcgtctcgtctcgcctctcctctccttttcccccctccctgcacagcgccgctcaccgtcaccggaccacagcagcgatcgatggctgaggtacacaacgagcggcccgtggggatggtgggcggcgtccgggacgcgccggtgggccgcgagaacgacctcgaggccatcgagctcgcgcgcttcgcggtcgccgagcacaacagcaagaccaacgcgatgctggaattcgagaggctggtgaaggtgaggcaccaggtcgtggccgggaccctgcaccacttcaccgtcgaggtgaaggaggccggcggcggcgaaaagaagctgtacgaggccaaggtgtgggagaaggcgtgggagaacttcaagcagctgcagagcttcgagctcgtcggagacgccgcggtcgcctgaggcgcacaggcttttcgctggaggctggagcacaacaatgaaagaatttaactgtcatcccactggaaaagtatgatataatgaataaaccagcgtcttacccacatctcattctattacagtggtcaaatatctcattagggtacaatacatctgatttcccttatccttatccgagcggttcctggagaattccccaacccccttggcttatcttctcccacgcgcgcgcacgcagtctcattccgctgatgccttccttagcttcttctctgcgtcggccatcatggagccctggtcttctcctctaactccggtggtcgactctccgttcttctcggttgtccctgtatctctaactcccacaatgtaagttctctttgataaatatcctaggttcacctctccagtagcaagccccatcgtctagattttttttctatttgccc

SEQ ID NO: 1997 - DNA, 684 bp, Zea mays
  unsure (1)..(684): unsure at all n locations
  Clone ID: PAT_MRT4577_37567C.1
gccggccgggcttcgatctatctgaccgtcatcgagcgttcaacccacctccccctgcgactgtgccggccgtcgactgccgcgctacttcgtgcccttttctgtcgacgatcccaccaatgacttgctgatggagattgacagtcctcagacaaagatctgatcgaggtgctgataaacgatcattatcttctgctatagctctgaaagatggatcacatactgtgtgaaattgaggaggttattgcgaatgtgcagatgatgaatacaagaatctactgcgaaatgtatgaccacccatctcactccttgcagaactgaaagctaagctcaatgaattgacaccactaaacccgctagaatgcaaccaaaaggagctcagtggtgctctgaccaaatatactcaaactgccttggcaagtctttcaataccacatatattcttagngcatacagaactgagatattttgaggtccatacagcaaacaatatgatagcgaatcatttctaccgccaagggctctttgatcttgctgacatgtatagtccctgagtgtgcggaactaggctcagcttccttgcagctaccggttcaggacatgtatgctatcgcttgaagccatgatagagacaacctcgagcctgctctcacgtggcgtgccaaaaaccatgatcatatgatg

SEQ ID NO: 1998 - DNA, 1703 bp, Zea mays
  Clone ID: PAT_MRT4577_37639C.1
gctgcatctctctcctcggtcctcgctcgctcggcttccctcctctctctctctccgccgagaccgagaggaggaggaggcaaggcaggcatccctgacgtacggacggcggccatggggacgcaggcgccggagaactaccccgccgagaaggacgcgaggagcgcgcgggagaaggccatcgacgactggctcccgatcacctcgtcgcggaacgccaagtggtggtactccgccttccacaatgtcaccgccatggtcggcgccggcgtgctcagcctgccctacgccatgtccgagcttggctggggccctggcatcgcggtgctggtggtgtcgtgggtgatcacgctgtacacgctgtggcagatggtggagatgcacgagatggtgccggggaagcggttcgaccgttaccacgagctggggcagcacgcgttcggggaccggctgggcctgtggatcgtggtgccgcagcagctggtcgtcgaggtgggcgtgaacatcgtgtacatggtgaccggcggcaagtccctgaagaagttccacgacgtgctggtgtgcggcgacacgggggtgtgcgaggggaaggacaacatcaagaccacctacttcatcatgatcttcgcgtccgtccacttcgtcctctcgcagctccccaacttcaactccatctccggcgtctccctcgccgccgccgtcatgtcgctcagctactccaccatcgcgtggggcgcgtcggtgcacaaggggaggatgtcgggcgtcgactaccacctgcgcgcgaccaccacgccggggaaggtgttcggcttcttcggcgcgctgggggacgtggcgttcgcctacgccgggcacaacgtggtgctggagatccaggccaccatcccgtccacccccgacaagccgtccaagaagcccatgtggaagggcgtggtggtcgcctacgtcgtggtggcgctctgctacttccccgtcgcgctcatcggctactgggcgttcggaaacacggtcgaggacaacatcctcatcacgctcagcaagcccaagtggctcatcgcgctcgccaacatgatggtcgtcgtccacgtcatcggcagctaccagatctatgccatgccggtgtttgacatgatagagaccgtgctggtgaagaagctgcgcttccctcccggcctcacgctgcgtctgatagctcggaccctctatgttgcgttcacgatgttcatagccatcaccttccccttcttcggtgggctgctcggtttcttcggcgggttcgccttcgcgccgaccacctatttccttccctgcgtcatgtggctcgcaatctacaagcccaaaaggttcagcctctcctggttgaccaactggatgtgcatcattcttggggtgctcctgatgattctgtcgcccatcggagggctccggcaaataataatggaagcgaaaacctaccagttctactcgtgagctctaccaccagccatgacttgtgacttgtaagcacgattggagaaatctgtcaaagcctcaaccacgagtttttttttgtcatgccaaacacatacatatacgtactgtttcttaatattcaaaggtgttcttcgtggcttgcgtgtgtacagtattatgtgtatgagggagacttttaagtttaatgatgctggctgtcaaagataatggcggttcaattacacttt

SEQ ID NO: 1999 - DNA, 2577 bp, Zea mays
  unsure (1)..(2577): unsure at all n locations
  Clone ID: PAT_MRT4577_37645C.1
cattggtacctcgagccggccgggaatcctcctcctccttctcctcctaccgcagcccgcagggaggtggagttgtcaacgtgccgaggactggagcggcccgcgtcctctataaacgagacgcccggccatttcctctgctcctctctgttcccccctgcctgcctgcttccagctgcatctctctcctcggtcctcgctcgctcggcttccctctctccgccgagaccgagaggaggcatccctgacgtacggacggcggccatggggacgcaggcgccggagaactaccccgccgagaaggtacaggacgcgaggagcgcgcgggagaaggccatcgacgactggctcccgatcacctcgtcgcggaacgccaagtggtggtactccgccttccacaatgtcaccgccatggtcggcgccggcgtgctcagcctgccctacgccatgtccgagctcggctggggccctggcatcgcggtgctggtggtgtcgtgggtgatcacgctgtacacgctgtggcagatggtggagatgcacgagatggtccccgggaagcggttcgaccgttaccacgagctggggcagcacgcgttcggggaccggctgggcctgtggatcgtggtgccgcagcagctggtcgtcgaggtgggcgtgaacatcgtgtacatggtgaccggcggcaagtccctgaagaagttccacgacgtgctggtgtgcggcgacaacggggtgtgcgaggggaaggacaacatcaagaccacctacttcatcatgatcttcgcgtccgtccacttcgtcctctcgcagctccccaacttcaactccatctccggggtctccctcgccgccgccgtcatgtcgctcagctactccaccatcgcgtggggcgcgtcggtgcacaaggggaggatgtcgggcgtcgactaccacctgcgcgcgaccaccacgccggggaaggtgttcggcttcttcggcgcgctnnnnnacgtggcgttcgcctacgccggccacaacgtggtgctggagatccaggccaccatcccgtccannnnngacaagccgtccaagaagcccatgtggaagggcgtggtggtcgcctacgtcgtggtggcgctctgctacttccccgtcgcgctcatcggctactgggcgttcggaaacacggtcgaggacaacatcctcatcacgctcagcaagcccaagtggcnnnnnnnnnnnnnnnnnnnnnnnnnnnnnnnnnnnnnnnnnngcagctaccagatctatgccatgccggtgtttgacatgatagagaccgtgctggtgaagaagctgcgcttccctcccggcctcacgctgcgtctgatcgctcggaccctctatgttgcgttcacgatgttcatagccatcaccttccccttcttcggtgggctgctcggtttcttcggcgggttcgccttcgcgccgaccacctatttccttccctgcgtcatgtggctcgcaatctacaagcccaagaggttcagcctctcctggttgaccaactggatgtgcatcattcttggggtgctcctgatgattctgtcgcccatcggagggctccggcaaataataatggacgcgaaaacctaccagttctactcgtgagctaccaccagccatgacttgtaagcacgattggagaaatctgtcaaagcctcacccccgagtttttgtttttgttttttgtcacccccaacccatacatatacgtactgtttttttaatattccccccccccccccctggcttgggtgtgtccagtattatgtgtatgagggagccataagtttaatgatgctggctgtcaaagataatggcggttctcgtcgtcgctctccttgtcgctagtagtactgtttactgtctgcttcggcgccaccgccaccgacaccgccaccgacggcgccattcgtctcctccccggcagctctggtgctgttggtcgaccgtgggagtgctgtgactatgtcaccaaggacccgattatcagcaggccgccccggtggcgctgcaacgacgtggtggacaagtgctccgccgactgccaagagtgcgaggagtcgctggccggcgacggcttcgtctgcgatgactggatcttcagcctgctcgagcccccggtctgcacacccaggccgtgggactgttgcgacttcgccgtctgcacaagggaatacatccccaactgccggtgcggcgacgtgggggagtcgtgccccagcaactgcaaagtgtgcgagtttgtggagtcggaccctcctggctaccgatgcctagacgtcttccacggctatcctggccccaggtgcacgccatttggatcggtaaaagcaattagctcagctcagctacttgctagtacgtagtacgtccacaaaaataaataaaagtggctagcgaacaaattaaagctgttacacctggttgttcgtcccgacatggacgatcagtcgattagactagctccatcgctagctgctgctactctctttcgcgcaatcgtgcgtcattaaatatcaatctggcgaagccactaggcctcgatcccactcc

SEQ ID NO: 2000 - DNA, 2320 bp, Zea mays
  Clone ID: PAT_MRT4577_37648C.1
gtgatgcatattccatggcgcggcggcgttggagcttctgtttgccctatactagtgatcacgtcatcagggcgtcaggcccccatcggtggatcagccgatcgatgggccgggaggccatgacgaactgatcaccctcgttgctagctggggtagggtgggagctggttacgaagaaatcacacagcccatctaaaagcgacgacgcgacggcatcctcccagcttccagcttccagcctccagcctccagcaccagggtgtcagagcgtgctccgaatcccccgccaagaaacgcgagagcctccatcacagctctgctgaggcctctcaattctgcccgtcgaagcgcccgcggcttttattactgtgtatatatatataatactacggcatctatcggtccctcaaatcctcctcctcctcctgccgcagcccgcagggaggtggagttgtcaacgtgccgaggactggagcgcccgcgtccggcgtctctataaacgagaccgcccggccatttggtctgctcctctctgttctcccctgcctgcctgcttccagctgcatctctctccgccgagaccgagaggaggaggaggcaagggaggcatccctgacgtacggacggcggccatggggacgcaggcgccggagaactaccccgccgagaaggtacaggacgcgaggagcgcgcgggagaaggccatcgacgactggctcccgatcacctcgtcgcggaacgccaagtggtggtactccgccttccacaatgtcaccgccatggtcggcgccggcgtgctcagcctgccctacgccatgtccgagcttggctggggccctggcatcgcggtgctggtggtgtcgtgggtgatcacgctgtacacgctgtggcagatggtggagatgcacgagatggtccccgggaagcggttcgaccgttaccacgagctggggcagcacgcgttcggggaccggctgggcctgtggatcgtggtgccgcagcagctggtcgtcgaggtgggcgtgaacatcgtgtacatggtgaccggcggcaagtccctgaagaagttccacgacgtgctggtgtgcggcgacacgggggtgtgcgaggggaaggacaacatcaagaccacctacttcatcatgatcttcgcgtccgtccacttcgtcctctcgcagctccccaacttcaactccatctccggcgtctccctcgccgccgccgtcatgtcgctcagctactccaccatcgcgtggggcgcgtcggtgcacaaggggaggatgtcgggcgtggactaccacctgcgcgcgaccacgacgccggggaaggtgttcggcttcttcggcgcgctgggggacgtggcgttcgcctacgccggccacaacgtggtgctggagatccaggccaccatcccgtccacccccgacaagccgtccaagaagcccatgtggaagggcgtggtggtcgcctacgtcgtggtggcgctctgctacttccccgtcgcgctcatcggctactgggcgttcggaaacacggtcgaggacaacatcctcatcacgctcagcaagcccaagtggctcatcgcgctcgccaacatgatggtcgtcgtccatgtcatcggcagctaccaagatctatgccatgccggtgtttgacatgatagagaccgtgctggtgaagaagctgcgcttccctccccggcctcacgctgcgtctgatcgctcggaccctcctatgttgcgttcacgatgttcataaccatcaccttccccttcctcggtgggctgctcggtttcttcggcgggttcgccttcggcgccgaccacctatttccttccctgcgtcatgtggctcgcaatctacaagcccaagaggttcagcctctcctgggttgacaaactgggatgtgcaacaatcctgggggtgctcctgaataatctgtcgcccatcggagggctccggcaaataataatggacgcgaaaacctaccagttctactcgtgagctaccaccagccatgacttgtaagcacgattggagaaatctgtcaaagcctcaaccacgagtttttgtttttgttttttgtcatgccaaacacatacatatacgtactgtttttttaatattcaaaggtgttcttcgtggcttgcgtgtgtacagtattatgtgtatgagggagacataagtttaatgatgctggctgtcaaagataatggcggttcaattacactttcatctcacttgcttcgtagctaggactttggaaggggctacagtatgtatttgggattatttgagcagtgtgttttttgtcgtttct

SEQ ID NO: 2001 - DNA, 1885 bp, Zea mays
  Clone ID: PAT_MRT4577_37650C.1
gccggccggttcggaggtccctcaaatcctcctcctccttctcctcctaccgcagcccgcagggaggtggagttgtcaacgtgccgaggactggagcggcccgcgtcctctataaacgagacgcccggccatttcctctgctcctctctgttcccccctgcctgcctgcttccagctgcatctctctcctcggtcctcgctcgctcggcttccctctctccgccgagaccgagaggaggcatccctgacgtacggacggcggccatggggacgcaggcgccggagaactaccccgccgagaaggtacaggacgcgaggagcgcgcgggagaaggccatcgacgactggctcccgatcacctcgtcgcggaacgccaagtggtggtactccgccttccacaatgtcaccgccatggtcggcgccggcgtgctcagcctgccctacgccatgtccgagcttggctggggccctggcatcgcggtgctggtggtgtcgtgggtgatcacgctgtacacgctgtggcagatggtggagatgcacgagatggtgccggggaagcggttcgaccgttaccacgagctggggcagcacgcgttcggggaccggctgggcctgtggatcgtggtgccgcagcagctggtcgtcgaggtgggcgtgaacatcgtgtacatggtgaccggcggcaagtccctgaagaagttccacgacgtgctggtgtgcggcgacacgggggtgtgcgaggggaaggacaacatcaagaccacctacttcatcatgatcttcgcgtccgtccacttcgtcctctcgcagctccccaacttcaactcccatctccggcgtctccctcgccggccgccgtcatgtcgctcagctactccaccatcgcgtggggcgcgtcggtgcacaaggggaggatgtcgggcgtggactaccacctgcgcgcgacgactacgccggggaaggtgttcggcttcttcggcgcgctgggggacgtggcgttcgcctacgccgggcacaacgtggtgctggagatccaggccaccatcccgtccacccccgacaagccgtccaagaagcccatgtggaagggcgtggtggtcgcctacgtcgtggtggcgctctgctacttccccgtcgcgctcatcggctactgggcgttcggaagcacggtcgaggacaacatcctcatcacgctcagcaagcccaagtggctcatcgcgctcgccaacatgatggtcgtcgtccatgtcatcggcagctaccagatctatgccatgccggtgtttgacatgatagagaccgtgctggtgaagaagctgcgcttccctcccggcctcacgctgcgtctgatcgctcggactctctatgttgcgttcaccatgttcatagccatcaccttccccttcttcggtgggctgctcggtttcttcggcgggttcgccttcgcgccgaccacctatttccttccctgcgtcatgtggctcgcaatctacaagcccaaaaggttcagcctctcctggttgaccaactggatgtgcatcattcttggggtgctcctgatgattctgtcgcccatcggagggctccggcaaataataatggaagcgaaaacctaccagttctactcgtgagctctaccaccagccatgacttgtgactgcacgattggagaaatctgtcaaagcctcaaccacgagtttttttttttgtcatgccaaacacatacatatacgtactgtttcttaatattcaaaggtgttcttcgtggcttgcgtgtgtacagtattatgtgtatgagggagacttttaagtttaatgatgctggctgtcaaagataatggcggttcaattacacttccaaaaaaaaaaaaaaaaaaggccccta

SEQ ID NO: 2002 - DNA, 223 bp, Zea mays
  Clone ID: PAT_MRT4577_37706C.1
aaacccgaacaaaagcattttttccgaacaaaagcatccatgggcccaattaatttttaaaatgaaaaggggggatcgaaacatagcacccgggccccatgggtcggttgggccaaacgaaggggggggcgtttcactcgtggttggggacccggacaagctgttttccgaccttgcgaccggggaagagtcctatgagcgccttgggcgcgctctttagccc

SEQ ID NO: 2003 - DNA, 288 bp, Zea mays
  Clone ID: PAT_MRT4577_37757C.1
ggccaccggtccggtcgttccggaagaacattatgttcgtgcagttcgacaagggggccgccgccgccaacggggacaagttcttgccggcgggaggcgggggttccccttttgtgaaggtgagcttggacggggcgccctaccttggcaaagtggaccttaagatgttcaggagcttccagcagttgttcaaggggcttgagaacatttttagcttctttaccattggaagctgtgggttttaagggatgaacggcgttaaccagagcaagctggtggattttttta

SEQ ID NO: 2004 - DNA, 2563 bp, Zea mays
  Clone ID: PAT_MRT4577_37761C.1
ggatcaattggtggtggtaggattttactccgatcagggttcaacacaggcgtatgaggatccggacaggcaacaagccagccgccgccaacaggtatgttccagtctgccgttcacttattacagacaagtatttatgtgctacagtaatagacctagttcacccatgggcctccaacgtacttggcattgggcttcttggtgcgtttgcttctctgcgctttggctgcagcctggtcgtcgatctccagtggcactgtcttctgggccttgtgacagatcaggagacctgcaccccggcgttgaggttgaggttgaggatgcgtgcggtggacctgatctccagggcggggctgatggagagcaggcccaccaagctctccggcgggacccgcatcccgcccacgttgatgcactccagccgccggcacttgttcaccagcgccaccagcccgccctccgtcacgtggcggcagctccacaggatgatgctcttaagatttgcgcagctgtttgtggctgccgggcggggccgggattttcagccgccccaccgcagcagcagagaagaggccgccgccgccgcgaccaagagccgatggatccgaagatgacagaggtgacccagatgttcgcccgcttcaaggcggcctacacccgcaacgacctcgacgcctgcgtcaccctcctctcacagctcaaggtccatctcaccaaattccccagccttccgccctcatttgagcagacacctaaagccgtggaggagctcaaacttgcaagggacatttatgagcatgctgttgttttgagtgtgaaacttgaggaccaagatgcatttgaacgtgatttctgtcagctaaagccttattacatggatacatgtggcataattcccccctcaccagaggagtacccaattttgggactcaatcttctgaggctgttggttcagaatagaattgctgagttccatactgagctggagcttttacctgtcaaggcacttgagcacccttgcatcaagcatgctgtagagcttgagcaatccttcatggagggtgcctacaaccgagtgttaagcgctcggcaagctgtgccacatgagacctatgtttacttcatggaccttctcgccaagacagttagagatgagatcgctgggtgcagcgaaaaggggtatgattccctatctgtaagtgatgcaaaacaaatgcttatgttcagttctgaccaagatctgcacgagtacatcacagaggagcacccggaatgggagcttaagaacggtgccgtcttcttccagaaggaaaaggcgtcacagccccgtaagaggaatcccatccttgcccctggtgaatgtttatttctgtggccgcttggcatggcatgtactgtcctttacatttgagatcagctctgatcgcagctcatgtcagctctgatcaatctctgaagggcttgatctctgcggcattgtttcaccacattaactgcattgcttgaaagatgcctgtcattcattgctgctgttaacttttgatgggcttaaaaaaaaaaaaaaaaaaaaaaaaaaaaaaaaaaaaaaaaaaaaaaaaaaaaaaaaaaaaaaaaaaaaaaaaaaaaaaaaaaaaatgtcctgctaaggactgaaaactgtagcaaattgggaccctcgaggccggccgggactagttgttcccaccgcaagcaaagcattttcgcccgccccaccgcagcagcagagaagaggccgccgccgcgaccaagagtcgatggatccgaagatgacagaggtgacccagatgttcgcccgcttcaaggcggcctacacccgcaacgacctcgacgcctgcgtcaccctcctctcacagctcaaggtccatctcaccaaattccccagccttccgccctcatttgagcagacacctaacgccgtcgaggagctcaaacttgcaagggacatttatgagcatgctgttgttttgagtgtgaaacttgaggaccaagatgcatttgaacgtgatttctgccagctcaagccttattacatggatacatgtggcataattcccccctcaccagaggagtacccaattttgggactcaatcttctgaggctgttggttcagaatagaattgctgagttccatactgagctggagcttttacctgtcaaggcacttgagcatccttgcatcaagcatgctgtagagcttgagcaatccttcatggagggtgcctacaaccgagtgttaagcgctcggcaggctgtgccacatgagacctatgtttacttcatggaccttctcgccaagacagttagagatgagatcgctgggtgcagcgaaaaggggtatgattccctatctgtaagtgatgcaaaacaaatgcttatgttcagttctgaccaagatctgcacgagtacatcacagaggagcacccggaatggggagtttaaagaatgggcgccgtctttcttccagaaggcaaaggaatcacagccccctacagggagatcccatccttgcagctcatcaacagacgctcagctatgcgagg

SEQ ID NO: 2005 - DNA, 3587 bp, Zea mays
  Clone ID: PAT_MRT4577_37763C.1
atttctttcgtttttttgtcggatcgccccgccgtgcaggggtcttcctcccgatcaggctccaacacccgcgtccggcggcagcaccctcacccctcaccaacccaagccgcaagcataacccgcagcacagaagaggagaggagtcgccgcgaccgagagctccagagcacgcccccggcacagcctccgacgatggatccgaagatgacagaggtgacccagatgttcgcccgcttcaaggcggcctacgcccgcaacgacctcaacacctgcgtcaccctcctctcgcagctcaaggtccatctcacccaattccccagccttccgcccttgtttcagcagacaccgaacattgtggaggagctcaacctcgcaagggatgtgtaggcgcatgctgtggttttgcgtgtgaaactggtgtgccacgcccgtcggggcactacatcctccggccctcgccccagcacccgacgagcccgccgtcgcccacgcggccaaaggccgataggaaccgtagtatgacagaggggacccagatgttcgcccgcttcaaggcggcctacacccgcaacgacctcgacgcctgcgtcaccctcctctcacagctcaaggtccatctcaccaaattccccagccttccgtcacctcatttgccgcagacccctaaaacaagtgatgggcttgctctgccacatgacatctatgtatatgtcatcgaactttacggcgaaactctaagacacaagagactttgatgagcgtaatatggttatgattttcaatctttcgggcatagataggacatgatcatgttctgttctggccgagatctgctcgcgtacacccctgaggagcacgccgcgtgggagaataagaatggtgctgtcttcttccagatggtgagggactcacggccctgcactgaaatcccgttgtagaggctgagcaatcattcctggagggtccctagagcggggtgtcaagcgctctgcatgatgtgccacccgagacctatcttttcttcccggcccttctcgcctggacagtgagagatgagatcgctgggtgcagcgaaaaggggtatgattccctatctgtaagtgatgcaaaacaaatgcttatgttcagttgtgaccaagatctgcacgagtacatcacagaggagcgcccggaatgggagcttaagaacggtgccgtcttcttccagaaggcaaaggagtcacagccctacaaggagatcccatccttgcagctcatcaaccagacgctcagctatgcgagggagctggagcgtattgtatgatttaatttcacagtaatccctggttgatgtttatttctgtggtcacttggcatggcatgtactgtcctttacatttgagatcagctctgatcgcagctcatgtcagctctgatcaatctctgaagggcttgatctctgcggcattgtttcaccacattaactgcattgcttgaaagatgcctgtcatccattgctgctgttaacttttgatgttcttaatacaaaaaaagcattttcgcccgccccaccgcagcagcagagaagaggccgccgccgcgaccaagagtcgatggatccgaagatgacagaggtgacccagatgttcgcccgcttcaaggcggcctacacccgcaacgacctcgacgcctgcgtcaccctcctctcacagctcaaggtccatctcaccaaattccccagccttccgccctcatttgagcagacacctaacgctgtcgaggagctcaaacttgcaagggacatttatgagcatgctgttgttttgagtgtgaaacttgaggaccaagatgcatttgaacgtgatttctgccagctcaagccttattacatggatacatgtggcataattcccccctcaccagaggagtacccaattttgggactcaatcttctgaggctgttggttcagaatagaattgctgagttccatactgagctggagcttttacctgtcaaggcacttgagcatccttgcatcaagcatgctgtagagcttgagcaatccttcatggagggtgcctacaaccgagtgttaagcgctcggcaggctgtgccacatgagacctatgtttacttcatggaccttctcgccaagacagttagagatgagatcgctgggtgcagcgaaaaggggtatgattccctatctgtaagtgatgcaaaacaaatgcttatgttcagttctgaccaagatctgcacgagtacatcacagaggagcacccggaatgggagtttaagaatggcgccgtcttcttccagaaggcaaaggaatcacagccctacaaggagatcccatccttgcagctcatcaaccagacgctcagctatgcgagggagctggagcgtattgtatgatttaatttcgtatccctccgggggccgcaccctccactataacccaacccgcaagaaaaaacccgcagcagagaagaggagtcgccgcgaccgagagctccagagcacgcccccgccacagcctccgacgatggatccaaagatgacagaggtgacccagatgttcgcccgcttcaaggcggcctacgcccgcaacgacctcaacacctgcgtcaccctcctctcgcagctcaaggtccatctcacccaattccccagccttccgcccttgtttcagcagacaccgaacattgtggaggagctcaaacttgcaagggacatttatgagcatgctgttgttttgagtgtgaaacttgaggaccaagatgcgtttgaacgcgatttctgccagctgaagccttattacatggatacatgtggcataattcccgcctcgccagaggagtacccaattttgggactcaatcttctgaggctgttggttcagaatagaattgccgaattccacactgagctggagcttttacctgtcaaggcactcgagcatccttgcatcaagcatgctgtagagcttgagcaatccttcatggagggtgcctacaaccgagtgttaagcgctcggcaggctgtgccacatgagacctacgtttacttcatcgaccttctcgccaaaacagttagagatgagatcgctgggtgcagcgaaaaggggtatgattctctatctgtgagtgatgcaaagcaaatgcttatgttcagttctgaccaagatctgcacgagtacatcactgaggagcacccggaatgggagattaagaacggtgctgtcttcttccagaaggcgaaggagtcacagccctgcaaggagatcccatccttgcagcttatcaaccagacgctcagctacgccagggagctggagcgtattgtatgatttaaaccaatccctggtggttctttttccccctgtgaccgcttggcatggcttgtactgtcctttgcatttgggatcttctttgatcgcagctctcatctgactgaaacatcatgtgaatctctgaagggctcagtttctccggcattattctgttaacttcatttgtatttcaccacattaactgcattgcttgaaaaatgcccggcattcactgctgctgtgaacttttgattgaattaaccccccccccc

SEQ ID NO: 2006 - DNA, 2324 bp, Zea mays
  unsure (1)..(2324): unsure at all n locations
  Clone ID: PAT_MRT4577_37764C.1
gnccgcttttggccgcttttttttttttttttttttaagtaaaacattttcatgttaactgctggttatgtaatgtgtggtatttcaagatgaacagcaaaacttgtatacagtcggagccctagtagtacatgcaccaagacagcacattgcaacgattaacaaagggaaaaagactgcaaaacggcatgaatcctgttcgccgcaccaaacggatctattcgtcgtttagctgtagacattgttgaggtagaagtacaggccagccaaggcgatgatcccgacgacgatggcaataggcaaggctttccccatgctctcctccttcttcagctcctccttcctcgcctttctggcatcggtggcgttcgcgttcttggagactgccggctcgtagggtctgaaccttctcttcggagctccacaaacagggcagaagtagttgtcagccagcttgtcgaacggcgtcctgtcgttgtagatgtacccgcagtcacggcagatgtaggcctgcttggacgcgacccgcatggtgatccgcgcggcagtggccacccggcgccgcgcaggcgccggcagccgcagcgaccacggggcggagaaggagggccgtggcggcgcggaccgctgtgccgccggcgcgcgcatgagtgacggggcctgcagggccatcgctgcagcgagagctgagcagtggccgagaaccgaacgtacgcgcgcgcggcgaggcgacggatagcaagcggtggcgaggagataagaatggggtggggaggcgattcccgcccgcccgcgagggagccacccaaggagacgaggatgccaacgccctaccttgctcttccagcccagcgggcggcgccccagactttaagaaatcgaaagctctcttcctccaacagacataccttatcagtccatcaccacaggtctggtctaaccggcggcggccggggcgtggtcgccccccacctccggttttgcgtcccagcccggtcctctcggttgaggagtctgctcaatcgctccacggcttccgcggggtcgctgtgtttctcttctcctctggcattgaaggaattttagttctcatccttgtctcttgcctccccatgcttggagcaggcagttcaaaaggttgacctatttgggaatctccggctttatgcttagtttcagctcgccgaagcatttggtcgctggctgcgtacgattccctatctgtaagtgatgcaaaacaaatcctcaatgttcagttctgaccaagatctgcagtagtacatcacagaggagcacccggaatgggagtttaagaatggcgcagtcttcttccagaaggcaaaggaatcacagccngacaaggagatcccatccttgcagctcatcaaccagacgctcagctatgcgagggagctggagcgtattgtatgatttaatttcacagtaatccctggtggatgtttatttctgtggccacttggcatggcatgtactgtcctttacatttgagatcagctctgatcgcagctcatgtcagctctgatcaatctctgaagggcttgatctctgcggcattgtaaaaccacattacccgcattgcttgaaagatgcctgtcattcattgctgctgttaccttttgataggcttccgatggaagacagagatcgcccagatgttacgcccgcattcaaggctggcctacacccgcaacgacctcgacgcctgcgtcaccctcctctcacagctcaaggtacatctaaccaaattccccatgctttcgccctcatttgagcagacacctaacgctgtcgaggagctcaaacttgcaagggacatttatgagcatgctgttgatttgagtgtgaaacttgaggaccaagatgcatttgaacgtgatttctgccagctcaagccttattacatggatacatgtggcataattcccccctcaccagaggagtacccaattttgggactcaatcttctgaggctgttggttcagaatagaattgctgagttccatactgagctggagcttttacctgtcaaggcacttgagcatccttgcatcaagcatgctgtatagcttgagcaatccttcatggagggtgcctacaaccgagtgttaagcgctcggcaggctgtgccacatgagacctatgtttacttcatggaccttctcgccaagacagttagagatgagatcgctgggtgcagcgaaaaggggtatgattccctatctgcaagtgatgcaaaacaaatgcttatgttcagttctgaccaagatctgcacgagtacatcacagatgagcacccggaatgg

SEQ ID NO: 2007 - DNA, 1262 bp, Zea mays
  Clone ID: PAT_MRT4577_37835C.1
caggttaaagcgacgccgccgccgcaagccgtccgcctcgctcttctcccgagcctggtcctcatcctctcgcctctctccccccacacagatttagcaatctaggtttagcgcctccgtccatctcgtagctgctgcgatggcgatcaagaggaccaaggccgagaagaagatcgcgtacgaccagaagctctgccagctgctcgaggagtacaccaaggtgctcatcgccgtcgccgacaatgtcggctccaagcagctccaggagatccgcaagggtctccgcggtgactccatcgtgctcatgggcaagaacaccctcatccgccgctgcatcaaggtgcactcggagaagaccggcaacaaggacttccttgagctcagcaacctcctcgtcggtaacgttggcctcatcttcaccaagggtgacctcaaggaggttcgcgaggaggtcgccaagtacaaggttggtgctcctgctcgtgttgggctagttgcacctgttgatgtggtggttccccctggcaacactggtctggatccctcccagacgtccttcttccaggtgctcaacattcccaccaagattaacaagggcactgtggaaattatcacccctgtggagctgatcaagaagggtgaaaaggtgggctcgtccgagtctgccctgctcgccaagctgggtatccgtcccttctcgtacggcctccaggtcaccagtgtctacgaggatgggtccgtgttcagccctgaggtgcttgacctttccgaggaggacctgattgagaagtttgccactggtgtctccatggttgcctccctgtcactggcgatctcgtacccgacccttgctgctgtgccccacatgttcatcaatgggtacaagaatgtgcttgctgttgctgtcgagacagactactcgtacccacatgctgacaagatcaaagagtacctcaaggacccaagcaagtttgctgttgccgccccggttgctgctggtgacgctggcgctgcagctgctcccaaggaagaagagaaagctgcggagcctgaagaggagtcggacgaggaaatgggcttcagcctcttcgacgactagagctgctgttttcgtcaaactgctgcaagttttagttttttttttatcatctacaagtactgtttcctatattttttagcagacaaattatcgtgtgtaatcgacaatgatatccccttaaattttaagaacctgtgttgtgtcactaaagttgatactgttt

SEQ ID NO: 2008 - DNA, 827 bp, Zea mays
  Clone ID: PAT_MRT4577_37871C.1
catcctctccatcggcggtcttcccccaagtcgtcgtctaaactaaaccctaatccccaaatccccgacgcagacaacacgacgcgcacctgcgttcacgaggagcaagcatgagtcgccacccaatcactaagtgggcacagaggtctgacagggtgttcttgacgatagagctgcccgacgccaaggatgtgaagctgaacttgaagcccgaaggtcatttcaacttctcggctaagggctcagatgacttgccctatgagtttgaccttgagctgtttgatgctgtgaatgtggaggagagcaaagcagctgttgccccaaggaccatatgctacctgatcaagaaagctgagagcaagtggtggccaaggctgctgaaaaaggagggcaaggcacctgtgttcttgaaggttgactgggacaaatggcaggatgaggatgatgaggatgttggatttaatgacttcagtgatatggacttctcgaaactggacatgggaggtgctgatgatgacgattttgaggatgacgaagacgatgtggttgaaagtgctaacaaagatgaagaaggtggtaagacagagaagagcaacggggaggaggaagcagctgccgcagcagcagccgctgaggaagtgaagccatgaagaagcatttgagtttgctccacgccataggtgtccatggtatctagctaggctaaatgttcccttagatttttggtgtaaaatctggaggatgaatacaaaacagttgtgctgttttagttttatctgaaccctgtgaactgctgatataatatttgatcagagctcatttgcgtc

SEQ ID NO: 2009 - DNA, 942 bp, Zea mays
  Clone ID: PAT_MRT4577_37872C.1
gttctgacttccgacgagcggcaccacacctatttttataacccacacacctttttttttttttttgcgtcgcatgatggatgcatataaactctgaccaaatattgtagcagcagttcacagggttcagccaaaaactaagacagcacaactgtttttgtatcctttacttcaataggcagtgagtggttcgacctccagattttacaccaaaaatccaagggaacgtctagcctagctagataccgtggacacccatggcgcggagcaaagtcaaatgattcttcatggcttcacttcctctgcagccgcaggagctgcttcctcctccttgctctcttctgtcttacctccttcttcatctttgttagcactttcaaccacatcatcttcatcatccccaatatcgtcgtcatcagcacctcctatgtccagtttcgagaagtccataccaccaaagtcattaaatccagcgtcttcatcatcctcgtcctgccatttgtcccagtcaaccttcaagaacacaggtggcttgccctcctgcttcagcagccttggccaccacccgctcttagctttctttatcaggtagcatatggtccttggggcaatagctgctttgctctcctccacattcacagcatcaaacagctcaatgtcaaactcatagggcaagtcatctgagcccttagctgagaagttgaaatggccttcaggcttcaagttcagcttcacatcctgggcgtcgggcagctctatcgtcaagaacaccctgtcggacctctgtgcccacttagtgatcgggtggcgactcatgcttccgcctcgtgaacggaggtgcgcgtcgtgtggtctgcgtcggggatttagggattggggtttagacgtcttgggggaagactgccgatggggagaggatgcggccgcgcccacgcgtccggc

SEQ ID NO: 2010 - DNA, 571 bp, Zea mays
  Clone ID: PAT_MRT4577_37945C.1
gtaggagacctgcacgctcctattacctgctcattaacgtgaaccaggccagcaccaagagcaagtttgacaactctgtatgggggccgtcactcactccctcatggtctgatgagggccaccgacattatgatcgccggaaacggtgcctaggaccgcggatactgcgatgttcgcaagggattgagcccctacactcaagcaggctggtgcccggaacatagggacctacatcgaccccatctgctccctccaggctctgatgaagggtctacaagacctaacgttcgaggacgtaatatattgaagctgacatcttaactaccaccactggcaacaacgatatcaccatgggagaccacatgaggaagatgaataacaatgctcatcgtctgcaacattgaccactacgacacagaaatcgatatgctcaggcttcagacctaccctggcgataagcgcatcaccatcaagccccatactgaccagatggtgttccccgagaccaacactggcatcattgtccatgctgagggtctcctgatgaaccttaggtgtgctactggccata

SEQ ID NO: 2011 - DNA, 449 bp, Zea mays
  unsure (1)..(449): unsure at all n locations
  Clone ID: PAT_MRT4577_37965C.1
ttttttttttttttttctaaaaatgtgctttcttatttctgggaagccacaaacatcagacaaaaactttattattgagctataactcataagaaactaaaagagggaccaccaatgagggggtgttgggaaaacgctgctgggggggggaaagcaagtggggtgaatgggancaattgtggcggttgtaagagggggccagcgttaggcgcagcgtgctgggaaaacggcaacaactgtgggtgtatcaagaagggggcagggctcacaccagctagctgggtgaatgggantaggtgtggcgtgggtaaataagcaggagagttcaatgcggccagtgtggtgagtgggaaaaattggtggggggaggcancaggtanctggctgaatggganttgtgtgggttgcaaataaaaagcagaggtcaatgcggctaggtgggtgaatgg

SEQ ID NO: 2012 - DNA, 577 bp, Zea mays
  unsure (1)..(577): unsure at all n locations
  Clone ID: PAT_MRT4577_37967C.1
aaaaagtactttcttatttctgggaagccacaaacatcagacaaaaaactttattattgagactataactcataagaaatctaaaagagggaccaccaatgagggggtgtggggaaaacgctgctgggtttgtgggagggggggggtgaatgggancaattgtggcagttgtaagagggggccagcgttaggcgcagcgtgctgggaaaacggcgacaactgtgggtgtgtcaagaagggggcaggggtcacaccagctagctgggtgaatgggantaggtgtggctgctgtgaataagcaggagagttcaatgcggccaggtgggtgaatgggaaaaattgctggggggaggcancaggtanctgggtgaatgggantgtggtggtgggcaaataagaagcagagttcaatgcggctagtgtggtgaatggaaaaaactgctgtggctgagagtangcancaaggggtgctancacaaggtgtggtanttgttgtgccctgatgtgttgtgcgaataaatgcgccanaggtgactgatgtaatanggctgatgattgttggaggagacaaggggat

SEQ ID NO: 2013 - DNA, 242 bp, Zea mays
  Clone ID: PAT_MRT4577_38034C.1
attcccgctcgagccactcgtcctccgagcgtccgcaactagcaacatattattcacaatagtgtaccaacaatgtcagccagaatatttttcctccttatgctccttggtctttctgcaagtgctgctactgctaccattttcccgcaatgctcacaatctcctatagcttcccttcttcccccttacctttcaccagtgttgtcttcattatgtcaaaacccaattctttaaccttacat

SEQ ID NO: 2014 - DNA, 393 bp, Zea mays
  unsure (1)..(393): unsure at all n locations
  Clone ID: PAT_MRT4577_38142C.1
agaaatgtactttcttatttctgggaagcctcaaacttcagacaaaaaacttttttgttgaactataactcataagaaatctaaaagagggcaccaccaatgatgggttgttggtggaacgctgctgggttggtgaaagcatgttggttgaatggcagctattgttgcagttgttagagggtgccagcgttaggcgcctcgtgctggttgaacggcaacaactgtggttgtctcaagaaggtagctgggctcacacctgcttgctggctgtgtggtcgtngttgttgctgctgttgttcagccggtgagttcagtgctgcctgttggttgcttggtagaaattgctgggggtcggccccctgttgctggctgcatgggcgttgttgttgttgc

SEQ ID NO: 2015 - DNA, 421 bp, Zea mays
  Clone ID: PAT_MRT4577_38299C.1
gttggcttctcctccccctccggttcggcttcgggttcgtgaggttctccggggttcggtttagggggtgagcggatctatatggcggcgaaagatgttgagtaccgatgcttcgtcagcggcctcacctgggccacggacgaccactccctacacaacgccttcagcacctacggcgaggtcctgaagtccaagatcatccatcgatcggctagacgcatgaggtcccgcggattcggcttcgacaccttctccactgatgaggcgatgcgtaacgccttcgacggcatgaacaggaaggagctggacggccgcaacatcaccttatacgaggcccactcccgcagagtccgtgtgagctgccgaggatgtggatacggtggtggccgttgaggcatctgatactgcggcggcgggcacc

SEQ ID NO: 2016 - DNA, 835 bp, Zea mays
  Clone ID: PAT_MRT4577_38506C.1
tcatttcaaataggtcttccagctaagttcaccatcttcaacttcggtgctcagaaggacgtgtccaactggggcctgttcttctgcgtggcagttggtctgtgggctggtctgattattgggtttgtgaccgagtactacactagcaatgcctacagccctgtgcaagatgttgccgattcctgcagaactggtgctgccaccaacgtcatcttcggtcttgccctgggttacaagtccgtcatcatcccaattttcgctattgctgtcagcatctacgtcagcttctctattgctgcgatgtacggcattgcaatggctgctcttggcatgcttagcacaatggcaactggtcttgcgatcgatgcttatggtcccattagtgacaatgctggtggaattgctgagatggctggcatgagccacagaatccgtgagaggactgatgctcttgatgctgctggcaacacaaccgctgctattggaaagggtttcgccgttggatcagctgctcttgtgtccctggcacttttcggtgcttttgtcagcagagccggcgtgaaggtcgtcgatgtcctatctcccaaggtgttcattggcctgattgttggagccatgcttccgtactggttctctgccatgaccatgaagagtgttggaagtgctgctctcaagatggttgaggaggtccgcaggcagttcaacaccatccccggactgatggagggaactgccaagcccgactatgccacctgtgtcaagatctccactgatgcttccatcagggagatgatcctcccgggtgctttggtcatgctcacccccctcattgtcg

SEQ ID NO: 2017 - DNA, 506 bp, Zea mays
  Clone ID: PAT_MRT4577_38545C.1
cgccagaggtaatttcgtcctcgattcgaccccgattcgtctcgcccgcgaccgggattccctccgccaggagcggatctgaacgctgcgctccgtggcgtcgcacgaatccgccatgaagggggacaaatccaagggcgccgccaaggacgatgccaagctgacgcgtgaagagcaaggggacggagaaccccgccaaggccaggaaggggaaggtcgccaaagaccccaacaagcctaagagggctaccagcgctttctgcacgttcatggaggaatttcgcaaggttttctaggagacaaaccctaagaacaagcctgccgcaggggaggaagaagttgctggcgacaggaggaaatcccggagagagacggcaaaggctccctatgtatccaaggcctaacacgctcaagctacagtaaaacaaggccatcaaaacctacaacaagggagagaggactgctaataagaaggctcccgccaaggagcaacaggaggcagacca

SEQ ID NO: 2018 - DNA, 367 bp, Zea mays
  Clone ID: PAT_MRT4577_38578C.1
gttccttagggtaatgtggaggggcgatggcggcgtctgatgtggagtaccgatgcttcgggggaggacttgcctgggccaccaacaaccagtccctagagaatgccttcccctcctacggcgagatcctcgactacaaggtcatcaccgaccggcagaccgcgaggtcccgccgcttcggctttgttaccttatcctgcgagaactccatgctcgacgctatcaataacatgaacggcaaggatctcgacggccgtaacatcaccgttaaccagacccactcccatgccggcggccgtggcaccggtggctacagcagaaagacggagcggcggcgccggttatgagtggccaacgccacgaccgc

SEQ ID NO: 2019 - DNA, 671 bp, Zea mays
  Clone ID: PAT_MRT4577_38644C.1
agaaaagccgccgccgccgcatcctgcagcagccgcatccgcagcaggcgagcgagatggtgtttgtgaagaaccagaagaccagggcctactccaagcggttccaagtgaagttcaagagaaggagacaggggaagaccgattacagggccaggctcaggctcaccaaccaagacaagaacaagtacaacacgcccaagtaccggtttgttgtacgatttaccaacaaagatgtcactgcccaaattgtgtacgctaccattgctggtgatatcgtgatggctgctgcctattcccatgagcttcctcggtatggtcttgaagttggcctcaccaactatgctgcagcgtactgcactggtctgcttttggcccgccgtgtgctcaagtgccgtgatttggatcaggaatatgagggcaatgttgaggccactggggaggacttctctgttgagccggctgatgagaggaggcctttccgcgcgctcttggatgttggccttattaggaccactactggaaaccgtgtgtttggtgcccttaagggagctttggatggtggtcttgatattccgcacagtgacaagagatttgctggcttcaagaaggatgagaagcagctggacgctgagattcaccgcaaatacatctatggagggcatgttgctgac

SEQ ID NO: 2020 - DNA, 1952 bp, Zea mays
  Clone ID: PAT_MRT4577_38702C.1
atcaacgcacaaggctgactgttttgccatgtgaggagaccgcggtgggttgctttgatgcttgtcaattaacgcacgctatgggcacttccgctgccgtcgtgcggcgcgcctgcaactgcaacgctaccacctcgactcgcccctgctagcagcatccgggaagctgccctgccactgccaggctgccacaccgaggtgctcccttgactccctctcctctcctcttctcgcgcacgtggtctgtgcccgtacgcggcggcgctgccgctcaccagaccggccgccgccacgtctgcttccgcgcctccccgcctcctcaccgtccgcccccttttacctgcctgatcattttattataaatgtggggcgagagaactcatcataagcactggcatcaaggtcatggtacctcggggaattccaacaacaaaaagcatgataagcggcagccaaaatttataccagacaattatagctccgtcgatgaggttactactgctctgcgagaagctggcctcgaatcgtcaaatctaatcctcggtattgatttcaccaaaagcaatgagtggtcaggcaggcattcctttagaagaaaatctctgcatgccattaatggcaccccaaatccatatgaacaagctatctctataatcgggcgaacgctgtcaccttttgacgatgataacttgataccatgttttggatttggcgatgcttctacacatgatcattctgtgttcagtttctacccagagaaccgaccctgtcgtggctttgaggaggttcttgtaaggtatcgacagattgtaccacatttgaacctttcaggaccaacttcttttgcacctcttatttatgcagcgatttctgttgttgaaaacagtaattggcagtaccatgtcctcgtgatcatagctgatggacaggtgactgccgcgaatataaatgatggaagattaagtccacaggaacaagcaactatacaagcaattgtcgatgctagctactatcctctttcaatagtaatggttggggtgggtgatggaccatgggatgcgatgcagcattttgatgactgtatccctgaaagagcttttgacaattttcagtttgtgaacttcactggtattatgtcaacaagtaaggatatgtcaaagaaggaggctgcatttgcccttgcagctcttatggaaataccttctcagtataaagcaacgcaaggcctccgacctccagaaaagcaagcacaaaggattggctctcctaggattcttcctcctccaaataaagttcttgaaaatgataatgccgccgccgctgcttcgcaccctcctcaaactgcaagctcgaaatcaactggtattggcaaaagtgctgctgacgagcaggtatgccccatatgtctaaccaatccaaaggacatggcttttcagtgtggtcatctgacatgtaaggaatgtggcccaacactatcaacgtgcccattgtgccgcgctctaatcaccatgcgtgtgaggctctactcctaagtcggttggtgtctggagggatgggaccaaacagaaaggagcaagaactttggggcgcaaggactgcgctacgatcttgagatatggtccatatggatgtcatgataacgatgcatgtacagaaaccttgtccgtgcctattcagtaatgtcgttgatgagtatcttccatcaatcacatgtaaaatttctaatgttatcttgtattagtagcaggggattgcttgttgagtggaataccaccagttgttcagcaacagatagtaaactccatgtgcatttggaagtcacttttgtgatttgtgtcaaaaaaaaaaaaaaaaaaagccaaaataaaaaaaaaagggttttttaataattttataaaatataaataataatatatacaatataaataataataatacctcggagggggggt

SEQ ID NO: 2021 - DNA, 279 bp, Zea mays
  Clone ID: PAT_MRT4577_38703C.1
aggaactgagcggtggggcccgcgcggctcttatatcctgttcgctaccgtgatgtttacgctagtccagagggtttatcttccgtcctcttctttggtggtgcccattttggtttttgattgcaagggccctttttgtcaagtggtaatgctggggtcattctcggcttcagcaaacccatgcattaaccaacatggactgtggatcgatggatgcttttactcctgtcaagatttgttcttaattaattctaaggaaaaaatggtgcttcttggtgc

SEQ ID NO: 2022 - DNA, 325 bp, Zea mays
  Clone ID: PAT_MRT4577_3890C.1
cggcaaggagctcgacggccgtaacatcaccgctaaccaggcccaatcccgtggcggtggcggtggcggcggaggctacggcggcggtcgcatgcggcagcagcagctatggcggcaggcgccgtgaccgcggttatggcggctgcggcagctactgcgtgtcggcgcgaaggtggcggctgcggctactgacgcagaggcggatacgagggtcggcgcgagggtggcggcggcggctacgtgctgcagtgcatgctgcggctgcaggtactgatgtgtaggcccatgctggcttctgccgaggtatattatctatctatagtat

SEQ ID NO: 2023 - DNA, 316 bp, Zea mays
  unsure (1)..(316): unsure at all n locations
  Clone ID: PAT_MRT4577_39022C.1
cacttgctttccctccaacaagctaaggaaggcgggtcgtcatccctcttctagctcgttttattatccatggcggaggagaagcaccaccaccaccacctgttccaccataagaaggacgaggagcaggaggagcagctcgccggcggcgggtacggcgagtctttcgagtacaggggggggggggtgacngaggtggtgtccacggacaaaaacgagtacgaggagacaaggaggagaagcagtataagcacaagcagnacctnggngaggccggngccatngncgncggngccttngnactntacnagaagca

SEQ ID NO: 2024 - DNA, 375 bp, Zea mays
  Clone ID: PAT_MRT4577_39039C.1
gcaacgtagaaagcacaatagtgtaccaacaatggcagccaaaatattttgcttccttatgctcgttggtctttctgcaagtgttggtaccgcaaccattttcccacaatgctcacaagctcctatagcttcccttctttccccataccttttaacaacggtgtctttaatgggtgaaaccccaattggttaacccttcaggatccaaccaggcattgcaaccagcattttaccattattacccttggtccttcaacaaccgtgagccctattacaggaattacctttgggccatttggggggacaaaacattagggcacaacaactacaacaacttgtgctagcaaaccttgctgcatactcttagcaacatca

SEQ ID NO: 2025 - DNA, 1678 bp, Zea mays
  Clone ID: PAT_MRT4577_39086C.1
gggtacctcgaggaattcggccggaggcgtgtacgcccaccagccaccacacatcctctctcccttccagtcccaggagcgtggcctcactctcctcgtcgcatcccccctcctcatcttcgcagcgcgggcggcggcaatggcgatggcctccacctacgcgccgggcggaggcgcgcgggcgctcgcgcagggtagatgcagggtccgcggtcccgcggggctgggcttcctcggcccctccaaggccgccggcctcccccgccccctcgccctcgccaggcggatgagcagccccgtcgcggtgggcgccaggctgcgatgcgcggcgtcgtcgtcccccgcggcggcgcggcccgccacggcgccgcgcttcatccagcacaagaaggaggccttctggttctaccgcttcctctccatcgtgtacgaccacgtcatcaatccgggccactggaccgaggacatgcgcgacgacgcgctggaacctgccgacctcttcagccgccacctcacggtcgtcgacgtcggcggcggcacggggttcaccacgctcggcatcgtcaagcacgtcaacccggagaacgtcacgctgctcgaccagtccccgcaccagctcgacaaggcccggcagaaggaggccctcaagggggtcaccatcatggagggcgacgccgaggacctcccgttccccaccgactccttcgaccgatacatctccgccggcagcatcgagtactggccagacccacagcgggggatcaaggaagcctacagggtcctgagatttggtgggctagcttgtgtgatcggcccggtctacccgaccttctggctgtcccgcttcttcgccgacatgtggatgctcttccccaaggaggaagagtacatcgagtggttcaagaaggctgggtttagggatgtcaagctgaagaggattggaccgaagtggtaccgcggtgtccgaaggcatggcctcatcatgggctgctccgtcacaggcgtcaagagagagcgcggtgactctcccttggagcttggtcccaaggcggaggatgtcagcaagccagtgaatccgatcaccttcctcttccgcttcctcgtaggaacgatatgtgctgcctactatgttctggtgcctatttacatgtggataaaggaccagatcgtgccaaaaggcatgccaatctgagtgaagggaatgagctgcatggaagagaggatagccaacgtctgaattttactcttctctatattagacgcttcctgcctgttttgtattaatacctcttgttttccttctgctatttacttcttgcactgctgttcctgtttgtggtaattaataatactaagacatcgatgttctcctgtttcttgagcatgactggttgcagtggaacctcgaaattaaattatatgatgtgtaatttagttggttaaattatataaatttgtatagtttatttggttcctggttcaacaaaattccttctttcttgtcaccagtacgatttctaagacctgttttgttactctatgctcaatctttgttacccttgttggatttcatctctagcttaatccaacttgcttataattagaatgcttataattagaaggcttcggactttggtgttgttagtattgttacgctaagtggtagagtggtaatatt

SEQ ID NO: 2026 - DNA, 711 bp, Zea mays
  Clone ID: PAT_MRT4577_3916C.1
cccacgcgtccggtgaggttccatctcacaatcgaatcatgtgggagtacctgcatgttatcacagggaggtcggcagttattgtaggaatcgtggcgcttttcacaggaatgaagcatttaggccataggtatgacagtgagaatgtagaggagctcacttgggccttaatgctgtgggtgctttcagttatcgttgttgtgctgtgcttggaatataaggaagtcaaaagaaggatcggtgacagaagtgccagagggcactgggtattaggcaacaccgaggaggaggattcagttgatcttttgcatcctgatggtgcagccaggaattcagaatctagcgctactggtgtaatggaggtgcagcttgaacctctcactagatgatgtagatcaatctgtcagatacaaatacacctgaatacctgatccatatcttatatggatgataggtcagccggcatggattttctggttcagaggaaattgatctggaatccccatgtttgttttaagcagaatggttccagactagacaagatgttcagattctgttcttaatttcatgcatcacacctttacattgtacagtgtacattttttttacaatagacaggtataatttgtgacactgccccagccattctttttgctattgatatttataaagggaaagaattaatttaggtggtcattggaatccccagcc

SEQ ID NO: 2027 - DNA, 404 bp, Zea mays
  Clone ID: PAT_MRT4577_39173C.1
tctacggcgccgggcaggtactttcttattttgggaagccacaaacatacacaaaaaaactttattattgaactataactcataagaaactaaaagaggcaccaccaatgatgggttgtaggtagaacgctaatgggtttgtcaaagcaagttggttgaatggcagcaattgttgcagttgtaagaggtgccaacgctaggcgcaacgtgctggtagaacggaaacaattgtggttgtgttaagaacgcatgagggctcacactagctagctggctgaatggtagcagcagctgctgctgtaaataaacatgagatttgaatagctgccactggcttgaatggacgaacacgctgggtgtcggcataacataactgggtgactagcagttgctccctcttacaa

SEQ ID NO: 2028 - DNA, 563 bp, Zea mays
  Clone ID: PAT_MRT4577_39195C.1
ccctctttctttcttcttttatttatttttcttttttattttctttttctttttttttctttggtttttttttttttttttttttaaaaaggactttcttatttctgggaagccacaaacatcatccaaaaaacttcattattgaagtataacccataagcaatctaaaagagggcccccccaatgatgggttgttggtaaaaccctgttgggtttgtcaaaacaagttggttgaatggcaacaattgttgcagttgtaaaagggggccagcgttaggcccaacgtgcaggtaaaacggcaacaactggtgttgggtcaaaaaggcaacagggctcacatcaactaactggctgaatggggggagctgttgctgttgtaaaaaaacagcaaagttcaatgctgccaattgggtgaatggaaaaaaatgctggggggaggcaacaactaactgaccgaatgggagttggtgttgcaaataaaccgcaaagttcaatgcaccccgttgggtgaaaggaaaaaactcccgttgcttgaaagtaggcaccaagggttcccaacacaa

SEQ ID NO: 2029 - DNA, 2682 bp, Zea mays
  Clone ID: PAT_MRT4577_39279C.1
tagcgatctagtctcctcctcttcatcccaccccacgcgtccgccctgcttcgctgttccctttccccgcccctacctggggcatctgcctctgaatcgcggcggctcccgaggcgccgcctggcgagcgtctaggcgccggtctacggcgacgatggaggtgtgatttggacgggagagagcgtggtggtgaggtctcggttttctcgatataggagatggcggcggcagaggcgcggggaggggagttccccgtgggcatgaaggtgctggttgtggacgacgacccgacgtgcctcgttgtgctcaagaggatgctccttgagtgccgatatgacgtgacaacatgtcctcaggctacaagagcactaactatgttgcgagagaataggcgtggttttgatgttataataagtgatgtccacatgccggatatggacggattcaggctacttgaacttgtaggccttgagatggaccttccagttatcatgatgtctgctgattcaagaacggatattgtaatgaacggaattaagcatggagcatgtgactatttaataaaacctgtcagaatggaggagctgaaaaacatctggcaacatgttattaggaaaaaatttaatgaaaacaaggaccatgagcattctggtagcctagatgacaccgatcgtaacagaccaaccaataatgataatgaatacgcttcctccgcgaatgatggaggtgatggcagctggaaatctcagagaaagaaaagagagaaagaagatgatgaaactgacctcgaaaatggtgatccttcttctacatcaaagaaaccaagagttgtttggtcagttgagcttcatcaacaatttgtgaatgcagtcaatcacctcgggatagacaaagctgtcccaaagaaaattttggaattgatgaatgtcccaggcttaaccagggaaaatgttgccagccatttgcagaaattcagactctacctgaagagaattgctcagcatcatgcaggaatacctcatccatttgttgcgcctgtatctagtgctaacgttgctccgttaggaggactggaattccaagctttggctgcttctggtcagatccctcctcaagctctggctgctttgcaggatgaactccttggtcgacctacaagcagtttggcgttgcctggaagggaccagtcatctttgcgagtggctgcaatcaaaggaaacaagcaccatgaagaaagagaaatagcatttggtcaacccatatacaagtgtcagaataatgcatatggtgcattccctcaaaacagcccagcagttggaggattgcaaccttttgcagcttggcccaataacaaagttggtatgactgattcaacaagcacattgggaaatgtgggcaattctcaaaatagcaatatgctattgcatgaattgcagcaacagccagacaccttgctgttaggaacccttcacaatattgatgccaaaccttctggtgtagttatgccatctcagtcgttaaatacattcccggctagtgagggtatctcacctaatcaaaatcccttgattataccatctcaacccccaagttttgtgtcatcaattcctccatccatgaaacatgaatctcttcttggattaccttcaacgtcaaccagtctgttgggcgggcttgatatggttaatcaagcttcaacaagtcaggctttgattagtagccatggaacaaatcttcctggtctcatgaaccgtagctcaaatgcaatcccttcaccaggaattagtaattttcaaagtggaaatattcattatgttgttaatcagaacgctatgggagttagctctaagccaccaggtgttctaaagaccgagagcactgactcactgagttgtagttatggctatattggtggtagcaccagtgtggactctggcttgttctcttctcagtccaaaaatccacagtatggtctactgcagaatcaaaatgatgttaacggcagctggtcgccttcacaagattttgatagttttggaaattctcttgggcaaggccaccctggtaccacttcatctaacttccagagttccgcccttgggaagttgcctgaccaaggacgagggagaaatcatgggtttgtcgggaaaggcacttgcattccaagccgctttgcagtggatgaggttgaatctccaactaacaacttgagccacagcattggaaacagtggagacatagtgaaccacgacatatttggatttagtggacatatgtgaaactttcttgaatttgtaagtagcgttgatcagtgagcactggaaacaaatctagtggtttgatgaatggttgctagtaatttcgtttcttttttttttcttctgtaattggtttataaagggaataatctatgtggcagcatgtggaatcttactttatagaagtttgttcagttcaaaggacttaaaattggtcagtcccttgtcatatagcttcttttctttgttctctttttctgtaattaccaattgtagcattatttttatgaccgtcgtaattcagcctagtcgatttattcccggccccaaatcggctatgtaacagcataggaatcttctttatagaagtttttcagtttaaaggacttaaattatcagtcccttgcgataaaaaaaaaaaaaa

SEQ ID NO: 2030 - DNA, 2747 bp, Zea mays
  Clone ID: PAT_MRT4577_39280C.1
gccagcggtgttattagcagtaactcgtaatcgctgcctgagctctccggccaatcgcgtcatttacttgctttactaatcacgcttagcgattttagtctcctcctcctcttcaccccacctcttcctccctcccttccctccctgttccctttcccacccctgcctgaggccttccgccttcgtctctgaatcgcggcggctcctgagtcccgaggcgccgcctgatgagcggctaggcgccggatctacggcagcgttggaggtctgatttggacgggagagagcgaggtgaggtctcggttttctcgatataggagatggcggcggcagaggcgcggggagcggacttccccgtggggatgaaggttctggttgtggacgacgacccgacgtgcctcgtcgtgctcaagaggatgctccttgagtgccggtacgacgtgacaacatgtccgcaggctacaagagcactaactatgttgcgagaaaataggcgtggttttgatgttataataagtgatgtccacatgccggatatggatggattcaggctacttgaacttgtaggccttgagatggatcttccggttatcagtcagtatatatttcttcttgtttttctgtttagtatgttaacatgtggtgttggaacacatcagaaataattgctgatgaaattgcagtgatgtctgctgattcaagaacggatattgtaatgaagggaattaagcatggagcatgtgactatttaataaaacctgtcagaatggaggagttgaaaaacatctggcaacatgttgttaggaaaaaatttaatggaaacaaggatcatgagcattctggtagcctagatgataccgatcgtaacagaccaaccaataatgataatgaatatgcttcctctgcgaatgatggaggtgatggcagctggaaatctcagaaaaagaaaagagagaaagaagatgatgaaactgacctagaaagtggcgatccttctacatcaaagaaaccaagagttgtttggtcagttgagcttcatcaacaatttgtgaatgcagtcaatcacctcgggatagacaaagctgttccaaagaaaattttggaattgatgaatgtccctggcttaaccagggaaaatgttgccagccatttgcagaaattcagactctacctgaagagaattgcacagcatcatgctggaatacctcatccatttgttgcgtctgcttctagtgctaaagttgctccgttaggaggactggaattccaagctttggctgcttctggtcagatccctcctcaagctctggctgctttgcaggatgaactccttggtcgacctacaagcagtttggcattgcctggaagagaccagtcatctttgcgactggctgcaatcaaaggaaacaagccccatggagagagagaaatagcatttggtcaacccatatacaagtgtcagaataacacgtatggtgcattttctcaaagcagcccagcagttggaggattgccatcttttgcagcttggcccaataacaaacttggtatgactgattcttcaaacacattgggaaatgtgggcaattctcaaaatagcaatatgttattgcatgaattgcagcaacagccagacaccttgctgtcaggaacccttcacaatattgatgtcaaaccttctggtgtagttatgccatctcagtcgttaaatgtgttcccggctagtgaaggcatctcacataatcaaaatccattggttataccatctcaatccccaagctttctggcatcagttcctccatccatgaaacatgaatcccttcttggatcaccttcaccatcaaccagtctgttgggtgggcttgatatggttaatcaagcttcaacaagtcagcctttgattagtagccatggagcaaatcttcctggtctcatgaaccgcagctcaaatgcaatgccttcaccaggaattagtaattttcaaagtgggaatattccttatgtggttactcagaatgctatgggagttagctcaagaccaccaggtgttctaaagactgagtgcactgaatcgctgactcatagttatggctatattggtggtagcaccagtgtggactctagcttgctctcttctcaggccaaaaatccacagtatggtttattgcagagtcaaaatgatgttagcagcagctggttgtcttcacaagattttgatagttttggaaattctcttgggcaaggccaccctggttccacttcgtctagcttccagagttccgctcttggcaaattgcctgaccaaggacgagggaggaatcatgggtttgtcgggaaaggcacttgcattccaagtcgctttgcggtggatgaggttggatctccaactaacttgagccacaacattgtaaacagtggagacatagtgaacccggacatattcggatttagtggacagatgtgaaactttcttgaatttgtaattagggttgatcagtgaggactggaaacaaatttagtggtttgaatggttgctcgtattttcgtttcttccttttccttctgtaattggtttataaggggaatcggctatgtgacagcatatggaatcttgctttatagaagtttgttcagtttaaaggacttgaaattaatcagtcccttgccatatagctcctttcctttgttctcttgtagcacaatttttatgacagtcgtaactcaacctagccgatttattcctaacc

SEQ ID NO: 2031 - DNA, 1150 bp, Zea mays
  Clone ID: PAT_MRT4577_39495C.1
catggcgtccgcccaaccctccaaaccaaggcggccaagccccttccatttgccaggcggccacaccatctgatccccaattcgtttccacctatcgagccaaggtgcgacgacggcggtcgcagcgtcccctccctccctccgtaccgctgccgccggtctaccaaaaggtgaaatatttacgcaagcgaaatcagtgtcttgaagatagcttccagatatgtggggttttgcatcaaatgcttgggcatccgggctggggaagaggagtcccccaaattgcacctcttcgagtgctgcttgttccgatgacgaagcatcctcgtgcacgagcagggaagaaggcctggaatgcccaatatgttgggagtctttcaatatagtggagaatgtgccttacgtgctatggtgcggccacaccctttgcaagaactgcgtcctaggacttcaatgggccgtcatcaaagttccaactgtgccgatgcagctacccttcttcgtttgctgtccctggtgcaacctcctgtcgcttcgcatactttacaaagggaacctcacgttcccacggaagaactatttcctcctctggatggttgaggggatgaatggtgagcgggccagatcacgcccagctactcacagcgagcaacatactccatggctctcaagcagcagcagagcaaatggaaatgcaggctgctcaaatcccacaagacgccaccttccactgccaccgccggttgacactacttcgcccaccaatgcaaatcatgccaaccatggggtccctgtccctctgctgaacgcagagagggtacaggcttcgctgcgcaagtccttgtcgttcctggttcacctgacctccaagtttcccctggtgttcatcttcctcctcatagtgctctatgcgatccctgccagcgcagcagtcttgctactgtacatccttatcacggtgctgttcgcgctcccctcgttcctgatactgtatttcgcgtatccgagcctggactggcttgttagggaaatctttgcctgagatttccttgttcggtaaaatctcaatgctgttgttgagtccttgtataactgaaccttccctagatcttgttgcaagcgtggatgctattgcaaagttttggtttttaca

SEQ ID NO: 2032 - DNA, 1513 bp, Zea mays
  Clone ID: PAT_MRT4577_39766C.1
attcggctcgaggtgggattgtgggaagatgcctcgggatggcgcgcaggcggcgccgccaccggagcgcggcgagatggacgaggtggtagaggcggacccggatacggaggcggaggatcaggaggagaggtgggcgaggctgctgccggagctgctctccgacgtggtgcggcgcgtcgaggcgtccggcggcgagcggtggccggcgcggaaggacgtcgtctcctgcgcctgcgtgtgccgccggtggcgggaggccgccgtctccgtcgtgcgtccgccggcggagtccggcaagatcaccttcccctcctcgctcaagcaggtcgattgcatggcttcccttatatggcgtcatcagcggttttgatacgtaccggccattcagatatttaggatatagtttgagaagtttcctggccaattcagtgtcgtagtgttttttatttgacatctgtgtacctaaatcttacaccatttctcaaaacacagccagggccaagggagagaccaatgcagtgctttatcaagaggaataagaacaactctacattctacctctaccttggcttcacaagttcacctgtggataaagggaagtttctcatggctgctagaagatttaggcgtggtccccataccgagtacattatatctcttgatgcagaagacttatcacaagggagcaatgcatacatggggaaactgagatctgatttctgggggacaaacttcaaaatatatgatagcaagccaccatatgatggtgctaaagcatcaagtagtcgatctagtcgtcgtttcggaagcagaaggattagtccccaggtatcggctggcaattatgaagttggacaggtttcatacaaatacaacttgctcaaatccagaggccccaggagaatgtattgcactctcgaatgcccttcagcccaagagacttgggaaaactcactcaagacaaagttcaggcgccccctgggccccacaactttacgaaataaagcaccccgctggcatgagcacctgcaatgctggtgcttaaacttccatgggcgggtaacagttgcatcagtcaagaatttccagcttgtggctgctgccgaccccagtgagcctactaccaacgtggatgatgaaacggttctgctgcagtttggtaaggtcgatagcgatatgttcacaatggattaccggcaaccactctccgcgtttcaagcatttgccatcagcctcagcagctttgggaccaagctagcctgtgaatagcgatgcagtttgatgctcttcgtgtggctatatggtttgtgttggtggttgcttgcttgtttcttgttgttacgatgtgatccgttcttcgttttagttgagtatttatgtactatttgtaccacaagagatgtaataaactattgtattgtcaaacggatttgttcaaggaaattatgtgtaatgaacttttgctctagttccatgcaaaagacatttcaatgtacatctgttcatggtg

SEQ ID NO: 2033 - DNA, 1526 bp, Zea mays
  unsure (1)..(1526): unsure at all n locations
  Clone ID: PAT_MRT4577_39767C.1
ctcgctatacgccttccgcgcgggcttttgaacaagaagagagagaaaaagaaaaaggagaggcccgcgactgtagtgggattgtgggaagatgcctcgggatggcgcgcaggcggcgccgccaccggagcgcggcgagatggacgaggtggtagaggcggacccggatacggaggcggaggatcaggaggagaggtgggcgaggctgctgccggagctgctctccgacgtggtgcggcgcgtcgaggcgtccggcggcgagcggtggccggcgcggaaggacgtcgtctcctgcgcctgcgtgtgccgccggtggcgggaggccgccgtctccgtcgtgcgtccgccggcggagtccggcaagatcaccttcccctcctcgctcaagcagccagggccaagggagagaccaatgcagtgctttatcaagaggaataagaacaactctacattctacctctaccttggcttcacaagttcacctgtggataaagggaagtttctcatggctgctagaagatttaggcgtggtccccataccgagtacattatatctcttgatgcagaagacttatcacaagggagcaatgcatacatggggaaactgagatctgatttctgggggacaaacttcaaaatatatgatagcaagccaccatatgatggtgctaaagcatcaagtagtcgatctagtcgtcgtttcggaagcagaaggattagtccccaggtatcggctggcaattatgaagttggacaggtttcatacaaatacaacttgctcaaatccagaggccccaggagaatgtattgcactctcgaatgcccttcagcccaagagacttgggaaaactcactcaagacaaagttcaggcgccccctgggccccacaactttacgaaataaagcaccccgctggcatgagcacctgcaatgctggtgcttaaacttccatgggcgggtaacagttgcatcagtcaagaatttccagcttgtggctgctgccgaccccagtgagcctactaccaacgtggatgatgaaacggttctgctgcagtttggtaaggtcgatagcgatatgttcacaatggattaccggcaaccactctccgcgtttcaagcatttgccatcagcctcagcagctttgggaccaagctagcctgtgaatagcgatgcagtttgatgctcttcgtgtggctatatggtttgtgttggtggttgcttgcttgtttcttgttgttacgatgtgatccgttcttcgttttagttgagtatttatgtactatttgtaccacaagagatgtaataaactattgtattgtcaaacggatttgttcaaggaaattatgtgtaatgaacttttgctctagttccatgcaaaagacatttcaatgtacatctgttcatggtgaagtgatacttctcccttttctatcggccggggggggaaaaaacggggaaaaaaaaaaaaaaaaacaaaaangaagggcggccgccgactagagtagacgtcgacccaggaataaaa

SEQ ID NO: 2034 - DNA, 1989 bp, Zea mays
  unsure (1)..(1989): unsure at all n locations
  Clone ID: PAT_MRT4577_39768C.1
ttgaacgcggttttgcacaagcgagcaaagagagggagagagagaaagaaaagaaaagaaaagaaggggagggccgcgactgtagtggggagatgcctcggcatactgcgcccgcggcgccgccatcggagcgcggcgagatggacgaggtggtagaggcggatccggacacggaggcggaggatcaggaggagaggtgggcgacgctgctaccagagttgctctccgacgtgttgctgcgcgtcgaggcctccggcgccgagcagtggccggcgcggaaggacatcgtctctttcgcctgcgtgtgccgctggtggcggaaggccgcagtctccgttgtgcgtcctccggcggagtccgccaagatcaccttcccctcctcgctcaagcagccagggcctagggagaacccaatgcaatgctttatcatgcggaataagaactctacattctacctctaccttggcttcacaagttcacctgtgtataaagggaagtttctcatggctgctagaagacttaggcgtggtccccatactgagtacattatatctcttgatgcagaggacttatcacaagggagcaattcatacatgggaaaactgagatctgatttctgggggacaaacttcaaaatatatgatagcaagccaccatatgacggcgctaaagcatcaagtagtcgatctagtcgtcgtttcggaagcagaaggattagtccccaagtatcgtctggtaactatgaagttggacaggtttcatacaaatacaacttgctcaaatccagaggccccaggagaatgaattgcactcttgaatgcccttcagcgcaagagacctgggaaaactcactcaagacaaagttcaggaggcccttgggtcccacaactttacgaaacaaagcgccccgctggcatgagcagctgcagtgctggtgcttaaacttccatgggcgggtaacagttgcatcggtcaagaatttccagcttgtgactgctgccggccccagtgaccctactagcaacgtggacgaggaaacggttctgctgcagtttggtaaggtcgacgatgatattttcacaatggattaccggcaaccgctctctgcgttccaagcttttgccatcagccttagcagctttgggaacaagctagcctgtgaatagcgatacggttcgatgctcgtcgcgtggctatatggtttgcggtggtgggtgcttgctcgccgttgttacaatgtgatctgttcttttttttttagttgagtatcgacgtactatttgtaccatgctgttgtacaagagatgcactatactgcattactgctgtgttgtcaaaaggacttgttcaagaaggaaatactgtgtcataaactttttgctctgattccatgcaaaaggcatttcggtggccggtgttaaaaaatattggattgtcaacggatttgttcaaggaaattatgtgtaatcaacttttgctctagttccatgcaaaagacatttcaatgtaaaaaaaaaaaaggtgaaagaaaaaaaaaaaaaaaaaaaaaaaaaaaaaaaaaaaaaaaaaaaaaaaaaaaaaaaaaaaaaaaaaaaaaaaaaaaaaaaaaaaaaaaaaaaaaaaaaaaaaaaaaaaaaaaaaaaaaaaaaaaaaaaaaaaaaaaaaaaaaaaaaaaaaaaaaaaaaaaaaaaaaaaaaaaaaaaaaaattttttttttttttttttttttcccccccccccccccccccgggggggaaaaccccccccggcgggggggaccccccccgtccccctttaaaaaccccccccccccgagggggggggggggtttccaaaaaaaaagggggggggggggccccaaaattggggggggacccccccccccggggggaaaccccgggggggggggggggggcccccccccccacccccccccccccnaggggggggggccctcaatatttgcctaaaaaaaaaaaggggggggga

SEQ ID NO: 2035 - DNA, 480 bp, Zea mays
  Clone ID: PAT_MRT4577_398C.1
aaaaactaaaaagtccttttttatttctgggaacccacaaccttcagcacaaaaacctttattatggacctttacctcataaaaaactaaaaagggccccaccaatgatgggttgtgggtaaacccctgctgggttggtcaaaccaggttggttgattggcaccatttgttgcagttgtaaaagggtcccaccgttaggcccaccgtcctggtaaaccggcaccacctggggttgtttcaaaaaggtaccaggcctaaccccacctacctggctgaatggtagtagttgttgctgctgaaaataaccaggaaagtccaatgctgccagttggttaaatggaaaaaattgctgggggtaggcaccaggtacctgcctaaatggaacttgttgttgttgcaaataaaaaccaaagttcaatgcacttagttggttaaatggaaaaaactgctgttgcttaaaagtagccaccaaggtttgcc

SEQ ID NO: 2036 - DNA, 380 bp, Zea mays
  Clone ID: PAT_MRT4577_40046C.1
agaaatgtacttccttattagtgggaagccacatacatcataccaaaaactttattattgcactataactcataagaaatctaaaagagggccccaccaatgacgggctgctggtagaatgctgttgggtttgtcaaaaccaagctggttaaatggcaccaattgatgcagctgtaagagggtgccatggttacgctccatgtgctggtagaactgcaaccatctgtgctgtgtcaataaggtaccagggctcacaccagctagctggctgaatgtgagtaggagctgctgctcgaaataaacaggagagctccaagctgcccgttggttgaatggaacaaactgctgggggtaggcaccacatagctggctgaatggta

SEQ ID NO: 2037 - DNA, 1899 bp, Zea mays
  Clone ID: PAT_MRT4577_40235C.1
tcccctgcaactgcaagtcgtcttcttccccaagcctaaaaccaacaacagtttggcagatcgcccggctcgatcgatcgcagccatggtgctctccaaggccgtctccgagagtgacatgtccgtgcactccacgttcgcgtcgcgctacgtccgctcgtctctcccaaggtaccgcatgccggagaactccatccccaaggaggcggcgtaccagatcatcaacgacgagctcatgctcgacgggaacccgcgcctcaacctggcgtccttcgtcaccacctggatggagcccgagtgcgacaagctcatcatggccgccatcaacaagaactacgtcgacatggacgagtaccccgtcaccaccgagctccagaaccggtgcgtgaacatgatcgcgcatctcttcaacgcgccgttgggcgagtccgagacggcggtgggcgtcggcacggtgggctcgtcggaggccatcatgcttgccgggctggccttcaagcgcaggtggcagaacaagcgcagggccgagggcaagccgttcgacaagcccaacattgtcaccggcgccaacgtccaggtttgctgggagaagttcgcgaggtacttcgaggtggagctcagggaggtgaagctgcgcgacggctactacgtgatggaccccgagaaggcggtggagatggtggacgagaacaccatctgcgtcgccgcgatcctgggctccacgctcaacggcgagttcgaggacgtgaagctgctcaacgacctgctccaagccaagaacagggagacccggtgggagacgcccatccacgtggacgcggcgagcggcggcttcatcgcgcccttcctgtacccggacctggagtgggacttccgcctgccgctggtcaagagcatcaacgtcagcggccacaagtacggcctcgtctacgccggcatcggctggtgcatctggcgcagcaaggaggacctgccggaggaactcatcttccacatcaactacctcggcgccgaccagcccacgttcacgctcaacttctccaagggctccagccaagtcatcgcgcagtactaccagctcatccgccacggcttcgaggggtacaggaacatcatggagaactgccacgagaacgccatggtgctcaaggagggcctggagaagacgggccgcttcgacatcgtgtccaaggacgaaggcgtcccgctggtggccttctccctcaaggaccgcagccggcacgacgagttcgagatctcggacatgctgcgccgcttcggctggatcgtgccggcatacaccatgccccccgacgcgcagcacgtcacggtgctccgcgtcgtcatccgggaggagttcagccgcaccctcgccgagcgcctcgttctcgacatcgagaaggtgatgtaccagctggacgcgctcccgtccaggctcccgccccctcccccggcggcgccgctgctcaggaaaaagacggagctggagacgcagaggtcggtcacggaggcgtggaagaagtttgtgctcgccaagaagaccaacggcgtctgctagtgacgcttccaccgctacacacaacactaccatggtcaacgggccttcttccgtgctgatttgagtgagcaccgcgatatctaggtagtctaatatgcttcgtgtctttccgtaatttgtgcatgcagttgctatgcaccgagtgagttgctatatatgttcgatagcaacagtttttttctccccaatgcaaggaagagagtaatagttgaggctggtgtcgattattgttatccatgcccatgcgcgtgcagttattacctccattctaaactgtaatctattttaatttcttcagagagtcaaagcccctcaagttttattaaacctataagatttat

SEQ ID NO: 2038 - DNA, 5088 bp, Zea mays
  Clone ID: PAT_MRT4577_40273C.1
ggcacgagctctgttcctcatctcccgttcaccccgccggcgccgggcgcgctctctccacgtggcgatctccgaccgtaacggccgctgcccgggttttcgccggtcccttctccacatcttctctgcacccctcgtctgcgacgagcacccaccagcagaatcaattggaccgtctgatacatctatcgattgagggaagcaggttctaccgcaaagcatataatggctggttttcacgtctaagtactgagcactatccggctgcatcgattaatatgcctcagtatatgcgctctgggtggcatctcttcttaatgctccattcgagatcaccagaattggtcaaggacccggtgtcctgcatccatggattagttggtgtgttggcgattcttttgattaacgtgccagctaaattgaggagcttcacgattgaaggctcttctcacttaatcaaacaaactgagaaaggcgtggatcttattgcttcattatgtcataactatcatacctctgaagaacgtttgaaagaaatgttgcacaagtctcacaatgcaatagaagacattttccatatgaaagcactaagtgcttcagagtgcaaaccagaaaatttggataagatagacacagatgacctgatgtatttcaaaggtctgattgatatggaatgtttccagtcaaatttggaaaaaatggagaaactatgtaattctaatagctgtaaaggggagcttgattttaaatcaattttgatcaataatgattatattccctatgatgagaactcgacgggggattccaccaatttaggacattcaaagtgtgcctttgaaacattggcatctcccacaaagacaataaagaacatgctgactgttcctagttctcctttgtcaccagccaccggtggttcagtcaagattgtgcaaatgacaccagtaacttctgccatgacgacagctaagtggcttcgtgaggtgatatcttcattgccagataagccttcatctaagcttcagcagtttctgtcatcatgcgatagggatttgacaaatgctgtcacagaaagggtcagcatagttttggaagcaatttttccaaccaaatcttctgccaatcggggtgtatcgttaggcctcaattgtgcaaatgcctttgacattccgtgggcagaagccagaaaagtggaggcttccaagttgtactatagggtattagaggcaatctgcagagcggagttacaaaacagcaatgtaaataatctaactccattgctgtcaaatgagcgtttccaccgatgtttgattgcatgttcagcggacctagtattggcgacacataagacagtcatcatgatgtttcctgctgttcttgagagtaccggtctaactgcatttgatttgagcaaaataattgagaactttgtgagacatgaagagaccctcccaagagaattgaaaaggcacctaaattccttagaagaacagcttttggaaagcatggcatgggagaaaggttcatcattgtataactcactgattgttgccaggccatctgttgcttcagaaataaaccgccttggtcttttggctgaaccaatgccatctcttgatgacttagtgtcaaggcagaatgttcgtatcgagggcttgcctgctacaccatctaaaaaacgtgctgctggtccagatgacaacgctgatcctcgatcaccaaagagatcgtgcaatgaatctaggaacacagtagtagagcgcaatttgcagacacctccacccaagcaaagccacatggtgtcaactagtttgaaagcaaaatgccatccactccagtccacatttgcaagtccaactgtctgtaatcctgttggtgggaatgaaaaatgtgctgacgtgacaattcatatattcttttccaagattctgaagttggctgctattagaataagaaacttgtgcgaaagggttcaatgtgtggaacagacagagcgtgtctataatgtcttcaagcagattcttgagcaacagacaacattattttttaatagacacatcgatcaacttatcctttgctgtctttatggtgttgcaaaggtttgtcaattagaactcacattcagggagatactcaacaattacaaaagagaagcacaatgcaagccagaagttttttcaagtatctatattgggagtacgaaccgtaatggggtattagtatcgcgccatgttggtatcattactttttacaatgaggtatttgttccagcagcgaagcctttcctggtgtcactaatatcatctggtactcatccagaagacaagaagaatgctagtggccaaattcctggatcacccaagccatctcctttcccaaatttaccagatatgtccccgaagaaagtttcagcatctcataatgtatatgtgtctcctttgcggcaaaccaagttggatctactgctgtcaccaagttccaggagtttttatgcatgcattggtgaaggcacccatgcttatcagagcccatctaaggatttggctgctataaatagccgcctaaattataatggcaggaaagtaaacagtcgattaaatttcgacatggtgagtgactcagtggtagccggcagtctgggccagataaatggtggttctacctcggatcctgcagctgcatttagccccctttcaaagaagagagagacagatacttgatcaattataaatggtggcctctctcgtatatagctcacagatccgtgctccgtagcagtctattcttctgaataagtgggttaactggagcgatttaactgtacatgtatgtgttagtgagaagcagcagtttttaggcagcaaactgtttcaagttagcttttgagctatcaccatttctctgctgattgaacatatccgctgtgtagagtgctaatgaatctttagttttcattgggctgacataacaaatctttatcctagttggctggttgttgggaggcattcatcagggttatatttggttgtcaaaaagtactgtacttaattcacatctttcacatttttcactagcaatagcagccccaaattgctttcctgactaggaacatattctttacaggtataagcatgccaactctaaactatatgaatccttttatattctcatttttaagtacttctctgtttctgctacttttgtactgtatatttccagcttctccatcagactgatgatcccatattcagtgtgctgcaagtgatttgacatatgtggcttatccttcaggtatgtctcatgttgtgacttcattgctgattgcttttgtaatggtactgttgagttcatttctggttacaatcagcctttactgctttatattgttctactaattttggcttgcacagccaggatgattggttttctgcatcaatcaatcttttttaggacaagatatttttgtatgctacacttcccaaattgcaattaatccagaagtctaccttgttttattctattagttctcagcaacagtgaatgaatatgaatcagtcatgctgatagatgttcatctggttattccaaacaatctgacatcgcatctctttctgcaagtgagatgaagaaaacctgaaatgctatcaccatttaaaacattggcttctggaagttcaggtgattagcaggagacgttctgacattgccattgacatgtacggtagtgatggcaggagacgttcttaaacagcagctgctccttcagcttgtaatgtctgattgtattgaccaagagcatccaccttgccttatggtactaactgaatgagctggtgacgctgactcatctgcataatggcagatgcttaaccatctttaggagctcatgtcatgattccagctgcaccgtgtgcaaatgtgaaggccctgcaagggctttccaggccgcaccaatcctgcttgcttcttgaagatacatatggtgccacctaaataaaagctgtttctggttatgtctgtccttgacatgtcaacagattagtgttgggttgcaatcatgtggtgtttaagtcttggagaaggcgagaagtcattgctgccagcattgtgatcgtcaggcacagaagtactcaaaagtgagagctacttgttgcgagcaaacggagggcgatataggttgataatcaatttcagttctctatatacaagcagcggattttgtttagagttagcttttgagatgcatcatttctttcacatctgattctgtgtgttgtaactcggagtcgcgtagaagttagaatgctaactgaccttaattttcaccgaataatttgctagcgtttttcagtatgaaatccttgtcttaaataaaaaaaaaaaaaaatcatgggtatattttgtctttagatacttgtcatgtttttaatcatttattacatatttatagttttgactaagtactctgcgttgttaccactgcttaagggcgatagccccctttcaaagaaaagagagacagaaacttgatcaattataaatggtggcctctctcgtatatagctcacagatccgtgctccgtagcagtttatttttttgaataagtgggttaactgtagcgatttaactgtacatgtatgtgttagtgagaaccaccagtttttaggcagcaaactgtttcaagttagcttttgagctatcaccatttttttgctgattgaacatatcccctgtgtagagggctaatgaatctttagttttcattgggctgacataacaaagctttatcctaattggctggttgttgggaggcctttaaaaaaaaaaaaaaaaaaaaaaaaaacgtcgtctggcgagtggtgccggtgtgtgtacgcccgtgctggacgaagatatatatatttggtcgtctggggctctgggctgggatgttattcttgtgatattttcgaggtatatactgttgttcttgttcggtcgctgggtcctgcagctagcaaaggtttgtacacaaattctgctggctgcgctggtaatgtgttcatctgtgaaatggtaatctgatcctactgatattatcatgagcc

SEQ ID NO: 2039 - DNA, 2332 bp, Zea mays
  unsure (1)..(2332): unsure at all n locations
  Clone ID: PAT_MRT4577_40303C.1
aacgtgaacccgcagtcccacacacaagtgcatagaattcacaagagctgaggcctgaggggggagatagaggagtggcaccgccgtccgccgcaccggcactggaggcgaaatttcattatttggcgcactggagcggggagagagagagagagagctggaaggtggaagcaaaaatctagagtctatagagggaggatggagatctggagctcctggggagcaacgagaagcagctggaaaatctcatggtaacggttggcagagggatccttgatctcttcctgagctggaggactccatctttcgagccgcggacccggagaaacttggatctctaggccatccaagaaaaggtttactcattccttgctggtagcctactgcattgctgcctgcccccagatccgagctgccgcaagaagaaaggtggaatctttgctcgcctgctgcacaaatccgtccaaatttggggtttcttgagctgttcttgggagcgccgtgcttcatgtttttttttgggggaaaggtcgttttctttgctggggtagatgcgggagtgatgtcgaccactttatgagctttccccctgctattttggggtttagattcgctctagttatggcggatcttgacatggagcattaggagtttctttcgtcgaaggcggaaggagcttgctgtaagctgcaatgtctctcaagagcattgtgcgggagctgaaggagatgagggacggtatcgggagcatgtcgagacgcggcggcagcggctccgacgggcgcgtcggccacggccgctcggggtcgcggcattcttggcccagcctgtgggcggagcagcaacagtcgcatcggcagggccagggccctgggtcccgggcccggaggggccgcatcatcagcatcaggggcggtgggcgaacttgcctccggaactgctgctggatgtgatacagagggtggagtccagcgaggcgacgtggccggcgcggcgccaggtcgtggcatgcgcagccatttgccgatcatggcgcgaggtcaccaaggaggtggtgaagacgctcgaggagtgtggcaggatcaccttccccatatcccttaagcagccggggcctcgtgaaatgccggtccaatgttttgtgaggagggagagggcaacatccacatatctactctacctagggctcagcccatctatgaatgtggagaaagacaagttattgcttgctgcccgtaaggtcaggcgtgccacaaggacttattttgtgatatcactggtctctgatgatttctctcactctagtagcacctacgttggcaaactgaagccaaacttcctcggcacaaagttcacaatcttcgacagccagcctcctcctgacgctgtagtgctaccaaacaataagacaagcaaaaggcagtccaagcaagtatcaccgagactgccgctaggcaattacaatgttgctacagtcacgtacgagctcaccgtcctacgcaacaggggtccaaggagaatgcaatgcaccatgcactcaataccagctgagtgcatccaggagggcgggaaggcccctacccctacaggcgccatccagtcgcttgacgagccagtgtcgtccaccttacctagtgccaaagggaaggaagtggctgtagaattctcttcgacaagcctcagcgccgatctgtctggaccggcctgcgtgaacggaacacctctagtgctgaagaacaaagctcctcgttggcatgagcagctgcagtgttggtgcctcaacttccgggggcgtgtcaccgtcgcgtcagtgaagaacttccagctcgtcgcctctgttgatccttccctaaacatccccgcagcggagcaggagaaggtgatcctccagtttgggaagataggcaaggatatattcaccatggactaccggtacccactctcggcgttccaggcctttgcgatctgcctgaccagcttcgacaccaaaccggcctgcgaatgattgacggtagtttaaaatcccgggtggtggagtcttgtgtacgtccgtgttcttccagggcgatgtaaattctttatcttgccatgctgggcctctgctgcccaggcgaaatggtagcttgtgaggtggagatgagcgatagcatctgtaccataggaagagatttgagcgaccttgtttacccaactgttatatgtattattgctgggatgtttggctgtgaaatatcactgccgtatcgataatggacgttgtgaccattttgctantattaaananagggggcgccctctcagaggactccacgctgcgagcgcgtgcatccac

SEQ ID NO: 2040 - DNA, 206 bp, Zea mays
  Clone ID: PAT_MRT4577_40351C.1
gcgacgcgtggcgcactatggaccttgcgttatctgaaactccttcgactggtgcggcatgagaatgtcattgctgtgaaggatgtaatgatgccaatacacacgagaagctctaaggatgtgtactagaggtacgaactcatggatactgacttgcaccatataatcaaatcacctcaaggccttagcaatgaccactgacagta

SEQ ID NO: 2041 - DNA, 2091 bp, Zea mays
  Clone ID: PAT_MRT4577_4043C.1
gccggccgggcctcgaattacgggcgacactcgcggctccttccctattttaagaccccaccacggcaccacctcctccgcaaacaacacacgaacacggaacaccgcaccgcaacgtagccggctaggggaagagctctttccttcagctgtgccgtgcacaacgcacggcacgctggtttggtttgcatcgcccccgccaagaaagacgctgccgtgagcgggcagagcgggcgggaagcagcagcaggcgggcgacatgccgagcggcagcgcgttctccgggtcggtgaacctcaagcacgtcaagctggggtaccagtacctggtgaaccacttcctgacgctgctgctggtgccggtgatggccgccacggcgctggagctggcgcgcctcggccccggcgagctgctctcgctgtggcgctcgctggagctggacctggtccacatcctctgctcggcgttcctggtcgtcttcgtcggcaccgtgtacgtgatgtcgcggcccaggccggtgtacctggtggactacgcctgctacaagccccccgccagctgccgcgtgcccttcgccaccttcatggagcacacgcgcctcatcagcgacgacgacaagagcgtgcgcttccagaccaggatcctggagcgctcggggctcggcgaggacacgtgcctcccgcccgccaaccactacatcccgcccaaccccagcatggaggcctcgcgcgccgaggcgcagctcgtcatcttctccgccatcgacgacctcgtccgccgcacggggctcaagcccaaggacatcgacatcctcgtcgtcaactgcagcctcttctcaccgacgccctcgctctccgccatgatcatcaacaagtacaagctccggagcaacatccgcagcttcaacctgtcggggatgggatgcagcgccgggctcatctccatcgacctcgcgcgggacatgctccaggttcacccgaactcgaacgcgctggtggtttcgaccgagatcatcacccccaacttctaccaggggagccggcgcgacatgcttcttcccaactgcctgttccggatgggcgcggctgcgatcctgctgtcgaaccggcggcgcgaggcccggcgcgccaagtaccggctggtgcacgtggtgaggacgcacaagggctcggacgaccgcgcgtaccggtgcgtgtacgaggaggaggacgagcagggcttctcgggcatctcgctgtccaaggagctgatggccatcgccggcgacgcgctcaagtccaacatcacgacgatcgggccgctggtgctgcccatgtcggagcagctgctcttcttcttccgcctggtggggcgcaagctcgtgaacaaggggtggaggccctacatcccggacttcaagctggcgttcgagcacttctgcatccacgcgggcgggcgcgccgtcatcgacgagctgcagaagaacctgcagctgtcgccgcgccacgtggaggcgtcccgcatgacgctgcaccgcttcggcaacacgtccagcagctccctctggtacgagctcgcctacatcgaggccaagggccgcatgcgccgcggcgaccgcgtctggcagatcggcttcggcagcgggttcaagtgcaacagcgccgtctggaagtgcctccgcagcatcaagacccccaccaacgggccctgggacgactgcatccaccgctaccccgtcgacgtcccggaggtcgtcaagctttgacctacgggctacggctacggctacgacaacgagcgagctcggccggcaccgccgccgccgccgccgccgtcctactgtgtacctgtacgtcctctctgttctcttctcttcccatttccttcgctattaatataaaaaaggtaaaaaaagaaagaaagatccatatacactctgactgttggaagtattgtcatccctcaggcaagggattgggtgattgtaatttgcttgaatgagaatgaatcgtgcacttgtaaattgtaatccacgttgtaactgtgtgaaagggatacatgcattctcctgatacttggttgacgaaaaaaaaaaaaaaaaaatttgcggcc

SEQ ID NO: 2042 - DNA, 380 bp, Zea mays
  Clone ID: PAT_MRT4577_40513C.1
gctgactactctcacaaacatcaggggggtctattcaaccaactaggggcatacaacgcccactagtgtaccaacaatggtatccaaagtattctgcctacatatgctccttgaactttctacaggggctgatacggctaccattttcccgaaatgctcgcaagctcctatagctaccattattgccccgtacctctcaccaccgttgtcttcggcatgtgaaaacctaattcttcaaccctacaggatccaacaggcaatcacagttggcgtgttacctttatcacccttgttcctccaacaatcatcagccctattacatcagttacctttggtgcatttaatggcacaaaacattaaggcacaacaactacaacaac

SEQ ID NO: 2043 - DNA, 2278 bp, Zea mays
  Clone ID: PAT_MRT4577_40527C.1
agtagcccattttcctggaggcggcgacggcagcggcccagcccacctctgccgctgtgcttcgcgtgggccgtgcaactcgccggagacggaagcgacgtcggcgagaaccgcgctgccgttgccgtcgaggcgatatggccctaccctcgtcgacggagacacggagtccgcatccgcctccgcctccggggcgctcgtcgtggtcggcgccgcgtgatcccacgggggtctagaatccgggcctcgtcttcatcacccgccacccaccggcgtccgcaagatgcgcgagatggcaccgccgccacagagtcagtatcaaatccaagaggtcattggtaagggaagttatggagtagttgctgctgcaattgatagtcacgcctctcatccggattggattgataccagctgtggcttgttccagaaagaatactagacatggactttttctcggagtatgggggggcgagtcagtatcaaatccaagaggtcattggtaagggaagttatggagtagttgctgctgcaattgatagtcacactggggagcgggttgcgatcaagaagataaatgatatttttggtaatgtctcggatgctgctcgcattttgcgggaaatcaagcttcttcgtctgcttcgtcacccaaacatagtccagattaagcacattatgttgccccctacccgaagggatttaaagcccaggaacatactatgttgtttttgagctcatggagtctgacctgcatcaagtgatcaaagcaaatgataacctgactccagagcatcaccgctttttcctgtatcaacttatttgtgctctcaagtacatgcattcagcccatgtatttcatcgtgatttaaagcccaggaacatactggccaattcagacagcaaactaaagatctgcgactttggacttgcacgtgcatcatttaacgactctctttcagctatctattggacagattatgtcgcaacaaggtggtaccgggctcctgaattatgtggctcctttttctccagttacacccctgcaattgatatttggagtatagggtgcatttttgctgaagttctcaccggaacaccattgtttcctgggaggaatgttgtgcaccaattagacttaataacagatctccttggaacaccatcgtttagatccttatcccagattcacagtgataaggccagggaatatttgcttggcatgccgaggaagcgccctattccattttctcataagttccgtaatgccgatcctctggctctccggttgctagagcgtttacttgcatttgacccgaaagatcgacctactgctgaagaggctttagctgatccatacttcagtggcctttctaaattggaacttgagccttcagcacaaccaatttcgaaggttgactttgaattcgagggaaggaaactaacaaaggctggtgtgagagaaatgatatatcgggagattttggagtaccacccccagatgcttcaggagtacatcgaaggtggagatcagattcacttcctatacccaagtggggtcgatcgcttccagcgacagtttgctcatctcgaggagaactacaggagaggagtagcaagcaccccgccgcgaaggcagcccacatctctgccgagagagcgagtctgctcatcagaagatggccacagtcaggactctgacagcgaagagcaaagagcagcatcctacgttgcccgaacaaccataagccctccaagatcacaagaggagggcggcaagctccagcctgcctaccagagcgccgccgccgccgcagactcctgcgccaagagctatctgaagggtgccgctagtatcagtagtgcttccaggcgtaccatcaagggggataatggccgaaaggagaaggaatctccgaggctgtgaaagaggtggcgcaggctcgtgacctgttaggcaaaagaggtagcaatggcgccaatgcgactgcaacgtgggatgtcttagtcatcatgcatccaacaatgcaggagcacggagcaccacctcacccccccccccccccccccagtacaagtatgcaggtcatcctagctaggtcgcccaaattaaagcagcctgcttggaggaattagatttgtgtactgttgttaagttttttttttttttgaattcaactgctagattctggcagatctgtcaaccgcactctccttggtttcccaaaatttactggtttgaacaagtttattactgaaaaaaaagtcgacgcggccgcga

SEQ ID NO: 2044 - DNA, 142 bp, Zea mays
  Clone ID: PAT_MRT4577_40589C.1
tcatcatggcttacgaaatctctcggcctccataaatcacccatcacaaacatgctctagcattagcattaccttgcccccgaaacgccagggcggccatcgaaacgcgagagccattcgaggataggtgtaggcagcagcg

SEQ ID NO: 2045 - DNA, 346 bp, Zea mays
  Clone ID: PAT_MRT4577_40836C.1
caactctctatagtgagtcgtattattcgcgatagatagcgcgaccgatccactgcgatggccaccgtccagcctcaatccccggcaggtcccattcatctcccgcacgaggatcgacacggggacgccccggtaccgccctccgtctccggcggaaccgccgccgcaacgtgagctggcggccagatctccgcgcatcacaagcaactcggcctcgtcagccgctgtgaaggataggacgccggtctgggccaccatcgcaagtcggggatggaatcttgtggctgaggccatgcgcaagtacgctgccccgcggtcttctcgcttccacagcgttaccaggctc

SEQ ID NO: 2046 - DNA, 1802 bp, Zea mays
  Clone ID: PAT_MRT4577_40856C.1
aattaattacccacctctctcttccctcctctcttcccgtagctctctctcctcgccccgctccgtcctcccctcctagggttcgacgccctcgccagcccgcggcgaagccaccgcccacctcgccggcggcgtccgcggccaggaagatggctggcggctttcgggtgctgcatcttgtcaggcccttcttggctttcttgccggaagtgcagagtgctgacaggaaaataccatttagagaaaaagtgatctacaccgtcatttctctcttcattttcctggtgtgcagtcagctcccgctctatggcatccattcaaccactggagctgatcctttctactggatgcgtgttattcttgcatcaaaccgtggtactgtcatggaactgggtattacccccaattgtgacatctggaatggttatgcaacttctagtgggatccaagattattgaagttgacaacagtgtgagagaggatcgtgctctgctgaatggtgcacagaagttgctgggtatcctgattgccattggggaagctgtggcatatgttctgtctggaatgtatggcagtgtgagccaacttggaactggaaatgccattctcatcatacttcagcttttctttgctggcatcattgtcatctgtctagatgaacttctccagaaaggctatggtttgggttctggcatttctctcttcattgctaccaatatctgtgagaatatcatttggaaggcatttagccctaccaccatcaacagtggacgtggtgctgaatttgaaggggctgtcattgcattgttccatctgttgattactcgatcagacaaagtccgtgccctacgagaagctttctaccgtcagaatctgccaaatggtgaccatttgcttgctactgtcctggtctttctcatagttatctatttccaaggcttccgtgttgtgcttccagtgaggtcaaagaatgctcgtgggcagcaaggctcatacccaattaagctgttctacacttcgaacatgcccatcattctgcactctgccctgattaccaacctgtatttcatatcccagcttctctacaggaagtacagtggaaactttctggttaaccttctcggtatatggaaagaatctgaatattctggccattctatccctgttggtggtcttgcttactatgtaactgcaccatcaagtatggctgatattctggcgaatccattccatgcattgttctatgtggtcttcatgctgtcagcatgtgctctcttctcaaaaacatggattgaagtctctggttcatcagccaaggatgttgctaagcagctgaaggaacaacaaatggtgatgccaggtcatcgtgagtcaaacctgcaaaaggaactgaacagatacatccctactgccgctgcatttggtggagtgtgcatcggcgcattgactgttcttgctgatttcatgggcgcaattggttcaggaaccggaattctgttggctgttaccatcatataccagtactttgagaccttcgagaaggagagggcaacagagcttggtttcttcgggttttgattgatacatgatagctttgggagcatgttatggctacagcacagctcgagtctttttagacagtcgcaatactgcttggctggctggctgttgtggttgtaaccggagattaaattctgtttaggttaccccgacttatttacagttgagaaatctgtagatgctgcgtgtgttcttcaggccagtttatggtgggtggaccggtccaagcacgggcgtggccg

SEQ ID NO: 2047 - DNA, 336 bp, Zea mays
  Clone ID: PAT_MRT4577_4090C.1
caacgtacaaagctcaatcatctaccaacaatggcatccaaagtattctgactccttatgctccttgggatttttgtaagtgctgctacagcgaccaattttgcgcactgcttacaagctcttatagctttccttcttacctcgtacctatcaccagcggtgtctttggtatctgaaaactcaattcttaaaccctacaagatgcaacaggcaatcgcatctgacatttaacatttatgacccttgatccttcaacaatcatatgacctattacagctgttacccatggagcgtttattggcacaaaacatcagggcccaccaactactacgactt

SEQ ID NO: 2048 - DNA, 345 bp, Zea mays
  Clone ID: PAT_MRT4577_40967C.1
aggggttcgggttagagggtgagcggatctagatggcggcgtcggatagttgagtgccggtggttcctcggcggactcacctgggccacggacgaccactccctccacaactccttaagcacctacggagaggtcctctagtccaagatcatgctcgatcgggagacgcaaaggtcacctggcttcagcttcgtcaccttctacacagaagaggcgatgcggaacaccatcaaggtcatgaaccggaacgagctggacggccgcaacatgaccgacaacgaagcccattcccttggcggccgtggaggcggaggcggcggatacggtggcagccgtggaggcggc

SEQ ID NO: 2049 - DNA, 1430 bp, Zea mays
  Clone ID: PAT_MRT4577_40999C.1
cattgggtccctcgaggccggccgggctgcacacattccgcgcacaccccggcagccgcaaacgccttcgccgtcgcgtcccgctcctccgcccgcccgacgcgacccctaggacctggagagagaggtcggcatggctgccgcagtggtcgacgacgctggtatggacgccgtccagaagcgcctcatgttcgaagacgaatgcattttggtggacgagcaggacaatgttgttggccatgagtcaaagtacaactgccatttgatggaaaagattgattctgagaatctgctacatagggcattcagtgtgttccttttcaactcaaaatatgagctgctacttcagcaaaggtccgcgacaaaggttacctttcctttagtttggaccaatacctgctgcagccaccctctgtaccgtgagtctgagcttatccaggagaactaccttggtgtgagaaatgcagcacagaggaagctactggatgagctgggcatcccagcagaagatgccccagttgaccaattcacccctctgggccgaatgctttacaaggcaccatctgacgggaaatggggggagcatgagcttgactacctgctgttcatcgtccgggacgtgaaggtgcagccgaacccagatgaagtcgctgacgtgaagtacgtgaaccgcgacgagctcaaggagctcatccggaaggctgacgctggcgaggacggggtgaagatctccccctggttcaggctggtggtggacaacttcctcatgggctggtgggaccatgtcgagaaaggcaccctcggcgaggccgtggacatggagaccatccataagctgaaggagtgaggggccgccggccggccggctccgatgacctcaccacctgttgatgttgctgctgctgctgcactgcatgtttatcaaaagttatcgctcctgctcgcggaaagtgagcttgactgttgccggggtggaagtgtcgttttggactgaagatgagtgccgcggaggggtttgttgtttgtttgtttgtttgttcggtgaccgaatcgcgagttggacgcctgtttaatccgtgcttatacatcgtctgagtaaacagcaataagagggacatccgtaagctctttccgtaactacttttgcgactcgtctgctgctactgcagttccatttctgtatatttttggcagaagatccttgtgcagcctaggctagcggcatcgtgactgggaggtagggaagggaacgacgcttgtggttgtgcatgttggcttgcttcttgagctctttgcttgtggctgtagctgatttttttaaaaaaataactttaggggctcgtttatctcagtataacatgagggtttgggtttatttgcttgtgactggacttctgtttatgaacttaagggcctggcttatctgatta

SEQ ID NO: 2050 - DNA, 538 bp, Zea mays
  unsure (1)..(538): unsure at all n locations
  Clone ID: PAT_MRT4577_41025C.1
ctcctctctcnctttccaccaaacacacctcagacctcacctcgctccccgccccgccgatctcttctcttctaggctcgtcggcgatggcggctccggtggtggacgccgagtacctgcgccaggtcgacagggcgcgccgtgccctccgcgccctcatcgcctccaagggatgcgcccccatcatgctccgcctcgcatggcatgatgctggcacgtatgatgtgaacacaagaactggtggtgcaaatggttcaattagatacgaggaagagtacacccatggttcaaatgctggcttaaaaattgctattgatctcctcgagcctattaaagcgaagcatccaaagattacatatgcagacctttatcagcttgctggagtagttgcagttgaagtcacggggggtccaactgttgagttcatccctggaagacgtgattcgtcagtttgtccccgtgaagggcgccttcctgatgctaagaaaggcgcaccacatctgagggacatcttttatcgaatgggcttaacagacaa

SEQ ID NO: 2051 - DNA, 2921 bp, Zea mays
  unsure (1)..(2921): unsure at all n locations
  Clone ID: PAT_MRT4577_41083C.1
ccacgcgtccgtgcacggctacctctaagtcgcatagttccgatatctccaaacgagcttaacctttatcggatcgtgattgttctccggcttatcatcctatgtttcttctttcaatatcgtataactcatccagtggaagatgcttatgggttgtggcttgtatctgttatttgtgaagtttggtttgccttgtcttggcttctagatcagttcccaaagtggtatcctatcaaccgtgaaacttacctcgatagacttgcattgagatatgatagggagggtgagccatcccagttgggctccaatcgatgtctttgttagtacagtggatccacttaaggaacctcctctaattactggcaacactgtcctgtccattcttgctgtggattaccctgttgacaaagtatcatgttatgtttctgatgacggttcagctatgttgacttttgaagcgctatctgaaaccgcagagtttgcaaggaaatgggttcccttttgcaagaaacacaatattgaacctagggctccagagttttactttgctcgaaagatagattacctaaaggacaaaatacaaccttcttttgtgaaagaaaggcgggctatgaagagggagtgtgaagagttcaaagtacggatcgatgcccttgttgcaaaagcgcaaaaaatacctgaggagggctggaccatggctgatggcactccttggcctgggaataaccctagagatcatccmggaatgatccaagtattcttgggccacagtggtgggcttgacacggatgggaatgagttgccacggcttgtttatgtttctcgtgaaaagaggccaggcttccagcaccacaagaaggctggtgccatgaatgctttgattcgcgtatcagctgtcctgacgaatggtgcttatcttcttaatgtggattgtgatcactacttcaatagcagcaaagctcttagagaggctatgtgtttcatgatggatccagcactaggaaggaaaacttgctatgttcagtttccacaaagatttgatggtatagacttgcatgatcgatatgcaaaccggaacattgtcttctttgatattaatatgaagggtctagatggcattcaaggacctgtttatgtgggaacaggatgctgtttcaataggcaggccttgtatggctatgatcctgtattgacagaagctgatttggagcctaacattatcattaaaagttgctgtggcggaagaaaaaagaaggacaagagctatattgattccaaaaaccgtgatatgaagagaacagaatcttcggctcccatcttcaacatggaagatatagaagagggatttgaaggttacgaggatgaaaggtcactgcttatgtctcagaagagcttggagaaacgctttggccagtctccaatttttattgcatccacctttatgactcaaggtggcatacccccttcaacaaacccaggttccctgctaaaggaagctatacatgtcattagttgtggatatgaggataaaacagaatgggggaaagagatcggatggatatatggctctgttactgaagatattttaactggtttcaagatgcatgcaagaggttggatatccatctactgcatgccacttcggccttgcttcaagggttctgctccgattaatctttctgatcgtctcaaccaagtgttacgctgggctcttggttcagttgaaattctacttagcagacactgtcctatctggtatggttacaatggaaggctaaagcttctggagagactggcatacatcaacaccattgtttatccaattacatctatcccactagtagcatactgcgtccttcctgctatctgtttactcaccaacaaatttattattcctgcgattagcaattatgctggggcgttcttcatcctgctttttgcttccatcttcgccactggtattttggagcttcgatggagtggtgttggcattgaggattggtggagaaatgagcagttttgggtcattggtggcacctctgcacacctctttgctgtgttccaaggtctcttaaaagtgctagcagggatcgacacaaacttcacggtcacatcaaaggcaaccgatgatgatggtgattttgctgagctgtatgtgttcaagtggacaactcttctgatcccccccaccactgtgcttgtgattaacctggttggtatagtggctggagtgtcgtatgctatcaacagtggctaccaatcatggggtccactattcgggaagctgttctttgcaatctgggtgatcctccacctctaccctttcctgaagggtctcatggggaagcagaaccgcacaccgaccatcgtcattgtttggtccgtccttcttgcttccatattctcgctgctgtgggtgaagatcgaccccttcatatcccctacccagaaggctctttcccgtgggcagtgtggtgtaaactgctgaaatgatccgaactgcctgctgaataacattgctccggcacaatcatgatctaccccttcgtgtaaataccagaggttaggcaagacttttcttggtaggtggcgaagatgtgtcgtttaagttcactctactgcatttggggtgggcagcatgaaactttgtcaacttatgtcgtgctactgttacttatttgtagctaagtagcagtaagtagtgcctatttcatgttgactgtcgtgactacctgttcaccgtgggctctggactgtcatgatgtaatctgtatgttggaacttcaagtactgattgagctgtttggtcaatgacattgagggattctctctcttgaaatttatataaaaaaaaaaaaaaaaaaaaaaaaaaaaaaaaaaaaaaaaaaaaaaaaaaaanaaaaaaaaaaaggggcggggcc

SEQ ID NO: 2052 - DNA, 691 bp, Zea mays
  Clone ID: PAT_MRT4577_41105C.1
cggccgctcgagccggcgggcgggtctttttcgcatctcctgatcattatctgaaacatcagacagtttacaatgcaaatgaacttgctgatctggttgagaagaagaagaaaatgcggaattggcttgattactaccaaaacaagcttgagcgaaaatccaaaaggccaacaactaagactggctttcttggatgttttggttctgaagtggatgcgattgatcactgcaaatcagagattgagaagatagggaaggaagaagctgaagagcgtaaaaaggtcatgaaggatcccaagtcaattatgccagcagcctttgtttcttttcgttcacggtggggtgcagctgtttgtgcacagacacaacaaaccagcaacccaaccctttggctgactgaatgggctccagaacctcgtgatgtctactggagtaatctatctattccctttgtttccctcacagtcaggaggttgataattggcgtggcctttttcttcctcaacttcttctatgtcattccaatagcattcgtacagactcttgcaaatcttgaaggcatagagaaggcactaccatttctaaaacctttaattgaatcacctcccattaaatcattcatccaagggtttcttcctggacttgctccgaagatcttcctcatagtgcttccaactatactgatgtacat

SEQ ID NO: 2053 - DNA, 396 bp, Zea mays
  Clone ID: PAT_MRT4577_41116C.1
cccacgcgtgcgcaagtgaacctgaaacttgcggtgttactggctggtattctgagtgagagtgagtgatcgagctatctgagctccgatcctagctagctaggataccgccataccacaggtcttcattcacaagtttaggagcgacagcaacaagagatcgatggcctgtgccaccgagcttaagttcttcttccttcccaagaagtccgaatggggcgccaccaggcaggccggcgcgcccaggccgaccaccgggttcatggtcgagcgcgccttcgtctacgccgatgagctcgggaagaccgtgaaaacgatcgcgttttcggggcggagcatcctggcgacggactagtagaacgcgacgtgcgggaagcggatggcgatcatcgtgct

SEQ ID NO: 2054 - DNA, 617 bp, Zea mays
  Clone ID: PAT_MRT4577_41145C.1
cggacccgtcaccagccggaggcttcgggatgtgaaaacccaatgcttcaacgcctacaggatccaccaggcagcgcagctggcatcttacctttatcacccttgctactccaacaatcatcagccctattacagcagccacctgtggacgcatgtattgtgacgaaacatcagggcacaacatctaccacaacttgcgctagcataccgtgctgtctactctcagcaacagcagttccttccattcaaccgactagctgcattgaactgtgcttcttatttacaacaacaccaactaccattcagccagttacctggtgcctacccgcagcattttcgtcacattcaaccaactgtgagtattgaactctcctgcgtatttacagcagcaacaactactaccattcagccagctagctggtgtgagccctggtaccttcttgacacaaccacagtcgatgccgatctaccagcgcgcgtgcgcctaacgctggaacgcctattacaactgcaacaattgctgccattcaaccaacgtgctttgacgaacctagcagtgatctaccagcaacccatcattggatggtgccctcttttagatttcttatgagttatag

SEQ ID NO: 2055 - DNA, 151 bp, Zea mays
  Clone ID: PAT_MRT4577_41162C.1
ggctctcgcagcgctatattcctcatatctttggcttcaagctccacaagccataaacctcatatatttatcttttaaactcctcaagacgtagcactgggggcatacgagaattttacaatccttgaaaacttacatataagagcgccct

SEQ ID NO: 2056 - DNA, 550 bp, Zea mays
  Clone ID: PAT_MRT4577_4155C.1
agagagacaagtggtttccaaagccaagtgtgtactagcagtctagcaaccagctagctcgggcggcagcaggcagccatcatgtcggaggagaagcaccaccacttcttcaaccaccacaagaaggacgaggagcagcccgccggcgagtacgggtactccgagaccgaggtggtcaccgccaccggcgagggcgagtacgagaggtacaagaaggaggagaaggagcacaagcacaagcagcacctcggggagggcggggccatcggcgccggcgccttcgcactctactataagcactaggcgaataaggaccccgagcacgcgcacaggcacaggatcacggaggaggacaatgccgcggagggcgacggcgccggcgaatacatattccacgggcaccacggagaagaagaaggaccacaaggaacgccaaggcaggatagcggatgagaagaaacaccaccccctcttcgggatgaccgaaggaccgcgcggaagcatcacccagctagctagttccggcgcacgcaaccacgcacctgtttaa

SEQ ID NO: 2057 - DNA, 196 bp, Zea mays
  Clone ID: PAT_MRT4577_41589C.1
ccacgcgtccggatcgatgcacggaggaggatgctgccgctgctctggcctaatcactagtataaagcaggcggagacagcctggccgcctgaccgcagtgctcccccttcctccccgtccccaaccacatgccctgcctccgccccgccccgccctgcccaagctcgattccccagcccccaacaaacaattact

SEQ ID NO: 2058 - DNA, 244 bp, Zea mays
  Clone ID: PAT_MRT4577_42217C.1
cctatagtgagtcgtattaacacgcgtgcgcacacctcgcgacagccaccaggagtacaccgtttcacgcgacagccgtcacgcgtcacgtatccaggctgaccgtaggagagacactcatcttcaggacggagggagacgactacacaggatgcacgggttcaggcagctgcagcgatcgccagctcaagagcaacatcaggcgccgtcggatcagctgtacgcctggggtgtcggaagtcgt

SEQ ID NO: 2059 - DNA, 121 bp, Zea mays
  Clone ID: PAT_MRT4577_42224C.1
tcacgaaatagttggcaatattttacactgctcgtctctgataaggagtcgcttttggatgatcttgagggcgagcactctaatcacagtcgttcagacgtgtcacactagcaataggtat

SEQ ID NO: 2060 - DNA, 715 bp, Zea mays
  Clone ID: PAT_MRT4577_42323C.1
gggaccctcgggttcggccggggccggctgctgcctgcactgtcaggtgcactgccagagtatccgcgatccaattagagagaatctcccctgctgtgacgtctggcgctctctgtggagaacacctcgtctggacgggagtacaaggtcaaggatctctcgcaggcggacttcggccgcctcgagattgagctggccgaggtcgaaatgcccggcctcatggcgtgctggggggagttcggcccgtcgaagcccttcgctggcgctaggatctcggggtctctccacatgaccatccagaccgccgtcctcatcgagaccctcaccgcgctcggcgccgaggtccgctggtgctcctgcaacatcttctccacgcaggaccacgccgccgccgccatcgcgcgcgactcggccgccgtgttcgcctggaagggggagaccctcgaggagtactggtggtgcaccgagcgctgcctcgactggggcgaggcgggcggccccgacctcatcgtcgacgacggcggcgacgccacgctgctcatccacgagggtgttaaggtcgaggaggattacgagaagaccggcaagatccccgatccggagtccaccgacaacgctgagtttaagatcgtgctcaccatcatccgggacgggcttaagggtgaccccaagagtaccgcaagatgaatgataggcttgtcggcgtctctgagga

SEQ ID NO: 2061 - DNA, 1831 bp, Zea mays
  Clone ID: PAT_MRT4577_42325C.1
aactgatgtcgcggccgtgccgcctgtggttgccctggcggcggatggccaggcgggtgccgaggagatcgtgctgcagcccatcaaggagatctccggcaccgtcaagctgccggggtccaagtcgctttccaaccggatcctcctgctcgccgccctgtccgaggggacaacagtggttgataacctgttgaacagtgaggatgtccactacatgctcggggccttgaggactcttggtctctctgtcgaagcggacaaagctgccaaaagagctgtagttgttggctgtggtggaaagttcccagttgaggatgctaaagaggaagtgcagctcttcttggggaatgctggaactgcaatgcggccattgacagcagctgttactgctgctggtggaaatgcaacttacgtgcttgatggagtaccaagaatgagggagagacccattggcgacttggttgtcggattgaagcagcttggtgcagatgttgattgtttccttggcactgactgcccacctgttcgtgtcaatggaatcggagggctacctggtggcaaggtcaagctgtctggctccatcagcagtcagtacttgagtgccttgctgatggctgctcctttggctcttggggatgtggagattgaaatcattgataaattaatctccattccctacgtcgaaatgacattgagattgatggagcgttttggtgtgaaagcagagcattctgatagctgggacagattctacattaagggaggtcaaaaatacaagtcccctaaaaatgcctatgttgaaggtgatgcctcaagcgcaagctatttcttggctggtgctgcaattactggagggactgtgactgtggaaggttgtggcaccaccagtttgcagggtgatgtgaagtttgctgaggtactggagatgatgggagcgaaggttacatggaccgagactagcgtaactgttactggcccaccgcgggagccatttgggaggaaacacctcaaggcgattgatgtcaacatgaacaagatgcctgatgtcgccatgactcttgctgtggttgccctctttgccgatggcccgacagccatcagagacgtggcttcctggagagtaaaggagaccgagaggatggttgcgatccggacggagctaaccaagctgggagcatctgttgaggaagggccggactactgcatcatcacgccgccggagaagctgaacgtgacggcgatcgacacgtacgacgaccacaggatggccatggccttctcccttgccgcctgtgccgaggtccccgtcaccatccgggaccctgggtgcacccggaagaccttccccgactacttcgatgtgctgagcactttcgtcaagaattaataaagcgtgcgatactaccacgcagcttgattgaagtgataggcttgtgctgaggaaatacatttcttttgttctgtttttctctttcacgggattaagttttgagtctgtaacgttagttgtttgtagcaagtttctatttcggatcttaagtttgtgcactgtaagccaaatttcatttcaagagtggttcgttggaataataagaataataaattacgtttcaaaaaaaaaaaaaaaaaaaaaaaaaaccgtggctgtcaagcctgctgctacgttttaggagatggcattagacattcatcatcaacaacaataaaaccttttagcctcaaacaataatagtgaagttattttttagtcctaaacaagttgcattaggatatagttaaaacacaaaagaagctaaagttagggtttagacatgtggatattgttttccat

SEQ ID NO: 2062 - DNA, 401 bp, Zea mays
  Clone ID: PAT_MRT4577_42338C.1
ccccgcgtccgcccacgcgtccgggcgagggacaacaagaagacgcgcatcatcccgcgccacgtgctcctggccatccgcaacgacgaggagctcgggaagctgctggccggcgtcaccatcgcgcacggcggcgtcctccccaacatcaacccggtgctcctgcccaagaaggtggccgagaaggcggccagcggcggcagcaaggaggccaagtccccaaagaaggccgccaagtcccccaagaaggcttagaaagtagggagttcattagcgctgtgtaacatgttcgtgtttagatctgtggatgggatgtgttgtggtctagtttcctccctgtggcttatggtatgttcattttcattgagaagatcttcagaaatcagagctcgttgcatagt

SEQ ID NO: 2063 - DNA, 563 bp, Zea mays
  Clone ID: PAT_MRT4577_42475C.1
aagaaccgagtgtcaagtgaacctgcatcttgcggagtcactggctggcttagcctgagcgcgagtgagtgatcgagctagctgagctccgatcctcgttagctagatcggataccgccataccacaagttttatttacaagtttaggagtgacagtaacaagagatctcgatggcctatggcatcgcgctcaagttctcctttctttccaagaagaccgaatggggcgccaccaggcaggtcgccgagcccaggccgaccaccgtcttcatggtcgttcgcgcctccggctaccccgatgagctcgtgaagaccgtgaaaacgatcgcgtcggcggggcgggacatcctgtcgatggacgagtcgaacgcgacgtgcgggaagcggctggcgtccatcgtgctggagaacacggaggccaaccggcaggcgtaccgcacgctgctggtcacggcgccggacctgggccatacatctccggcgccatcctttttgaggagacgctgcaccagtccgacgtcgacggtcgaatgatcgtgtacatgctggtggagcagggcatc

SEQ ID NO: 2064 - DNA, 883 bp, Zea mays
  Clone ID: PAT_MRT4577_42487C.1
ggccgcccttttttttttttttttttcacttctatggatctggtattatatcattccaaattccaatcacccacacacggccatgcatgtgcctcatggcattattatttttttgactgtcaagtcatctattttcacacctggtgtgagattgttttaaatccctgaacagttatatagaaacccaaatattgctaatcgaccatcattgctttgatagagcactgattttgatatggataataaatcatttcatttgccgattgcctagaacagtaagtctcggaaggtggggagcttgatctcgccctcggtggtgagcgggatagtgaaggcgccgatgacggggaggtcgatggtgagccctacctccagcaggtagtcgatgtcccagtcccctcccagatccttcatcagcgtcaggatgaagtcgtacggcaccttcaccggtagctccagcttggtgctaccgctcgccgcaatccacccggggtcgggcatcatgcccgacgctatcaccttgccggcgctcttgaaggtgtaggtgatctcgcagatggggatgcggtgcgagtaggggttgctaacgtcgacgtggctgtgcagctcgacgccctcgcggcttatgctctggaaggagactcgatccagcgccgcctcgggcttgggaatctgcgccaccttctccaccacgaagcccttggccctgtccacgaggccggccatcaggccgacgctcctctcccgtctctcctcctcccctcctcccgcttctgcggcggcgccggacctctcatcctctgtcgtgctcatgttggggaacggagatcgtgccgcgcggccggaggcggtgtgtccctcgctcgacgcgggcggaggtgga

SEQ ID NO: 2065 - DNA, 713 bp, Zea mays
  unsure (1)..(713): unsure at all n locations
  Clone ID: PAT_MRT4577_42542C.1
ggccgcttttttttttttttttttgtttattcgttttcatttttttttgttttttatttattttttgagtacatacgaataggaactctttggacgatgatacacaagcacgtgcgtacacacgacatctacgtacgatagattacgaacgcacacttattcctgcatcacacgagcgcatacatacgtacgcgcgcacaacaaggggggtagctcgatatcactctcacgcgcacgcggagctcacggcgagggacgacgatacgggaggatcaatcagccgaagaagtggtgcttcttctcgccgacggcctgcttggactgcttgtggtccttcttcttctggtggcgctcgtagaaggcgaagccgacggagccgacggacgacgacgacgggacctcctcctcgatcttgcggtggtgcgcgtgctgcggatccttattagcctcgtgcttttagtagagagcaaaggcgccggcggcgatggcgccggactcgccgaggtgctggttgtgcttgtgctccttttactgcttcttgtactggtagtactcgttctcggccgaggacaccaactccgttaacgtggcctacgagtactcggaggactaagcgtacccgccgacggcgagctgctcctcgtccttcttgaggtggaacaggtggaggaggcaggagcttatactncggcatggataatgaaacgagctat

SEQ ID NO: 2066 - DNA, 1984 bp, Zea mays
  Clone ID: PAT_MRT4577_42559C.1
ctcgccgctgccgcatcctcaccctcgtccgctcctccgctgccccaaaccctagcctgaggaggggtcctcctccgctaccgagacccacgatgtcgaccatcgctgcctcccgccgctcgtcctcctcgtcctcttccgcgaccgccaagcgccccgcgattgcggacggccccgggggacccaaggcgaccgccgcacaggccaagaagcgcgtggcgctcggcaacatcaccaacgttgccgcgcggggagggagggcttccgttggcggcagccttgggaacgtcatggcgcccaccagcagcgcgaagttgaatccaacggtacccttgaagaagccgtctttggcaacaagtgctcggagtgtgagttcttccatccggggttctgctgacaaaccggcttccatcaagccagctccaccagtagcacgccatggcagcgcaacacaaaggcataacaatgttcctcctcctaaagtgcctaccattgccgatgtgccaagtcgtgctcctgccttggtgtcctgcaccggcttggtgtctcctggacgctcaggagattctgtttcatccgatgagacgatgtcgacttgcgactccatgaaaagcccagactttgagtacgtagacaatcaggacacctcgatgctggcttcgttgcagcgacggacaagtgaacatctgcgaatatcagaggatagagatgttgaagaaaataagcggaagaaaaatgccgtggccccaatggaaattgaccgcatctgtgatgttgacagtgaatatgaggatccacagctgtgcgctactctggcttctgacatttacatgcacttgcgagaggctgagacgaagaaaagaccgtcaactgatttcatggaaacgattcaaaaagatgtcaacccaagcatgagagcaattttgatagactggctcgtggaagttgctgaagaatatcgtcttgttcctgatactttgtacctgacagtcaactacattgaccgttatctttctggcaacgaaatcagccgccaacggctgcaattacttggtgttgcatgcatgcttatagctgcaaaatacgaggagatatgtgcaccacaagtagaagaattctgctacataacagacaatacatatttcagagatgaggttctagatatggaagcttctgtactgaattacttgaagtttgaaatgacagcacctacagcaaagtgctttttgaggagatttgctcgtgctgcacaagcgtgtgatgaggatcctgctttgcatctggagttccttgccaattacatcgctgagctatcactactggagtacagtctactctcttaccctccatcactaatagctgcatcggctattttcttggcgagatttatactacagccaacaaagtatccttggaattccacactcgctcattacacacagtacaaaccgtccaaactgagcgaatgtgtaaaggcattgcatcgcctttgcagcgttggttctggtagcaaccttccagcaatcagagaaaagtacagtcaacataagtacaaatttgttgcaaagaagcagtgtccaccgcagatccctactgaattctttcgggacgcgacatgctagactagaaacccagaagtgattccagttgcttactggattcttcttgatgtgtcttgaatgcccagtgtagcacagcacaactatgcaagtgctgataacccccaggttgtttcaggtgattacaggggtgtaatcaatgtttgtggtcatgttaggtcattggtgtggtttttcttttcctgcttccagtctttctgtatgtagatcagtgttttcaggcgcttgtaaatccgagttctgtagtagagcacaatatcttgtaagttaactgaagaaatttggtgatcaaccaagttacctacaacttatgttgagctggtgatcaggtttttgcgctagttgaaaaaaaaaaaaaaaaatgg

SEQ ID NO: 2067 - DNA, 1189 bp, Zea mays
  Clone ID: PAT_MRT4577_42575C.1
tgggacctccagccggcgggaattccgctttcctcacaacctcacccggctccatccacgcggctccaacgccagccacagcacgagccatggactcgcgcgtcgtggacggcgcaggtgggggtgccgacgcctccttgccggccgatccgccgagccccgtgcccgatccggccgcgggcgggatggatgcgcgcctcccatcggacctgcttcgtgcagtgctgcaaaggctgccgccgatcgacctcgcgcggtccgcctgcgtctgccgagcgtggcgcgcggttgcctccgaccgcgccgtggtcgaggccgccttctgtgcgccctggggagtgcggcgcgtcgtcggagagccggcgacgggggccttctggcgggccgcctcccttgggagatttgcgctgtcgcatgcgatccgccgcggggataccgtccccggtgtcgctctcaagtactccgtgcaggtgaccgatatcaaacgattcaacaacatgatgagtgaccatggcatctattcgagggagaggcttctggttccgatcagcaacccagaaatccttcttggcagcacctgctacatcgagatggaccataacgctaagagagaggttgcaatcttttaccccgagggacgcccaggtggcaaaactgactctgtggcaagcattgtctctgcggagaggagaaacaaaaggattctcgagtcggtgaggcggagcctgcacgtcgatgatggcactgctgcgtactacttatctgttactgagggtgatccgagggctgccatgacggagtactccgaggacctgaggtgggagcagcaacgcgcaggtcggtagattcatatatattccaatgacatatgttaagatcatggtgcttgatccttatcatttggtgtatatattgtacaatctggatggttgtaagtataaatacaaactttggtctaatgaatatagatgcatgtacgtgataataaataataattgccaaatggcatcggtgttgagaacaaaaatcgcgccgggtgacaattggctggtgaaaagtattacatgacattcgtgaacctgcttgtttgtaagtaacattgtttgttgttgctaaattccttgcggaatactcgattatgctgccgatttttagtttctgtatttaatgaaaaaaaaaaaaaaaaaaa

SEQ ID NO: 2068 - DNA, 301 bp, Zea mays
  Clone ID: PAT_MRT4577_42576C.1
gcgcgcacgcgtccggtcttctccttccataccggatcgggttcgggttcgtaagggtcggcagggttcggtttcgtgggtgagcggatcgagatggcggcgtcacgatgttgagtaccgctgcttcatcggcggactcgcctgagccacggacgaccactccatacacaacgcctacagcacctaaggtgaggacctcgagtccaagatcatccatgatcggcagacacataggtccctcagcttctgctatgtcaccttttccacggaagtagcgatgcggaacgccatctagggcatg

SEQ ID NO: 2069 - DNA, 1786 bp, Zea mays
  unsure (1)..(1786): unsure at all n locations
  Clone ID: PAT_MRT4577_42605C.1
actccatagggcgattgggttcctcgaggccggccggggtccctctcccctgcctgcaccaattcctgaggcaccaaccaagcctctcttgttgactccgacgccgatcgaacgtacagacggccatggagacccaagcgccggagaaggagaactacctccctgaaaaggatgcgaggagcgcacgggagaaggccatcgacgagtggctcccgatcacctcgtcgcggaacgccaagtggtggtactccgccttccacaatgtcaccgccatggtcggcgccggcgtgctcagccttccctacgccttgtccgagctcggctggggccctggcatcgccgtgctggtggtgtcgtgggtgatcacgctgtacacgctgtggcagatggtggagatgcacgagatggtgcccgggaagcggttcgaccggtaccacgagctggggcagcacgcgttcggcgagaagctgggcctgtggatcgtggtgccgcagcagctggtcgtcgaggtgggcgtgaacatcgtgtacatggtgaccggcggcaggtcgctgaagaagttccacgacgtgctggtgtgcggcgacggcggggcgtcgtgcgaggggaaggacaacatcaagaccacctacttcatcatgatcttcgcctccgtccacttcgtcctctcccagctccccaacttcaactccatctccggcgtgtcgctggccgccgccgtcatgtcgctcagctactccaccatcgcgtggggcgcgtcggtggacaagggcaggatggcgggcgtggactaccacctgcgcgcgaccacgacccccggcaaggtgttcggcttcttcggcgcgctgggcgacgtggcgttcgcgtacgcggggcacaacgtggtgctggagatccaggccaccatcccgtcgactcccgagaagccgtccaagaagcccatgtggaagggcgtcgtcgtcgcctacgtcgtcgtcgcgctctgctacttccccgtcgcgctcatcggctactgggcgttcggcaacagcgtccaggacaacatcctcatcacgctcagcaggcccaggtggctcatcgcgctcgccaacatgatggtcgtcatccacgtcattggcagctaccagatctacgccatgccagtgtttgacatgatagagacggtgctggtgaagaagctgcgcttccctcccggtctgacactgcgtctcatctctcggaccgcctatgttgcgttcacaatgttcatcgccatcaccttccccttcttcggcggactgctcggcttcttcggcggattcgcctttgcaccgacgacctatttccttccctgcgtcatgtggctcgcgatctacaagcccaagaggttcagcctctcgtggttcaccaactggatctgcatcattctcggggtgatcctgatgattctgtcgccaatcggagggcttcggcagatcataatggacgcgaaaacgtaccagttctactcgtaaaatgctaccagacactgagtttttttgtcgtgccaacaacagaggggaacttcctggtaccatgtataagctgttacagatgttgggttagttatatatatacatgcatacgtattgtttcttaattaatgttccaaggtgaccgtgggttgtgtatatggtataaaggagaatcgatgatggtggttgtcccagatatttggtggtttaattctattcccttgtcccatgtatttgccgggttccccctaaaaaacnacatngggggggggggtggggggngaaatttaatt

SEQ ID NO: 2070 - DNA, 801 bp, Zea mays
  Clone ID: PAT_MRT4577_42655C.1
gcatccccatccgcacctctctccatctccctgckcctccgccttcttcttgatccagccaagccagggatcgcsagggbggactcggaggagcaccacttcgaatcgaaggccgacgccggagcstccaagaccyacccccagcaggctggcaccstccgtaaraacggcttcatcgtcatcaagaaccgcccccccmaggtgttgaggkttctacctcaaagactggkaagcatgggcatgccaaawgccactgtgttgycatagakatattcaacgggaaaaagcbcgaagagattgttccctcgtcacacaactktkataktccgcatgtkaaccgtactgagtatcagcygagtkadaaawcagargatggatttgtkagccttcttacttcagaaggcaacactaaggatgatcttagactcccmactkatgagactcttgttgcccacatcaaggaagggtttkaaagttgcaaggatyttgttgttacttttcagtcttcyattggggaggagcagaacybcsccccgaaggatgttggccccmagtaacttcccycccttggaatactgtatctcaaaaccyaaatygaaaaaagaagtgtattaaggatttctacagagacaaccatcttgcttkagccggcttttgcyawgtyaaacacaagttcagggatytctgggtgttgcaccctktcttchttaactgttgggacattctggaccccstattttctatkcctttatgcccccaccgtgtagtatwaattatcaataaatttgtttkggacggttg

SEQ ID NO: 2071 - DNA, 3408 bp, Zea mays
  Clone ID: PAT_MRT4577_42664C.1
cccattctctcacacccaacacccagctatcacaccctgatccccgaggccgcgcgtcggggtgaggaggaggaggggccatgatggagtcggcggcggcccagtcctgcgcggcgtgcggggacgacgcgcgcgctgcctgccgcgcgtgcagctacgcgctctgcagggcgtgcctcgacgaggacgccgccgagggccgcaccacatgcgcgcgctgcggaggggactacgccgctatcaacccagcgcgcgccagcgagggaaccgaggcggaggaggaggtggtggagaaccaccacaccgccggtggcctgcgtgagagggtcaccatgggcagccacctcaatgatcgccaggatgaagtaagccacgccaggaccatgagcagcttgtcgggaattggtagtgaattgaatgatgaatctggtaagcccatctggaagaacagggtggagagttggaaggaaaagaagaatgagaagaaagcctcggccaaaaagactgcagctaaagcacagcctccgcctgtcgaagaacagatcatggatgaaaaagacttgacagatgcatatgagccactctcccgggtcatcccaatatcaaagaacaagctcacaccttacagagcagtgatcattatgcggttaattgttcttgggctcttctttcactaccgtatcaccaatcctgttaacagtgcctttggtctctggatgacatcagttatatgtgagatctggtttggtttctcctggatattggatcaattcccgaagtggtatcctatcaatcgtgagacttatgttgataggctgattgcacgatatggagatggtgaagaatctgggttagcacctgtagatttctttgtcagtacagtggatccattgaaagagcctccactaatcactgcaaacactgtgctgtctattcttgctgtggactatcccgttgagaagatctcatgctatgtatctgatgatggttctgctatgctcacatttgaatcgctcgcagagactgcagaatatgctagaaagtgggtgccgttttgcaagaagtacgccattgagccacgagctcctgagttctacttctcacagaaaattgactacttgaaggacaagatacacccatcttttgtcaaggagcgtagggctatgaagagggactatgaagagtacaaggtgaggataaatgctttggttgccaaggctcaaaagacacctgatgaaggctggatcatgcaagacggtacaccatggcctgggaacaatcctcgtgaccaccctggcatgatccaggttttcctgggtgagactggtgcacgggactttgatggaaatgaacttcctcggttagtgtatgtgtcaagagagaaaagaccaggctaccaacaccacaagaaggcaggggctatgaatgctctggtccgagtgtctgctgttctgacaaatgccccttacattcttaatcttgattgtgatcactatgttaacaacagcaaagctgttcgtgaagcaatgtgcttcatgatggaccctactgttggcagagatgtctgctatgtacaattcccccagaggttcgatggcattgatcgcagtgatcgatatgccaataggaacgttgtgttctttgatgttaatatgaaaggacttgatggcctccaaggcccagtttatgtgggaactggttgttgtttcaataggcaagcactttatggttatgggcctccatctctgcccgcacttccaaagtcttcgatttgttcctggtgttgctgctgctgtcccaagaaaaaggttgaaagaagtgagagggaaatcaacagagactctcggcgagaagacctcgagtctgccatttttaaccttcgcgaaattgacagttgtttttcagactacgatgagtacgagaggtccatgctcatctctcagatgagcttcgagaagtcttttgggctgtcctcggtctttattgaatcgacccttatggagaatgggggcgtccctgaatctgcaaacccatctaccctaattaaagaagccattcatgtcattagctgtggatatgaagagaaaactgaatggggaaaagagattggctggatctatggttcagttacagaggatattctgactgggtttaagatgcactgccgtggctggagatccatctactgcatgccggtgagacctgcattcaagggatcagccccaatcaatctttccgatcgtcttcaccaagttctccggtgggctcttggttctgtcgagatcttcttcagtcggcactgcccgctgtggtacggttacggtggcggccgtctgaaatggctccagaggctctcctacatcaacaccatcgtgtacccgttcacttctcttcctctcgttgcctactgttgcctgcctgccatttgcctgctcacaggaaagttcattatacctacgctgtccaacgctgcaacgatatggtttcttggcctcttcatgtccatcatcgtgacgagcgtgttggagctgcggtggagtggcatcgggatcgaggactggtggcgcaacgagcagttctgggtcatcggaggcgtgtccgcgcacctgttcgccgtgttccagggtatcctcaagatgattgccgggctggacaccaacttcacggtgacggcaaaggccacggacgacactgagttcggggagctgtacctgttcaagtggacgacggtgctgatcccgcccacaagcatcctggtgctgaacctggtgggcgtggtggctgggttctcggccgcgctcaacagcggctacgagtcctggggcccgctcttcggtaaggtgttcttcgccatgtgggtgatcatgcacctgtacccgttcctcaagggtctcatgggccgccagaaccgcacgccgaccatcgtggtgctctggtccgtcctcctcgcctccgtcttctccctcctgtgggtcaagatcgacccattcgttggaggaaccgagaccgtcaacaccaacaactgcaacacgatcatctgctgattcaccatcggtcagctgctgtcgtgccgcggcggacgtgtttctggtgttgcaaacgtgggttgcctgcctgatgcgggtctcctctgtctatctcgcatctgggcttttgccccaggatctgaagcgggttgtgtaggttagctttattttgcgtccaagtgttgattgatgttgtctgtgttatgaaaagttttggtggtgaaacctgaaatgttaaaactgggctcaattgtgagaaggcactgttttttaagtgtgtgtaaataataggaacgtgggaaaaaggaactgagaatcatttgcctaccaaaaggtgaaaccaattacattagtggatcttgaaatcgcagctgtgtttagc

SEQ ID NO: 2072 - DNA, 1194 bp, Zea mays
  Clone ID: PAT_MRT4577_42708C.1
cctcgaggccggccgggccgtccctgatccgacggccccgcgcgcgcgttcacgcccgacccagcgcctcgcctcggctgctctacctctatcccgcgacccgcgagatcggaatcgcggcgccccgccgccctcctccaaaatggcgccgtctctgctcggggggttcaccaagtcgttggccatgacggtgctctccgagatcggggacaagaccttcttcgccgccgcgattctggctatgcgccatcccaggaaactcgtattggcaggctgtttaactgcactaatagtcatgacagctctatcggcttctctaggttgggttgcaccaaatctgatttcacgtaaatggactcatcatttgaccactctattgttctttctatttggcatttggtcattgtgggaaggcttcaaggaagatggagattcggaagaattggctgaagttgaagcagagctggatgctgcctttaagagtaataaaggtgaatctaaaaataaatttaaggcgaatgatgatatgaagaaacagcaaagaccatttctcatgcagttcttctcaccaatttttctgaaggcattttctattacattctttggtgagtggggtgacaagagccagattgctacaattggcttggctgctgatgaaaacccgttcggtgttgtcctgggtggaatcatagcgcaagcactctgcactactgctgccgttcttggtggaaagagcctagcgtcccagatatctgagaagatggttgaactgtcaagcggagtgctcttcctgctcttcggtatcatgtccttactctctggaccagaaggagaattgtaatccctgcttgagcctttttcagctagctgattaacatggctttctcttcttagacctatcttatttcagtacatgaatgatggcaacgaaagccatccatccatggcgaacaggatggtgatttaacagtttagccgacacgctgtaaacatttcagtcgcccttcaaaaattactacatgttacagaagtctgtagcgattgtatatttgtattctgtcgtgcccagcacgtgaaattttgttatcgcaattacatgcgttaacaaagctttgttcgtgaaccaagtattcaggcaattaatatggggcttatagcaggcctttgtcttcaaaaaaaaaaaaaaaaagcggc

SEQ ID NO: 2073 - DNA, 1334 bp, Zea mays
  Clone ID: PAT_MRT4577_42710C.1
cccccgaggtcggccgggccgacggccccgcgcgcgcgttctcacctgaccctgctcttcgcctcggctgctctaccagtctacctctaccccgcgccccctccgagatcggaatcgcggcgccccgccgccctcctccgccatggcgccgtctctgctcggggtcacctttcctcttcctctctccccttcttcttcattcaggtgtgttaattaagcagaggaagtggcttggcttcttgctcatggttctaggtgcgtgcgtgcagggcttcaccaagtcgctggccatgactgtgctctccgaggtcggggacaagaccttcttcgccgccgcgatattggctatgcgccatcccaggaaactggtcctggcaggctgtttgactgcactaatagtgatgacagctctatcagcttctctaggttgggttgcaccaaatctgatttcacgtaaatggactcatcatgtgaccactctattgttctttgtatttggtatttggtcattgtgggaaggcttcaaggaagatggagattcagaagaattggctgaagttgaagcagagctggatgctgtctttaagagtaataaaggcgaatctaaaactaaatttaaggcgaatgatgatatgaagaaacagcaaagaccatttctcatgcagttcttctcaccaatttttctgaaggcattttctattacattctttggtgagtggggtgacaagagccagattgctacaattggcttggctgctgatgaaaacccgttcggtgttgtcctgggtggaatcatagcgcaagcactctgcactactgctgccgttcttggtggaaagagcctagcgtcccagatatctgagaagatggttggaactagactcattttctttgcactcctgtaaaatgtccagcattagttcgatgcttgtctggttgtaggttgaactgtcaagcggagtgctcttcctgctcttcggtatcatgtccttactctctggaccagaaggagaattgtaatccctgcttgagcctttttcagctagctgattaacatggccttctcttcttagacctgtcatatttcagtacatgaataatggcaaccaaagccatccatccatggcgaacaggatggtgatttaacagtttagccgacacgctgtaaacatttcagtcgcccttcaaaaattggtacatgttacagaagtctgtagcgattgtatatttgtattctgtcgggcccagcacgtgaaattttgttatcgcaatgacatgcgttaacacagctttgttcgtgaacctattcaggcaattaatatggggcttatagc

SEQ ID NO: 2074 - DNA, 2802 bp, Zea mays
  unsure (1)..(2802): unsure at all n locations
  Clone ID: PAT_MRT4577_42713C.1
aattcggcacgatcggcacgagggttctgccgctggcgcaccgcgtcccgcccgcgccgcgtcctgccggcggacgcaccccgcccggcatcctgcgaccttccttcaaccttcaacggcgcaatccatgcgcaattcccgctccccaccgtatcggcctcgctcgcgcaatccatgtggcctaaccttcaatcaaggctccgggcaaggtttccatcgttggcgaagcaccaacctccatccttctccacgctctcctggaagactatcatccatggtttacggagaaatcacgcctccccagacgtccaccaggggctacaccatgaccccgccccctctcccacaccgccggccagcctccatcgtcgatggaagggcgcgatctccgcaatccgcaggccccttcccccacaaatgccgccatggatggcgggtgcagcggatttcgcctccatcccgcttggccccctccgcgcacagccagccgcatgcccgcgcatggcggatccgcctccccctccgccaacgagcatgcgccagcacccgatcctcgctcgctcagccatgccctcgctcggtcccctccgcgcacgcgcaaaccaccgttcccccgcccgctccactgatccccatccccctcagatcctccctgcaaatcaaatccccccacgcgtccgcccacgcgtcgcccgcagcgcctcgcctcggctgctctacctctatcccgcgacccgcgagatcggaatcgcggcgccccgccgccctcctccaaaatggcaccgtctctgctcggggggttcaccaagtcgttggccatgacggtgctctccgagatcggggacaagaccttcttcgccgccgcgattctggctatgcgccatcccaggaaactcgtattggcaggctgtttaactgcactaatagtcatgacagctctatcggcttctctaggttgggttgcaccaaatctgatttcacgtagatggactcatcatttgagcactcgttgtgcctcgagcctcgaccggccgggccccgtcccggatccgacggccccgcgcgcgcgttctcacccgaccctgctcttcgcctcggctgctctaccagtctacctctaccccgcgccccctccgagatcggaatcgcggcgccccgccgccctcctccgccatggcgccgtctctgctcgggggcttcaccaagtcgctggccatgacggtgctctccgaggtcggggacaagaccttcttcgccgccgcgatattggctatgcgccatcccaggaaactggtcctggcaggctgtttgactgcactaatagtgatgacagctctatcagcttctctaggttgggttgcaccaaatctgatttcgcgtaaatggactcatcatgtgaccactctattgttctttgtatttggtatttggtcattgtgggaaggcttcaaggaagatggagattcagaagaattggctgaagttgaagcagagctggatgatgtctttaagagtaataaaggcgaatctaaaaataaaactaaggcaaacgatgatacgaagaaacagcaaagaccatttctcatgcaattcttctcaccaattttcataaaggcattttctattacattctttggtgagtggggtgacaagagccagattgctactattggcttggctgctgatgaaaacccatttggtgttgtcctgggtggaatcatagcgcaagcactctgcactactgctgctgttcttggtggaaagagcctagcctcccagatatccgagaagatggtcgaactgtcaagcggagtgctcttcctgctgttcggtatcatgtcattgctctctggaccaggagaattgtaatccctgcttgaacccttttcagctggctgattgacatctctctctccttagacctatcttatttcagtagatgaatgatggcgacaaaagccatccatccatatggcgaaccggatggtgattcgatagtttagccgacacatcggaaacatttcactcgtccttcataaataactacatgttacagaagtctagcgatttcattctgttgtgctcagcatgtgaaagtcagtctttagtactccctccatttttttatatttgtcgcgttttagtttaaaaataaactagaagacgataaatattcgagaatgaaggtagtagaagctacatgcagtatcatgaatatgataagattcttgttactaaatttttgttgtcgcaattacatgcgttaacaaagcttagtttgtgaatccgcaggccaaatcgtaaattccgaattcaactacataatacgggtttttaatccctgcttgtgaccggtcccttttccgctggctgattgacatctctctctccttanacctatcttatttcagtagatgaatgatggcgacaaaagccatccatccatatggcgaaccggatggtgattcgatagtttagccgacacatcggaaacatttcactcgtccttcataaataactacatgttacagaagtctagcgatttcattctgttgtgctcagcatgtgaaagtcagtctttattattccctccatttttttatatttgtcgcgttttagtttaaaaataaactagaacacgataaatattcgagaatgaaggtagtagaagctacatgcaggctcgtgaatatgataagatagttgcttctgatgtgtagtgaagccaagaacaacaacctggagctggtgctgctgacaacaccagccataccagaagacaggatgaagggagatcaccaa

SEQ ID NO: 2075 - DNA, 1928 bp, Zea mays
  Clone ID: PAT_MRT4577_42714C.1
ccggccgggaaccccgattcgtttccccttggcacctggcgccctgtcgccttcgaaaaacagccgccgccgtcgcccgtcccggatccgacggcccccgctccttcgtctagtatttatactagtgccttgccggcgctgctccaaaaaaaaaaagcctctcgcatttgccccgctgcccacgcccgcagcgcctcgcctcggctgctctacctctatcccgcgacccgcgagatcggaatcgcggcgccccgtcgccctcctccaaaatggcgccgtctctgctcggggggttcaccaagtcgttggccatgacggtgctctccgagatcggggacaagaccttcttcgccgccgctattctggctatgcgccatcccaggaaactcgtattggcaggctgtttaactgcactaatagtcatgacagctctatcggcttctctaggttgggttgcaccaaatctgatttcacgtaaatggactcatcatttgaccactctattgttctttctatttggcatttggtcattgtgggaaggcttcaaggaagatgggtaccgagattcggaagaattggctgaagttgaagcagagctggatgctgcctttaagagtaataaaggtgaatctaaaaataaatttaaggcgaatgatgatatgaagaaacagcaaagaccatttctcatgcagttcttctcaccaatttttctgaaggcattttctattacattctttggtgagtggggtgacaagagccagattgctacaattggcttggctgctgatgaaaacccgttcggtgttgtcctgggtggaatcatagcgcaagcactctgcactactgctgccgttcttggtggaaagagcctagcgtcccagatatctgagaagatggttgaactgtcaagcgaagtgctcttcctgctcttcggtatcatgtccttactctctggaccagaaggagaattgtaatccctgcttgagcctttttcagctagctgattaacatggctttctcttcttagacctatcttatttcagtacatgaatgatggcaacgaaagccatccatccatggcgaacaggatgttgatttaacagtttagccgacacgctgtaaacatttcagtcgcccttcaaaaattactacatgttacagaagtctgtagcgattgtattctgttgtgcccagcacgtgaaagtcaacctttagcaatagctgcctacaatatgatgtaagattcttgtcactgaaattttgttatcgcaattacatgcgttaacaaagctttgttcgtgaaccaagtattcaggcaattaatatggggcttatagcaggcctttgtcttaaaaaaggaaacagcaaagaccatttctcatgcaattcttctcaccaattttcataaaggcattttctattacattctttggtgagtggggtgacaagagccagattgctactattggcttggctgctgatgaaaacccatttggtgttgtcctgggtggaatcatagcgcaagcactctgcactactgctgctgttcttggtggaaagagcctagcctcccagatatccgagaagatggtcgaactgtcaagcggagtgctcttcctgctgttcggtatcatgtcattgctctctggaccaggagaattgtaatccctgcttgaacccttttcagctggctgattgacatctctctctccttagacctatcttatttcagtagatgaatgatggcgacaaaagccatccatccatatggcgaaccggatggtgattcgatagtttagccgacacatcggaaacatttcactcgtccttcataaataactacatgttacagaagtctagcgatttcattctgttgtgctcagcatgtgaaagtcagtctttagtaaaaaaaaaaaaaaaaaagcggc

SEQ ID NO: 2076 - DNA, 428 bp, Zea mays
  Clone ID: PAT_MRT4577_42811C.1
tccgggggtcgccttcacctacctgacaccagctagcaactctttctcttctgcaataatggccgctcgctcctgctggtgccaaccgcagctggtcgcggccgcggcggtcctggcagcggcgctgctgctgctgggtctgagggggccgggacggcatcagcggccgcgagctgccgccaggcgacatcgtcggtggcgccgtgcctagggtacgcgatgggcagcgcggcgtagccctccgcggcgtgctgcatcgaagtgcgctcgctcaacagacgtgcgtcgtcggcggctgaccggcaggccacctgcaactggctcacgagcatgaccggacagttcggctgcggcatcagcatggacaactgatgcgacataacagggacgtgctgcgtctacatgtgcttgcccatcagcccaaccgg

SEQ ID NO: 2077 - DNA, 364 bp, Zea mays
  Clone ID: PAT_MRT4577_42956C.1
attgaactataactcataataaatctaaaagcagggcaccaccaatgatgggttgttggtagaacactgctgggtttgtcaaagcaagttggtggggtggcgggggttgttgcagttgtcagagggtgccaccttcacgcgcaacgtgctgggggaacggcgacaactgtggttgtgtcaacaatgtaccagggctcacaccatctagctggctgagtggtagctgctgttgctgtggcaaattagcacgagagttcaggggggccagttggctgactggaagatcttgctgggggtccgcttcaggtagctggctgcgtgctcgttgttgttgttgcatgtcccatgcgtgcgtcagtggacc

SEQ ID NO: 2078 - DNA, 2559 bp, Zea mays
  Clone ID: PAT_MRT4577_43021C.1
cgcacgcacgcacgaccacgaccagttgccacggcagaccaccccgcccagcggccagcttgctcgccacgaccacgatgggcttccccgtggggtactcggagtcggagatgctgctcccgcgcgtgctgctgcaggtgctcctcctcctcggccacttccaccgcttcctcctctgggccttccacgccgtggggctcggcgacctgatcgacctcggctgcaactacccgccgccgccgccctccgcgtccacggcgcacgagatgatggagcaccagcaccagcaccaggggcgcgacgacgtggcctccccgctgcagcaccagcgcccggagttcaggcccgtcgcggcggcgctcatcgaggaggcgctccccgtggtgcggttcgacgagctgggcggcgcgccgtgcggcggcggcgactgcgcggtgtgcctgagcggcatcggcggcggcgacgaggtgcggcggctcggcaactgccgccacgccttccaccgggcctgcctggaccgctggatggcgcacgaccagcgcacctgcccgctctgccgcgcgccgctcatcccctgggccgccgacgccgactacgacatgtcctatccgtctcccctgccgcccacgccactgcggcggcctcacgagctgctgctgctgcttaccggcctgggcggcttccagtgatgcgcctgcgcgtgggcagcgtggctggcacttgggcaggccggccggaacgggccgtgtgtgtttccttctccgtcagccgcgccgccgcccgcctccccaactgtcaggcgccgcgatggaggctctccacgaggagatgcccttcgacctcgacttccacccgtcgtctccgctcgtcgtcacctccatcatcaccggagagctctgcctgttccgctacggcccggagtcgcagcctgagaggttacttttgttaaaagcccacaaggagtcatgcagagctgttcgttttgtggactcaggaaaagtgattttgtcagggtcagctgattgctcagttcttgcctcagatgtagaatcgggcaaggccattgcccgcttggaggatgcacatgagaatgccataaaccgccttgtctgtcttactgaatctacaattgccacaggtgatgatgaaggctgcattaaggtatgggatacccgggagcgatcttgctgcaacagttttgaagtccacgatgattacatttcagatatgacctatgtggctgagacaaatcagatactggccacaagtggggatggaactttgtctgtgaacaacctgcggaggaataaagtaaggtcacgatctgaattttcagaagatgagttgctatccttggtgttaatgaagcatggtaaaaaggttgtgtgtggaactccaagtggagcactcttattatattcatggggatactttaatgattgcagtgaccgctttatcggacacacgcagtctgtggatacaatgctgaagctggatgaagacactttggtttctggatcatcagatggtgtgatcagattggtgggcatcctacctaataggataaaacagccacttgctgaacattcagaataccccattgaggcccttgctttgtcaaacgacaagaaatatttaggcagcatctcacatgataaaatgctgaagctctgggacttggaagaactcttgagtggcccacaggtagccaatggtgatgaacctgctgaagctggtagtgatgacagcgatgacgatagcgatgatgatgtgatggatgtagacatggcggcaacctcttctaaaggttcaaggagtaaaaaggcaggtaaaggacagagttcgagtcggccggcatcggatttctttgcagatctatagtcgtcaagtttcctaagttagaagctgtgtactctcctctctggttttttttgggttactgtacgcgagtgcgtgtgcgagtgggcaactttgaccgccggtgcaaggcatgccaaatgttgttttatttataagtatattgctgatggcatttatcagaagtagaagcagtaagtgttgtggacatggtgctaatggtttggaatttggaaagcggaaaccaaaccttatccacgcgaatccgatccgtggcgaggcaaaccgcgtgctcatgtgcggcccagcacgcccggtcggtcaggcgggtgaccgccgccaaacctgctcagttgccagccgtacacgcttgccggcctcgtcttcggtcgtgtctccgactccgttggtttttttacagaggctcccagtcccaggtcaaacaaaaaaggaggcgaaacagacaaagcagtcggaaattaggcaggtactgtactaggttgatctgtaggccgattgggcgactccaaatctgtggagctgtgaatcctttggcagattaaactaaaaattgtctctatagatcagaccatcaaaaaaaaagccacgcggccgcggacgcgtggggccattccgcatcgatcgatcgatcactcactcgctcagtcactcgaaaaaaaaaaacccccccccccacccaac

SEQ ID NO: 2079 - DNA, 1113 bp, Zea mays
  Clone ID: PAT_MRT4577_43023C.1
cgcacgcacgaggccaccaccacgaccacgagcgcgcgcttgccacggcagaccaccccgcccagcggccagcttgctcgccacgaccacgatgggcttccccgtggggtactcggagtcggagatgctgctcccgcgcgtgctgctgcaggtgctcctcctcctcggccacttccaccgcttcctcctctgggccttccacgccgtggggctcggcgacctgatcgacctcggctgcaactacccgccgccgccgccctccgcgtccacggcgcacgagatgatggagcaccagcaccagcaccaggggcgcgacgacgtggcctccccgctgcagcaccagcgcccggagttccggcccgtcgcggcggcgctcatcgaggaggcgctccccgtggtgcggttcgacgagctgggcggcgcgccgtgcggcggcggcgactgcgcggtgtgcctgagcggcatcggcggcggcgacgaggtgcggcggctcggcaactgccgccacgccttccaccgggcctgcctggaccgctggatggcgcacgaccagcgcacctgcccgctctgccgcgcgccgctcatcccctgggccgccgacgccgacgccgacgcggccgactacgacatgtcctatccgtctcccctgccgcccacgccactgcggcggcctcacgagctgctgctgctgcttaccggcctgggcggcttccagtgatgcgcctgcgcgtgggcagcgtggctggcacttgggcaggccggccacgcgaatccgatccgtggcgaggcaaaccgcgtgctcatgtgcggcccagcacgcccggtcggtcaggcgggtgaccgccgccaaacctgctcagttgccagccgtacacgcttgccggcctcgtcttcggtcgtgtctccgactccgttggtttttttacagaggctcccagtcccaggtcaaacaaaaaaggaggcgaaacagacaaagcagtcggaaattaggcaggtactgtactaggttgatctgtaggccgattgggcgactccaaatctgtggagctgtgaatcctttggcagattaaactaaaaattgtctctatagatcagaccatccaaaaaaaaccc

SEQ ID NO: 2080 - DNA, 612 bp, Zea mays
  Clone ID: PAT_MRT4577_43051C.1
gcaaacaaaaaccttgctcattttttttttgattggtttcatagcgggagcaaacaaagggaacaacaggggtcccaacacctaatccaaaggtagaacggacactaacacggggacagaagccaacggtaacacgattctttaaatagataaaataactcggccgaagccaggatgggcccacacattagtcccttcagccgccgccgccccctccttagccaccaccaccacccttgcgccgaccggcgtagcccccaccgccttcgtagccgccgccaccacccttgggccgaccgccgaagccgccaccgccgccttaacccccgtcacggggcccgccaccataacccccgccgccgcgaccgccgatgtagccaccgctgtcaccgccaccgacacgggactgggcctggttaacggtgatgttacggccgtcgagctcctttccgttcatgttttcgatagcgtcaagcatggagttttcggaggagaaggtaacaaagcccaagccgggagaccttcccgtttcccggtcggagatgaccttggagtctaggatctcgcccaaggaggcgaaggctttctccaacgacttgtttttggtggccc

SEQ ID NO: 2081 - DNA, 418 bp, Zea mays
  Clone ID: PAT_MRT4577_43129C.1
ctcaaatggagtttttgaggtatctctgcgtaaccttcaagggaactcatggtggaaacgttttctgaatcactctttttttcattgtggaaacatcttctgaattacacactgttctgatttgattctatgtattgctactcaggtcaaagcaacaaatggtgatactttcttgggtggtgaagattttgataatacactattggagttcttggtgagtgatttcaagaaaactgagggcatagatctgtctaaagatagattggccctgcaaaggcttcgtgaagctgcttagaaggcaaaggttgaacttttcgtgactttttagacagaaatcaatctgccattcataacagctgatgcttcatgggcaaaacatttgaacatcacacttgcaaggtcaaaattttgaattttt

SEQ ID NO: 2082 - DNA, 2186 bp, Zea mays
  Clone ID: PAT_MRT4577_43220C.1
tcgagccggccggggccgtgtcgtgcagtgccatcctacctccattgtttcccggctcttcgtcccttgggagttgggccttggcatttccttaagaaaaaaaagggggaaatcggcttcctactccccgtccttatcgccagccgaaccgacattgttttctccccccttctcgccttctccttctccccctagtctagaggcgtttgctccccaatcccttcggcccgtccgcccgcccgctcgacgtgatcccaccggcagccatggatccatacaagcaccgcccgtctagtgggagcaactccagcttctggaccaccaactccggcgcccccgtctggaacaacaactctgccctcaccgtcggacagcgaggtccaatcctccttgaggattatcatctaatcgaaaagcttgctcagttcgacagagaacgtatccctgaacgtgttgtgcatgcacggggagccagtgccaagggtttctttgaggtcactcatgatgtctctcaccttacatgtgctgattttctccgtgctcctggggtccagacacctgttattgtccgtttctctacagttgtgcatgagcgtggaagccctgagaccttgagggatccacgtggttttgctgtcaagttctacaccagagagggtaactttgacctcgtgggtaacaacatgcctgtgtttttcatacgagatgggatgaaattccctgacatggtccacgctttcaagccgaatccaaagaccaatttgcaggagaactggagaatagtagatttcttctctcaccacccagagagcctacacatgttcaccttcctctttgacgatgttggcatcccactcaactacaggcacatggagggctttggtgtcaatacctactccttgatcaacagggatggaaagcctcaccttgtgaaattccattggaagcctacttgtggtgtgaaatgcttgctcgacaatgaagctgtgactgttggaggcacctgccacagccatgcgacgaaggatctatatgattccatcgcagctgggaattaccctgaatggaagctctacatccagactattgatcttgaccatgaggataagtttgactttgacccgctcgatgtcaccaagacctggcctgaggatatcatcccgctgcagcccgttggacggatggtcctgaacaagaacgtcgacaacttctttgcagagaatgaacagattgctttctgcccagcgattagtgttcctggaattcactattctgatgataagctgctccagacgagaatcttctcctatgctgatacccagaggcaccgccttggtccaaactatctgatgcttcctgtgaatgcaccaaaatgtgcccaccacaataaccaccatgatgggttcatgaacttcatgcacagggacgaagaggtgaactacttcccttcgaggtttgatcccgcccgtcacgcggagaaggtccccattcctccccgtgttctaacaggctgtcgtgagaagtgcatcattcagaaggagaacaacttcaagcaggctggcgagagatatcgatccttcgaccctgcaaggcaagaccggttcatccagcgatgggttgacgcactgacagaccctcgcgtgacccatgaacaccataccatttggatctcctactggtcccagtgtgacgccgctcttggccagaagctggcttctaggctgaacctgaagccgaacatgtaagatcgacgaggaagaaagcaggcaccggtggccaaggttgcaacgcaacatggagcgtgtgatgtttacaccaatataattgaataaacaggggatgtgcgcgtcgtcctacttatgctgatgctgatggtcggtgatcggttatatatactggaacttctggtgtatgctcttctcttctggagagacgtaatgtaacgaagaagaatgtgtcattggggcctgtggtacaaaccctgctgtgtatgggcctgtctataagaaacagcgatgagctgtgacgtatgtttctgacagtttatttactagtgagcacatctttgatttactagaacgaagagaagtggaggaactgtcggacagatgcagcaaggatcctcattcaataatagaatcatactcttgtttgcaaaaaaaaaaaaaaaaaaaaaaggggggggg

SEQ ID NO: 2083 - DNA, 2181 bp, Zea mays
  Clone ID: PAT_MRT4577_43221C.1
taccctcgaggccggccggggccgtgccgtgcagtgccatcctccctccattgtttcccggctctccgtcccttgggagttgggccttggcatttccttaagataaaaaaggggggaaatcggcttcctactccccgtccttatcgccagccgaaccgacattgttttctccccccttctcgccttctccttctcccccctagtctagaggcgtttgctccccaatcccttcggcccgcccgctcgacgtgatcccaccggcagccatggatccatacaagcaccgcccgtctagtgggagcaactccagcttctggaccaccaactccggcgcccccgtctggaacaacaactctgccctcaccgtcggacagcgaggtccaatcctccttgaggattatcatctaatcgaaaagcttgctcagttcgacagagaacgtatccctgaacgtgttgtgcatgcacggggagccagtgccaagggtttctttgaggtcactcatgatgtctctcaccttacatgtgctgattttctccgtgctcctggggtccagacacctgttattgtccgtttctctacagttgtgcatgagcgtggaagccctgagaccttgagggatccacgtggttttgctgtcaagttctacaccagagagggtaactttgacctcgtgggtaacaacatgcctgtgtttttcatacgagatgggatgaaattccctgacatggtccacgctttcaagccgaatccaaagaccaatttgcaggagaactggagaatagtagatttcttctctcaccacccagagagcctacacatgttcaccttcctctttgacgatgttggcatcccactcaactacaggcacatggagggctttggtgtcaatacctacaccttgatcaacagggatggaaagcctcaccttgtgaaattccattggaagcctacttgtggtgtgaaatgcttgctcgacaatgaagctgtgactgttggaggcacctgccacagccatgcgacgaaggatctatatgattccatcgcagctgggaattaccctgaatggaagctctacatccagactattgatcttgaccatgaggataagtttgactttgacccgctcgatgtcaccaagacctggcctgaggatatcatcccgctgcagcccgttggacggatggtcctgaacaagaacgtcgacaacttctttgcagagaatgaacagattgctttctgcccagcgattattgttcctggaattcactattctgatgataagctgctccagacgagaatcttctcctatgctgatacccagaggcaccgccttggtccaaactatctgatgcttcctgtgaatgcaccaaaatgtgccccaccacaataaccaccatgatgggttcatgaacttcatgcacagggacgaagaggtgaactacttcccttcgaggtttgatcccgcccgtcacgcggagaaggtccccattcctccccgtgttctaacaggctgtcgtgagaagtgcatcattcagaaggagaacaacttcaagcaggctggcgagagatatcgttccttcgaccctgcaaggcaagaccggttcatccagcgatgggttgacgcactgacagaccctcgcgtgacccatgaacaccgtaccatttggatctcctactggtcccagtgcgacgccgctcttggccagaagctggcttctaggctgaacctgaagccgagcatgtaagatcgacgaggaagaaagcaggcaccggtggccaaggatgcaacgcaacatggagcgtgtgatgtttacaccaatataattgaataaacaggggatgtgcgcgttgtcgtacttatgctgatgctgatggtcggtggtcgattatatatactggaacttctggtgtatgctcttctcttctggggagacgtaatgtaacgaagaagaatgtgtcattgtggcctgtggtacaaaccctgctgtgtatgggcctgtctataagaaacagcgatgagttgtgacgttatgtttctgacagtttatttactaatgagcacatctttgatttactagaacgaagagaagttgaggaactgtcggacagatgcagcaaggatcctcattaaataatagaatcactcttgtttgcattcaaaaaaaaaaaaaaggccccta

SEQ ID NO: 2084 - DNA, 448 bp, Zea mays
  Clone ID: PAT_MRT4577_43251C.1
caacaaaacaaacgggtcccggtttaaaaacactaaatgcccaaaaagaaaggcttttttaacacttccataatacaaaatttaggaagctaaaaaaaaacagaggcaaagttataaacaaaatatcgggccaaacatggggggcattttgctgaaaaacttgacaggatgagggggcccatggggggggccctgcgggggggactggggtttcttcttcctcctcagcgggaaaaacgggggcattatttttgagcactgggccgaaagaacaccacgcctgagggctattttcggatggaaaggggggacaggccctgcggcctggttttggttggttaaataaaaagggctggtttgcccttccccagggaaaagcctaacccagttgccttgggctccaaaaagctggttgggggccccccatcccccagtattcgattttagc

SEQ ID NO: 2085 - DNA, 250 bp, Zea mays
  unsure (1)..(250): unsure at all n locations
  Clone ID: PAT_MRT4577_43692C.1
gttgacttatcctccccctccggatcgagttcgagttcgtgagggtctccaanattcggtttcgtggctcagcggatcgagatagccgcgtccgatgttgagtaccgctagcttcgtcggcaggctctcctgggccacggacgaccactacctccacaacgccttcagcacctacggcgaggtcctcgagtccaagatcatcctcgatcaccagacccagagctcccacatgttctgcttcatcaccttc

SEQ ID NO: 2086 - DNA, 720 bp, Zea mays
  Clone ID: PAT_MRT4577_43716C.1
ccgggccgggccctcgtgtgcgctgctcccacctgtagcccgacaggcgaagccgccgccgttgcttggttcatagccaccgcaggagactgacatggggggttttggcaagacccacaagagcactgcatacttaaagcgcttccagatcaagatcaacagaaggcgcgctgccaaaacagactacacggccagaataaggctgtttaaccacgacacagacatgtacaatacacccaaatacagatttggggggcgatttaccaacaaggacataacagcgcacatgatctttgatagtatagcaggtgatatggttcttgcttgtgcttactcgcatgagttgccacgatatggtcttgaaggtggtctgaccaactatgcaagtgcctactgcactggccttatgatgcatcctcgcgttctcaagacccgctgtttacataccgaatatcagggcaatgtttaggccattggcgaagatttctctgttgagccaactgatgagatgacgccttctcaggctctcttggatgttagccttatcaggactacgacatggaaccgtgccttttgtgccctcaagggatctttggatggaggcctgaatattcctcacagcgagaagaggttcgctggtttcaagaatgatgacaagcagcttggatgctgatatccatcgcaagtacatatatggtggccagtgtgatgactacatga

SEQ ID NO: 2087 - DNA, 186 bp, Zea mays
  Clone ID: PAT_MRT4577_43883C.1
aacactctatagtgagtcgtattatgtgaatccggtcatcgcatgatgcactccgacccaagtggcgtgcatgttctgcaacatgaccgtcgaaatgggatacggcatggccaattacggtgacagctactacaccgcatgcgctagatgctggctatgcaaatgcgacgacgcgtgctccgccta

SEQ ID NO: 2088 - DNA, 432 bp, Zea mays
  Clone ID: PAT_MRT4577_43927C.1
acggagagcgctcgctcaacagctgtgcttctacagcggcggaccggcacgccacctggaactgcctcaagagcatgacgggccaactcggcaagcggagtcagcatggccaacgccggcaacatccacagcaagtgcagcgtatccgtcggcgtgcccatcagccgcaccgtcgactgcaccaagatcaactgatcgatggaaccatagtggagagagctcgctccttggataaccgcggacgtggccattatcagcatgcagtcagcgtagtaccatagatgtactagctacatgtgtgtcatgcatcagactggcacataatacaaaagtagatcatgcacgcactagtgatcactcaccccagtgtccctccgatcaatgtcgtcgtcttcgtcgtgtaccttacgtgacacgctgtaacacgtacgc

SEQ ID NO: 2089 - DNA, 500 bp, Zea mays
  Clone ID: PAT_MRT4577_43992C.1
gcttcgtcggcgtccttgcctgagccaccagcaacgagtcgctggagaatgccttcgtctcctacggcgagatcgtcgactccaaggtcatcaccgaccggtagacggagaggtcccgcggctttcgcttcgttaccttctcctgcgagaactacatgctcgacgctatcgagaacatgaacggctgggagctcgactgccgtaacatcaccggtaaccaggcccagtcccgtggcgggggcggtgtcggcggtgactacggcgtagtgcggggtggcggcggcggttatgatggcgggcgccgtgacggcggatatggcggcggtggcggctacggcggtcggcgcgaaggtggcagcgtcggctacagaggcggtggcggttacagcggtcgtcgcgagggtggcggtggcggatacggcgtcggcggcggcgtcggctggagggactgatgtgtggacccatcctggcttcgcgcgagttatcttatctatctatag

SEQ ID NO: 2090 - DNA, 2270 bp, Zea mays
  Clone ID: PAT_MRT4577_43995C.1
tggccataaggagacgcggcgatcaggccttccttaattttcttctgttccatcctcgctctacctgcctgctgccagtttcaactctccaaggtcaacgccagccctcgcgcgcttggtgtactctagtttagtacaccaatccgcatgcattcttttttgtttgtttgtttgtttgtttgttttgattgacaaatatatgcggcagagttaagaacgaatcgactccgtcgtctcggctagtcgaccgtacatatccacgacctccaaaggccgccaaaacacccgatccggccagccttgtcgtgtcatcgtccagttagatgtcaactcccatctgaatctcctcctccatggcggctttcctataaatacgtcgcctttccatgttggatgtcattccattccagcaggcaacagcagctatagtttccaagggaaagggatacatcacctgctgctctagctctgctatagcgctagcagcaatataatggcggccgtcggcgccccgggcagctctctgcacggagtcacggggcgcgagccggcgttcgccttctccacggagcacgaggaggcggcgagcaatggcggcaagttcgacctgccggtggactcggagcacaaggcgaagagcgtccggctcttctccgtggccaacccgcacatgcgcaccttccacctctcctggatctccttcttcacctgcttcgtgtccaccttcgccgccgcgccgctggtccccatcatccgcgacaacctcaacctcaccaaggccgacatcggcaacgcgggcgtggcctccgtgtcgggctccatcttctcccgcctcaccatgggcgccgtctgcgacctgctgggcccgcgctacggctgcgccttcctcatcatgctgtccgcgcccaccgtgttctgcatgtcgctcatcgacgacgccgcgggctacatcgccgtcaggttcctcatcggcttctccctcgccaccttcgtctcctgccagtactggatgagcaccatgttcagcagcaagatcatcggcaccgtcaacgggctcgccgccggatggggcaacatgggcggcggcgccacgcagctcatcatgccgctcgtctacgacgtcatccgcaagtgcggcgccacgcccttcacggcgtggcgcctcgcctacttcgtgccgggcctcatgcacgtcgtcatgggcgtcctggtgctcacgctggggcaggacctccccgacggcaacctcaggtcgctgcagaagaagggcaacgtcaacaaggacagcttctccaaggtcatgtggtacgccgtcatcaactaccgcacctggatcttcgtcctcctctacggctactgcatgggcgtcgagctcaccaccgacaacgtcatcgccgagtacatgtacgaccgcttcgacctcgacctccgcgtcgccgggaccatcgccgcctgcttcggcatggccaacatcgtcgcgcgccccatgggcggcatcatgtccgacatgggcgcgcgctactggggcatgcgcgctcgcctctggaacatctggatcctccagaccgccggcggcgccttctgcctctggctgggacgcgccagcaccctccccgtctccgtcgtcgccatggtgctcttctccttctgcgggcaggcggcctgcggcgccatcttcggggtcatccccttcgtctcccgccgctccctcggcatcatctccggcatgacgggcgccggcggcaacttcggcgcggggctcacgcagctgctcttcttcacctcctcaacctactccacgggcagggggctagagtacatgggcatcatgatcatggcgtgcacgctacctgtggtgttcgtgcacttcccgcagtgggggtccatgttcttcccgcccagcgccaccgccgacgaggagggctactacgcctccgagtggaacgacgacgagaagagcaagggactccatagcgccagcctcaagtttgccgagaacagccgctcagagcgcggcaagcgaaacgtcatccaggccgatgccgccgccacgccggagcatgtctaagtctactactaataagatggatcgatccatcatccatgttcacctgctacctacctctacgtgtatgccttgtaacgcgccggaccggagcacttgtttgatacaaaagcacatgttaccaacacatagttgagatgtgccaacgatattcatcatgatgagtgattaccaaaaagatatcatctttggtttacagttgact

SEQ ID NO: 2091 - DNA, 890 bp, Zea mays
  Clone ID: PAT_MRT4577_44045C.1
tcgaggccggccgggcctccattgctccaccagttgatacatgtcttgtgacttgtgaagtgtggtgtgttcctatctgcatcaccttccttcgccttgcaaccctttggctagttcattcatacgaatggattattctaatttgcgtcgccaagctgcatccatgaaaaagactctctttgatcaggggtacctagatgagcaattttgccaggtggaagacttgcaggatgaagctagtcctaatttcgcggaagaggttgtcactttgtttttcaaggactcggccaggctaatatcaaatgctgaacaggctctggaaaaataccccaaagatttcaatagatgggatgcatacatgcagcagctaaaaggcagctgttccagcattggtgcttcaaggatgaagagtgagtgcgtgtcattccgggattactgcggacagggaaatgttgaaggttgtatgagatcgttccagaaagtgaagagggagcacggtgccctgaggcagaaactagaggcctatttccagctgctacgacaagctggtcctgctggagctgccaccaggcctggatgtaagaactaggagttgcaggaaaacggagtatgacccaagaagatacctcactacaactgactggcccagtggccctgctgcgcagcaattaggggtcagcatacgaagcgaaacaagagatgatatgcatggatatgcacaaaactgtaataagagattgttttttcaagaacaaaaaaaaaatcagaggagaggaagggatgggaaccttgtgtagtgagtttacaagctttactgaaagatggtattattgtctcatgtgtaatatattccttccattttaaaatatatttattcttagagtcaaaaa

SEQ ID NO: 2092 - DNA, 1601 bp, Zea mays
  Clone ID: PAT_MRT4577_44373C.1
acgagctacaccacggtccacggaccacggctatgttccactccaggtggaggctgcagccccggtttcgcaagccgcgccgtggctcatctcgctttggatcgattggtttcgtaactggtgagggactgagggtctcggagtggattgatttgggattctgttcgaagatttgcggaggggggcaatggcgaccgcggggaaggtgatcaagtgcaaagctgcggtggcatgggaggccggcaagccactgtcgatcgaggaggtggaggtagcgcctccgcaggccatggaggtgcgcgtcaagatcctcttcacctcgctctgccacaccgacgtctacttctgggaggccaaggggcagactcccgtgttccctcggatctttggccacgaggctggaggtatcatagagagtgttggagagggtgtgactgacgtagctccgggcgaccatgtccttcctgtgttcactggggagtgcaaggagtgtgcccactgcaagtcggcagagagcaacatgtgtgatctgctcaggatcaacaccgaccgcggtgtgatgattgccgatggcaagtcgcggttttcaatcaatgggaagcctatctaccactttgttgggacttccaccttcagcgagtacaccgtcatgcatgtgggttgtgttgcaaagatcaaccctcaggctccccttgataaagtttgcgtccttagctgtggtatttctaccggtcttggtgcatcaattaatgttgcaaaacctccgaagggttcgacagtggctgttttcggtttaggagccgttggtcttgccgctgcagaaggtgcaaggattgctggagcgtcaaggatcattggtgtcgacctgaaccccagcagattcgaagaagctaggaagttcggttgcactgaatttgtgaacccaaaagaccacaacaagccagtgcaggaggtacttgctgagatgaccaacggaggggtcgaccgcagtgtggaatgcactggcaacattaatgctatgatccaagcttttgaatgtgttcatgatggctggggggttgctgtgctggtgggtgtgccacataaggacggtgagttcaagacccccccgatgaacttcctgaacgaaaggaccctgaagggggccttttttggcaactataagccccgccctgatttgccaaatgtggtggagctgtacattaaaaaggagctggaggtggaaaagtttatcacgcccagggttccgtttgccgagatcaacaaggggtttgaccttatggccaagggggagggcatccgctgcatcatccgcatggagaaatagatttcgctgtttagtttgtgatttggcctggggttggggttaataaaaaaggcaaaggtagcctgcccttttgatgaggaggtacaaacacgctggggatgggccgcgcttgtgtgttgggttcagtttgggttttgccaaacagtaggggagcttcccgggtcggtaattatatggtatgaaccctccccttttggctttacatggtatgaacgtaaaatacaaattcccattaaaaaaaaaaaaaaaaaaaaactcgagcctgcagcccggg

SEQ ID NO: 2093 - DNA, 1835 bp, Zea mays
  Clone ID: PAT_MRT4577_44375C.1
cagccccggtttcgcaagccgcgccgtggtttgcttgcccacggcggccaaaccgcaccctccttcccgctcatctcgctttggatcgattggtttcgtaactggtgaaggactgagggtctcggagtggatcgatttgggattctgttcgaagatttgcggaggggggcaatggcgaccgcggggaaggtgatcaagtgcaaagctgcggtggcatgggaggccggcaagccactgtcgatcgaggaggtggaggtagcgcctccgcaggccatggaggtgcgcgtcaagatcctcttcacctcgctctgccacaccgacgtctacttctgggaggccaaggggcagactcccgtgttccctcggatctttggccatgaggctggaggtatcatagagagtgttggagagggtgtgactgacgtagctccgggcgaccatgtccttcctgtgttcactggggagtgcaaggagtgcgcccactgcaagtcggcagagagcaacatgtgtgatttgctcaggatcaacactgaccgcggtgtgatgattggcgatggcaagtcgcggttttcaatcaatgggaagcctatctaccactttgttgggacttccaccttcagcgagtacaccgtcatgcatgtcggttgtgttgcaaagatcaaccctcaggctccccttgataaagtttgcgtccttagctgtggtatttctactggtcttggtgcatcaattaatgttgcaaaacctccgaagggttcgacagtggctgttttcggtttaggagccgttggtcttgccgctgcagaaggtgcaaggattgctggagcgtcaaggatcattggtgtcgacctgaaccccagcagattcgaagaagctaggaagttcggttgcactgaatttgtgaacccaaaagaccacaacaagccggtgcaggaggtacttgctgagatgaccaacggaggggtcgaccgcagcgtggaatgcactggcaacatcaatgctatgatccaagctttcgaatgtgttcatgatggctggggtgttgctgtgctggtgggtgtgccgcataaggacgctgagttcaagacccacccgatgaacttcctgaacgaaaggaccctgaaggggaccttctttggcaactataagccacgcactgatctgccaaatgtggtggagctgtacatgaaaaaggagctggaggtggagaagttcatcacgcacagcgtcccgttcgcggagatcaacaaggcgttcaacctgatggccaagggggagggcatccgctgcatcatccgcatggagaactagatttcgctgtcagtttgtgatctggcctgggcttgggttaataaaggaggcaatgctagcctgccctttcgatgaggaggtacatacacgctggcgatggaccgcgcttgtgtgtcgcgttcagtttggcttttgccaagcagtagggtagcttcccgtgtcggtaattatatggtatgaaccatcaccttttggctctaaaaaaaaaaaaaaaaaaaaaaaaaaaaaaaaaaaaaaaaaaaaaaaaaaaaaaaaaaaaaaaaaaaaaaaaaaaaaaaaaaaaaaaaaaacaaaaaaaaaaaaaaagctcaaaaaagaaaaaaaaaaaaaaattgccggccgggactaccggataaaagggcaaatccaaccaaagggggagccgtgtaaaaaggaatcccctgtggaaacaagttttggggtaacaagggcaaaaacttttccccggcgaaaaattaaaatccaataaccagggcccccaaaaaaagagacccaactcaaaaaagtgaaaacccggggacccc

SEQ ID NO: 2094 - DNA, 1787 bp, Zea mays
  Clone ID: PAT_MRT4577_44376C.1
ctcgaggccggccggtttctaagttaaatcctaaggaaaaaaatggtgcttcttggtgctgcaaaaaaaaaaaaaaaaaatgttccactccaggtggaggctgcagccccggtttcgcaagccgcgccgtggtttgcttgcccacaggcggccaaaccgcaccctccttcccgctcatctcgctttggatcgattggtttcgtaactggtgagggactgagggtctcggagtggattgatttgggattctgttcgaagatttgcggaggggggcaatggcgaccgcggggaaggtgatcaagtgcaaagctgcggtggcatgggaggccggcaagccactgtcgatcgaggaggtggaggtagcgcctccgcaggccatggaggtgcgcgtcaagatcctcttcacctcgctctgccacaccgacgtctacttctgggaggccaaggggcagactcccgtgttccctcggatctttggccacgaggctggaggtatcatagagagtgttggagagggtgtgactgacgtagctccgggcgaccatgtccttcctgtgttcactggggagtgcaaggagtgtgcccactgcaagtcggcagagagcaacatgtgtgatctgctcaggatcaacaccgaccgcggtgtgatgattgccgatggcaagtcgcggttttcaatcaatgggaagcctatctaccactttgttgggacttccaccttcagcgagtacaccgtcatgcatgtgggttgtgttgcaaagatcaaccctcaggctccccttgataaagtttgcgtccttagctgtggtatttctaccggtcttggtgcatcaattaatgttgcaaaacctccgaagggttcgacagtggctgttttcggtttaggagccgttggtcttgccgctgcagaaggtgcaaggattgctggagcgtcaaggatcattggtgtcgacctgaaccccagcagattcgaagaagctaggaagttcggttgcactgaatttgtgaacccaaaagaccacaacaagccagtgcaggaggtacttgctgagatgaccaacggaggggtcgaccgcagtgtggaatgcactggcaacattaatgctatgatccaagctttcgaatgtgttcatgatggctggggtgttgctgtgctggtgggtgtgccacataaggacgctgagttcaagacccacccgatgaacttcctgaacgaaaggaccctgaaggggaccttctttggcaactataagccacgcactgatctgccaaatgtggtggagctgtacatgaaaaaggagctggaggtggagaagttcatcacgcacagcgtcccgttcgccgagatcaacaaggcgttcgacctgatggccaagggggagggcatccgctgcatcatccgcatggagaactagatttcgctgtctagtttgtgatctggcctgggcttggggttaataaaggaggcaatgctagcctgccctttcgatgaggaggtacatacacgctggcgatggaccgcgcttgtgtgtcgcgttcagtttggcttttgccaagcagtagggtagcttcccgtgtcggtaattatatggtatgaaccatcaccttttggctctacatggtatgaacgtaagatacaaattccaactacctctagctcgcttgtgtggtatctgtatcagtatacatgtgtttgtttgcttatgtgtttgtttgcttgtatttgctggtgtctgtatcgcgggatgcaatgagttgttgtttggttgtgtcaaccaggctcaaat

SEQ ID NO: 2095 - DNA, 1539 bp, Zea mays
  Clone ID: PAT_MRT4577_44377C.1
gattttctcgctcctacaggctcatctcgctttggatcgattggtttcgtaactggtgagggactgagggtctcggagtggattgatttgggattctgttcgaagatttgcggaggggggcaatggcgaccgcggggaaggtgatcaagtgcaaagctgcggtggcatgggaggccggcaagccactgtcgatcgaggaggtggaggtagcgcctccgcaggccatggaggtgcgcgtcaagatcctcttcacctcgctctgccacaccgacgtctacttctgggaggccaagactcccgtgttccctcggatctttggccacgaggctggaggtatcatagagagtgttggagagggtgtgactgacgtagctccgggcgaccatgtccttcctgtgttcactggggagtgcaaggagtgtgcccactgcaagtcggcagagagcaacatgtgtgatctgctcaggatcaacaccgaccgcggtgtgatgattgccgatggcaagtcgcggttttcaatcaatgggaagcctatctaccactttgttgggacttccaccttcagcgagtacaccgtcatgcatgtgggttgtgttgcaaagatcaaccctcaggctccccttgataaagtttgcgtccttagctgtggtatttctaccggtcttggtgcatcaattaatgttgcaaaacctccgaagggttcgacagtggctgttttcggtttaggagccgttggtcttgccgctgcagaaggtgcaaggattgctggagcgtcaaggatcattggtgtcgacctgaaccccagcagattcgaagaagctaggaagttcggttgcactgaatttgtgaacccaaaggaccacaacaagccagtgcaggaggtacttgctgagatgaccaacggaggggtcgaccgcagcgtggaatgcactggcaacatcaatgctatgatccaagctttcgaatgtgttcatgatggctggggtgttgccgtgctggtgggtgtgccgcataaggacgctgagttcaagacccacccgatgaacttcctgaacgaaaggaccctgaaggggaccttttttggcaactataagccacgcactgatctgccaaatgtggtggagctgtacatgaaaaaggagctggaggtggagaagttcatcacgcacagcgtcccgttcgccgagatcaacaaggcgttcgacctgatggccaagggggagggcatccgctgcatcatccgcatggagaactagatttcgctgtctagtttgtgatctggcctgggcttggggttaataaaaaaggcaatgctagcctgccctttcgatgaggaggtacatacacgctggcgatggaccgcgcttgtgtgtcgcgttcagtttggcttttgccaagcagtagggtagcttcccgtgtcggtaattatatggtatgaaccatccccttttggctttacatggtatgaacgtaagatacaaattccaaaaaaaaaaaaaaaaaaaaaaaaaaaaaaaaaaaaaacaaaaaaaaaaaaaa

SEQ ID NO: 2096 - DNA, 2424 bp, Zea mays
  Clone ID: PAT_MRT4577_44378C.1
cattgggtacctcgaggccggccgggactactactagctactagctttaatttgtaactgcttgtctgccatggaggaggaggagggatcgtcgacatcatcagtcgctgtgcctgtgccgccgcctaataagtacgactcctggacgacagatccggaggagctgatgatgatgatggtcgacgaggcggcggtgcagcaggaagggccccgtcgccggcgggactccatgctcaacaagctcatctccacggtctactccggacccaccatcagcgacatagagagcgcgctctctttcaccggcggcggcgacgtggatgctcgcaactacaacaactcctccgccggcccaggggctttatcgtccccggagaaggtgctgatgagcaagatggagaaacaggctcatctcgctttggatcgattggtttcgtaagtggtgagggactgagggtctcggagtggattgatttgggattctgttcgaagatttgcggaggggggcaatggcgaccgcggggaaggtgatcaagtgcaaagctgcggtggcatgggaggccggcaagccactgtcgatcgaggaggtggaggtagcgcctccgcaggccatggaggtgcgcgtcaagatcctcttcacctcgctctgccacaccgacgtctacttctgggaggccaaggggcagactcccgtgttccctcggatctttggccatgaggctggaggtatcatagagagtgttggagagggtgtgactgacgtagctccgggcgaccatgtccttcctgtgttcactggggagtgcaaggagtgtgcccactgcaagtcggcagagagcaacatgtgtgatctgctcaggatcaacaccgaccgcggtgtgatgattgccgatggcaagtcgcggttttcaatcaatgggaagcctatctaccactttgttgggacttccaccttcagcgagtacaccgtcatgcatgtgggttgtgttgcaaagatcaaccctcaggctccccttgataaagtttgcgtccttagctgtggtatttctaccggtcttggtgcatcaattaatgttgcaaaacctccgaagggttcgacagtggctgttttcggtttaggagccgttggtcttgccgctgcagaaggtgcaaggattgctggagcgtcaaggatcattggtgtcgacctgaaccccagcagattcgaagaagctaggaagttcggttgcactgaatttgtgaacccaaaagaccacaacaagccagtgcaggaggtacttgctgagatgaccaacggaggggtcgaccgcagtgtggaatgcactggcaacattaatgctatgatccaagctttcgaatgtgttcatgatggctggggtgttgctgtgctggtgggtgtgccacataaggacgctgagttcaagacccacccgatgaacttcctgaacgaaaggaccctgaaggggaccttctttggcaactataagccacgcactgatctgccaaatgtggtggagctgtacatgaaaaaggtaaattgcaaagtgctgttccttcggtttccttaccagccgagcttttgctgaaaaactgttaagaatcgttcctgcaattctgcttggctctgcacaggagctggaggtggagaagttcatcacgcacagcgtcccgttcgccgagatcaacaaggcgttcgacctgatggccaagggggagggcatccgctgcatcatccgcatggagaactagatttcgctgtctagtttgtgatctggcctgggcttggggttaataaaagaggcaatgctagcctgcccattcgatgagaaggtacatacacgctggcgatggaccgcgcttgtgtgtcgcgttcagtttggcttttgccaagcagtagggtagcttcccgtgtcggtaattatatggtatgaaccatcaccttttggctctacatggtatgaacgtaagatacaaattccaactaaaaaaaaaaaaaaaaaaaaaaaaaaaaaaaaaaaaaaaaaaaaaaaaaaaaaaaaaaaaaaaaaaaaaaaaaaaaaaaaaaaaaaaaaaaaaaattcaaaaaaaaaaaaaaaaaaaaaaaaggtttttgggccgggccccccctaagggggaattttgggaaatttccttcacactgggggccgttcgaccttgcttttaaagggcccatttccccctttaggggggggtttaaaaattaatgggccggggtttaaaaacggggggacggggaaaacccgggggttacccaatttattggctttgaagaaaatccccttttggccagtgggggtaatagcaaaaaggccccaaccgttcgcccttccaaaaattggcccacccttaatgggaaatggaccccccctgttacggccctttaagcgcggggggggggggggt

SEQ ID NO: 2097 - DNA, 1211 bp, Zea mays
  Clone ID: PAT_MRT4577_44488C.1
cattgggtacctcgaggccggccgggcaccatcgcacccacccggagcgcctcctcttctccagcgtccgatccccattccccacctctcctccctccgccgccagctcccgcccccttctctcccctcctcgcctccccgcgcgcgcgtttttataagggtttcggcggaggcgcccggtcgctggcgatggccgacgacggcgggagccacgagggcagcggcggcggcggaggcgtccgggagcaggaccggttcctgcccatcgccaacatcagccggatcatgaagaaggccgtcccggccaacggcaagatcgccaaggacgctaaggagaccctgcaggagtgcgtctccgagttcatatcattcgtgaccagcgaggccagcgacaaatgccagaaggagaaacgaaagacaatcaacggggacgatttgctctgggcgatggccactttaggattcgaggagtacgtcgagcctctcaagatttacctacaaaagtacaaagagatggagggtgatagcaagctgtctacaaaggctggcgagggctctgtaaagaaggatgcaattagtccccatggtggcaccagtagctcaagtaatcagttggttcagcatggagtctacaaccaagggatgggctatatgcagccacaggtaatctatcgtactgtcatttgttagtaaaacaatactgcagctattttccgtctcactaaacatggcagaaaatttcgatcattacattattccactaataattttctctctgtacgcactcagtaccacaatggggaaacctaataaagggctaatacagcagcaatttatggtaatattattgctccctgaattttgttaactaaagattctgtatcatgctatatgtatgtttccttttttcttcttctttgttttgacaattgcttctttctctacggtgtttatccatcagctagggaagtctctgcattgcttaccatgtgtattggcagaaaacaggaggcacttacaaagggtgttaatctctgcgatggctgcctctcaggtgtaaattggcttcggtttagcgctgcttttgtccgtatatttaggatgatttgactgttgctacttttggcaaccttttacatttacagatatgtattattcagcataaatataatatagtagtcctaggcctaaataatggtgattaacatacc

SEQ ID NO: 2098 - DNA, 396 bp, Zea mays
  unsure (1)..(396): unsure at all n locations
  Clone ID: PAT_MRT4577_44618C.1
ccaaacgaaanaaaaggagcaaccaagcaagngaaacaggcacaaaaccnncagtacgaaaaacctgcagcacagctgcaaattaaaaaagctatagcagtggacaaactgccaaaatcgctaacagctaaacgacaaattcccacaacctttggaacaccaaggtggaccaaaacgcaaaggcagtatctttggcaacagaaaagccgtggacacgccgaggagcgtaagcagcctcacaaaaattcaccaagcaaaagggggtccctcccccttggacccccaccccacagtcaggagcccgatgacggatgaaaacccgatgcggagcaaggccacaacggactgaccggtgccgcataaccccaacgtcttcgcattttcaatggcaaaacc

SEQ ID NO: 2099 - DNA, 457 bp, Zea mays
  Clone ID: PAT_MRT4577_44721C.1
cccatcatttcttcagtgctcatgacctagagaaaattcaagaaacagcgaggaatctcatggacgagcacagcaaagataccatagtcttagttactgagaaggattatgaccgtgatccagaggccctcaagacactggacgcaaacgtttgggtgctgtcttcttcactgcagattatgcatcacagcaaacaaggagaagatgaattcatgaggaaagtcaatgagattatcacagttacctggtgtgcgaagtcacatgcagcggaccgggccacgggttgctgatggtgtgtggtttgatatggttgtacctgaaaacaactgatagtgaaacattttttgcctggagatatgaacattagcatgcgggttatagtttttccttgcaaccgagtcagtgtcccagtcaaacttacaagatttaaacatgagcaagtaacccgacagcaacg

SEQ ID NO: 2100 - DNA, 309 bp, Zea mays
  Clone ID: PAT_MRT4577_44955C.1
aaaaaaaaacaaattttattcataaacaaaaggggttcacagatttttctccatacgaacatgctcattggggaagacccagttgcccacctagggctgcatacttacttattcagactgatccagcatggggcaacatgggaggttaacatgcttacagacaacaaattttcataacaaaagcctggcttggctgtttcacagaataaccaaacgccacccccgaaattggggccatttaaaataaacaccttaaaagcaaatggaccccaaaagcccgttttaattaaaaagcactttggccttttt

SEQ ID NO: 2101 - DNA, 2232 bp, Zea mays
  Clone ID: PAT_MRT4577_45001C.1
gccatttggcagagacgagacggacacctctgcggcgccgcctcgggcctcggcagacgacagcaatcacagcagcggctctacaagaaaggagaaactgcagaaaccgcgagggcaggcgcggcagcgggcaggcagtccatccccatgtgtttgtgactttgtgctcgtcctcatacccccaccccccagctcccgtctcctcgtgctctccactgctgcatgcgcctcttgtcctgtccccctccccaccttgttcctcccatcccgcgccgtctctgcacgaagcagagcgccggtccaccgacaaggacagctacaactacgacgcgcaggcagagccatcgctcatctggggctgccctcggttactcctcccctccgccgctgcccctgccttgtccacagctgttgttaattccttcatgagttggcgtcggcgccagcggggcggaggggaaggaggcggggcttcagcttccccggcgccggccgccgcctgaagatcccttcttctcctgtagtcctgtcgtcgggcgggcgaggtccaagcatcatggggctcttaggtatgatgggcgactcttttggttgctcggcgactggggagcgacttgtgtctgctgcaagagatggagacatccaggaggccagggctctcttagaactcaatccccgccttgctcggtactccacgttcgggatccggaattcgcctctccattactcggcagcaaagggccaccatgagattgtctccctcctaatcgagtccggtgttaatattaaccttagaaattgcagagggcagactgctctgatgcaagcttgtctatatggtcactggaaagttgtacagattctagttctttttaaagctaatattcacaggagagattgttttagcggcgcgaccgctattcattttgccgcgctaaaaggtcatactcgctgcattcggcttcttgtggctgattatgtgcctagcttgtcagagttttggaccattatgcgtggaaagtccacagatgaaatgaaaaagggtgcctttgatgccgcgtctctccagagactagttaatggaaagtctgatggtggtgtcaccccgcttcacttggcagcccttcatggacatgctgagagtgtacagttgctgctagaccttggagcctctgtctctgaggtgactgtcaatgatggttcaacaattgacctcattggttcggggagcacacccctccattacgcggcgtgtggtggaagtgctgtttgctgccaacttctcattgcagcaggagcaaacatgggagctcaaaatgttaacgggttgactcctttattggtggctcgttcgtggcacaagactagcatcgaaggtattctaagcaagcaaccagaaaaccgaatgcgtattcttccttcaccatacctttgcttaccactgatgagcattgtcaaaattgccagggaatgtggatggaggaaaacttccgcctcatccacttgtcaggatccatgtgtcatatgtttggaggtggaatgcactgtagctgcagaaggttgcggccatgagttctgcaccaaatgtgcactctacttgtgctccaccactagcagctcaacatccacccgtggagttcctggctccatatcatgccctctgtgtcgccatgccatcgtctccttcatgaggctcaccagcactaccccgataaaggagcttccatggacaagcgcgtcactagctctatgtgcagcgggctcaaacactggccgccctgaacatggcgggtccttgcatcgaaggcctgacctgcgtcgactgcgctccatctcagttcagctgggatgctcttcttttagatccattggctctgggaagctgtcgtccatgaagctgaactgcacaggagctgaagaggcggtgccttgcctcgtcagctgcctcaggcccgatgtgcagcgttcatcgtcgtacaggggaagaattaggagatattcagagttttgaaaggatggttttgtggcgtccttcctgcgagtttttagggtttgggaatttaaacctgtgtcgtcatgttcctcttcgtttgtttccctgttgtttaatatgcatgcagtcctcgttgtgaagatctatttgtgtacatggcccgtttgtcttcattacttttacttatatgtgaattatataccatctctgttttgcaattaccgacaagttaatactcc

SEQ ID NO: 2102 - DNA, 827 bp, Zea mays
  Clone ID: PAT_MRT4577_45018C.1
ttcggtcgaaggtggtttcagcgttgcgttcgaccccctcgacggctccagcattgtcgacaccaacttcaccgtcggaaccatcttcggagtctggcccggcgacaagctgaccggagtgaccggcggcgaccaggtcgctgccgcgatgggcatctacggccctcgcacgacctacattgtcgccctcaaggactgccctgggacgcacgagttcctcctcctcgacgaaggtaaatggcagcatgtgaaggacaccacgaccattggggaagggaagatgttctctcctggtaatctgagggcgacattcgataaccctgagtacgacaagctcatcaactactacgtcaaggagaagtacacattgcgctacactggaggaatggttcccgatgtcaaccagatcatagtgaaggagaagggcatcttcaccaacgtgacgtccccgacggccaaggccaagctgcggctcctcttcgaggtggcgcccctgggcttcttgatggagaaggccggcgggtacagcagcgacggcaagcagtcggtgctgcccggcgggatcaacgagctcgacgagcggacccaggtggcctatgggtccaagaacgagatcatccggttcgaggagaccctctacggctcgtccaggctcgccgccagcgccaccgccaccgcccgcgcccttatctgaattgcccacttttttcatcaacttaagtttttagattaaacttttttgaaacaatcagacaggagatctgtcttatatattgatgaggagaaagatgcccaaaggcaaaaaaaaaaaaaaaaaaggggcggcc

SEQ ID NO: 2103 - DNA, 1577 bp, Zea mays
  Clone ID: PAT_MRT4577_45021C.1
gggtacctcgaggccggccgggccggggcgcttgtccagacgtgcatcatatcctccgtgtgatccattcatccccgcgccgtgctagcttgctagttgcaagcaccagccgaccaccaaacggtagcgcacgcggacaatttaacagcatcaggtttaggccctgctgccgtcgtcgagcgcccgggccaccgcacacctgaaagcaatggagatcgtcgccacgcgctccccggcttgctgcgccgccgtgtccttctcccagtcgtacaggcccaaggcgtccaggccgccgaccacgttctacggcgagtcggtgcgggtgaacacagcgcggccgctctcggcgaggaggcagtccaaggcggccagccgcgcggccctcagtgcccggtgcgagatcggagacagcctggaggagttcctgaccaaggcgacgccggacaagaacctcatcaggctgctcatctgcatgggggaggccatgaggacgatcgcgttcaaggtccggacggcgtcctgcggcggcacggcctgtgtcaattccttcggcgacgagcagctggccgtcgacatgctcgctaacaagctcctctttgaggctttggagtactcacatgtgtgtaagtatgcgtgctccgaggaagtccccgagctccaggacatgggtggcccagtcgaaggtggtttcagcgttgcgttcgaccccctcgacggctccagcattgtcgacaccaacttcaccgtgggaaccatcttcgcggagtctggcccggcgacaagctgaccggagtgaccggcggcgaccaggtcgctgccgcgatgggcatctacggccctcgcacgacctacattgtcgccctcaaggattgccctgggacgcacgagttcctcctcctcgacgaaggtaaatggcagcatgtgaaggacaccacgaccattggggaagggaagatgttctctcctggtaatctgagggcgacattcgataaccctgagtacgacaagctcatcaactactacgtcaaggagaagtacacattgcgctacactggaggaatggttcccgatgtcaaccagatcatagtgaaggagaagggcatcttcaccaacgtgacgtccccgacggccaaggccaagctgcggctcctcttcgaggtggcgcccctgggcttcttgatggagaaggccggcgggtacagcagcgacggcaagcagtcggtgctggacagggtgatcaacgagctcgacgagcggacccaggtggcctacgggtccaagaacgagatcatccggttcgaggagaccctctacggctcgtccaggctcgccgccagcgccaccgccaccgcccgcgcccttatctgaattactagaatccgggctcgtagatgctggagtacacagtacagggaaattgcccacttttttcatcaacttaagtttttagattaaacttttttgaaacaatcagacaggagatctgtcttatatattgatgaggagaaagatgcccaaaggcaaaaaaaaaaaagtcaatacaaaaacaacaaaaaaaaaaaaggcccctacgtccg

SEQ ID NO: 2104 - DNA, 581 bp, Zea mays
  Clone ID: PAT_MRT4577_45643C.1
tcaagagcagtcttgcaccatctaccttcaagtctcgctacgtagcagcgcaataaaagaagcacgccgcaatggcgagcagcaccaatggccctctcctccacggccatgcgccgtaaaggccgcgaacttgccgtcatcatccgccttcggcgaggcccgtatgtcgatgctcaatacggcgtttaaggtctagtcagcggatgcgtccgggagtccgtgttactgccccgaccgcgtgctgtacctgggcccactgtccggcgagccaccgagctacctgacggtatagttcccgggcgactacggatggaacaccgcggggctgtgggcgtatccggagacgttctgcagatatgcgaggtgaatgtgatccactgccgctggaccctgatgagcgccttcggctgcgttttcccccagctgactcgccgactgcgcgtgaagtgccgttaggacgagcggtgctagagaggatcacagatcttcaacatggaaggtgtgtgatacctcgggaacccgagactcctctacgcgcagagcatgctctactatttaggggatgccacggcgtgctcgtg

SEQ ID NO: 2105 - DNA, 1970 bp, Zea mays
  Clone ID: PAT_MRT4577_4573C.1
aaataccgccggccgggccgttgcgtccgtccatcctcatccccatccgccacccaccccgcgcccctccttctcactccagtgctggctgccggccagctccgcccccggggtccttgagctggaggtggcggtggatgaccagctctcggagttttctgaggcgaggatcggagggcgttgcgttaggtccgcggttggtgagcggcggtcggagcggtctcgcgcgcggcggggtcgttcgatgacgcaggaatcgcgctctgggagggtgggaatacctcgcgctcgcgctcaaggtgctcgattaatttactgcctgaggctgagggggggcgcgcctgtgagctgaaccgttcccgctgcactgactcctgagctcgggaaatggttgggagcgtgcacgtcaatggatcggtccacggcggcaatggcacggccacggaggagcggctggacgagctgcgccggctgctcggcaagtcggagggggaccttctcaagatcgtcagcgtcggcgccggcgcgtggggcagcgtcttcgccgcgctactacaggacgcgtacggccatttccgggacaaggtgcagataaggatctggcgtcgcccgggccggacggtggaccgctccaccgcggagcacctgttcgaggtgatcaactccagggaggacgtgctcaggcgcctcatccgccgctgcgcctacctcaagtacgtcgaggcgcggctcggagaccgcacgctgtatgccgacgagatactcaaggacggcttctgcctgaacatgatcgagacgccgctctgccctctcaaggtcgtcactaacctgcaggaggccgtctgggatgccgacatcgtcgtgaatggggtgccgtccaccgagacgagggaggtgtttgatgagatcagcgagtattggaaggagaggatcagtgtcccggtgataatttccctcgccaagggaattgaggcctcgttggatccaatacctcgtatcattacacctactcaaatgattagctctgcaactggagttccaactgaaaatatactctatcttggaggaccaaacatcgcctcggaaatttataacaaagaatatgcaaacgctcgaatctgtggatccaacaagtggaggaagcctcttgctaagtttttgaggcagccacatttcattgtctgggacaacagtgatcttgtcacccatgaggtgatgggtggcctgaagaatgtctatgcaatcggtgctggaatggtggcagctttaacaaacgagagtgcaacaagcaaatctgtatattttgctcattgcacgtcagagatgatattcattactcatttgctgacagagcaacctgagaaactcgctggtcctctgctggctgacacgtatgtaactctcttaaaaggtcgcaatgcatggtatgggcaaatgcttgccaagggagagttgagtcctgacatgggtgatagtatcaaggggaagggaatgattcagggtatctctgcagttggtgcattttttgagctgcttagtcaacccagcttaagtgtgcagcacccagaagaaaacaagcaggttgctccagctgagctatgcccaatcctgaagaggctttacagaatactgataaaaagggagctcccagcaagggacattcttcaagccctgagggacgaaacgatgaatgatcctcgggaaaggattgagatggcacaaagccatgcattctaccgcccgtctctccttggaaaaccatgatctagttagtcttgtagattagtagaatataaacggacgctgtgctgcaggtttctccactgtgcttgctgtccttgtgtccgagctacatggggatggggctttgtcagttgtcgaattctttgtgcttcctcgttgccatggtgtacaagagattactgaaccaataaatgttctaagtgcatattatatgaacacccaatttg

SEQ ID NO: 2106 - DNA, 973 bp, Zea mays
  unsure (1)..(973): unsure at all n locations
  Clone ID: PAT_MRT4577_4576C.1
gctccggcagtgctaagatccaggacacgcgctgtcccgctagcaccacgcctccccttgtcatcgtcctcctcccacgtgctgctgtgggggtgcagacgggagacacatccggacctgattgatttcttcgttttgttctgctggtttacatggctgcaagaaagaaaaagcctttgcttattgcttgccaagcaaccagtgccagaataacaagatctcaggctgctgcaaatagtacaagatctgggctggctccttctgtaccagtacctctgaaaacggagcataaccatgcagcgaaaaaaaagatgaaaagggaagcttcagatgaaaatgcttctgctgatgctggagcttcagctcctctgcctaaaaggcgtacagttctcaagaatgtaactaacataagctgtgctaaaatttccaaaaggtgcactgctgtgactgggctgaagttgggtccctcccagaaggctgggcagagcataaacaagcaatgcacaaacaagatctccatgcttctccctctggctgttggagggagttcacttgtggatgattctaataatgctgaagaaacacaaatggtagaccttttggcacagaaagagaagcagattgttttgcttaaggaggctcagccattacagaatactgaacaaaacaaaggcggtgcttgtgatgaggcatctgttgaggaaagaaatgccatgaatgtacacgaaactgctgccttaaaggctggggtctctaatggtttaaacattgtagatattgacaaaaataatggtgatcctcaaatgtgtgttacctacgttgcagagatatacagaaatctaatggcctcagaggtatgctatttatttttggtaaaaaatagaatcttttaactattgtttgngctgactgttggttccctcacatagtaacatttcacaagcttgtgatctaggggacaagcgttatgctc

SEQ ID NO: 2107 - DNA, 294 bp, Zea mays
  Clone ID: PAT_MRT4577_45936C.1
cagaaatgcacttctattatttctgggaagccacatacatcacgataaaaaactttattattgaactataactcataagaaatctaaaagagggcaccaccaatgatgggttgttggtagaacactgctgggtttgtcaaagcaagttggttgaatggctgaaattgttgcagttgtaaaagggggccggcgtttggcgcaacgtgctgttagaacggtaacaactgtggttgtgtcaaaaaggtagaagggtttacaccagcttaactggctgaatggtccttgttgttgctg

SEQ ID NO: 2108 - DNA, 512 bp, Zea mays
  Clone ID: PAT_MRT4577_46026C.1
gggggcgagcggtgcgcaggctggccgccccatgaagaatcggggacgcggcccgaacggccagcctgtagtaaaccttcggccggctctggctctacctcaagaaggccggtccgcgcagtgcgtgggcactggcgcccccgtttacctcaggcgccgacctggaatacctcgccttctaggttctagagttggcaaggaacgcggggagaagacaacaagaagacccccatgatgccgcgccacgtgctcctggcgatccgcaacgacgaggagctcgagaagctgctggtcggcgagaccatcgagcacggcggggtcctcgccaacatccactccgtgctcctgcccaagaaggcggcggagaaggcggccagcggcagcagtaaggagaccaagtccaccaagaagggcgccaagtcccccaagaaggcttaaaaagtagggttttcatttgcgctgtgtgctgtagcatgttcgtgtctagaactagggatgggatgtgttctgct

SEQ ID NO: 2109 - DNA, 283 bp, Zea mays
  Clone ID: PAT_MRT4577_46128C.1
cctgcgagggaagagcacaagaggggtggctttattatgacgctggggggggctccaactccagctcgacggacgacgacggcatgggcggaaggaggaagaagggaatcaaggagaagatcaaagagaagctgcccggatgccacaaggacgaccagcatgccacggcgacgaccggtggcgcctacgggcagcagggacacaccggcggcgcctaccgtcagcaaggacacaccggatgcgcctactccaccggcgccgatggcaccggcgagaagaaagg

SEQ ID NO: 2110 - DNA, 621 bp, Zea mays
  Clone ID: PAT_MRT4577_46237C.1
cattgggtacctcgaggccggccgggactaccagtctgggctgctcccgccaggagggctttggcctgatgaccgggacggccatttcaccggcgacccgatcctccatgacgccgatccacggcgatacaaggcattcttctactgcaacgccaccgcgttcatggcgtcggtggtcatagtcatcctgctgctcaacagcacaataagcaagtacaggaggtctctcctccccatgaaaacggcaatggtgctggacctgcttgctctgcttggggcttacgctgctggcagctgcaggaaactgaagacttctgtatacgtcttcgcgctcgtcgttgctgttttcatgtacattgtcgttcacatcttgctgtccttcgataaaatggcacgggtcatgaagaggactggagaacagtgggttccatgtctgaagaagatgtgggcactcattgaaattgaacctccaaaccatcagccatcttcagaggaaccatgagaggctgacccttgaccgtatgcttgtattgtgattaaatgaattgttcaattgatatgtacctaagtaccttagaatcaatatttgtttttcccaaaaaaaaaaaaaaaaaagcggcc

SEQ ID NO: 2111 - DNA, 486 bp, Zea mays
  Clone ID: PAT_MRT4577_462C.1
gggctaggaaaccttgctggctactcatgaaagcagcggcttattacattcaaccaactagctgcattgagctctgctagttatttgtgacaacaacaactaccattgagccagctacctgctggctacccgcagaaattgcttacattcagccaactggcagcattgtactctactgcttatttacagcaacaacaactactaccattcagccagctagctgaagtgagccctgctacctagttgatacaaccacagctggtggcgttataccagcacgctgagcgtaacgctgggaccctcttacaactgcaacagttgctgccattcaaacaactggctttgacaaacacaggagaggaataccaacaacccatgattgagaggagcacctcttttagatttcttatgagttataggtcaataataaaggattcaggctgatgtacgcgggttcccaaaaataagaaagtacattagtagatt

SEQ ID NO: 2112 - DNA, 467 bp, Zea mays
  unsure (1)..(467): unsure at all n locations
  Clone ID: PAT_MRT4577_46345C.1
ctccccgaggggcgacagaggcaatttcgacctcgattcgaccgcgattagtcggcccgcgaaagggataccctccgacaagagaggatctgaaagatgagatccgtgacaccgctcgaatacgacatgaagggggccaaatccaaaggagccgccaaggccgaagccaagctggaggtgaagagcaaaggggnggagaagaccgccaagggcaggaaagggaaggacggcaaggaccccaacaagcctaagagggctcccagcgctttcttcgagatcatggaggaatttcgcaaggggttcaaggagaagaaccctaagaacaagactgtcgctgcggtggcgaaagctgctggcgacaggcgcaaatcccctgagcgagttcgcacaaagctcccctatgcagccaaggctacccagccacaagctccagtaccacaaggccctcgctgcctaccaacaagggc

SEQ ID NO: 2113 - DNA, 236 bp, Zea mays
  unsure (1)..(236): unsure at all n locations
  Clone ID: PAT_MRT4577_4657C.1
agtnccttttttattaagaatgctctggagggaagcaagttattcataagcnncagaatnncttgagcaaatcccttacaaatgataatcagataagtagagccaacaagacaaaactgtatctggcaacgcacatcgccttaccccagccgactacaccattattcttcagcaaaagcaagcaggtcctttcgtcccccttcagctcaagcgataaccataagaaaacctgctac

SEQ ID NO: 2114 - DNA, 725 bp, Zea mays
  Clone ID: PAT_MRT4577_46737C.1
gtcgacccagcgtccggacccattggtcgtcggcaatgttgtgggagatattgtggatcccttcatcacaacggcgtcactgagagtgttctacaacaataaggagatgacaaatggttctgatcttaagccatctcaagtgatgaatgaaccaagggtccacgtcggtgggcgtgacatgaggactctttacacacttgtcatggtggacccagatgcaccaagccccagtaaccctacaaaaagagagaaccttcactggttggtgacagacattccagagacaactgatgccagtttcgggaacgaaatagttccgtacgagagcccacgtccaatcgccggaatccatcgcttcgcattcgtcctgttcaggcagtcagtgaggcagaccacctatgcgccgggatggagatcaaacttcaacactagagacttcgcagccatctacggccttggctcccctgtcgctgcagtgtacttcaactgccagagagagaacggatgtggtggaagaaggtacataaggtgatatatcaaccaagcataacaacaaattggagtgaaaaaaatatatatcatgtgtgtggtgaacattgcaagtacgatgttcacaatcataagagccattattggatcacatattattctaatgtaatgtggctggggcgttctattggaaaaatagccacggtttgagatttacatataaatttgtgttaacg

SEQ ID NO: 2115 - DNA, 864 bp, Zea mays
  Clone ID: PAT_MRT4577_46740C.1
gcgtccgtaagctcggaattcggctcatatcctaaccaggctcactaatccttaccaatcctttcacccaaatcatacataagatagatgttcaatatgtctagggacccattggtcgtcggcaatgttgtgggagatattgtggatcccttcatcacaactgcgtcactgagagtgttctacaataataaggagatgacaaatggttctgagcttaagccatctcaagtgatgaatgagccaagggtgcacgtcggtgggcgtgacatgaggactctttacacacttgtcatggtggacccagatgcaccaagccccagtaaccctacaaaaagagagaaccttcactggttggtgacagacattccagagacaactgatgccagtttcgggaacgaaatagttccgtacgagagcccacgtccaatcgccggaatccatcgcttcgcattcgtcctgttcaggcagtcagtgaggcagaccacctatgcgccggggtggagatcaaacttcaacactagagacttcgcagccatctacggccttggctcccctgtcgctgcagtgtacttcaactgccagagagagaacggatgtggtggaagaaggtacataaggtgatatatcaaccaagctatgtgtgcttctctctctctcaagggagagaagcataacaacaaattggagtgaaaaaaatatatatcatgtgtgtggtgaacattgcaagtacgatgttcacaatcataagagccattattggatcacatattattctaatgtaatgtggctgggcgttctattggaaaaatagccacggtttgagatttatatataaatttgtgttgacgaaaattctgatattgg

SEQ ID NO: 2116 - DNA, 237 bp, Zea mays
  unsure (1)..(237): unsure at all n locations
  Clone ID: PAT_MRT4577_46795C.1
cgcagcgcgggcggnggnaatggcgatggccttcacctacgcgccaggcggaggcgcgggggcgctcgcgcagggtagatgcagggtcctcggtcccgcggggctgggctttctcgggccctccaagggcggcgggcttccccggcccctcgccctcgcccttgccagggggatgagcagccccgtctcggtgggcgccaggctgcgatgcgcggcgtctttcgtccccgcgggggg

SEQ ID NO: 2117 - DNA, 891 bp, Zea mays
  unsure (1)..(891): unsure at all n locations
  Clone ID: PAT_MRT4577_46815C.1
ccggccngggcccgggacgaaaccatccacacgagaagaagaagaaacaagccataccatagcacacaccaaaggttactcagtcacatggcaacatccagcacgggctgtctcgtcttgctctgccttgcgtctcccctcctcctccttcccagtgcggtggtccttggccacccatggggtggcggcggcggcttgtccccacagttctacgaccactcgtgccccatggcggagaagattgtgcagtccgttgtggcgcaggctgtggccaaggagaccaggatggcggcgtccttggtcaggctgcatttccatgactgctttgtcaagggctgcgacgcttcggtgctgctggacaacagcagcagcatcgttagtgagaaagggtccaacccgaacaggaactccatcagggggttcgaggtggtagaccagatcaaggctgctctcgaggctgcctgcccgggcacagtctcctgcgccgacattctcgccctcgccgctcgtgattccaccgccctggttggtggcccatactgggacgtggcgcttgggcggagggactcgctgggcgcaagcatccaggactccaacaatgacatcccagcccccaacaacacgctccccaccatcatcaccaagttcaagcgccagggcctcaatgtcgctgatgtcgttgccctctcaggcggtcacaccataggcatgtctcggtgcaccagtttccggcagaggctgtacaaccagacaggcaacggcatggccgacagcacgctggacgtgtcctacgccgcgcggctgaggcagagctgcccccgctctggcgccgacagcaccctcttcccccctggacgtcgtcgccccagccaagttcgacaacttctacta

SEQ ID NO: 2118 - DNA, 1172 bp, Zea mays
  Clone ID: PAT_MRT4577_47013C.1
ggccggcaccgctgctagcttgctagcatacttcccctacacgcgcgcgcaaccgcaagcagtcgatcgtcgcatggcgccaggaggcagcggcgagcggtggagcctggccggcgcgacagcgctggtcaccggtggcagcaaggggatcgggcaagccgtcgtggaggagctggccaggctcggcgcgcgcgtgcacacgtgcgcccgcagcgcggcggacctggaggagtgccgccggcggtgggccgagaaggggctccgcgtcaccgtctccgtgtgcgacgtcgccgtgcgcgccgaccgggagaggctcgtcctggacacggtcagcgcggccttcgacggcaagctcgatatcctggtcaacaacgctgcgctgctgctgctcaagccggcggcggagtgggcggcggaggactacgcgcggatcatggcgaccaacctggagtcgtgcttgcacatctcccagctcgcgcacccgctgctcctcaacgcctccgtcgccggaggggcgagcatcgtcaacgtctcctccatcgccagcgtccttggcttcccgcaggaagttatgtacagcgtcaccaaaggaggactgaatcagatgacgagaagtctagctgtggagtgggcctgcgataggatccgtgtgaactgcgtcgcgccgggcgtgatcatgacggacatgggtaaagagctaccggcggcgttggtggagcaggagcggtcacgcatcccgctgcggcggaccggcgagccggaggaggtggcgtccctggtgtcgttcctctgcatgccggcggcgtcctacgtcaccgggcaggtcatcttcgtcgacggcggccggaccattagtggcgcctgatcgacgacgacggccagctatatattctctattctactgtatttgaatttgttttcgttcttgatcggccatgtatcaccgtcagacgtcagcggcaataatccggccgccgtcagctagcgccatgcaagctgcccgatcatgcaaggtgcagacactgtcgttgcctgcagttctgttcctttttctactatggtttcttgtattcactgcccactggtgatgtttctgtgataacgacttcgacagaggggatacattttaaaaaaaaagaaataaaaaagggcgcccgccaactagtgagctc

SEQ ID NO: 2119 - DNA, 1085 bp, Zea mays
  unsure (1)..(1085): unsure at all n locations
  Clone ID: PAT_MRT4577_47014C.1
tttttggnnttttgggggggggttggcgaatgtttcctcgaggtcggtcgggtcgggagattaccaaagatgccggcaccgctgctagcttgctagcatacttccggtcggcaagcagtcgatcgtcgcatggcgccaggaggcagcggcgagcggtggagcctggccggcgcgacagcgctggtcaccggtggcaagctcgatatcctggtcaacaacgctgcgctgctgctgctcaagccggcggcggagtgggcggcgcagcgactacgcgcggatcatggcgaccaacctggagtcgcgcttgcacatctcccagctcgcgcacccgctgctcctcaacgcctccgtcgccggaggggcgagcatcgtcaatgtctcctccatcgccagcgtccttggcttcccgcaggaagtcatgtacagcgtcaccaaaggaggactgaatcagatgacgaggagcctagctgtggagtgggcctgcgataggatccgtgtgaactgcgtcgcgccgggcgtgatcatgacggacatgggtaaagagctaccggcggcgttggtggagcaggagcggtcacgcatcccgctgcggcggaccggcgagccggaggaggtggcgtccctggtgtcgttcctctgcatgccggcggcgtcctacgtcaccgggcaggtcatcttcgtcgacggcggccggaccattagtggcgcctgatcgacgacgacggccagctatatatatatgcgaagaataaatgtgggtctattctactgtattttaatttcttttcgttcttgatcggccatgtatcaccgtcagacgtcagcggcaataatccggccgccgtcggcttgccgggagggaggtacccaactagtgccatgcaagctgcccgatcagtcgtctcgtctcgcctcgccggaaggcaaggcccccccactgtcgttgcctgcagttctgttcctttttcatactatggtttcttgtattcactgcccagtgcccactggtgatgtttctggtgataacgacttcgacagaggggatacattttaaaatncttgtgctaaaaaaaaaacacccaccc

SEQ ID NO: 2120 - DNA, 1367 bp, Zea mays
  Clone ID: PAT_MRT4577_47015C.1
tacctcgacccaagcctgcaagactgccggcaccgctgctagcttactagcatacttccaaatatgggcaggcactagctagctaggcggcaaagagccaaagactgccggcaccgctgctagcttgctagcatacttccggtcggcaagcagtcgatcgtcgcatggcgccaggaggcagcggcgagcggtggagcctggccggcgcgacagcgctggtcaccggtggcagcaaggggatcgggcaagccgtcgtggaggagctggccaggctcggcgcgcgcgtgcacacgtgcgcccgcagcgcggcggacctggaggagtgccgccggcggtgggccgagaaggggctccgcgtcaccgtctccgtgtgcgacgtcgccgtgcgcgccgaccgggagaggctcgtcctggacacggtcagcggggccttcgacggcaagctcgatatcctggtcaacaacgctgcgctgctgctgctcaagccggcggcggagtgggcggcggaggactacgcgcggatcatggcgaccaacctggagtcgtgcttgcacatctcccagctcgcgcacccgctgctcctcaacgcctccgtcgccggaggggcgagcatcgtcaatgtctcctccatcgccagcgtccttggcttcccgcaggaagtcatgtacagcgtcaccaaaggaggactgaatcagatgacgaggagcctagctgtggagtgggcctgcgataggatccgtgtgaactgcgtcgcgccgggcgtgatcatgacggacatgggtaaagagctaccggcggcgttggtggagcaggagcggtcacgcatcccgctgcggcggaccggcgagccggaggaggtggcgtccctggtgtcgttcctctgcatgccggcggcgtcctacgtcaccgggcaggtcatcttcgtcgacggcggccggaccattagtggcgcctgatcgacgacgacggccagctatatatatagcgaagaataaatgtggatctattctctattctactgtatttgaatttgttttcgttcttgtcttcttgatcggccatgtatcaccgtcagacgtcagcggcaataatccggccgccgtcggcttgccgggagggagatacccaactagcgacatgcaagctgcccgatcagtcgtctcgtctcgcctcgccggccggcaaggtgcagccactgtcgttgcctgcagttctgttcctttttctactatggtttcttgtattcactgcccactggtgatgtttctgtgataacgacttcgacagaggggatacattttaaaaaccttgtgctaatcattttttgtgcacatcagagttttttgagaacagggaaattaattccg

SEQ ID NO: 2121 - DNA, 3113 bp, Zea mays
  unsure (1)..(3113): unsure at all n locations
  Clone ID: PAT_MRT4577_47028C.1
caaaatattgcattattcataaaacaaaaaggacagcttcagctgagtggtgagcgagacagattccacagcaatttgctcctcttccacgcacaggcaagactgctccccagaaaagattgtagttttcatcgatttagccggtttctgcccggggggatcgctgctggagatctcagagaaccgggaggctccgagcttttgctccgtttgcgtcgaatctgcctcgggagcggagaaaggagcggccttccgagctcgtaggggccgtccctgagaaggcgagaggggacgcggcggcggcggagtcagctctagggcgctcgtggaagtcggtgatgccggtggtttgaggacgaggcggcctcggtggttttgaggaagccagcctctgccgcggcaaggatggactccagcggggaggaactcctgaagaagatccgggaactggaggttgggcaggcgcagctcaagcaggagatgtctaagctaatacccggcgctggggagcgtcggcgctcgcaatccgtctcgccgcggcgcggcgtgccggtgccgccgccaccgccggccaaggcgaaggcgggggcgccaggtaggcggctgtccggggggtttgagggcgggcagcgcgcgtgggcccgtgggtcggcgtctttcccgcactcatcaccgctgcagcgggagggccgcgcaacgggcgctggagacgctagcaccagcgctaggctgccggagaggcagtactccagggtgcttcagtcaatggggcagtccgtccacattcttgacctcgacgggaggatcatatactggaatcagtctgcggagaatctgtttggctatcctgcatcagaagcccttggtcaggatgccctcatgcttctggttgattcccatgaccacaatgcggtaaataacatcttccaacgtatttctatgggtgaaagttggactgggaagtttccagttaagaacaagcaaggacatagattttcagttgttgccaccaatacacctttctatgatgaagatggcagtttgatgggtttcatttgtgtttcaagtgattcccgccaattggagcagatattttgtaagcctccgacctctgcaaggtcccagtcagaatcatctatgacatcttgtgatgggagttgcagcaacactagtcacagaatcaattcgttgaatagaagttcttttgattctaatctacccctgcaaagcactttagcatccaagataacgaatttggctaccaaggtcacaaataaagttcgttctcgggtcaggacagacgagaatgacgatggtggcagtggtgagagccattgcttggatcgtggtgcaaaggaagagccaacatctagcggaacaagcacaccaagaggggatgcaccacatggtccctttgctacagaagagaactcacctgggaaatcaacgaacccaaacagcgacgaatcagaaggaaaagtaggtctgcacaagattttgggttctaaggcagaggcactattgaacaagaaagggatatcatggccttggaaagggcgcgagaatgagggacctgatgaaagaaaccatgtgatattgccgtggttgcatggtggccaagagaatggtgtgaatcatcagaaggtttctgattctagtatatctccagacgcccaaggcgctgaacacaaccaacctagcaaaaatgaggcatcaggttcctggtcctctttcaacaataacagcacaggcagtgcaagcagcacgggaagcactaatagcagtgctctctacaaagtagatcatgaagcagattgtctggattatgagatcctgtgggaagaccttgtcattggagaacaaataggtcaaggctcttgtgggacagtatatcatgctttgtggtatggttcggatgtggctgttaaagttttctccaagcaagaatattcagaagaagtgatactgacctttcgacaagaggtatcccttatgaagaaattgcgccatcctaacatactgctcttcatgggtgcggttatgtctccacaacgcctttgtattgtatcagagtttctcccccgtggaagcttgtttcgcttacttcaaaggagcgctaccaagttggatgtgagacggcgtgtccacatggctttagatattgtaaggggcatgaattatcttcaccattccagcccgcctatcattcatcgagatttaaaatcatctaaccttttggtcgacaagaactggattgtgaaggtggcagactttggtctttcacgtctcaaagcgtgaaactttcttgacaacccaaaaacaggaaaaggaacaccccaatggatggcgcccgaggtgttgcgcaatgaaccttccgatgagaagtctgatgtgtacagttacggggttatcctgtgggaacttgttactcagaagataccctgggaaaatctgaactcgatgcaggtcattggtgcagtgggttttatgaaccaaaggttggatatcccaagtgaagtagatcctcagtggaaatcaattatcctgagctgctgggaaagcgacccgcagcaacggccgtcgttccaggagcttcttgagaggctccgggagctgcagaggcactacgccatccagcaccggaacacaaagaacagcatcgaggagtgaagaacacaatgcgacctctcagagcgctgtggcttgcttcgaagcattttgcgagcgaacgaacgaagaaccccaggtctctagaagggcctggaccctcctgtactgtatggttttgctttggcggaacagccaaggctggaagaagtttgttgtacagacgggggtacgttcttctttgtttgacagggcaattgtgactgtaatctctgggtcctaacacccaagggtagggtagagactatagagtgagtagtgactgagctccggattgctggcgcatttgggttcttctgattcgtggcaatgcaaatgcgtggttaacaataacatccaatccggggcttgtgtttctggaaaagggcatgatgatgtgtagattgtttgctctgacaaaaaaaaaaaaaaaaaaaaaaaaaagggcggccccgactngagtactc

SEQ ID NO: 2122 - DNA, 223 bp, Zea mays
  Clone ID: PAT_MRT4577_4741C.1
actaaatatttgggtgaagggattgtttacattccagggaggatttactgcagcaaaagtttacaaaggaccaggaccgcatactatctctctgtctttttctctccctttgcctttgccaatcgcaggtggctggcacaattttccccaccaaaaaaaaagcgtttcagtacgaatcggcaaatgatctcgcgaaccattgagggaacatagaaacctgggg

SEQ ID NO: 2123 - DNA, 364 bp, Zea mays
  Clone ID: PAT_MRT4577_47512C.1
taacaacatagaacgcacagtagtgtgccaacaatggccgtcaaaatattttggtttcttatgctccttggacttactgcaagtgctgttaccgcaaccattatccaacaatgatcacaagctcctatagctatcttttttgccccatacctctcaccagcggagtattgagtatgtgaaaacccaattgttcaaccctacaggatccaacacgcaatcgtagcacgcatgttacctttatcacccttgatcctgcaacaagccgaagccctattacagcagttacctttggtgcatatcgttgcacaaaacatcaatgtagaacaactacgacaacttgtgctaggaaaccttgatgactact

SEQ ID NO: 2124 - DNA, 335 bp, Zea mays
  unsure (1)..(335): unsure at all n locations
  Clone ID: PAT_MRT4577_47534C.1
ggccgctttttttttttttttttttttaatagccgacacgttgtgtgttcgtgtaaaacttttcctttacaacccagcgaaacagattgttcgtcatgatccggcctagaaatggtttaggcctcggaagcggccttgagaacaaacacctggccgtccaactcccaaaggtaaaagaatcgtgaagggggggggaccatgcatcctaaagttgtgatcatcagtgccctcctcccatggagacggaccggaagctgcccttgggctgctttggcagcatgatgatccctgcgacgcccgcggtgaaggcgaacacggcgncccccccccccgcg

SEQ ID NO: 2125 - DNA, 453 bp, Zea mays
  Clone ID: PAT_MRT4577_47692C.1
gtcacatatagaacacgatcgagcacacaggcactaagactggtgtaggataatccataaactcaccaagccgtgcaagcatcatggattacggtcagcaggagcagcgcggtcacggcgccacggcccatgtgagaccagtacggcaactcagttggtggcgtcgagcacggctccgtcgggatgaggcacggctcgggaaccaccggaggcatgggccagctgggtgagcacggcggctctggcatgggtggcggacagttgcagtctgcgagggaggagcacaagaccggcgagatgctgcatcgctccggcagctccagctccagctcgtctgaggacgacgtcatgggcggaaggaggaagaagggaatcaaggagaagatcaaagagaagctgtctggaggccacaaggacgaccagcacgccacggcgactaccggtggcgcctat

SEQ ID NO: 2126 - DNA, 482 bp, Zea mays
  Clone ID: PAT_MRT4577_47706C.1
aagaatctagaaatgtactttcttatttgtgggaagccacaaacatcagacaaaaaactttattattgaactataactcataagatatctaaaagagggcaccaccaatgatgggttgtcggtagaacgctgctgggtttgtcaaagcaagttggttaaatggaagcgattgttgcacttgtaagagggtgccagcgttaggcgcaccgtgctggtagaacggcatccactgtggttagatcaagaaggtagcagggctcacaccagctaactggctgaatggtagtagttgttgctgctgtaaataagcaggagagttcaatgctggctgtcgctagaatggaagatactgctgggggcaggcagcaggtacctgtgtgaatggtagttggtgttgatgcaaatcacaagcagagttcattgcaactagatgggtgaatggaagacactgctggtgctgatagtcagcatcaaggtttgct

SEQ ID NO: 2127 - DNA, 680 bp, Zea mays
  unsure (1)..(680): unsure at all n locations
  Clone ID: PAT_MRT4577_47708C.1
tagcgtgnngtcgcggccccgaggtactcaacattaggcagcgtagaaatatcatgcctccttatgctccttgatctttcgtgcagtgctgctacggagaccattttaccacactgctcacagagctcctatagcttccattgttgccccgtacctctcaccaacggggtctaatggatgtgaaaacccaattcttctttttacacgatccaacaggcaatcgcatctggcatcttacctttatcacccttgttcctccaacaatcatcagccctattacagcagttacctttggtgcatttattggcacaaaacatcagggcacaacaactacaacaacttgtgctagcaaaccttgctgcctactctcagcaacagcagattcttccattcaaccaactagctgcattgaactctgctacttatttgcgacaacaacaactaccattcagccagctatctgctgcctacccacaacgatttcttgcattcaaccaactgacagcattgaactctcctgcttatgtacagcagcaacaactactaccattcaaccagctagctggtgtgagccactgtaccttgttcacacaaccacagttgatgacgctctacgcagaacgctgcgcctaacgctggcaccctattacaactgcaacacatgctgacattcaaccaac

SEQ ID NO: 2128 - DNA, 531 bp, Zea mays
  unsure (1)..(531): unsure at all n locations
  Clone ID: PAT_MRT4577_47712C.1
gtgnaccaatagcaacatagnaaagccgatagtgtgccaacaatggcagccaaaatattttgcttccttatgctccttggtctttctgcaagtgctgctaccgcaaccattttcccacaatgctcacaagctcctatagcttcctttcttcccccatacctctcaccagcggtgtcttcgaggggggaaaacccaattcttcaaccctacaggatccaacaggcaatcgcagcaggcatcttacctttatcaccctggttcctgcaacaaccgtgagccctattacagcaggtacctttggggcatttgttggcacaaaacatcaaggcccaacaccttcaacaaccggggctatgaaaccttgcttcctactctcagcaacatgagtttcttccattcaaccaactggctgcattgaactctactgcttattcggcacaacaactaccattccagcacctagttgctgcctactccccagcaattctttgcattcaaccaactgggaagcttcgaacctctgctgcctta

SEQ ID NO: 2129 - DNA, 418 bp, Zea mays
  unsure (1)..(418): unsure at all n locations
  Clone ID: PAT_MRT4577_47714C.1
cggggatcgcacatattcattganaccaactagcaacatagtaaagcacaatagcgtaccaacaatggcagccaaaatattttgcctccttatgctccttggtctttctgcaagtgctgctacggcgaccattttcccgaaatgctcgaaagctcctatagcttcccttcttcccccgtacctctcaccagcggctgtcttttgtatgtgaaaacccgggggttcaaccctacaggatccaacaggcaatcgcaggtggcatcttacctttgttacccttggtcctacaacaatcatcagccctattacaacagttacctttgatgcatttattgggacataacataagggtacaacaactacaacaacttgtgctagcataacttgctgtctactttcagcatcagcattttcttcc

SEQ ID NO: 2130 - DNA, 679 bp, Zea mays
  unsure (1)..(679): unsure at all n locations
  Clone ID: PAT_MRT4577_47715C.1
gcggggccgggaactattatttgagaccaactangcaaatagaaaagcacaatagtgtaccaacaatggcagccaaaatatttgcctccttatgctccttggtatttctgcaagtgctgctacgggcgaccattattcccgcaatgctcacaagctcctataggttcccttcttcccccgtacctcataccagcggtgtcttcggtatgtgaaaaccgggggcttcaaccctacaggatccaacaggcaatggcaggtggcatcttacctttatcacccttgttgctccaacaatcatcagccctattacagcagatcctttggtgcatttattggcacaaaacatnagggcacaacaactacaacaacttgtgctagcaaaccttgctgcctactctcagcaacagcagtttcttccattcaaccaactagctgcattgaactctgctttttattttgaacaacaacaactaccattcagccaggtacctgttgcctacccccaggaatttcttccattcaaccaactggctgcattgaactcttctgcttatttacaggagcaacaactactaccattcagccagctaagctgtgggagcccctgctacctttttgacacaaccacagttgttggccggtcctaccaacacgcttgcgcgctaacgctgggcaccct

SEQ ID NO: 2131 - DNA, 496 bp, Zea mays
  Clone ID: PAT_MRT4577_47716C.1
ctctcaccagcggcgtctttggtttgtagaaaacccaattcttgaaccctacaggatccaacaggcgatcacaggtgggatcttaccttgatcacccttgatcctacaacaatcatgagccctattacatcagttacctttggtgcattcattggcacaaaacatcatggcacagcatctacaacaacttgagctagcaaaccttgctgcctactctcagcaacagcaggttcttcgcttcaaccaactagctgcattgaactctgctttttatttgcaacaacaacaactaccattcatacagctacctgctgcctacccccagcaatttctttcattgaaccaactggcagcattgtactctgctgcttattgacagcagcaaccactactaccattcacccagctagctggtgtgagcccccttaccttattgatacgagcacaggtggtgccgttctaccagaacgctgcgcctaacgctggcaccctctta

SEQ ID NO: 2132 - DNA, 600 bp, Zea mays
  unsure (1)..(600): unsure at all n locations
  Clone ID: PAT_MRT4577_47717C.1
actttacttatttctgagaagcccaaactcagacaaaaaactttattattgaactctaactcataagatatctaaaagagggcaccaccaatgatgggttgttggaagaatgctgtagagtttgtcaaagcaagttgcttgaatggcaacaattgttgcacttgtaagagggtgccagcgttaggcgcagcgtgctggtagaacggcaacaattgtggattgtgtcaagaatgtagcaaggctcacaccagctagctggctgaatggtaatagatgctgctgctgtaaataagcaggatagttcaaagctgtcagtaggttgaatggaataaattgctgggggtaagcagcagatagctagctgaatggtacttgttgctgttgcaaataagaagcacagttcaatgcagctaataggctgaatggaagaaactgttgttgctgatagtaggcagcaaggacttgctagcacaagttgttgtagttgttgtgacctgatgctntgtaccaataaatgcaccaaaggtaactgctgtaataaggctgatgattgttagaggaacaagggtgataaaggcaagatgccagctgcaattacct

SEQ ID NO: 2133 - DNA, 270 bp, Zea mays
  Clone ID: PAT_MRT4577_47838C.1
cgtcgtcacgcgccggaccagctcccagctgctccctgcagacctccctcctccatctccagcgtgtgttctgactcacctgcaccaatggctgctctttctgctgctggtgctcccccggcctcagctatcgtcgtttgagggctatgagaagcgcctcgcgatccacatcctttgaggcacctgtttttgcggacccccatggaaccggtccgcgtgccctttccaggtcccagtctgactctgttctggatctcgtacggcgcacga

SEQ ID NO: 2134 - DNA, 467 bp, Zea mays
  unsure (1)..(467): unsure at all n locations
  Clone ID: PAT_MRT4577_47967C.1
gccggccgggngagactctctcacgaatccatttccccatctcccatatctacttcgcgagttctccctcctctgccgccatggcgctctctgaggagaagacctcgtctgcacgggagtacaaggtctaggatctctctctgcggacttcggacggctcgatattgatgtggccgaggtagaaatgcccggcctcatggagtgccgcgccgagttcggcccgtccaagcccttcaccggcgctaggatctcgtgctctctccacatgaccatccagaccgacggcctcatcgataccctcaccgcgctcggcgccgacgtacgctggatgcttctgcaagatcttctccacgcaagaccacgccgccgagcgtcatctcgcgcgagtcggtcgccgtgctcgcctgtaagggcgagaccctacaccagtactgtgcgtgtgcaccgcatcactgcctcgactgggg

SEQ ID NO: 2135 - DNA, 532 bp, Zea mays
  Clone ID: PAT_MRT4577_47978C.1
ggataatcgataattgatgatgtattgaaaaacacgagttttgaaccatggagcagtttggaagttttacctgactggggaaaaaaaggacctgggattggaacttttatgaacactggtactaataatggtcacataacatggctttgtaataatactggtgatcaccacattcaccaacagcaggcaattcggttgccaatgaagaagcagccttaaacaagcacctgaactgcaactagcctaacaatcggaaccctgaaaggggaacaagaaacgtaatccaacccaaccttcgcgaaaaaagccacaaaagaaggctcttcaccgtgttcttcacaaatgcccacctttaagttaagcctaactttgcgggccctttctggagcaaggttcaccaacttgcccacttccctttggtccaagaactccaaagggtcatggtggagaatgccctgagcaagataaaccggaatgaacttttccacattattcctgctggacccaaaagtcatttgcgtcaagtcggtcg

SEQ ID NO: 2136 - DNA, 336 bp, Zea mays
  Clone ID: PAT_MRT4577_4804C.1
acacatccttattgagaccaactagcaacatttaaagcacaatagtgcacctgcggtggcagctaaaatatcatgcctccttatgctccttgctctttctgcttgtgctgctacggcgaccattttcccacaatgctcacaagctcctatcgctaccctccttaccccgcacctctcaccaacggtgacttcgaggtgctgaaaacccagttgttcaaccgtacaggatccaacaggcaatctcacgtggaatgttacctttatacacacattgttactccaacaatcatcagctctgtatcacagaaccttccttagcatgcattcattgcaaca

SEQ ID NO: 2137 - DNA, 385 bp, Zea mays
  Clone ID: PAT_MRT4577_4816C.1
acgcaactagcaacatagaaagcacaatattgtaccaacaatggcagccaaaatagggcggcttcttatgctacttggtctttctgcaagtgctgctacggcgaccattttaccgcaatgctcgcacgctactatagcttcccttcttccaccgtacctatcaccagcggagcattcagtatgtgaaaacccaattcttcaaacttacacgatccaacagggcattacagcatccattttacctttatcaccctcgatccttcaaccatcataagctctattacatcagttaccttcggcgcatttattggcacaaaacatcatggcacaacaactacaacaacttgagctatgcaaaccttgctgcctactctcagcaacagca

SEQ ID NO: 2138 - DNA, 607 bp, Zea mays
  unsure (1)..(607): unsure at all n locations
  Clone ID: PAT_MRT4577_48206C.1
ctcgaggccggccgggagcctctggccgctgcccgaccccgacgcctgctgcccaggtcttcgccggcgacgagcactccaccagacgagaggggattccaagatgccgagggccaccagcgacgcgaagctcctgatccagtccctcggcaaggcgtacgctgccacaccaacaaatctcaaggttgcttacatgggattggttgggtcgtttcccttcaactccttcctctcaggagtcctttcatgcataggaactgcagttcttgctgtttgcctccgcattcaagtgaacaaagacaacaaagaattcaaggaccttcccccagaaagggcctttgctgatttcgtcctatgcaatctggtgctccacctggtgatcatgaatttcctcggataagcaactgctgcaccatgttggttaaaggttttgtagccccaggttgtggtcgctgattgttgcctttaaatgtttggaactgttgtgatcgtgatgtcgaatatccatatgatctgttgaaggattacttgtgtaagctgagtattcccggagggaactattagtcgaatggacagtttgccctaaanaaaanaaaaaaaagcggcc

SEQ ID NO: 2139 - DNA, 1021 bp, Zea mays
  Clone ID: PAT_MRT4577_48208C.1
gaggccggccggggccttgcattttcatcccctcccatctcccgttcgaattcgcgtcgggccgccacatcccagttccacctccctcctcgggccgccgtatcctagctgcctctcttgcttcttcagcaacggcgcgctagctactagtaagagtataagaaagaaagtgaatcaaggaaagagagtgagggatagagagaaactgcaaaaaaaaaaaaaacacgtagagaaggaacgacggcccagcccaggaaacacgatacggtccagagtcgagaggaagagaaaaaccacgtccccctcggccgcagaagcgaaacagcctctggccgctgcccgaccccgacgcctgctgcccaggtcttcgccggcgacgagcactccaccagacgagaggggattccaagatgccgagggcaccagcgacgcgaagctcctgatccagtccctcggcaaggcgtacgctgccacaccaacaaatctcaagattattgacctctacgtgggttttgcggttgccactgcccttattcaggttgcttacatgggattggttgggtcgtttcccttcaactccttcctctcaggagtcctttcatgcataggaactgcagttcttgctgtttgcctccgcattcaagtgaacaaagacaacaaagaattcaaggaccttcccccagaaagggcctttgctgatttcgtcctatgcaatctggtgctccacctagtgatcatgaatttcctcggataagcaactgctgcaccatgttggttaaaggttttgtagccccaggttgtggtcgctgattgttgcctttaaatgtttggaactgtcgtgatcgtgatgtcgaatatccatatgatctgttgaaggattacttgtgtaagctgagtattcccggagggagctattagtcgaatggacagtttgcccagcgctgagaatgtgacctagcatgttctttatttgaagaataattcatttttcaaaaaaaaaaaaaaaaaaaaaaaagcggcc

SEQ ID NO: 2140 - DNA, 863 bp, Zea mays
  Clone ID: PAT_MRT4577_48209C.1
ccgtccccctcggccgccgaagcgaaacagcctctggccgctgcccgaccccgacgccagctgcccagttcttcgccggcgacgagcactccaccaggtacgcccaccccttcccttcctccctgctgccgtgcgaaaccgatcacccgaaccctcactcgagctacttgcttacctccgcgtcttcggatctggcctgattgcgtcttcggatctggcctgattgcgtcttcggatctgatctgactatgacctgctcctttctggttatatcctcacctcacgtggagaagacgagaggggattccaagatgccgagggccaccagcgacgcgaagctcctgatccagtccctcggcaaggcgtacgctgccacaccaacaaatctcaagattattgacctctacgtgggttttgcggttgccactgcccttattcaggttgcttacatgggattggttgggtcgtttcccttcaactccttcctctcaggagtcctttcatgcataggaactgcagttcttgctgtttgcctccgcattcaagtgaacaaagacaacaaagaattcaaggaccttcccccagaaagggcctttgctgatttcgtcctatgcaatctggtgctccacctggtgatcatgaatttcctcggataagcaactgctgcaccatgttggttaaaggttttgtagccccaggttgtggtcgctgattgttgcctttaaatgtttggaactgttgtgatcgtgatgtcgaatatccatatgatctgttgaaggattacttgtgtaagctgagtattcccggagggaactattagtcgaatggacagtttgcccaaaaaaaaaaaaaaaaaagcggcc

SEQ ID NO: 2141 - DNA, 1754 bp, Zea mays
  Clone ID: PAT_MRT4577_48210C.1
cctcgaggccggccgggattttattgcatccttttcgccttccggctaatttattattatgtgacttgcggtctagtacgcggtggtggtatggtttacgcgggcatgttatgggttcgcaatcctgataggataatccgcggaacgcggataatctcgttttaaatctggcgcatgctgtcgcaagatgctctatactagctggactggattgcgctatattgattgggatttgagctgagacgcaaaaaaaagaagattacatgagcatcgaccggctacactaatctcacctcctcatgctcaggacgcgcgcccgcgtagagactctccgcgttgatgcgtgtcgcccgatgctgctgaacgacgacgacctgatctcgagcgcgaaattctgtatgctcttcagtgtttgactggatatatgaacttatcgtccttattttcttaaattatggaatttatctgccctcaaacatgattcgtagatataggcacaatgtgtcttatgctcttgctttgtcaactgtacattcttattcagtttgcaactcttctcagccaccggttacaacacagcagtcaacttgcaaatctcagctttatctagctgttggcaacctgattgcgtggatgttgtggcaccattcttaccactgtaacttttgcaaaccgtatgttcttcagtggctgataggatatatcaacttgttagctgtcattttctcaaaaaaatcaaagaattcgttgtcctcaatcatggttcttaggttgaggacaagctatctttgcgcacttgtgttgtcaactgaacattattatttgagttgtttctgcaacatatctagtaatcgcccttggatgctagtagaaacgaaacaccttcagagacttactggtatgctatttattgtggaaaataaaactctacgtgggttttgcggttgcccctgcccctcggccgcagaagcgaaacagcctctggccgctgcccgaccccgacgcctgctgcccaggtcttcgccggcgacgagcactccaccagacgagaggggattccaagatgccgagggccaccagcgacgcgaagctcctgatccagtccctcggcaaggcgtacgctgccacaccaacaaatctcaagattattgacctctacgtgggttttgcggttgccactgcccttattcaggttgcttacatgggattggttgggtcgtttcccttcaactccttcctctcaggagtcctttcatgcataggaactgcagttcttgctgtttgcctccgcattcaagtgaacaaagacaacaaagaattcaaggaccttcccccagaaagggcctttgctgatttcgtcctatgcaatctggtgctccacctggtgatcatgaatttcctcggataagcaactgctgcaccatgttggttaaaggttttgtagccccaggttgtggtcgctgattgtcgcctttaaatgtttggaactgtcgtgatcgtgatgtcgaatatccatatgatctgttgaaggattacttgtgtaagctgagtattcccggagggaactattagtcgaatggacagtttgcccagcgctgagaatgtgacctagcatgttctttatttgaagaagatataattcatttttcactgaggtgtgctgcaagcggccaattcctgggaaaaaaaaaaaaaaaaaaaaaaaaaaaaaaaaaaaaaaaaaaaaaaagaaaaaaaaaaaaaaaaaagcggcc

SEQ ID NO: 2142 - DNA, 323 bp, Zea mays
  Clone ID: PAT_MRT4577_48218C.1
gtcagctagctgctgcctacccccagctttttctttcattcaaccaactggcagcattgaactcggctgcttatttacaacagcaacagctaccaccattcagccagctagctgatgtgagccctgttgccttcttgacacaacaacatttgttgccgttatacttgcacgctgatcctaacgctatcacactacttacgactgcaacaattgctgccattcaacctacttgctttgacagaccctacattgttctaccatcaactcataactggtggcacccttttttatattgctcatgatgcatacaccgattttgaatc

SEQ ID NO: 2143 - DNA, 419 bp, Zea mays
  unsure (1)..(419): unsure at all n locations
  Clone ID: PAT_MRT4577_48232C.1
ggccgccctttttttttttggggggttggtaataaggagacctgcgttttttcccggcancaaagnnananctcagatctcaacaactgaacaaaatgtgttgggatgatgtacattgtatgctcagttcctgcattgcctgtttcaatatacagaatctataaaccacagacttgggttcagcctacacccctacttcatcgtaggaggatccacccatccgccatggtccttgatcagcttgatcaaagcgttacttgcacctttcaaggcgatggcgcaccttacaacaggtttcgccaaccataaagggcgatcttttcgggagcgcctgcgacgtatacgaaatgggcatgacccatctctcctgggccatttgacaatacaacccattatagcgaacgaaacacctgccatat

SEQ ID NO: 2144 - DNA, 757 bp, Zea mays
  Clone ID: PAT_MRT4577_48321C.1
cccgaacgcatctctggccaccatcgaccttcaagtctctgctacgtaggcagtgcaatatagaaagcagtcgcaatgacgagcatgaccatggacctctcctccacggccttcgccggcgatggcgaggacgtgtcgtacgtctccgccttccgcgaggcccgcgtgacgatgcgcaagacgggggagaaggtcaagccgtcggcggcgtccggcagccctgtggtacggccccgaccgtgtgctgtacctgggcccactgtccgtggagacgtcgtagctacctgacgtccgagttcccgggcgactacgggtgggacaccgttgcgttgtccgaggacccggagacgtatctccaatgaaccgggagctggatgtgtatccactcccgctgggccatgctgtgcgcgctcgtgtgcgtcttcccggagctgctcgcccgcaacggcgtacaagttcggcgaggtcgagtggtatcaaggtcgcctcccatatcttcatcgagggtggactgtactacctcgggaacccgagcctcatccacgcgcagagcatcctcgccatctgggcctgccaggtcgtgctcatgtgcgccgtcgagggctaccgcatcgccggcggaccgctcggcgaggtcgtctacccgctctatcccggcggcagcttctacccgctcggcctcgtcgacgaccccgaggccttcactgagctcaaggtgaaggagctcaagaacgtgcgcctcgccatgttctccatg

SEQ ID NO: 2145 - DNA, 1266 bp, Zea mays
  Clone ID: PAT_MRT4577_48555C.1
ggccgggccgcattccaaagtcggcctgttccacgcgctctgcgcacgcgcgcacacctacctaccccctgcgcttgcacaaaatccttcttgatccgcacaggaaggtcccggcagaagaacttggcgggcgaaaggcgaaaccgacgtgctcccgggcgggcggcgacagcggcatggagcgagagcggcaggcagtggcgaggaacaggaaggtggtgctgcgcgggtacatcgaccgcgcgcccagagaggaagacatggagctcgtcgacggcggcgccgtggagctgcgcgtccccgagggcggcggcggccccgcggtgctggtgaagaacctctacctatcctgcgacccttacatgcgcggcaggatgcgggacttccgcaactcctacatcccgcccttcaaacctggatcacctattgaagggtttggcgtggggagggtggtcgactccactcatccaggattcagtgctggtgacgttgtttccgggatgactggatgggaggactacagtctgatcaccaagcctgaacagctcaggaagatccagcaaagcgacataccactctcctatcatctgggccttcttggcatgcctggctttacagcttatgttggattctatgagatctgttcaccaaagaaaggggagtttgtttttgtttctgctgcatcgggagcagttgggcaaattgttggtcaacttgcgaagctccatggttgctatgttgttggaagcgctgggacagatcagaaggttgagctcttaaaggaaaaattcggatttgatgcggctttcaattatgaggaagagcctgacttgactgctgccctgaaaaggcacttccctgaaggcatagacatctacttcgagaacgtaggcgggccgatgcttgatgctgtactactcaacatgcgagtacatggccgcattgcggtatgtggcatggtttcccagcacggggtgactgctcctgccggaatccacaacctgttctccttgataagcaagaggatagagatgaaggggttcatccagagcgattacgtgaagatcgtgtatgtggaagacatgagcgttgggctggagagtgggccggcttccttcgtcggtctgttcagcggtaaaaatgttggcaagcaggtcgtctgtgtgtcgcgggattgaaaggcctggattttgttccctactggccagtacccttaaataaaatcaggaaaacattattttcaaaaaaaaaaaaaaaaaagcggcc

SEQ ID NO: 2146 - DNA, 1368 bp, Zea mays
  Clone ID: PAT_MRT4577_48559C.1
aatacaggagaaaaaataaacatgaccttgggccgcttttttttttttttttttagtggggtccttctcggagttgaaaataatgttttcctgattttatttaagggtactggccagtagggaacaaaatccaggcctttcaatcccgcgacacacagacgacctgcttgccaacatttttaccgctgaacagaccgacgaaggaagccggcccactctccagcccaacgctcatgtcttccacatacacgatcttcccgtctctgtaatgcctggtgatgtcatcgacgaactgcgggaacaggtgcacgtaatcgctctggatgaaccccttcatctctatcctcttgcttatcaaggagaacaggttgtggattccggcaggggcagtcaccccgtgctgggaaaccatgccacataccgcaatgcggccatgtactcgcatgttgagtagtacagcatcaagcatcggcccgcctacgttctcgaagtagatgtctatgccttcagggaagtgccttttcagggcagcagtcaagtcaggctcttccttataattgaaagccgcatcaaatccgaatttttcctttaagagctcaaccttctgatctgtcccagcgcttccaacaacatagcaaccatggagcttcgcaagttgaccaacaatttgcccaactgctcccgatgcagcagaaacaaaaacaaactcccctttctttggtgaacagatctcatagaatccaacataagctgtaaagccaggcatgccaagaaggcccagatgataggagagtggtatgtcgctttgctggatcttcctgagctgttcaggattggtgatcagactgtagtcctcccatccagtcatcccggaaacaacgtcaccggcactgaatcctggatgagtggagtcgaccaccctccccacgccaaacccttcaataggtgatccaggtttgaagggcgggatgtaggagttgcggaagtcccgcatcctgccgcgcatgtaagggtcgcaggataggtagaggttcttcaccagcaccgcggggccgccgccgccctcggggacgcgcagctccacggcgccgccgtcgacgagctccatgtcttcctccctgggcgcgcggtcgatgtacccgcgcagcaccaccttcctgttcctcgccactgcctgccgctctcgctccatgccgctgtcgccgcccgcccgggagcacgtcggtttcgcctttcgcccgccaagttcttctgccgggaccttccaccgcgcgccaggaagcacgtcggtttcgcctttcgcccgccaagttcttccggcgggccggacgcggggagtcgaccacgtcgacgcggccgcgaattcga

SEQ ID NO: 2147 - DNA, 394 bp, Zea mays
  Clone ID: PAT_MRT4577_48688C.1
cgcatccagagcagcctctgccgcctcacctggaagtgcttctcgtggcagggcgggtccagcctgcccagcttcttcatgctctccctcgcattcgtcgtcatgctctgcctcgacacccagaacttccagattctcgtactcatcgcaaacctcctcaaggacccctagctcgcattgtcctcactctctgcctgcatgacaatgtcagggaggatgttcatgatctccaatgcattcaacgcagcaaccagcggcagagtgagcaacgagctcaaccccagcaacccaaggtcggccgcgttctccgtgacggtagtgaccctactcttcttagtactgtcggtcctcgtcttccccctcatcctgctctgcctgaactacatcatctaca

SEQ ID NO: 2148 - DNA, 377 bp, Zea mays
  Clone ID: PAT_MRT4577_48719C.1
cggacgcgtgggcgccgactaaaccagaccatctaacaagtgccagcgccctctcgcaggggccgcaatggagagcaccttcatcatgatcaagcctgacggcgtccagaggggcctcattggtgagatcatcagccgttttgagaagaagggcttctacctcaaggccttgaagcttgtgaacgtggagaggttttttgctgagatgcactattttcatctcgttttcaagcccttcttccagggcctttgtggactacatcatctttgttcctgtggtggccatggtctgttaggtcaagagctgtcattctactggccgtacgatcattgctgccaccaactccctggcttttgagcccgttactaatccgtgt

SEQ ID NO: 2149 - DNA, 317 bp, Zea mays
  Clone ID: PAT_MRT4577_48854C.1
aaagatgagcggcgccggcggcatggagtgctcagggagcggcggcacggtggcgccgttcgtggcaaagacgttcgcgatggtggacgacccggccaccgacgcggttgtcaggtgggggccgcccagcaatagcttcgtcgtcgccgaccccttcgccttctcgcacgcgctgctcccggcccacttcaagcacgccaacttctccagcttcgtccggcagctcaacacctacggctttcgcaaggttgaccccgaccgctgggagttcgcgcacgcctccttcctccggggccagacgcacctcctgccccgca

SEQ ID NO: 2150 - DNA, 453 bp, Zea mays
  Clone ID: PAT_MRT4577_49002C.1
ttatttctgggaagcgcaccctcatcccacaaaaaactttattattgaactatcacttatttaaatctaaaggaggcaccaccaatgatgggttgctggtagaacgctgctgggttggtcaaagcacgttggttgaatggctgccattgttgccgttgtaagagggtgccagcgctaggcgcagcgtgctggcagaacggcaacaactgtggttgtatcaagaaggtaccacggctcacaccagctagctggctgattggtactagttgttgctgctgacaataagcatgatagttcaatgctgccacttggttgaatggaagaaactgctgggcgccggcagcaagtaactggctgaatggcagctgttgctgttgcacactactagcaatgttcagtgccgccagctgctaccatggaagaaactgcttgtggtgagacctgctaccttgt

SEQ ID NO: 2151 - DNA, 348 bp, Zea mays
  Clone ID: PAT_MRT4577_49004C.1
ttatttctgggcaagcgcacccacatcaccacaaaagactttattattgaactatccctcattgaaatcttaacagaggcaccaccaatgatgggttgctggtagaacgctgctgggttggtcaaagcacgttggttgaatggctgccattgttgcccttgggagagggtgccagcgctaggcgcagcgtgctggtagaaccgccacaactgtgcgttgtatcaagaaggtaccacggctcacaccagctagctggctgattggtactagttgttgctgctgtcaataagcatgatagttcactgctgccagttggttgaatggaagaaactgctggcggtccgcagc

SEQ ID NO: 2152 - DNA, 2883 bp, Zea mays
  Clone ID: PAT_MRT4577_49018C.1
gccggctcttatacgactatctatacggaaagctggcgcgctccgcagagcaccgatcctgtatagccggcgcgggcgcccggccggcctcggcacgagaattcggcacgaggaaagaggagctggccgcgtcgtatcgactcctgccgccgaaaggccgagcccgagcccgtgtcccggtgcccgttcccgcaaccctaatccccttcccccgtcggctctcgccggcgaagaagagggagccgcgcggcgtcgccagggagcacgcgccccctcccttcccggctccctccgcgccgtggggaggcgcgtccacccggatccgccctcaccgcgaggcagaggggaggagagggagccaggtccggcgcacccgctgtcgtccgcgccgaagagcgttaagagtctccccacaggcttggctgagggaaacttgtgctctgcgcatcttggacactacttcaccatttaccaagtcttgagttattgctccggtgccagacaaaaaaccaaactctctggccgaacacagtgatggcgcaagcctgtaagaagaggagaggagtttatataagcagtgaatcaggagactctgatacagattctgatgttgagggaagcaaacactctcaaaagtctggggtgacatcaatttctacatgcgagcaccagtcatcttataacctcaaggctgcaagtatgaaaagtagcaggatgataaggctgtgtggaaatatcgtaaggaagctcatcgatcacaaatgtggctggcttttcaaagaacctgttgatccagatctatatgggattccagactactttgatgttatccgcagtccaatggatttgggcactattaagaataaactcacaaaaaagaaatatgtaagcattgaggagtttgcagcagatgtgaggctaacattttcaaatgctatgaagtataatcctccaggcaatgatgtgcatatttttgctaaagaattgaatgaaatgtttgattcagaatgggaatcagtagaaaggaaatttagaggccgaaaccttggtcaagaccagcagacaatgaaggccataaaagttcgagctatgatggattcaaagtctacagttgctagagggccggttgcatgctcaaaccctaaaactttggttgctagaggtccagtagcttgctcaaattcgattgcaaagaagacactgacagatgcattatcctccaaagtaaaaatcaaattttccgtgcgcagctctgcgcatacctcttccaaagatatactcgttcaagcagctggtagcaaagaggggtccttaaatcactctgtccctactggcaacaaagaggcatcttcaaattgtactcttcctatcgctaaggaggctaaaatatcaagggcacgagaaattgagcgctgctctggttcaattggaaaacaatcatggtcttgcaatgacacttctacttcacctctcgcttcctctgtgcaaggtgaggaaagttaccttcatgatgaacctttgtcaccaagcagggctcttcgtgcagcaatgctcaggagtcgttttgctgggactatagtgaaggctcaacagaaggcacttctagatcatgggaagaatatagaccctgtgaaattgcaattggaaaaggagaggctggaaaagaggcagcaagaagagaaagcaaggatcgaggcccaggtgaaggctgctgaagcagctgcacaacaaaagtttgaggaagaaatgaggatgaagagaaagcaggaaagggaggcagcacgcctggcactacgcatgatgaagaagactgttgatattgacaacagtgacttcctaaaggagctggagaacttcagcaaaacatggcaggcaaatccacctggcaaattaatcgtggattttatcagtggggacttgccaccggggttagggagtccgctggagaggctcggcctcttcatgaaggaagatttcgaggatgaggtagaacaggaaatggaggacagagtgtcaccctcaatggatgttgacatcaggaaagatttccaggaagacttaggacatgaaatgcaggacagtgcatcacccgtgactgtcattggcacaaagaatgacgtacagggagtggcaggacatgaaatggaggacagcggatcaccagccacagtcattgacacgaagaaagaagagacagaacatgagatggtggacagcgtatcacctttgatggatgttgacacggaggaaggggagatcagctgctgacggtagctacacctctcttcacccgcataatttattgaggcagacatccttgcttggttgttagattaggcaatttcataagcagagtgatgcagaaacattagttttatctgctttcatcgtagaaccatgtggtgtggagaacatgtctcagacgaaatgacgagtggttttggatttgctgcggattttaattttcgtggtcttgtcagtctggcaagagtatgatgactctgtatgttgaatttgacctcccccgctggatgacatgtataaaaggatgagaaaaaaaggatagtttggagctagtgtatgttgttggagtttatggtggagccagatttggtgagcgtgtcgtggacgtaaatgtaggtatagctatatacttgaaatattgataagagtgtttggttcaaaggatcaattcattccagttaaacatcatgagcttgttaatgggtgtttggttcgagagttcgttaatgggtgtttggtttgaggaataagctagtctactattttttttatttagttgttgaatgtaattttttgacctgtcatctcatttcttacaagtgaatgattatttctaagtctaaaaaaaaaaaaaaaaaa

SEQ ID NO: 2153 - DNA, 475 bp, Zea mays
  Clone ID: PAT_MRT4577_49027C.1
gcgcccgggatacacatattattgagaccactagcatcatagaaagccaatagtggaccaacaatggcagacaaaatattttgccttcttatgctccttggtctttctgcaagtgctggtacggagaccattttcccacaatgctcacaagctcctatagctgaccttcttgccccgtacctctcaccagcggagtgttcggtatgtgaaaacggcaatacttgaaccctataggatccaacaggcaataggaggtggcatcttacctttatgacccgtgttcctgcaacaataatcagccctattacagaagggacctttggagcattgattgggacaaaacattagggcacaacaactacaacaactagagctagcaaaccttgatggctactctgaggaacaacagggggttccattcaaccaactaggtggatggaactgtggttgttatttggagcagcagcaactacca

SEQ ID NO: 2154 - DNA, 368 bp, Zea mays
  unsure (1)..(368): unsure at all n locations
  Clone ID: PAT_MRT4577_49100C.1
ggggaaattcccaaaagcacaattttgggaggaccaggcaaaaaaaaacattaaaagaggaccaaatattcaaaggagaccctcggttccccacaagacagcaaaaataattttcgggacaatctagcagccccaaaaaggccccaaatagttagttaaaaaaaagctacaaactctttaattccaaagttaaacaggtccccaattaaaagggcaaggggtttaaagtttaaacatcctcagggccgaccaaacgggaggttttcaaattcactcgaaataaaaccccttctccgggagctccgggacgacctcattcctcatccgaacccacagtttcggggcttccggctcgaacttntaaaacg

SEQ ID NO: 2155 - DNA, 1763 bp, Zea mays
  Clone ID: PAT_MRT4577_49162C.1
gcaaaaagaaagctaaatttcaagaccttattttaccccataacttcggggatagctcttattgctaatgttataaacatggctgccaggaagttctcctttggtcctcctttggatcctttataaatatatatggctaactgaagagcggtacaactcaccaatggactcacggatcaatagtcgaattcgacacacagattaccaatttttcaccaagcaaacggtttgaacagctatgtctgaatagtgcaaccgatatgttaactatcttgcagtttgcgccgcttctcttgggagatcttagatctgtcgcctgtggctacttcggtaccagattcttcgatctctacgagtttctgttttacacctaattcagacgaacgttctcccagttctgcagtccgtgcgatgtctcctgttccatttgggtccatggttgcaccactatccttgtttgtagactggctctgattagatgacggtttagctgttgtatcccttgaggatggatcctggactttctccgtgctcgattgactctgcttttcaaacatcatctgcagatactttccttgctcttcaatccgcaactgcaattttctctgaatctcaagctgttcatgaagccgtttctggacttccatctgaaggcgcagcgcttcagtaagatccatgctcgttttcaggtccaggaccagctcttcagtggctgtccttttttccgatgtaccttctgacaggtctggtttatagcgggctgtgcggtacttctgcaggtggcttttgacatgatatatagtcaaaccatcaactttcataagctttagcacacccttaggagtagctttttcgctaccgccaagctgatttacagcatctacaaaacattcatggagttctggggtccatctcatccgttgtttggcaactgaagcattgctgctattgggaggactagcaacaggacaaatctccctactatgagatgaagctgactgatttactgcaggtagtgatgtagctgagttggaaatttgaatcatggcttttgagtgggaatcagtagctgttgcgtcaagaatatctttccaatcatcattcattatatctgcccaccaatcattttgtgtagcactctcatcagatgtcatagcaggacgtatactatggatttgattaacatcagaagcagcaatattatctgtgttgagtggtgaaacatccatagaagatgtgaaccaggctgccttagtgtgtgtttctggggtattatcagatagagactggagagcttcaaaattggatgagagaaataaagggtgcagccattgtctggctatcaaggttagacacagaatcaagtggactagcagtgtagcctgaatatggtaccccgataacaccagctcttgggtgcaaactaacagactgatgtgtgtcaatacacaagggcatagagtcatcaggaagctgcctcaacataggaatatgctgggggttatgaggccttgggaagctccctttcaaaggatttggcagaataggcaaagaggatgacattgctcccaaaactctgctcttttgagactgcatcagattaaacttcctcattcagaacagtgaacaagctccttcctttccataagtcacttctggtacatttcattaccttgcttaaagcattaatccattactctgctgcgcaaagaggaggacgacacccaccagttgcccggctcacggggaagcgcacctctgcc

SEQ ID NO: 2156 - DNA, 392 bp, Zea mays
  Clone ID: PAT_MRT4577_49219C.1
gaccaactagcaacatataaagcacactaacggaccaacaatggcagccaaaatatgttgcctcacttatgctccttgatctttctgcaagagctgctacagcaaccattttcccgcaatgctcgcaagctcctatagcttgcctctttcccccgaacctatcaccagcggagtatctagtatgtgaaaacccaattcttcaaccctacaggatccaacaggcaattgcagctggcatattacctttatcacccttgttcctacaacaatcatgaggcctattacaacagttacctttgctgcatttattggcacaaaacatgacggcacaacaactacaacaacttgtgctagcaaaccttgctggctactattagcaacagcaggttctt

SEQ ID NO: 2157 - DNA, 3715 bp, Zea mays
  unsure (1)..(3715): unsure at all n locations
  Clone ID: PAT_MRT4577_49229C.1
cattgggtacctcgaggccggccgggatacctatctcctcctcctcgcctacgactacgagttcgccgtggcgcgccacccgccaccagtcagtcccgccgcgccgataaaccctccctccccgaatcggagaaccgcatctctgagattcccctccgacacccgccgtccgcgctgggatctcccatccggacccgtcttccatcattgcccctcgaatttctcctccacagactcagtttcgtcatccgcgcttggtttcgtcagttccggcgggcctagcagattcgtggctcttcctcgtacacaatccgggctgggtgagtggggccccttttccgcctagcgggttgcgtgcggccggcggtgttgcttggaaggcaaatcgagtgtttagggggccgcgtgcgggggcggtggtaaataaagctaccagggttggtggggtcattagcggagctgtgactctgtgaggcgacgatggggctgggggctgcgatggcgctggcgctgggcgacccgccagcggactacgcctccatcgcggcggtggggctgttcgtggcgctcatgtgcgtctgcatcgtcgtcgggcacctcctcgaggagaaccgctggatgaacgagtccatcaccgcgctcttcatcgggctgggaactggagcggtcatcctgttcgcgtcgagcgggaagcattcgcgcgtgctggtgttcagcgaggacctcttctttatttacctgctgccgccgatcatattcaatgcagggttccaagtgaagaagaaacagttctttcgaaacttcattactattacactgtttggtgcagttggcaccttgatctcttttactgtaatatcccttggcgctctaggactaatatcaaggcttaatatcggcgcacttgaactgggagactatcttgcacttggggcaatattctcggccacagactcggtttgcaccttgcaggtgttaagccaagatgagacaccattcttgtacagcctcgtgtttggtgaaggtgttgtcaatgacgcaacttctgttgtgttgttcaatgcaatccagaactttgatcctggaaatatcagcagtgccaaattactgaacttcattggcagtttcctttatctgttcggctccagcaccattcttggagtagcttctggacttcttagtgcttataccattaagaagttgtacttcggcaggcattcaaccgatcgtgaagtttccattatgatgctaatggcttatttatcttacatgctagctgaattgctcgatttgagtggcattctcactgtgtttttctgcggtatcgtaatgtcacactatacttggcacaatgtaacagaaagttcgagggtcacaaccaagcatgcctttgcaacattgtcgtttatctccgagacttttctgtttctttatgttggtatggatgcattggatatagagaagtggaagattgtcggtcaaacttatagcccggtaaagtctatcgctttgagcagcaccattttagccttggtgctggtttcaagagctgcttttgttttcccactatcctttgtatcaaatttgaccaaaaaaaactccaaatggaaagatatcttttaggcagcaggttattgtttggtgggcgggtctcatgagaggtgctgtgtctattgcgttggcttacaataagttcacaagatcaggccatactcaacaacctagcaatgctatcatgatcacaagcacaatcagcgttgttcttttcagcacaattgtctttgggctgctgacgaagccactgatcaggctcttgatcccgtcaaggcacctatccagggaaccaagcgccctttctgaaccttccagcccgaagtctttctttgagcagctggccgccaacagccctggacacccggatcttgagaatggcataagcctacgacgcccggcgagcctccgttttctcctagtaagcccggcacggtccgtccaccattactggcgcaagttcgatgacagtttcatgcggccggtgtttggtggccgtggcttcgttcccttcgtccctggttcacccactgagagcagcttgccattgcttcctggcaatgagaactgaaaccagcgtatcgaggggctttaattcagcagaagttttgtaaattggcttcgcttatggttataatattttgtgtaaatctaggtttgtagattcaacttggtagcatgtacatgttgatgtaggctagttaactgaccagcgaccaaacggctgtgcatattgatatctcgtcgctctcaatgagtttgtatttataaaatactctgtacatcggatcactatatatgtatcgtctccaacttaataaatactcatccgttctaaaaaaaaaaaaaaaaaaacggccaaaaaaaaaaaaaaaaaaaaacgaaaaaaaggaccagatcgcgagcggcggcgccgatcttttagttctttggtcacactaaagtggtcgcattcaaggcaatctgtacattacaatacacgtgaccatcacacgtaaaggtccaactaatacctcagcgacattcttatggctgggagtacaatacatagtgcttggcgtgggtcgtgatttcgactatatcactatacatataaccatctatcatgtgattatggccctgtttggcacagcttattttcagcttcttcacaaatttaagctgaagtcctgccaaacagtcagcttctgcagcagcttatcagttcagctgcttctcaaaatgcactaaaagcagccaacaagcagaagctgcttttcaccagcttatcagataagctgctttttcaacaagcagcagttgtgccaaacagggcctatatacaatcttataataagtattatataccttctcgaatatttatcgttcgcttgtttataaatggaggagtcaaatatatatgccatgcacgagcacgcttgtcttggatgacgtaacagcatcatgcgtactgtatgctgtgcgatggttacgttggtggacgcgatcggcgctctagacggggtaggacggcagcttggcgagaccgcagnnnnnnnnnnngcacgagtattgccggatccggacgtatccnnnnnnnnnnnnnnnnnnnnnnnnnnngttcttcatcagccagtaccttgtgccgtcgttcgccgtgccgtacccgacggccgtgatggcgtggttgaggtccgnnnnnnnnnnnnnnnnnnnnnnnnnnnngtcgtagaagcggaacgccgggtcctcgccgttgatggccacggacacgggctggttggccannnnnnnnnngagcgcggcctcgttgttgcgcggcacgtcctcgtggccccggatggacgcggcccgcgcggcggcggcggacgagcggcagggcccgtcccggccctggtacgggtagcccgactccgaggccagcccgccgcggcgcgcgacgaactggaaggcgttgtccatgaggccgccgtcgcagccctggtccacgccgctgacgtcacagtccaccagctcctgctccgacagcgacaccagccgccccgtccggatcttgttcagcccttccaccgccgccaccgccgagaacgcccagcagcagccgcacgctccccgtgtgtgttgtgcatggtggctatgttggattaattgcgtagaaatactgggaaccttttaacttaattgg

SEQ ID NO: 2158 - DNA, 385 bp, Zea mays
  Clone ID: PAT_MRT4577_49279C.1
tgccggacactcaggaatgttctactacatgctcaggggcttatttcatctttgcatctgtatacgctgtcttagttcaagtaacatggcattgcgtggggatatttttggcttcatcatcaactattctctacatcatgattctaatgtcccggaaatgtttaagccatatgccccagtacttgatgctaaataaggttttcagacattcatggaacaacattcatcttcgcagctgtcaaattctctactggccaattgtcttccaagatgcatccttaagctccactgtgaatgttgaatatgcacacaaagctgcaattcggaagcatgctttgtggtcaagtatcattgtggatctcctgatgggttttgtccttggagc

SEQ ID NO: 2159 - DNA, 374 bp, Zea mays
  Clone ID: PAT_MRT4577_49351C.1
gtgggtcggcttctcctccccctccggctcggtttcggattcgcgaggttcttcggggctcggtttccttaatgagcggatcgagatgcccgcataggatgttgagtaccgctgcttcatcggcggtctcgcctgggccacggacgaccactacatccacaacgccttcagcacctacggcgaggacctcgagtccaagatcatcctcgatcgggagacgcataggtccagcgggttcggctatgtcaccttctccacggaggaggcgatgcggaacgccatcgagggcatgaaccgcaaggagctggacggccgcaacatcaccagcaacgaggcccagtcccaatgctgccgtagaagcagtggaagaggcg

SEQ ID NO: 2160 - DNA, 624 bp, Zea mays
  Clone ID: PAT_MRT4577_49427C.1
atggggcgcggcaagatcgagatcaagcggatcgagaactccaccaaccgccaggtgaccttctccaagcgccgcaacgggatcctcaagaaggcgcgggagatcagcgtgctctgcgacgccgaggtcggcgtcgtcgtcttctccagcgccggcaagctttacgactactgctccccgaagacatcgtgcgtgccgtttcctactccctggctatcaaaaatcctggagaagtaccagaccaactctggaaagatactgtggggtgagaagcacaagagccttagtgcagagattgaccgtataaagaaagagaacgacaccatgcagatcgagctcaggcacctgaaaggtgaagatctaaactcgctgcaacccaaagacctgatcatgatcgaggaggcacttgataatggactgacgaacctgaatgagaaactgactaagatgatggaagacgagaacaaattgctggccttcaaactccaccagcaagatatcgcgctgagcggcagcatgagagagcttgagctgggttaccatcctgaccgggacctggcggcccagatgccaatcaccttccgcgtgcagcccagccatcccaacttgcaggagaacaattag

SEQ ID NO: 2161 - DNA, 1459 bp, Zea mays
  Clone ID: PAT_MRT4577_49429C.1
ccggcccgggaaaaaaaaaaaaaaaaaaaaaaaaaaaaaaaaaaaaaaaaaacccaactacaccacaccgaaccggcaccaccaccaaccgagcggctccaggctcctgctcaggaaggggagaagaggcgagccttccttgggaagtcgcaggaggagagaaggggaacaaagatggggcgcggcaagatcgagatcaagcggatcgagaactccaccaaccgccaggtgaccttctccaagcgccgcaacgggatcctcaagaaggcgcgggagatcagcgtgctctgcgacgccgaggtcggcgtcgtcgtcttctccagcgccggcaagctttacgactactgctccccgaagacatcgctatcaaaaatcctggagaagtaccagaccaactctggaaagatactgtggggtgagaagcacaagagccttagtgcagagattgaccgtataaagaaagagaacgacaccatgcagatcgagctcaggcacctgaaaggtgaagatctaaactcgctgcaacccaaagacctgatcatgatcgaggaggcacttgataatggactgacgaacctgaatgagaaactgatggagcactgggaaaggcgtgtgacaaacactaagatgatggaagacgagaacaaattgctggccttcaaactccaccagcaagatatcgcgctgagcggcagcatgagagagcttgagctgggttaccatcctgaccgggacctggcggcccagatgccaatcaccttccgcgtgcagcccagccatcccaacttgcaggagaacaattagactgctggatgccctcgttccactcgccgaggatttcacccagccaccaccgctggcttgtatgccctcgtgcgctggcaactgtatctttatctttccggtatgtttggatgaacgtataatgtgtgtcagtgtcggtcgcatgacgtgccgatgtcgtgcatctctctctctctctgccagagcagcggaactctgcaccgtgagtaacttaattggtaccgtatgatctgccggacagtgaatagtttatgtgagtgggacaaaccataatgtgtaatatttgtgtccaactgtcaatggcacgcatttggattttcactacacgttacatatgaagggatatacatccatttgtcgccgcaaaaaaaaaaaaaaaaaatttgcggccggcttgtatgccctcgtgcgctggcaactgtatctttatctttccggtatgtttggatgaacgtataatgtgtgtcagtgtcggtcgcatcacgtgccgatgtcgtgcatctctctctctgccagagcagcggaactctgccccgtgagtaacttaattggtaccgtatgatctgccggacagtgaatagtttatgtgagtgggcccccaaaaaaaaaaaaaaaaaaaaaaaaaaaaaaagtactctgcgttgttaccactgct

SEQ ID NO: 2162 - DNA, 234 bp, Zea mays
  Clone ID: PAT_MRT4577_49460C.1
attgcagcaccaagaagctccattttttccttaagattaacttagaacaaatcctgacaggagtaacatcatccattgatccacagttcatgctggttgatgcatgggtctgctggagcctaggatgaacacagtactaacaactgacacatatcgaccttgcaattataaacacagatggtcaacaacaaactatactaactaagataaactccttggactagggttaacatt

SEQ ID NO: 2163 - DNA, 2050 bp, Zea mays
  Clone ID: PAT_MRT4577_49736C.1
tgtgaggtgccggtgctcgcagatggcgacctcacgctcttcggtaagttgagttcatcatcatccatcgtcggcccgtgcccgtctattataattcggtttttgctctacaaattatatatatcctctcgattataaaatttacccttttgattctacgggttcttcatcttctaagcgcgtgatatgtaatgcaacatcctccggctcgagctccgccgcgcactagcgggagcgcggagtagcgaggaaagcagtgaggacgtccgcacactcgcacaattccagctgctgatcttgatcctgcaccccgagccgtacacaagagctagtgggtagaacttgcgggagcggagcagaactaagtgcagagaacaggacatatggctacgccggcggggaaggtttacgggggggctatctcgccgttcgtatcgcgcgctctgctgcgcctgggggggggctgcctccacggccggccccaccagatgaagcgccagctctaacgtcacctctgatttctctctcctctctattgctagctgctttattataagtagcagctgcagccgggcggggcgggacacacccatccaattccagctgctgatcttgatcctgcaccccgagccgtacacaagagctagtcggtagaacttgcaggagcggagcagaactaagtgcagagaacaggacatatggctacgccggcggtgaaggtttacgggtgggctatctcgccgttcgtatcgcgggctctgctggccctggaggaggccggcgtcgactacgagctcgtccccatgagccgccaggacggcgaccaccgccgcccggagcacctcgccaggaaccctttcgggaaggtgccggtgctcgaggatggcgacctcacgctcttcgaatcacgtgcgatcgcgaggcatgttctccggaagcacaagccggagctgctgggcggcggcaggctggagcagacggcgatggtggacgtgtggctggaggtggaggcccaccagctgagcccgccggcgatcgccatcgtggtggagtgcgtgttcgcgccgttcctgggccgcgagcgcaaccaggcggtggtggacgagaacgtggagaagctcaagaaggtgctggaggtgtacgaggcgcggctggccacgtgcacgtacctcgccggcgacttcctcagcctcgccgacctcagccccttcaccatcatgcactgcctcatggccaccgagtacgccgctctcgtccatgcgctcccgcacgtcagcgcctggtggcagggcctcgccgcgcgcccggcggccaacaaggtggcgcagttcatgccggtcggcgccggagcgcccaaggaacaggagtgacgatgaagcgatcgaagcgacttgtgttgttgtgcttgattagttaattggaaaccttctcactcatctagtccatcatggtgcctgcttttctttatactatttgtcttaattttgctgctttctccacggaataatagtagagatttggaaatgtaatgtattttatcaaaatatattggattttcaagcaatatagtatggttttcgctgcaaaaaaaaaaaaaaaaaaaaaaaaaaaaaaaaaaaaaaaaaaaaaaaaaaaactcagactagttctcctcgtgcaccctacccaaacactcacgaccaagcgctcccgcacgacagcgcctggcagggcctcgccgcgcgcccggcggccaacaaggtggcgcagttcatgccggtcggcgccggagcgcccaaggaacaggagtgacgatgaagcgatcgaagcgacttgtgttgttgtgcttgattagttaattggaaaccttctcactcatctagtccatcatggtgcctgcttttctttatactatttgtcttaattttgctgctttctccacggaataatagtagagatttggaaatgtaatgtattttatcaaaatatattggattttcaagcaaaaaaaaaaaaaaaaaaaaaaacccacgcgaccgcggacgctgggcgacccgggagtttcggtccg

SEQ ID NO: 2164 - DNA, 1778 bp, Zea mays
  Clone ID: PAT_MRT4577_49800C.1
ccggccgggaactcactgcatatctgacatctcagttgctgaacgcctgaaccgcaagtcatccatgacctcttctattccgaagctgcttctcctcctcttctttctcagccatcgctctcccattgctcgcgcaggcgatgatggcagctacaaggttctgtccatgggctctccgagaactgactccgtctgttcccagtccaaagcggttccttcgtcgtccgccggtgccgccacggtgcccttgcatcaccgtcacggcccatgctcgccgttgccgaccaagaagatgccgacgttggaggagacgctccaccgcgatcagctccgagctgcctacatccagcggaagttctcaggcggcggtggcgctggtggtgacgtccagcgatcggacgccaccgtgccgacggccctgggcacctccctgaacacgctggagtacctgatcaccgtaggcctgggctcgccggccacgtcccagaccatgctcatcgacaccggcagcgacgtgtcgtgggtgcagtgcaagccgtgctcgcagtgccactcccaggcggacccactcttcgaccccagctcgtcgagcacgtactccccgttctcctgcggctccgccgactgcgcgcagctcggccaggaaggcaacggctgctcctccagctcccagtgccagtacattgtcacgtacggcgacggctccagcaccacggggacctacagctccgacacgctcgccctgggctccagcgccgtcaggagcttccagttcgggtgcagcaacgtggagtcgggcttcaacgaccagaccgacgggctcatggggctcggcggcggcgcgcagtcgctggtgtcacagacggcggggacgctcggcagggccttctcgtactgcctcccgccgacgccgagctcctccgggttcctcacgctcggcgctgctggcggtagcggaacctcgggcttcgtcaagacgccgatgctcaggagcagccaggtccccacgttctacggcgtgcgcctccaggccatccgggtgggcgggaggcagctcagcatacccgcctcggtcttctccgctgggacggtcatggactcgggcacggtcatcacgcggctgccgccgaccgcctactcggcgctgtcgtcggcgttcaaggccgggatgaagcagtacccgccggcgcagccgagcggcatcctcgacacctgctttgacttcagcggccagtccagcgtcagcataccgtccgtcgcgctagtcttctccgggggcgccgttgtcagcctcgacgccagcggcatcatcctcagcaactgcctcgccttcgcgggcaacagcgacgacagctccttgggcatcatcggcaacgtgcagcagcggacgttcgaggtgctgtacgacgttggccggggcgtcgtggggttcagggctggggcgtgctgatcgatcgtgatcggcgcaaggacattgacaataccggccgggagtacgtactgtgctcgtttgggttgcgagtgcaacgtaaatggaagaagtgcaaaacatatacatactacttcgattttaattatctttgcgatagcatgcaataacgtcatgcatgcaagtgtgcaaactactaaaagctaaaagataatcttaatgtcacctgattgatgactataaaagattaatgatatattattgtattgcgcttggtgcgatgattaattatggtgtatacagccttttgggcgagctaatgttccttatatattactcactccgtctc

SEQ ID NO: 2165 - DNA, 2353 bp, Zea mays
  Clone ID: PAT_MRT4577_4996C.1
gaacgacctgtccggcgggatccccgcgcagctcgcgcggtgcgccaacctgacgctgctcaacctggcgtacaaccgcctcgccggcgaggtgccggatgttctcggcgagctcaggagcctgcaggagctcatcgtttccggcaacggcctcggcggcgagttcccgagatcgatcctgcggtgccggaacctcagcaagctggacctgagctacaacgctttccgtggagacttgccggagaacatctgcaacgggtcacggctgcagttccttgtgctcgaccacaacgagttctccggaggcatcccagcagggattgggggctgtacccggctgcttgagctgcagctcggtagcaacaacctcagcggcgaaatcccagccgagataggcaaggtgaagagcctgcagatcgcgctgaaccttagctccaaccacttcaccgggccgctgccccgcgagctcgggcggctcgataagctcgtcgtgttggacttgtcgcgcaacgagatatccggccagatcccaggcgacatgagagggatgcttagcttgatcgaggtcaatctgtcgaacaaccggctcgcgggcgccataccggtgttcggaccgttccagaagagcgcggcctccagcttctccggcaatgccgagctgtgcggcgacccgctgaccgtagactgtggatcatcaatctatggctccagctatggaacggagacggaccacaggggaatatcttacagggtggccttggcagtcgtcggttcctgcgtgctcatcttctcgctggtgtcgttgctggtggcgttgttcatgtggcgcgagaggcaggagaaggaggaggaggaggcgaagaagaaggcggcggaggtggcggtggcggcagcagccccacaggtggtggcctcggccgtgttcgtcgagagcctgcagcaggccatcgatttccagagctgcgtgaaggcgacgttcaaagacgagaacgaggtgggcgacgggacgttcagcaccacctacagagccgtcatgccctccggcacggtggtgtcggtgaagaagctcaagtccgtggaccgcgcggtcgtccagcagcggacgaaggtggtccgcgagctggagcgcctcgcccacatcggccacgagaacctggtccggcccatcgggtacgtcctctacgacgacgtcgcgctgctgctgcaccagcacctggcgaacggcaccctgctccagctgctgcacgacaacggcgagaggcggaaggctgactggcccaggctgctgtccatcgccgtcgacgtcgcccaggggctggcgttcctccaccaggtggccaccgtccacctcgacgtctgctcggggaacgtgttcctcgactcgcgctacaacgcgctgctcggcgaggtcgagatctccaggctgctggacccgacgaagggcacggccagcatcagcgcggtcgccggctcgttcggctacattcctccagagtatgcgtacacgatgcgggtgacggtgccgggcaacgtgtacagcttcggggtggtgctgctggagatcctgacgtcgaagctgcccgccgtggacgaggcgttcggcgagggcgtggacctcgtgaagtgggtgcacgcggcgccggcgaggggcgagacgccggagcagatcatggacccgcggctgagcgccgtgtcgttcgcgtggcgccggcagatgctggccgtgctcagggtcgccatgctgtgcacggagcgcgcccccgcgaagcggccccggatgaagaaggtggtggaaatgctgcaggaggccagggacagctgagtggtctggttcctctgctcaatgatgtgtggttggctgcttggaacttggaacttggaagtcgaggcgagaaactctgaactgatcatcgttggagttcgagtatggagtccatccggtagcgtttgattctctgtatatattcggtaattagtatcccgatcatgcgccatggatcactggatgttcggtcttggagcaatgtctggaactctggatgcgtctttagcaaagcaattcggtgttctgcattgagggttttattttcatttgtttttgtttttgtttttttttttgaaaaaaaaaggagagagaagagaaattctatcccgatgtcgtccgctagaggaggtggttgtctgggtgctatttcttctctctaggagagcctggcccatggcgacgtggcagggatggcctctgtctgctgaggaagaggaatcgtgcctgtctgttaatacatgtatatagtatttttcttatttggtagaagaatatctgtggcacaaaaaaaaaaaaaaaaaagcggcc

SEQ ID NO: 2166 - DNA, 1444 bp, Zea mays
  Clone ID: PAT_MRT4577_49992C.1
cattgggtacctcgaggccggccgggactcacaaagaagccggggacggagagcagagagcttcagcgcaactgtgctcaatcgtttcttcgtctttagttggtgcttggtctccctccgtcctctgtttcccaaacagaggtgtctcagctgactcttttgcttgctagcaaaatagcacactctctctctagagctgagcaccaccttgctgaaggcagctagctagcgacgaccatggtctcctcggacaccatccgcacggccatcggcgtcatcggcaatgggaccgccctggtgctcttcctctccccggtgcctacgttcatccgcatctggaagaaggggtcggtggagcagtactcgccgatcccgtacgtggcgacgctgctgaactgcatgatgtgggtgttgtacgggctgccgctggtgcacccgcacagcatgctggtgatcaccatcaacggcaccggcatgctcatccagctgacctacgtggcgctcttcctcgtctactccgcgggggcggcgcgccgcaaggtgtccctcctgctggccgccgaggtcgccttcgtcggcgccgtcgccgcgctggtgctcgccctggcgcacacccacgagcgcaggtccatggtggtcggcatcctctgcgtcctcttcggcaccggcatgtacgccgcgccgctctccgtcatgaaaatggtgatccagacgaagagcgtggagtacatgccgctgttcctgtcactggcttccctggtgaacggcatctgctggaccgcctacgcgctcatccgcttcgacctctacatcaccatccccaacgggctgggcgtgctgttcgcgctggcgcagctggtcctgtacgccatctactacaagtccacccaggagatcatcgaggcgcgcaagcgcaaggccgaccagatcgccatgaccggggtggtcgtcgacggcggcaagaccaacaaccaagccggcgcgggccaatatgctcaagcaagaagccagcggcaaatcaattatgtcgccgctgggttttatgtattttgtgattctatatgcacgctagctgcttgtccgtcccggccaatggaaaaaaaagggggaagaaaaaatgtctgtcggtatatgtgttctcgccgaataactctcgcgcatagctggtggggctgagtcactgccttcgctatatgtatacgtgcaaaaattagaggtggagggttgttttagctaatccccccttaattccaaggcagagtgacctttttttccttctgtttcggctaggattttgctataattgagcaatttagcgcgacttgttattggggttggtgtgtctcaatcaaatagtaaaatgttcattttactctttccaaaaaaaaaaaaaaaaaaaaaaaaaaaaaaaaaaaaaaaaaaaaaaaaaaaaaaaagggcggcc

SEQ ID NO: 2167 - DNA, 1678 bp, Zea mays
  unsure (1)..(1678): unsure at all n locations
  Clone ID: PAT_MRT4577_49995C.1
gttgcccaaaggaaaggacgggctatatatattatatactcacttttgggtttcttttctggtatgggtgtctcgcaggcaatgggaccgccctggtgctcttcctctccccggtgcctacgttcatccgcatctggaagaaggggtcggtggagcagtactcgccgatcccgtacgtggcgacgctgctgaactgcatgatgtgggtgttgtacgggctgccgctggtgcacccgcacagcatgctggtgatcaccatcaacggcaccggcatgctcatccagctgacctacgtggcgctcttcctcgtctactccgcggnggcggcgcgccgcaaggtgtccctcctgctggccgccgaggtcgccttcgtcggcgccgtcgccgcgctggtgctcgccctggcgcacacccacgagcgcaggtccatggntggtcggcatcctctgcgtcctcttcggcaccggcatgtacgccgcgccgctctccgtcatggtaagtactgtagtatatgtatgcctttgttcctacatgtacgccgcgcctaatgcccttcttttaatttgttaccctcgtatgatgcgtgcgtgcgtggatcagggaggatgtacgtactaaccgaaggacgtattatacaacgtacgtacgtacgtacgaacatgcaggcctacgttcatccgcatctggaagaaggggtcggtggagcagtactcgccgatcccgtacgtggcgacgctgctgaactgcatgatgtgggtgttgtacgggctgccgctggtgcacccgcacagcatgctggtgatcaccatcaacggcaccggcatgctcatccagctgacctacgtggcgctcttcctcgtctactccgcgggggcggcgcgccgcaaggtgtccctcctgctggccgccgaggtcgccttcgtcggcgccgtcgccgcgctggtgctcgccctggcgcacacccacgagcgcaggtccatggtggtcggcatcctctgcgtcctcttcggcaccggcatgtacgccgcgccgctctccgtcatgaaaatggtgatccagacgaagagcgtggagtacatgccgctgttcctgtcactggcttccctggtgaacggcatctgctggaccgcctacgcgctcatccgcttcgacctctacatcaccatccccaacgggctgggcgtgctgttcgcgctggcgcagctggtcctgtacgccatctactacaagaacacccagaagatcgtggaggcacgcaagcgcaaggcgggccaggtcgccatgacggaggtggtcgtcgacggcagcagggcctccaacaacaacaacggtggcagcggcacctactgatgatgatgagtacgacgacgtaatatggtggtgaccacgccaacacaacaccaagcaacacgggggggcaacgccaacgccgtgcgtatctagcactagcaagcgtccttcttcctgacgaagggatgatctatgcatcttaagcagccgtcgtcttcttcttcttcttctgttaatcactagcttttactttctccatgcttcctagtaacgaagctttgcccactgattagtacttatatgttgaatcataatattacgacttcggcagcccaaacacttctcttaatccatttaatcaatagaccttagccaagtcaacttaatc

SEQ ID NO: 2168 - DNA, 2010 bp, Zea mays
  unsure (1)..(2010): unsure at all n locations
  Clone ID: PAT_MRT4577_49998C.1
actcacaaagaagccggggacggagagcggagagcttcagcgcaactgtgctcaatcgtttcttcgtctttagttggtgcttggtctccctccgtcctctgtttcccaaacagaggtgtctcagctgactcttttgcttgctagcaaaatagcacactctctctctagagctgagcaccaccttgctgaaggcagctactcagggccattgggtccctcgaggccggccgggagcactcaccaagaaccagagaggagcttcatcagctcattcaattctcgttccatccctcgtctcttgtgtcccgcctccgttccataattcaccagcgtcgtcctacccatatctcccatcgtcttctccctcgcgccatcagcttccccaagccagcggcgaccatgatctccccggacaccatccgcacggccatcggcgtcatcggcaatggaactgcactcgtgctcttcctctccccagtgcctacgttcatccgcatctggaagaaagggtcggtggagcagtactcgccgatcccgtacgtggcgacgctgctgaactgcatgatgtgggtgctgtacgggctgccggcggtgcacccgcacagcatgctggtgatcaccatcaacggcaccggcatggcgatccagctgacctacgtggcgctcttcctcctctactccgcgggggctgcgcggcgcaaggtggtcctgctgctggccgccgaggtgggcttcgtcggcgccgtcgccgcgctggtgctcagcctggcgcacacgcacgagcgcaggtccatggtggtcggcatcctctgcgtcctcttcggcaccggcatgtacgccgccccgctctccgtcatgaaaatggtgatccagacaaagagcgtggagtacatgcccctgttcctgtcgctggcttccctcgtgaatggcatctgctggactgcttacgcgctcatccgcttcgacctctacattactatccccaacgggctgggcgtgctgttcgcggtggcgcagctggtgctgtacgccatctactacaagtccacccaggagatcatcgaggcgcgcaagcgcaaggccgaccagatcgccatgaccggggtggtcgtcgacggcggcaagaccaacaaccaagccggcgcgggccaatactgaccgacgatcaagtgacgatcgacaccaatatgctcaagcaagaagccagcggcaaatcaattatgtcgccgctgggttttatgtattttgtgattctatatgcacgctagctgcttgtccgtcccggccaatggaaaaaaaagggggaagaaaaaatgtctgtcggtatatgtgttctcgccgaataactctcgcgcatagctagctggtggggctgagtcactgccttcgctatatgtatacgtgcaaaaattagaggtggagggttgttttagctaatcccaccttaattccaaggcacagtgacctttttttttctccttctgtttcggctaggattttgctataattgagcaatttagcgcgacttgttattggtgttggtgtgtctcaatcaaatagtaaaatgttcattttactctttcaaaaaaaaaaaaaaaaaaagcttcttcttcttcttctgttaatcactagcttttactttctccatgcttcctagaacgaagttgcccactattagtacttatatgttgaatcatagcggcacctactgatgatgatgagtacgacgacgtaatatggtggtgaccacgccaacacaacaccaagcaacacgggggggcaacgccaacgccgtgcgtatctagcactagcaagcgtctttcttcctgacgaagggatgatctatgcatcttaagcagccgtcgtcgtcttcttcttcttctgttaatcactagcttttactttctccatgcttcctagtaacgaagctttgcccactgattagtacttatatgttgaatcataatattacgacttcggccgnnnnnngnnngnnnnnngnanncaagg

SEQ ID NO: 2169 - DNA, 1830 bp, Zea mays
  Clone ID: PAT_MRT4577_50069C.1
cattgggtacctcgaggccggccggggcatttagttcttacgacgcgcccaaagctcacgccggacctgctcctctccgacggcggaatcggcttcgtgctccgctactttcccaaggcgttcaagccccgcccccgcccaggccacgaggtggacgacctcgccaacctcatcaagctctacgcggactgggactcccgcctgattccctactactccttcgaacagttcgtgcgcaaactcgagaaattgggtgccggcaaccgcgtcaggagatgtgtttccgttctggtgcgttcttgatcgccagaggcgaggatcctagggttctgcggacgcctggggtccaacagcggcacagcccacgggccacgcccagttgatatccctgatggcctgatgtcgcaactcgcaaccctagctcccagcctcccactcccacgcgcttcaagtcttcccaggcggccggcggcgtactcccagagtcccagacggccaatcttcccagcatcgggtggcgtcctcactccaggcggcaggcggctgcaccgccgcagtcacgaactcacgcgcaccgcgggcccgcggcagcgcgcacacgcgcacacgcgcacggcgcaccagcagccgtgagccggccagtccggcagtcccagcctcccaggcggccagtcctcccagtcccagtcccagctgcctaggtctgccgcctgtcttgaccccacccactggccacttcccctcctgtccgttcccaaatcccgtcccctccacccgcactccattggcgccgctcccctcccctcgccgccgccggagatctgatccgatccgtttgtgcttgtgctggacgatggtgggcctctctgaaggggagaaacacttcatccgcggcggcattgcacaagaccttcgcactgatggacgtaggcggctgcagttccggtccctctccgtccaaaccggagtcattccacaggcgaatggctcagcgcgtgttaggttgggggccactgaaataatcgctagtgtcaaggctgaactaggaaaaccaagcattcttcaccctgacaaaggaaaagttgctatttttgtcgactgtagtccaaccgctgagcctctgtttgagggtagaggctctgaagaattgtctgctgagctctctgtttccctgcaaagatgcttgttgggtggtaaaagcggtgctggtgctgcaattgatctgtcatccctaattgttgttgatggaaaggtctgctgggatctgtacattgatgggcttgtggtcagttctgatggtaatttgctagatgcgctagctgttgcgataaaggttgctttgagtgatacaggtataccaaaagttaatgtttctgttagtgctgcatctgatgaggaacctgaagttgatgtaagtgatgaggaatttctgcagttcgacacatccggtgtgcctgttattattacattaaccaaggtgggtcggcactacatcgttgatgccacctcagaggaagaatcccagatgagttctgcagtgtcggtgtcagtcaacaggcatggccagatatgcgggcttaccaagaggggaggggcagggctggatccaagcgtcatcttcgacatgatatctgtcgccaagcatgtgagccagcagttcatctccctcttggattcagagattgccgccgccgaagctgaagaagaggctcagtgattgatgaaaaggaaaaaggactggttgcgtaaatgctcgtgtgttccaacttcaaccaaatgctgtagaaatcttcaggaacactctatatttacaaagtcattttgctctct

SEQ ID NO: 2170 - DNA, 1635 bp, Zea mays
  Clone ID: PAT_MRT4577_50070C.1
ggagtctgttggagttggtctaattggctccctcgaggccggcggggaggatttaggtcttacgacgcgcccaaagctcacgccggacctgctcctctccgacggcggcatcggcttcgtgctccgctactttcccaaggcgttcaagccccgcccccgcccaggccacgaggtggacgacctcgccaacctcatcaagctctacgcggactggcactcccgcctgatcccctactactccttcgaacagttcgtgcgcaaactcgagaaattgggtgccggcaaccgcgtcagggacgatggtgggcctctctgaaggggagaaacacttcatccgcggcggcattgcacaagaccttcgcactgatggacgtaggcggctgcagttccggtccctctccgtccaaaccggagtcattccacaggcgaatggctcagcgcgtgttaggttgggggccactgatataatcgctagtgtcaaggctgaactaggaaaaccaagcattcttcaccctgacaaaggaaaagttgccatttttgtcgactgtagtccaaccgctgagcctctgtttgagggtagaggctctgaagaattgtctgctgagctctctgtttccctgcaaagatgcttgttgggtggtaaaagtggtgctggtgctgcaattgatctgtcatccctaattgttgttgatggaaaggtctgctgggatctgtacattgatgggcttgtggtcagttctgatggtaatttgctagatgcgctagctgttgcgataaaggttgctttgagtgatacaggtataccaaaagttaatgtttctgttagtgctgcatctgatgaggaacctgaagttgatgtaagtgatgaggaatttctgcagtttgacacatccggtgtgcctgttattattacattaaccaaggtgggtcggcactacatcgttgatgccacctcagaggaagaatcccagatgagttctgcagtgtcggtgtcagtcaacaggcatggccagatatgcgggcttaccaagaggggaggggcagggctggatccaagcgtcatcttcgacatgatatctgtcgccaagcatgtgagccagcagttcatctccctcttggattcagagattgccgccgccgaagctgaagaagaggctcagtgattgatgaaaaggaaaaaggactggttgcgtaaatgctcgtgtgttccaacttcaaccaaatgctgtagaaatcttcaggaatttggttccatttttatgttattattagtagtagtaaacaccgaggatttggatcctgggaacgaacgacgtcgtgttggctttggctgggctcagaggaacgaatactgaatcttgggtctgatgatctgatcctcttgtgcccccaatccgatgataaatttggcccctctcacaccaaaccaaacactatggatttcctccgtccgttttcaaacaattaagcacgcaaaaaaaaaaaaagttgccccatgtcggtgtcagtcaacaggcatggccagatatgcgggcttaccaaaaggggaggggcatggcttgatccaaacgtcatcttcgacatgatatctgtcgccaagcatgtgagccagcaattcatctccctcttggattc

SEQ ID NO: 2171 - DNA, 647 bp, Zea mays
  Clone ID: PAT_MRT4577_50147C.1
ttatactaatcttgttttttgaaaactgcatcaacaacaagctggaagcaagaaagaaagaaagaaaaaggcaaaataatggaagcaagaaccaaccaataacagtcacgcaattcaagaagcagcaagcaagctagaagcagaagatgcctccccaatctcaaggggtgaggggaaaaaaactaaaagaagcagaaaaaaactagtgtagtgtagtgtagctcatcagcgcccaagcaagatctggagccacgtgactacatacgcagagcagaccagatcagagcatcctgttgaggagcagagcagcggcggcggcggcagccatgggcgtggcagcgaggagtgacggtggcggcgcggcgctggtcttggccttggacttcttggcgggcggcgagggggaggaagtgtcgtcgtcagaggaggaggaggagtcagatccggacgaggaagaggaggatgactttgctgtgacgtggagcttcatgccgttgtagcagtagccgtagctgcagatgaagtagtagtccttggcgtccttgagctggaaggcgtaggtgtgtcccttgctgtagctgctcagcgcgttggccttgtcgcagttgtcgtagccgacctcgtccacctgcaccacgtccgaccgc

SEQ ID NO: 2172 - DNA, 839 bp, Zea mays
  Clone ID: PAT_MRT4577_50148C.1
acggcggcccgtttggggtgtttttagataataaatagagctcttcattcacacttgacattatactaatcttgtctcttgaaaaaaaaactgcatcaacaacaagctggaagcaagaaagaaagaaagaaaaaaaagggcaaaataatggaagcaagaaccaaccaataacagtcacgcaattcaagaagcagcaagcaagcatgctagaagcagaagaggcctccccaatctcaaggggtgagggggaaaaaagctaaaagaagcagaaaaaaaactagtgtagtgtagtgtagctcatcagcgcccaagcaagatctggagccacgtgactacatacgcagagcaaagcagaccagatcagatcagagcatcctgttgaggagcagagcggcggcggcggcggcagccatgggcgtggcagcgaggagtgacggtggcggcgcggcgctggtcttggccttggacttcttggcgggcggcgagggggaggaagagtcgtcgtcagaggaggaggaggagtcagatccggacggcgacgacgaggaggaggaggaggatgaggatgacgactttgctgtgacgtggagcttcatgccgttgtagcagtagccgtagctgcagatgaagtagtagtccttggcgtccttgagctggaaggcgtaggtgtgtcccttgctgtagctgctcagcgcgttggccttgtcgcagttgtcgtagccgacctcgtccacctgcaccacgtccgaccgcccgttctggtactcgaagatgagccagtctcccttgtagaacggcttgtgcttcttcacccacgccgtgtagtccacgtccaggtt

SEQ ID NO: 2173 - DNA, 1304 bp, Zea mays
  unsure (1)..(1304): unsure at all n locations
  Clone ID: PAT_MRT4577_50149C.1
cgataataataaatagagctcttcattcacacttgacattatactaatcttgtctcttgaaaaaaaaaaactgcatcaacaacaagctggaagcaagaaagaaagaaaaaaagaaaaggcaaaataatggaagcaagaaccaaccaataacagtcacgcaattcaagaagcagcaagcaagcaagctagaagcagaagaggcctccccaatctcaaggggtgaggggggaaaaaaactaaaagaagcagaaaaaactagtgtagtgtagtgtagctcatcagcgcccaagcaagatctggagccacgtgactacatacgcagtaacgcagaccagatcagatcagagcatcctgttgaggagcagagcggcggcggcggcggcggtagccatgggcgtggcagcgaggactgacggtggcggcgcggcgctggtcttggccttggacttcttggcgggcggcgagggggaggaagagtcgtcgtcatcgttgtcagaggaggaggaggaggagtcagatccggacggcgacgaggaagaggaggatgaggatgactttgctgtgacgtggagcttcatgccgttgtagcagttgtcgtagctgcagatgaagtagtagtccttggcgtccttgagctggaaggcgtaggtgtggcccttgctgtagctgctcagcgcgttggccttgtcgcagttgtcgtagccgacctcgtccacctgcaccacgtccgaccgcccgttctggtactcgaagatgagccagtctcccttgtagaacggcttgtgcttcttcacccacgccgtgtagtccacgtccgggttccaccccttctcgtcgcccaccgtgtagttggccgccacgagccgccgccggcagctgccgacgccgccaccaaggcggccagcaggagggccagcgccagccgcgacgtcgccgccattcctctgaccccggcctcttgctgatcgacagagacggatgagcttgcagctagctggagcctggacctggaggaagaggtctgagctagtaattggagtggggtattggtggtggtggcctgggtctggtgagtggggacgaaccgacggacagcagtgcagacaagtcacgacgagctaaaagctggtgacctctctctctgcttgcttgcttgcttgtatattgccaagaaccctccataagcagaggcagtcaggaggagactggcgtgtgcagtaattattcatgcatgatttggcacaatcagtcaattgagccccngntnaaaatatatagattttactataatggtaacttaattg

SEQ ID NO: 2174 - DNA, 349 bp, Zea mays
  Clone ID: PAT_MRT4577_50413C.1
agcaacatagaaagcacaactatgtaccaacaatggcagtcaaaatatttcgcctgcgtatgctccttggactttctgcaagtgctgctacggcgaccattttcccgcactgctcgcaagctcctatagcttactttcattccccgaacctctcaccagcgtggtctttagtatgtgaaaacccacttcttcaaccctacatgatccaacaggcaatctcagctggcatcttaccttaatgaccctaggttctgcaacaatcatcatgcctattacaacagttacatttggcgcatctactggcacaaaacatcatgtcacaacaactacaacaacttgagctagcaaa

SEQ ID NO: 2175 - DNA, 535 bp, Zea mays
  Clone ID: PAT_MRT4577_5049C.1
ttttttttttttttttatacggcaccaaaaggaaaggaggaattactattctagcggcacataatctcatggcaaaagcgatgtcaccaacatagaaggcagaggaaagtactacaacaggacagaggtgtacaagcattatgagacggaggtaataaggagaaatgagggaggggtcttatgcgccaaaaccgtagagtgttcggccctgtcgttttagggcgtatacgacatcgagcgaagtgacggttttccgcttagcatgttcggtatatgtgaccgaatcccggatcacgttctcaaggaagattttcaatactcctcgggtctcttcgtagatcaggccagagatacgtttgacaccacctcgacgagccagtcttcggatagcaggcttggtgataccttgaatgttatcacgaagaatcttgcggtgacgtttggcaccgccctttccgagaccttttcctccgcttttaccacgtccggacatgttgtgcttggggttgagtttgaagggttgggggaagtgggt

SEQ ID NO: 2176 - DNA, 671 bp, Zea mays
  Clone ID: PAT_MRT4577_50571C.1
aaatctccgctccttctcgtcccctctcgctcgcgtgcgcgtgaggtgcgcaatggcggcggcggcggtggcgttgtcgaacggctccggtggcgactccaaggccgagttcgcggaaatatacagcaggctcaaggaggagatgctcgaggaccccgccttcgagttcaccgacgagtcgctccagtggatcgaccgcatgctggattacaatgtcctaggaggaaagtgcaaccgtgggctctctgtcatcgatagctacaagacattgaaaggtgtagatgttttgaggaaggaggagacatttcttgcctgcacccttggttggtgtattgaatggcttcaagcatattttcttgtgcttgatgatatcatggacaactcccagacacgacggggccagccttgctggtttagggtgcctcaggttggccttattgctgtaaacgatgggattatccttcgcaaccatatttcacggatccttcaacgccacttcagaggaaaaccgtattatgttgatctcattgatttgttcaatgaggttgaattcaagacagcttcagggcagttgttggatcttatcactactcacgagggagaaaaggatctcacaaaatataacttgaatgttcaccggcgcattgtgcaatacaagacagcgtactatt

SEQ ID NO: 2177 - DNA, 1464 bp, Zea mays
  Clone ID: PAT_MRT4577_50591C.1
cgttctctccttcctatcggctccacacctccacgcaactggaagcttcgctgcaatctgccctactcctcttccgccgcctccaacaccgcagacgcagctgccgcgggcgggagcttggacgtgctacgctgctctcatctcgtttccgcgcagttcaggaattgttctcaatggcccgcgtgtatgttggcaacttggattcacgggtgacttctggggaactcgaagatgagttccgcgtgtttggagttctgcgaagtgtttggattgcacgtaaaccacctggctttgcatttattgattttgacgacaggagggatgcggaggatgctattcgtgatctagatggtaagaatggatggagagttgaactatctcgtagcaccagtggtcgtggtggtcgtgatcggcatggtggatctgagtcaaagtgctatgagtgtggtgagactgggcactttgcacgtgaatgtcgtctgcgcattggctctggaggtctaggcagtggaagacgtcgcagcaggagcaggagccgcagtcgcagccctagataccgcaggagtccgagctataatagaaggagctatagccctcgttatcgttctccaaggcgccgtactccttcaccggctcgtggacgcagctatagcaggtcgccatagtacaactgtgacaaatatgcatctccctcgttaacggagtaatgatggcagatactggtgtagcaggagcttggcctgaagcccgtgcctgattcttctctgtgtgaggacttggttcttggtttggctgtggggaacaaatttggaactgtcgtcaactgcatgacttcagttcaggcatgttctgcttaaacgactcggccaactacggctctcagttgtagtcttcatggttttgttcctccattcttggcacgtccttatctgcaaacaaatgtcaacgttccattactagctgccttcgatgtttcatcatgaaattcttcaccgaagatgctacttcatcacaaattagtaacatcctttcccctcatatagttgatatggtttgagtgtactgagcactaacaaatgcagctcatgaaaataaggcccttgattttcgtcatagaacaagagcggctattttaattgcagcactcgtgtgaaaataaatctactctgcatgccggggattgaggcgactgaagtgtgagccttcagctgcacgtagttggccatccaaggaacctagtcaggctgatttcagcaagaggcgcagcctacgactgaacttggttttattttttgtggttttgattcttcacttcttccttgtgttctgccttcactgcatcttattggtagtggtcgaataatgcttctgtatgtggtaaatcattcttggtacaatggctctcttttttctgctaaaaaaaaaaaaaaaaaaaactcgagatagttctctctctcctcgtgc

SEQ ID NO: 2178 - DNA, 1076 bp, Zea mays
  Clone ID: PAT_MRT4577_50592C.1
ctcgaggccggccgggacccgcccggtctccagaacagacaacccgtccttctccttcccatcggctccacacaaccagaaggttcttcgcttcactctgccctgcgccgccgccaacgctgcagccgcagttgccgcaggcgggaacttggacgtgctactcgcgactgctctcatctgttcccgcgtaggattcgttcacaatggcccgtgtgtatgtcggcaacttggatgcacgcgtgacttccggggaactcgaagatgagttccgtgtgtttggagttctgcgaagtgtttgggtcgcacgcaaaccacctggttttgcatttattgattttgacgacaggagggatgcagaggatgctattcgtgatctagatggtaagaatggatggaaagttgaactatctcgtagcaccaatggtcgtggcagtcgtgatcggcatggtggatctgagtcaaagtgctatgagtgtggtgagactgggcactttgcacgtgaatgtcgtctgcgcattggctctggaggtctaggcagtggaagacgtcgcagcaggagcaggagccgcagtcgcagccctagataccgcaggagtccgagctataatagaaggagctatagccctcgttatcgttctccaaggcgccgtactccttcaccggctcgtggacgcagctatagcaggtcgccatagtacaactgtgacaaatatgcatctccctcgttaacggagtaatgatggcagatactggtgtagcaggagcttggcctgaagcccgtgcctgattcttctctgtgtgaggacttggttcttggtttggctgtggggaacaaatttggaactgtcgtcaactgcatgacttcagttcaggtttaaaaccttatctagcttattgtgattgtcttgattatgccattaaagaacttttaagatttgtgtattatgccactaagacatattaccttctctgtgttaaaaaggcatgttctgcttaaaaaaaaaaaaaaaaagcggaaaaaaaaaaaaaaaaaaaaaaaaagtactctgcgttgttaccactgcttaagggcgaat

SEQ ID NO: 2179 - DNA, 834 bp, Zea mays
  Clone ID: PAT_MRT4577_50627C.1
ccggatcactcatcatccccatccgcacctctctccatctccctgctcctccgcctccttcttgatccagccaagccagggatcgccatgtcggactcggaggagcaccacttcgaatcgaaggccgacgccggagcgtccaagacctacccgcagcaggctggcaccgtccgtaagaacggcttcatcgtcatcaagaaccgcccctgcaaggttgtggaggtttctacctcaaagactggtaagcatggccatgccaaatgccactttgttgccatagacatattcaacgggaaaaagctcgaagatattgttccttcgtcacacaactgtgatgtgagccttcttacttcagatggcaacactaaggatgatcttagactcccaactgatgagactcttgtggcccagatcaaggaagggtttgaaagcggcaaggatcttgttgtgactgtccagtctgctatgggggaggagcagatctgcgcgctgaaggatgttggccccaagtaacttccctgccttggaatactgtatctcaaaacctaaatcgaaaaaagaagtgtatcaaggattgctacagagacatccatctggcttgagctggcttttgctatggcaaacacaagtgcagggatcgctgggtgttgcaccgtgtctgcattatgtggttacattctggaccctgtattttctatgcttttatgcccctactgtttagtattaattatcaataaatttgtttgggacggttgaattgcatgcaaaaaaaaaaaaaaaaaaaaaaaaaaaaaaaaaaaaaaaaaaaaagtactctgcgttgttaccactgct

SEQ ID NO: 2180 - DNA, 663 bp, Zea mays
  Clone ID: PAT_MRT4577_50630C.1
tcgaggtcgctcgggtcgctgcagcttatcacttatcatccgcgtttgcacctctctccatctccctgctccgccgcctccttcttgatcgagccaagtcagtgatcgccatgtcggactcggaggagcaccacttcgaatcgaagggcgacgacggagcgtccaagacctacccgaaggaggctgccaccgtgcgtaagaacggcttcatcgtcatcaagaaccgcccctgcaaggttgtggaggtttctacctcaaagactggtaagcatggccatgccaaatgccactgtgctgccatagacatattcaacggggaaaagctcgaagatattgctccttcgtcacacttttgtgatattccacatgtgaaccgtactgagtaccagctgattgatatatcagaggatggatttgtgagccttcttacttcagatggcaacgctaaggatgatcttagactcccaactgatgaaactcttgtggtccagatcaggcaagggtttgaaagcgcgaaggatcttgttgtgactgtccagtctgctatgggggaggagcagatctgcgcgctgaaggatgttgcccccaagtaacttccctgccttgtaaatctcagaagctatatcgagaaaagaagtgtatcaaggattgctacagagacgt

SEQ ID NO: 2181 - DNA, 711 bp, Zea mays
  unsure (1)..(711): unsure at all n locations
  Clone ID: PAT_MRT4577_50631C.1
gtaccctcgggactcgccggggacacttatnatggcataaacgaacctctgtccatatccctgctactcagactgcttcttgagccaaccaagaccagcgatcgccatgacggacggggaggagcaccacctgggcaacgaacgccgacgcgcggaacgtccaacacctaccacaagaaaggtgcgaccgcgcgcaggaacgggtccattgtgatgaagaaccggacctgcaagggtgcggaggcttctacctgaaaaactggtaagcatggccatgccaaatgccactttgttgtcatagacatattcaacgggaaaaagctcgaagatattgttccttcgtcacacaactgtgatattccgcatgtgaaccggactgagtaccagctgattgatatattagaggatggattcgtgagccttcttacttcagatggcaacactaaggatgatcttagactcccaactgatgagactcttgcggcccagatcaaggaagggcatgaaagcggcaaggatcttgttgcgactgtccagtctgctatggaggaggagcagatctgcgcgctgaaggatgttgcccccaagtaacttgcctgacttggaatactgtatctcagaacctaaatcgaataaagtagtgcatcaaggattgctacagagacatccatctggcttgagctggctgttgctatggcacacacaagtgca

SEQ ID NO: 2182 - DNA, 2623 bp, Zea mays
  unsure (1)..(2623): unsure at all n locations
  Clone ID: PAT_MRT4577_50635C.1
gagaacaaataaacgtgacatacaaaataatgcgccgaattgaggcagaggagtggtctcttgatgcgtctgaaatagttatcgctagcacaaggcaagaaatagaagaacaatggaacttgtatgatggttttgaagtcatgcttgcgaggaagctccgtgcgttagtcaagcgtggtgctaactgttatggtcgttatatgcctcgtatggttataattcctccaggagttgaattcggccaattgattcatgattttgatatgtatggagatgaagataaccaatctccagcctcggagccatctatttggtttgagataatgcggttcttcacaaatcctaggaaacctatgattttggctattgctcgtccatattctgaaaagaatattgcaacacttgtgaaggcatttggtgaatgccatccgttgagggaacttgctaaccttacactgataatgggcaaccgtgaggctatttccaaaatgaacaaaatcagtgcagctgttttgacatcggtgcttacattgattgatgaatatgatttatatggtcaagtggcatacccaaagcttcacaagcactctgaagttcctgatatttatcgtttagcagcaagaacaaagggcgcttttgtaaatgttgcttattttgaacaatttggtgtcaccttgatagaggctgccatgcacgggttgcctgttattgcaacaaaaaatggggctcctgttgaaatttatcaggttctggaaaatggtctccttgttgatccccatgatcagcatgcaattgcagatgccctctataagatgctttctgaaaagcagttttggtcaagatgtcgagaaaatggattgaaaaatatacaccaattttcttggcctgaacattgcaagaattacttgtcaaggatatcaagtcttggtccaagacatcctgctttcgcatgcaaagaagaccacaaggtgcctgtgaagtgcaggaagcatatatctatcattgctgtagactctgttaacaaggaagatttaattcaaattatcagaaactctgttgaggctacacgcactggaactatgtcaggttctacaggttttgtgctgtcgacttcactgacaatagcagagctacagtctgtaatagtacgcacaggcatgctccctactgactttgatgcctttatatgcaatagtgggagcgatatatattatccattacagtctagtgatgtgccaagcaattcccgtgttacatttgcattggaccataactaccgatcacatattgagtatcgttggggtggagaaggtttaaggaagtacttagttaagtgggcctcttcagtagtagaaagaagggggagaacctgaaaagcaagtcatctttgaagattcggaacactcttcaacatattgtcttgcatttaaagtgattaatccaagtcatttgcctcctttgaaggagctgcaaaaattgatgagaatccagtcactgcgttgtcatgcactgtataaccatggcgccaccaggctatctgtaattccaattcatgcatcgcgatctcaggctctaaggtatttgtctatttgctggggcatagagttgccagatgctgtggtcattgttggtgaaactggtgattctgattacgaggaactgtttggaggtcttcacaagacagtcatccttaagggtggattcaacactcctgccaataggatccatacggttagaaggtaccctttacaggatgttgttgctcttgatagctcaaatatcattgcaattgagggatttagcactggtgacatcaggtctgctatgcaacaacagcttggtatacccacacgatgacaccaagtgcgatctattttgttattaatagaaagaaagaaacagacaatagaaatatacgatacaaatacttagtttccattctatcggaaatgtccgattttgcctgccagtcatttaatgtatgtgtgccagtgtgtggtctctgcatgggttatgaatgacattcccttggatccatgcactggagattttttggattgaagagcttgttaatggatacatccaactgtacagacggaacaaatttgtatcggcgctagcggctcgaggtcgtttaatgtatgtgtgccagtgtgtggtccctgcatgggttatgaatgacattcccttggatccctgcactggaaatttttggagcgaagagcatgtcaatggatacatccagctgtacagaagaaacaaatttgttcaaatgttgatagtgaaaacattttatggaagcattttcagcaacaaagcttccaatatacaaagctcacactttcacatcacttcaaagtggagcttatgattacagagcaaccctctaaaccttttttttccctttctaagaggggtgtcttatatttgtgtaaatactgtgtagcaccaatgcaccatcttgttttcttgtttcctgaattaatatgcgtaagcgtttactctctttctatatgtatgtccaccagcttgttttgtggtgacatcatgaacacgtttatgcatctgctgagtattggttatgaaattatagaagccagcgtggtgctcccaantatgcctt

SEQ ID NO: 2183 - DNA, 642 bp, Zea mays
  unsure (1)..(642): unsure at all n locations
  Clone ID: PAT_MRT4577_50641C.1
gtcggtcggttctccaagctgatcacttataatccccatccgcacctctctccatctccctgctcctccgccttcttcttgagccaaccaagccaggtgatcgccatgtgtggactcaggaggagcaccacttcgaatcgaaggccgacgccggagcgtccaagacctacccgcagcagggtggcaccggccgtaagaacggcttcatcgtcatcaagaaccgcccctgcaaggttgtggaggttctctacctcaaagactggcaagcatgggcatgacaaatgccactttgtggccgtagatatattccacgggaaatggctcgaagatattgttccttcgtcacacgactgtgatattccgcatgtgaaccgtactgagtatcagctgattgagatatcagaggatggatttgtgagccttcttacttcacatggcgacactatggatgatcttagactcccaactgatgagactcttgtggaccagatcgaggaagggtttgaaagtgtcaaggatcttgctgtgactgtccagtctgctatgaggcaggagcatatctgcgcgctgaaggatgttgtccccaagtaacttcactgccttgncatactgtatctcagaacctacatcgaaaaaagaagt

SEQ ID NO: 2184 - DNA, 1217 bp, Zea mays
  unsure (1)..(1217): unsure at all n locations
  Clone ID: PAT_MRT4577_50802C.1
cctcgaggccggccggtaaagatacctactcgacctacaccagcccttttcggccggctactgcccatgggatccgtgagcccctcacaccgcttacttgactcctcccgaacttccacatctctgctctgccttcccagtctcccatccctgaaaacctcacaaaacccctcgctccccaccaccccgccgcgccgccgcctgtaccagctgcgtcaagatgagtcggcaccctgaggtgaagtgggctcagaggatcgacaaggtttacatcactgtacagttacctgacgcaaaggatgctaaggtcaatttggatccagatggtgtcttcacattctctggcagtgctggtacaaacttgtatgaattgaaactagatctgaatgacaaagtaaacgttgaggctagcaaaataagtgtgggtgtcaggtccatattctgtatcgtagaaaaagctgaagccaaatggtggaagaaacttgttcgagatgatcaaagggcacctcactttgtgaaagttgattgggacaaatgggttgatgaagatgatgatggtgctgatatcaacatggatgggatggacttctcgaatttcggtggcatgggtggtatgggtggcatgggtgatatggctggtatgggtggtcttggtggcatgggtggtatgggtggtatgggcggtatgggaatggatgatttcgaagatgagagtgatgaagaagaagtgtcgaaacctcaagctgcggacaatgctgttgaggctgaggagacggagtcagcggaagccaagactgaggcggctcagagcagttgaagatgcttcatgatctaagctagttgtatcctcatgttaattctgctgaatcggaggacaaacctctacgttgtggcactggcaaatcccagtgacttgccctaaaatttacgttctgtctttacatgggcatcctagtgttgtgctcatcacattattgatattgtttctgtgatgcttcctttggtcgacaatcatgtgctggagtttggtttactggattgcttttcttctgtggtttttggctttatacctgtatggaaagctggagccgcaaatggagaaatagggacgacgtgtatttttgttaaaaagcatgcctctgcataaaaaaaaaaaaaannaagtcctctgcgttgttaccactgcttaagggcgagaaccagcacactggcggccg

SEQ ID NO: 2185 - DNA, 591 bp, Zea mays
  Clone ID: PAT_MRT4577_50804C.1
tcgaggtcttgccggaaaaaaaaaactcagaaaacctacaaaaaccctcgctccccacaacccgccgccgcccacgccgccgcctgtaccagcggcgtcaagatgagtcggcaccctgaagtgaagtgggctcagaggatcgacaaggtttacatcactgtacagttacctgatgccaaggacgctaaggtcaatttggaaccagatggtgtcttcacattctctggcagtgttggtacaaacttatatgaattgaaactagatctgaatgacaaagtaaacgttgaggctagcaaaataagtgtgggtgtcaggtccatattctgtattgtagaaaaagctgaggccaaatggtggaagaaacttgttcgagatgatcaaagggcacctcactttgtgaaagttgattgggacaaatgggttgacgaagatgatgatggtgctgatgtcaacttggatgggatggacttttcgaattttggcggcatgggtggtatgggtggcatgggtggtatgggtgatatggctggtgtgggtggtcttggtggcatgggtggaatgggcggtatgggtggtatgggaatggatgat

SEQ ID NO: 2186 - DNA, 1084 bp, Zea mays
  unsure (1)..(1084): unsure at all n locations
  Clone ID: PAT_MRT4577_50808C.1
cctgaaaacctcacaaaaccctcgctcgctccccaccacaccgccgcgccgccgcctgtaccagctacgtcaagatgagtcggcaccctgaggtgaagtgggctcagaggatcgacaaggtttacatcactgtacagttacctgacgcaaaggatgctaaggtcaatttggatccagatggtgtcttcacattctctggcagtgctggtacaaacttgtatgaattgaaactagatctgaatgacaaagtaaacgttgaggctagcaaaataagtgtggggggtcaggtccatattctgtatcgtagaaaaagctgaagccaaatggtggaagaaactcgttcgagatgatcaaagggcacctcactttgtgaaagttgattgggacaaatgggttgatgaagatgatgatggtgctgatatcaacatggatgggatggacttctcgaatttcggtggcatgggcggcatgggtgatatgggtggtcttggtggcatgggtggtatgggtggtcttggtggcatgggcggtatgggaatggatgatttcgaagatgagagtgatgatgaagaagaagtgtcgaaacctcaagctgcggacaaggctgttgaggctgaggagacggagtcagcggaaaccaagactgaggcggctcagagcagttgaagatgcttatgatctaagctagattgtatcctcatgtttaattctgctgaatcggaggacaaaccttacatttgtggtgctggcaagtcccagtggcgtgccatgaaaatttacgttccgtcttttaactgggtatccgagtgtgtgctcagcatattatggatattgtttccgtaatgcttcctttggtcgccaatcatgtgaagagtttgttttntgctatgtactttcttatagtcttgggtactactgaaggaaattaactagggtgacacacaaattgatacatgcacaagacatgatgtcaatatgggtagatttgttttaagtgtttaacattcccaagtttagtggacagtgatgaaccatgatctttgtgaaccacagacaccggcaagagctttgttacttattaatg

SEQ ID NO: 2187 - DNA, 1160 bp, Zea mays
  Clone ID: PAT_MRT4577_50812C.1
cggacgcgtgggcaggcctatcgtacctacgaggctacgaccatatcccagcccatttcgggatcagtcacttcaacggttcgaacttccatatctctcctctgctctcactctcctcccacccactccagaaaacctcacaaaaaccctcgctccccacaacccgccgccgcccacgccgccgcctgtaccagcggcgtcaagatgagtcggcaccctgaagtgaagtgggctcagaggatcgacaaggtttacatcactgtacagttacctgatgccaaggacgctaaggtcaatttggaaccagatggtgtcttcacattctctggcagtgctggtacaaacttatatgaattgaaactagatctgaatgacaaagtaaacgttgaggctagcaaaataagtgtgggtgtcaggtccatattctgtattgtagaaaaagctgaggccaaatggtggaagaaacttgttcgagatgatcaaagggcacctcactttgtgaaagttgattgggacaaatgggttgacgaagatgatgatggtgctgatgtcaacttggatgggatggacttctcgaattttggcggtatgggtggtatgggtggcatgggtgatatggctggcttgggtggtcttggtggaatgggtggtatgggaatggatgattttgaggatgatagtgatgaagaagaagtatcgaaacctcaagctgccggacatgctgctgaggccgagaagactgagtcggcggaagccaagactgagtcggctcagagcagttgaagatgcttccgacatgatctaaactagttgtatcgtcaagttaattctgctgaatcggtggacaaacttctacgttgtggcactggccgatcccagtgacttgccctaaaatttacgttctgtctttacatgggcatcctagtgttgtgctcatcacattattgatattgtttctgtgatgcttcctttggtcgacaatcatgtgctgggagtttgtttactggattgcttttcttctgtggtttttggctttatacctgtatggaaagctggagccgcaaatggagaaatagggaacgacgtgtatttttgttctttgggggtacttgtgcacatttgtttggttccttaccgtataatactctaaattttaagct

SEQ ID NO: 2188 - DNA, 1160 bp, Zea mays
  Clone ID: PAT_MRT4577_50814C.1
ccacgcgtccgaccgcttacttgactcctcccgaacttccacatctctgctctgccttcccagtctcccatccctgaaaacctcacaaaaccctcgtttgctccccaccaccccgccgcgccgccgcctgtaccagctgcgtcaagatgagtggcattgtcttctgtagtcggcaccctgaggtgaagtgggctcagaggatcgacaaggtttacatcactgtacagttacctgacgcaaaggatgctaaggtcaatttggatccagatggtgtcttcacattctctggcagtgctggtacaaacttgtatgaattgaaactagatctgaatgacaaagtaaacgttgaggctagcaaaataagtgtgggggtcaggtccatattctgtatcgtagaaaaagctgaagccaaatggtggaagaaactcgttcgagatgatcaaagggcacctcactttgtgaaagttgattgggacaaatgggttgatgaagatgatgatggtgctgatatcaacatggatgggatggacttctcgaatttcggtggcatgggtggtatgggcggcatgggtggcatgggtgatatggctggtatgggtggtcttggtggcatgggtggtatgggtggtcttggtggcatgggcggtatgggaatggatgatttcgaagatgagagtgatgatgaagaagaagtgtcgaaacctcaagctgcggacaaggctgttgaggctgaggagacggagtcagcggaaaccaagattgaggcggctcagagcagttgaagatgcttatgatctaagctagattgtatcctcatgttaattctgctgaatcggaggacaaaccttacatttatggtgctggcaagtcccagtggcgtgccatgaaaatttacgttccgtcttttaactgggtatccgagtgtcgtgctcagcatattatggatattatttccgtaatgcttcctttggtcgccaatcatgtggtgaagagtttgttttactggattgctttatttgttttttggtcgccaatcgaatggtctggtcaaaaggactagtggcgacgtgattttgttatttggttctctacccagcaatacaactcccacggtaaagtgctacagaggagcaccttcaaaaaaaaaaaaaaaaaaaagg

SEQ ID NO: 2189 - DNA, 1000 bp, Zea mays
  Clone ID: PAT_MRT4577_50828C.1
cattgggtacctcgaggccggccgggccgggaagctatagctagccagccatcctactgtcacacacacacacacacacagacaagtggtttccaaagccaagtgtgtgtactagcaaccagctagctcgggcggcagcaggcagccatcatgtcggaggagaagcaccaccacttcttcaaccaccacaagaaggacgaggagcagcccgccggcgagtacgggtactccgagaccgaggtggtcaccgccaccggcgagggcgagtacgagaggtacaagaaggaggagaaggagcacaagcacaagcagcacctcggcgaggccggcgccatcgccgccggcgccttcgcactctacgagaagcacgaggcgaagaaggaccccgagcacgcgcacaggcacaagatcacggaggaggtcgctgccgcggcggccgtcggcgccggcggctacgtattccacgagcaccacgagaagaagaaggaccacaaggacgccgaggaggccagcggcgagaagaagcaccaccacctcttcggctgaccgtagtaccggccggcgcgcgaccgagctagctagctccggcgcacacaaccacacacctgtttaattctgtactgcatgcgtgtgtaatttgatggttcacaataatgagtccctctccggaccttggtagctgcttgcttgtggtgagtgagagtgtgagactgagggagaagaggtggtgggcgtggggctacgtcgagagaggcgtgttcctgtaatcctgtactcgcttcgttttctctgcatgcgtctataattgtgttcaataataagtgagagcggtgtgatgtgtggctccccttgtcaggctcatgtttatccgtattgaatcctggcaccatgcatgactgaggatctggatgtctatgaagcaccgtgtatctatcatcacttttgcaaaaaaaaatattcttatatttcttgaaataaaaaaaaaaaaaaaaaagcggcc

SEQ ID NO: 2190 - DNA, 635 bp, Zea mays
  unsure (1)..(635): unsure at all n locations
  Clone ID: PAT_MRT4577_50839C.1
ggtacccccgnagtctcggccgggccggggacacatattattgttgaccactagcagcatcacaaagcacaatagtgcaccaacaacggcggccaacaattatgcctccttatgctccttggtgctttcgcaaggggtgctacggcgaccattctcccgcaatgctggtaagctgctatagattcccttcttcccccgtacctctcaccagcggtgtcttcggtatatgaagaccccattgttcaaccctactggatgcaacagggggtcaccgctggcatcttaccattatcacccttgttcctccaacaatcatcagccctattacaacaggtaccttcggtgcatttattggcgcaaaacatcatgggaccacaactacaacaacttgtgctagcaaaccatgttgcctactgtcagcaacaggaggttcttgcatgttaccaactacctgcattgaactctgcttcttatttgcaacaacaacaactaccattctgtcaggtacctgctgcctacccccagcaatttcttgcatgtacccaactggctacatagaacactcctgctgatttacagcagcaacaactactaccattcatgcacctagttggtgtgagcactgctaccttctt

SEQ ID NO: 2191 - DNA, 674 bp, Zea mays
  unsure (1)..(674): unsure at all n locations
  Clone ID: PAT_MRT4577_50881C.1
ttttttttttnnttttgatctcgattttaacatttcattactgcaaagaaagatacatcttgatcttgatttcccagcactgctgggacacatgattccacccaataacgaagcacatcagagatattttaatctgataactctctacatcaagccaagcaaggcagagggaactgaggaaacgccaccggcagccgctgcatacgagggaagagatgcgctcaaccaccgaacccgtacagagtgcggccctggcgcttgagggcgtacacaacatccatggcggtgacggtcttgcggcgagcgtgctcggtgtaggtgaccgcgtcgcggatgacattctcgaggaagatcttgagcacgccgcgggtttcctcgtagataagcccggagatacgcttcacgccgcccctcctcgccagcctccggattgccggcttcgtgataccctggatgttgtcgcggagaaccttacggtggcgtttcgcgccgcccttgcccagccccttgccgcccttgccgcgcccatacatcgccgccgagttggacgaagacagtggtgtgctacaagaagattgtgggatttgaactcgccgcgcctggggtgcctaatgagtgagctaactcacattaattgcgttgcgctcactgcccgctttccagtcgggaaacct

SEQ ID NO: 2192 - DNA, 624 bp, Zea mays
  Clone ID: PAT_MRT4577_50884C.1
cattgggtacctcgaggccggccgggacagagtaccgcggcgggttcaatctcacaatcttcttgtagcacaccactgtcttcgtccaactcggcggcgatgtctgggcgcggcaagggcggcaaggggctgggcaagggcggcgcgaaacgccaccgtaaggttctccgcgacaacatccagggtatcacgaagccggcaatccggaggctggcgaggaggggcggcgtgaagcgtatctccgggcttatctacgaggaaacccgcggcgtgctcaagatcttcctcgagaatgtcatccgcgacgcggtcacctacaccgagcacgctcgccgcaagaccgtcaccgccatggatgttgtgtacgccctcaagcgccagggccgcactctgtacgggttcggtggttgagcgcatctcttccctcgtctgcagcggctgccggtggcgtttcctcagttccctctgccttgcttggcttgatgtagagagttatcagattaaaatatctctgatgtgcttcgttattgggtggaatcatatcgagatcaagatgtatctttctttgcagtaatgaaatgttaaaatcgagatcaaaagaaaaaaaaaaaaaaaaaagcggcc

SEQ ID NO: 2193 - DNA, 594 bp, Zea mays
  Clone ID: PAT_MRT4577_50885C.1
accagagtcatcgcggcgagttcaatcccacaatcttcttgtagcacaccactgtcttcgtccaactcggcggcgatgtctgggcgcggcaagggcggcaagggcctgggcaagggcggcgcgaaacgccaccgtaaggttctccgcgacaacatccagggtatcacgaagccggcaatccggaggctggcgaggaggggcggcgtgaagcgtatctccgggcttatctacgaggagacccgcggcgtgctcaagatcttcctcgagaatgtcatccgcgacgcggtcacctacaccgagcacgctcgccgcaagaccgtcaccgccatggatgttgtgtacgccctcaagcgccagggccgcactctgtacggattcggtggttgagcgcatctcttccctcgtctgcagcggctgctggtggcgcttcctcagtttcctctgccgtgcttggcttgatgtagagagttatcagattaaaatatctctgatgtgcttcgttattgggtggaatcatgtgtcccagcagtgctgagagctcgagatcaagatgtatctttctttgcagtaatgaaatgttaacattgattggct

SEQ ID NO: 2194 - DNA, 661 bp, Zea mays
  Clone ID: PAT_MRT4577_50886C.1
ccggccgggaccagaggcatcgcggcgtgttcaaatcccacaatcttcttgtagcacaccactgtcttcgtccaactcggcggcgatgtctgggcgcggcaagggcggcaaggggctgggcaagggtggtgcgaaacgccaccgtaaggttctccgcgacaacatccagggtatcacgaagccggcaatccggaggctggcgaggaggggcggcgtgaagcgtatctccgggcttatctacgaggagacccgcggcgttctcaagatcttcctcgagaatgtcatccgcgacgcggtcacctacaccgagcacgctcgccgcaagaccgtcaccgccatggatgttgtgtacgccctcaagcgccagggccgcactctatacggattcggtggttgagcgcagctcttccctcgtttgcagcggctgctggtggcgcttcttccgtttcctctgccgtgcttggcttgatgtagagagttatcagattaaaatatctctagtgtgtttcgttattgggtggaatcatgtgtcccagcagtgctgagagctcgagatcaagctgtttctttctttgcagtaatgaaatgttaacattgattggctataagcgctttggaactgttgaaactttgctattgagcccgctgttatggggttatt

SEQ ID NO: 2195 - DNA, 1366 bp, Zea mays
  Clone ID: PAT_MRT4577_50888C.1
ggccgcttttttttttttttttttcggctgcaaaacgttgcccaggaatcatttcaattatcgaacgataagattggattacattcgaaacaacttcaagaatactactaacaatagtccaacacgtcacagacaaggaactaaacgaaataaccctaacaacaaacaggcatccacgacagcaaggagaagaggcatccagcctagcctccgaagccgtagagggttcggccctggcgcttgagcgcgtagacgacgtccatggcggtaacagtcttgcggcgtgcgtgctcggtgtaggtgacggcgtcgcggatgacgttctcgaggaagatcttgaggacgccgcgggtctcctcgtagataagccccgaaatgcgcttcacgccgcccctccgagccagcctacggatcgcgggcttggtgatgccctggatgttgtcacggagcaccttacggtggcgctttgctccgcccttgcccagacctttgccgcccttgccgcgccccgacatcgtcgctgccggtgccctgtctttcacgctctcctcgcctcgaagaaaatgggggatttttttgactagttctagatcgcgagcggccgctcgcgatctagaactagttcaaatctcacaatcttcttgtagcacaccactgtcttcgtccaactcggcggcgatgtctgggcgcggcaagggcggcaaggggctgggcaagggcggcgcgaaacgccaccgtaaggttctccgcgacaacatccagggtatcacgaagccggcaatccggaggctggcgaggaggggcggcgtgaagcgtatctccgggcttatctacgaggaaacccgcggcgtgctcaagatcttcctcgagaatgtcatccgcgacgcggtcacctacaccgagcacgctcgccgcaagaccgtcaccgccatggatgttgtgtacgccctcaagcgccagggccgcactctgtacgggttcggtggttgagcgcatctcttccctcgtctgcagcggctgccggtggcgtttcctcagttccctctgccttgcttggcttgatgtagagagttatcagattaaaatatctctgatgtgcttcgttattgggtggaatcatgtgtcccagcagtgctgggaaatcaagatcaagatgtatctttctttgcagtaatgaaatgttaaaatcgagatcaagatgtatctttctttgcagtaaagaaactttgctattgcgcccactgttaggctaatcacaatggaggtttcatgaggtgtttcatgtattaattagcctgctatattagctattttgatgatgtgtcatatcatttaaaaaaaaaaaaaactcgaggggggggccggt

SEQ ID NO: 2196 - DNA, 883 bp, Zea mays
  Clone ID: PAT_MRT4577_50890C.1
gattcattaatgcagctggcacgacaggtttcccgactggaaagcgggcagtgagcgcaacgcaattaatgtgagttagctcactcattaggcaccccaggctttacactttatgcttccggctcgtatgttgtgcgcggcgagttcaaatcccacaatcttcttgtagcacaccactgtcttcgtccaactcggcggcgatgtctgggcgcggcaagggcggcaaggggctgggcaagggcggcgcgaaacgccaccgtaaggttctccgcgacaacatccagggtatcacgaagccggcaatccggaggctggcgaggaggggcggcgtgaagcgtatctccgggcttatctacgaggaaacccgcggcgtgctcaagatcttcctcgagaatgtcatccgcgacgcggtcacctacaccgagcacgctcgccgcaagaccgtcaccgccatggatgttgtgtacgccctcaagcgccagggccgcactctgtacgggttcggtggttgagcgcatctcttccctcgtctgcagcggctgccggtggcgtttcctcagttccctctgccttgcttggcttgatgtagagagttatcagattaaaatatctctgatgtgcttcgttattgggtggaatcatgtgtcccagcagtgctgggaaatcaagatcaagatgtatctttctttgcagtaatgaaatgttaaaatcgagatcaagatgtatctttctttgcagtaaagaaactttgctattgcgcccaaaaaaaaaaaaaaaaaaaccattcccaaaccctccgtcgacccctctacaccggcgatcggcggcgaaccgatggggtgggcggacccggttccctggggggcggtgtgcttcttttgct

SEQ ID NO: 2197 - DNA, 321 bp, Zea mays
  Clone ID: PAT_MRT4577_51028C.1
gtccgaatcccggtcgaccacgctccgcactggcacctaaaaggcccattagttcccacaatgcagccaaaatatttgcctcttatgctcctggcctttctgaagggctgttacgggaccattttcccgaaatgctccaggctctatagcttccctcttccccgaacctttaccagcggggcttgggatgggaaaccccaattctcaaccctaaggatccacaggcaatcacagctggcatcttaccttatcacccttgttcctccaccaatcatagccctattacatcagttaccttggtgccattattggcacaaaaca

SEQ ID NO: 2198 - DNA, 322 bp, Zea mays
  Clone ID: PAT_MRT4577_51197C.1
attaactcaaaaaaaaagggggggcattcttttacagaatgggttcacagatatttctccatacagacatgctcatcgtggacgacccagctgaccacctacagctgcatacttacttattcagactgatccagcatgtagcaacatctgaagaaacatacttacagaccaccaaccttcataacaataacccagctttgctgcttcacagaataaccaatcgacaaccacgaaattgcgacaatttcacatacacaactcagaaccatagcgacaccacgagcccggattactcattaagcactcccgacttctcctccat

SEQ ID NO: 2199 - DNA, 325 bp, Zea mays
  Clone ID: PAT_MRT4577_51313C.1
gcgcccacacgtccgcctccccctccggttcgtgttcgggttcgtgaggttctcctgagttcgggttcgtgtgaaatcggatcgagatggcggcatccgatgttgagtaccgctgcttcgtctgcggcctcacctgggccacggacgaccactccctacacaactccttcagcacctactgcgaggtcctctagtccaagatcatcctttatctggagacgcaaaagtcccgcagcttctgcttcttcaccttcttcactgacgatgcgattcataacgccatctaaggcattaacggcaatgagctttacagacgtaacatcac

SEQ ID NO: 2200 - DNA, 609 bp, Zea mays
  Clone ID: PAT_MRT4577_51322C.1
tctccatcttgtgggatttatctcaccgcgtctatcactcaaacacgctccaatccactctacactctctcccaaccaacaacctcccccacacacatccatcaacatgactggtcgcggcaaaggtggcaagggtctcggaaagggtggtgccaagcgccaccgcaagattcttcgtgacaacatccagggtatcaccaagcccgctatccgtcgtctcgctcgtcgtggtggtgtcaagcgtatctcagccatgatctacgaggagactcgcggtgttctcaagaccttcctcgagggtgttatccgtgacgccgtcacctacactgagcacgccaagcgcaagaccgtcacttctctcgacgttgtctacgctctcaagcgacaaggccgcaccctgtacggtttcggtggttagagtgtttttcttcacggttttcatgttacgacttttgccgacttgttcagtccatggtcggcttcggtgctcggtgggatggtcatagccttgtacagtatactaaggctcggagttcacggttatatcagtcggtttctgctttgcatggaatgataccataatactccaaaaaaaaaaaaaggccccta

SEQ ID NO: 2201 - DNA, 317 bp, Zea mays
  Clone ID: PAT_MRT4577_51573C.1
cgttaagaggaacttacaataaagcctgacgggggtaacaacttccatcgatccgcagtccatgctgtttgatgcatgggtttggtcaaaccgaggatgaacacagtactaacaactggcacaaagcgaccttgcaatcaaaaacacagatggggaacaacaaacacgacgcgaacgaaaataaaccctctggactagggtaaacatcacggtcgcgaacaggataacttggccgagcgggccccaccgtttagttgctccagatcacgtcggagttgacgtagccgtcgtcactgttgaaaccgccgtaagccggc

SEQ ID NO: 2202 - DNA, 324 bp, Zea mays
  Clone ID: PAT_MRT4577_51599C.1
aaaatgcaacatttatgttttattgtttatagaggtcaacattattgtcatattaagagactgttaaaatttgccagacctgcaggacaacatgtttttttttacgtgcagttacagggagaagagtaaggctaacagtaacgcctttagggtgaggggccaaggggaaaatacgaacaatgaggccaaataaacagcagtgcagctaggcgggtagcgcacaatacacatgaactggcgatttgacaggagtttttctcgatgttcacggccggtcggtcgtatatttttgatgtgatgataggtgcgggcctcacaggtact

SEQ ID NO: 2203 - DNA, 3791 bp, Zea mays
  Clone ID: PAT_MRT4577_51643C.1
cattgggtacctcgaggccggccgggaattgtgggcctcggaccctctctttgttcttccgtttccaccctctctctcgtggttctcccgtgctctgtgtccctagcggcgacgactgggcgatcgccgccgccttaagccaggtgctcaggtctgccacttggcacttcgccggcgacgagcacctaacagagagatggctggtggttttcgagtactgcatcttgtgaggccatttctggctttcttgccagaagtacagagtgctgataggaaaataccattcagagagaaagtgatctacacggtcatttctctcttcatttttctggtctgcagccagctcccactctatggcattcattcaactactggcgctgaccctttctactggatgcgtgttattcttgcatcaaaccgtggtactgttatggaactgggtatcactccaattgtaacatctggaatggtgatgcaacttctagtgggatcaaagattattgaagttgacaacagtgtgagggaggatcgtgctctgctaaatggtgcgcagaagttgcttggtatccttattgccattggagaagccgtggcgtatgttctctctggaatgtatggcagtgtgagccaacttggaactgggaatgctatcctcattatacttcagcttttctttgctggtatcattgtcatctgtctagatgaactcctacagaaaggctatggtttgggatctggcatctctctgttcattgctacgaatatctgtgagaatatcatctggaaggcgtttagcccaacaaccatcaacagtgggcgtggtgctgaatttgaaggggcagtcattgcattgttccatctattgattactcgcacagataaagtccgtgctctacgcgaggctttctaccgtcagaatcttccaaatgtgaccaatttacttgctactgtattggtcttcctcatagttatctatttccaaggtttccgtgctgtgcttccagtgaggtcaaagaatgcccgtggtcaacaaggctcatacccaatcaagttgttctatacttccaacatgcccatcattctgcactctgcactgattaccaacctctatttcatatcccagcttctctacaggaaatacaggggaaacttccttggtaatcttcttgggaaatggaaggaatctgagtactctggccattctgttccggctggtggtcttgcttactatgtgactgcgccatcaagcttggctgatgttctggcaaatccagtccatgcattgttctatgtggtctttatgctgtcagcctgtgctctcttctcaaagacatggattgaagtttctggttcatcagcgaaggacgttgctaagcagctgaaggagcaacaaatggtgatgccaggccatcgtgagtcaaacctgcaaagggaactgaacagatacatcccaactgctgcagcatttggaggagtgtgcattggcgcgctaactgtcctagctgatttcatgggcgcaattggctcaggaactggcattctgctcgctgtcactatcatataccagtactttgagacattcgagaaggaaagggcaaccgagcttggtttctttggtttctaatcttcgtcgctggggtaaaagactgaatcttcctgcaagtgacagtaaatgcttggccggctgtttatgtttgtaattggagagcttatagtcagtttaggttgcgggctaatttacactgggaaatttgtagcaggttctgcatgcgtttttggggccaggatgggcattaagttgtgctcaattataaccacggtcatcatctcttgggattttccgttctcctgtattgactatagaattttggatcaattttgccgtcttgaactgaaaaaaaaaaaaaaaagtttccaccctctctctcgtggttctcccgtgctctctgtccctagcggcgacgactgggcgatcgccgccgccttaagccaggtgctcaggtctgcctcttggcacttcgccggcgacgagcacctaacagagagatggctggtggttttcgagtactgcatcttgtgaggccatttctggctttcttgccagaagtacagagtgctgataggaaaataccattcagagagaaagtgatctacacggtcatttctctcttcatttttctggtctgcagccagctcccactctatggcattcattcaactactggcgctgaccctttctactggatgcgtgttattcttgcatcaaaccgtggtactgttatggaactgggtatcactccaattgtaacatctggaatggtgatgcaacttctagtgggatcaaagattattgaagttgacaacagtgtgagggaggatcgtgctctgctaaatggtgcgcagaagttgcttggtatccttattgccattggagaagccgtggcgtatgttctctctggaatgtatggcagtgtgagccaacttggaactgggaatgctatcctcattatacttcagcttttctttgctggtatcattgtcatctgtctagatgaactcctacagaaaggctatggtttgggatctggcatttctctgttcattgctacgaatatctgtgagaatatcatctggaaggcgtttagcccaacaaccatcaacagtgggcgtggtgctgaatttgaaggggcagtcattgcattgttccatctattgattactcgcacagataaagtccgtgctctacacgaggctttctaccgtcagaatcttccaaatgtgaccaatttacttgctactgtattggtcttcctcatagttatctatttccaaggtttccgtgttgtacttccagtgaggtcaaagaatgcccgtggtcaacaaggctcatacccaatcaagctgttttatacatccaacatgcctatcattctgcactctgcactaattaccaacctctatttcatatcccagcttctctacaggaaatacagtggaaatttccttgttaatcttcttgggaaatggaaggaatctgagtactctggccattctgttccggttggtggtcttgcttactatgtgactgcgccatcaagcttggctgatgttctggcaaatccagtccatgcattgttctatgtggtctttatgctgtcagcctgtgctctcttctcaaagacatggattgaagtttctggttcatcagcgaaggacgttgctaagcagctgaaggagcaacaaatggtgatgccaggccatcgtgagtcaaacctgcaaagggaactgaacagatacatcccaaccgctgcagcatttggaggagtgtgcattggcgcgctaactgtcctagctgatttcatgggcgcaattggctcaggaactggcattctgctcgctgtcactatcatataccagtactttgagacattcgagaaggaaagggcaaccgagcttggtttctttggtttctaatcttcgtcgctggggtaaaagactgaatcttcctgcaagtgacagtaaatgcttggccggctgtttatgtttgtaattggagagcttatagtcagtttaggttgcgggctaatttacactgggaaatttgtagcaggttctgcatgcgtttttggggccagtatgggcattaagttgtgctcaattataaccactgtcatcatctcttgggattttccgttctcctgtattgactatagaattttggatcaattttgccgtcttgaactgaatacgtattcattactatccaaaaaaaaaaaaaaaaaaggccccta

SEQ ID NO: 2204 - DNA, 375 bp, Zea mays
  unsure (1)..(375): unsure at all n locations
  Clone ID: PAT_MRT4577_51656C.1
aagccagggatcgccatgggggactcngaggagcaccacttcgaatcgaangcccacccccgagcctccaaaacctacccgcagcaggctggcaccggccggaagaacggcttcatcntcatcaaaaaccgcccgaggagggtntngangtttctacctcaaaaactggtaancatggtcatgccaaatgccactttggtgccatagatatattcaacgggaaaaagctcgaagatattggtccttccgcacacaactgtgatattccggatgtgaaccggactgagtatcaggtggggggatatcanangatggatttggtagccttcttacttcaaatgggaacactaaggaggatcttaaactcccaactga

SEQ ID NO: 2205 - DNA, 483 bp, Zea mays
  Clone ID: PAT_MRT4577_51661C.1
tttttttttttttttttttttttttttttttttttttttttttttttttttttttttttttattcaaatggggagccggcctagagggaccaagataattagccccttaacaaacattatgggtctcatctatgccaaaggcaggcattttcatcatcaaaaattttttcttcctttaagcaaataaacatggagcatcagggcccaagggatgaacaaaacatatgggggggagccccatcacctgcaggaggaggcaggggggcccccaatggatccggggggggagcccccagctttgggggggggggggcacaaactaaagcccagtttatgccacaaaaaaagggggggggtttgatccccatagcgccctcataggaacctagcctatttggggggtctgggggaaacaaccggtatataaggtgccttgccgccaggctcacctggttgcccgcaggaaatctgatatccttgggc

SEQ ID NO: 2206 - DNA, 996 bp, Zea mays
  Clone ID: PAT_MRT4577_51897C.1
accggtaccggcacctcccggtgtcgacccacgccgtccgaaaggaagaaaaaaaagaaaaaccgacagcgagccccaagccccaaacggccaaacctccttggacacgactcgccgcacccatccccatccgccgccgctgccatggccgacgagattgacacgaggccggcctccgcgggctcccgcggccgtcctgcgcacgctaccgaggacgacgacagagaggagggcgagatcgccgccgacgccccctcgcccgccctccccgccgcgcacccgctcgagcactcgtggaccttctggttcgacaacccgcacggcaaaaacaagatggccgcctgggggagctccatccgacccattcacaccttatccaccgtagaagacttctggggcctctacaataatattcatcaccctagcaaattgatcgggggagctgatttccattgcttcaagaacaagatcgagccaaaatgggaagaccctatttgtgcgaatggtggtaaatggaccatcagctgtggaagaggaaaatctgatacgttttggctgcacactctgctggctatgattggtgaacaattcgactatggtgatgaaatttgtggcgcagttgtcagtgtgcgtgggaagcaggaaagaattgctatttggacaaaaaatgctgccaatgaagctgctcaggttagcatcgggaagcagtggaaggaacttctggactacaaggactccattggattcattgttcatgacgatgcaaagaagatggacaaaggcctgaagaaccgttacacggtttgatcctgatgctggaatcccagagagttgtagcagtagctggcccaaatgcatgctgggtggttttatctattgctgatgagttgtttaagcaagatccattcctgtattgtactccataagccacttgggtgttgctttgtattgttcaaaaaaaaaaaaaaaaaaaaagggcggcgctcgcgtcagaac

SEQ ID NO: 2207 - DNA, 1020 bp, Zea mays
  Clone ID: PAT_MRT4577_51899C.1
cattgggttggttacctcgaggcgggagccgggagacagccgccctaacggccaaacctccttggacacgactcgccgcacccatccccatccgccgccgctgccatggccgacgagattgacacgaggccggctcccgcgggctcccgcggccgtcctgcgcacgctaccgaggacgacgacagggaggagggcgagatcgccaccgacgccccctcgcccgccctccccgccgcgcacccgctcgagcactcgtggaccttctggttcgacaacccgcacggcaagaacaagatggccgcctgggggagctccatccgacccatccacaccttctccaccgtagaggacttctggggcctctacaataatatccatcaccctagcaagttgatcggcggagctgacttccattgcttcaagaacaagattgagccaaaatgggaagaccctatttgtgctaatggcggtaaatggaccatcagctgtggaagaggaaaatctgacacgctgtggctgcacaccctgttggctatgatcggcgaacaattcgactatggtgatgaaatttgtggagcagtggtcagcgtgcgtagcaagcaggaaagaatagctatctggacaaaaaatgctgctaatgaagctgctcagataagcatcgggaagcagtggaaggaatttctggattacaaggactccattggattcattgttcatgacgatgcaaagaagatggacaagggactgaagaaccgttacacggtttgatcccaaagagtagtagcatgtagggtggttctatccgattccgtagcaccttgcagagtgtgttgaaggttctctatttgctgaggagttgcttaagcataatctaacatgatgtcgaatgtattcctgtatgttccataggtcagtcacctaggtgttgtttttgtctcagctttgtgtgctatatatatatatatatatatatatatattgtatatatatatatatatatatatatatatatatatatat

SEQ ID NO: 2208 - DNA, 1158 bp, Zea mays
  unsure (1)..(1158): unsure at all n locations
  Clone ID: PAT_MRT4577_51900C.1
ctcgtgccgaattcggcagagctaccatgggcctggcctggcccatttcttgagaagagaggaggtggactccgggggggaaagggaaaggaaacctagacaagcgaggcggcggccccgcgttctccgtctccgtctccgtctccgtccgcccggcgtaaagaaaagcctctctcaccacagccgccacgccatggccgaggagaccgacaccaggcctgcctccgcgggctcccgaggccgccccgcgcccgaggacgacgacagggaggagggcgagatcaccgacctcgcctgcgctccttccccgcccgccacgcacccgctcgagcactcctggaccttctggttcgacaacccgcagagcaagtccaagcaggccgcctgggggagctccatccgccccatacacaccttctccaccgtcgaggaattctgggggctttacaataacattaatcaccctagcaaattgatcgtgggagctgatttccattgcttcaagaacaagatcgagccaaaatgggaagaccctatttgtgcgaatggtggtaaatggaccatcagctgtggaagaggaaaatctgatacgttttggctgcacactctgctggctatgattggtgaacaattcgactatggtgatgaaatttgtggcgcagttgtcagtgtgcgtgggaagcaggaaagaattgctatttggacaaaaaatgctgccaatgaagctgctcaggtaagcatcgggaagcagtggaaggaacttctggactacaaggactccattggattcattgttcatgacgatgcaaagaagatggacaaaggcctgaagaaccgttacacggtttgatcctgatgctggaatcccagagagttgtagcagtagctggcccaaatgcatgctgggtggttttatctattgctgatgagttgtttaagcaagatccattcctgtattgtactccataagccacttgggtgttgctttgtattgttcactactgtgttttttctatgtgtgggaccgcatctacagtactagttgcttgtcgaaaaaaaaaaaaaaaaaaactcgagactagttcagttgcgcttgaatctgaactaacggagtctgagcaaaaaaaaaanaaaaaaaaaaaaaaaaaaagggcggcg

SEQ ID NO: 2209 - DNA, 249 bp, Zea mays
  Clone ID: PAT_MRT4577_51967C.1
tcgggcttatcctccccctcttaccgagtgcttttcgggttagggttacttacggtttcgtggaagggcgattgcggctgctgatgcggagtaccgtacctttgtcggcgggcttgcctgggccaccaacaactgattcgctggagaatgcctttgccttctacggcgagatcctctactccaaggtcatcaccgaccgggagacggggaggtttcgcggtttatgctttgttaccttctcctccgata

SEQ ID NO: 2210 - DNA, 563 bp, Zea mays
  Clone ID: PAT_MRT4577_52020C.1
attggtccctcgaggcggcgggagtctcttcctgccacactctagcgagactcgagacgacccgatgtttccttcccgtcttcctcccacacgtccccatcaccattgctgagacgatagagagcggaatagggtaggtgctcgatgagacagatatggggggggggtcgtggcagctgcaccggatcgacaacaagatcaaccgccaagggatgttctccaaacgacggaacgggctgatgaagaaggaccacgacatctccgtgctctgcaacgcataggtcctgctcgtcgtcttctccactaaggggaatctcaacgagtactctagccaatccagcatggaaggcattcttgagcgataccagcgtttcttcatttgaagacatggcagtacttaaccctaggatggaaaaccagaaaaattggggagatgaatatgtccgaataaaatacaaacttgatgcacttcataagagtcaaaggctgctgttatgacaacaagtgagttcactgaccatagaagaactccggcaactgtcagcacaactggacagatcttt

SEQ ID NO: 2211 - DNA, 424 bp, Zea mays
  unsure (1)..(424): unsure at all n locations
  Clone ID: PAT_MRT4577_52027C.1
aacnaaaacaatgtacaagctaaaacccatttcttcaaccctaccggatccaacaggcnntcgcagctggcatcttacctttntcacccttgttcctccnacantcatcagccctattacagcagctacctttggggcgtgtattggcncaaaacatcagggcacaacanctacaacancttgtgctngcaaaccttgctgcctactctcagcaccagccgtttcttccattcanccaactngctgcgttgnactctgcttcttatttgcancaccgnctaccattcagcccgctagctgctgcctgcncccagcggtttcttccttcgcaccnactggcggcgttcggctctcctgcttatttgcgggcggggcggctgctgccattcggccggctggctggtgtgggccctgctgccttgtt

SEQ ID NO: 2212 - DNA, 338 bp, Zea mays
  Clone ID: PAT_MRT4577_52063C.1
cagctacctacatataaagcacaatagtgtaccaacaatggcagcccaaatatctagggttcttatgctccttggtatatctgcaagtgctgctaccgcgaccattttcccgcaatgctcacaagctcctatagcttcccttattcctcagtacctcttaccagcggtgtcttagatatgtgaaaacccaattcttcaaccctacaggatccaacaggcaatcgcagctgccatcttacctttatgacccttgttagtgcaacactcatcagacctattacagcacttacctttggtgcatttattgtcacaatacataagggcacaacaactacaac

SEQ ID NO: 2213 - DNA, 413 bp, Zea mays
  unsure (1)..(413): unsure at all n locations
  Clone ID: PAT_MRT4577_5207C.1
agctggactgccgcaacatcaccttcaactaggcccagtcccgcggaggtcgtggaagcgtgtgcagcggcagatgctgtggtggccgtggatgcagaggatacagcggtggctgacgccgtgatggcggatgcggctacagcggtggccgcggctactgtggttgctgcggcggctacggtggtggtggcggcggatacgtgcatggtaaccgtggcggatgctacggcaactccgacggtaactggatgaactgagcagtggtgcccgcgcggccaagttatcctgttcgctaccgtgttgtttaccctagtacaaagtgtttatcttagttcgactcgtgtttgatgntacccatctgtgttactgattgaaggtcactctgagtcagttgatagtgctatgttcaatat

SEQ ID NO: 2214 - DNA, 415 bp, Zea mays
  Clone ID: PAT_MRT4577_52121C.1
accatacgcacctctctccatctttctgctacttcttcttcttgttgatccagccaatcgagggatcttcatgttggactggggggagcaccatttcgaatcgaatgccgacgccgtagctttcaagacctaccctcagcaggctggcaccgtacgtactaaccgctttatcctcattaagaaccgtccatgtaaggctgagcaagtttctacctcacagactggtaagcatggtcatgcctaatgccactttgtctccatatatatattcaacggtaaaaagctccaagatattgttccttcgacacaaaaatgtgatattccggatgtgaactacactgagtatcagctgattgatatatcacaggatggattcgtgagcctttttactctagatggcaacactaaagatgat

SEQ ID NO: 2215 - DNA, 701 bp, Zea mays
  Clone ID: PAT_MRT4577_5234C.1
cgtatcgggttgtgcgcgggggacagggcgccacctgcgccgatgcgtgcgtttgtgttcgttgtttgtgtccgtttctgtgcctgtggcttcggttgttcctctgagcgacggcgatcgagccttaatcttagctcctgctgggctgcgcctgcgcaggctgagggggaccacagaagcattagctgggtgagcccactcaaagggggcagggaattgtgtgctagtttgaatggctgctacaaagcttcaggccctttggaaccacccggctggccccaaaaccattcatttctgggcgccaacattcaaatggggcatcagcattgccaacatagccgactttgctaaaccacctgaaaagatatcttaccctcagcaagttgctgttgcatgcactggactcatttggtcaaggtacagcttggttatcacaccgagaaactggaaccttttcagtgttaacgttgcaatggcgggtacaggcctgtatcagctttcacggaagatcaggcaagattacttatccgatgagaaagatgctgcttcacaactggaagcatagataatgacaacaggcaaagaataacggattggaaagcctgcatcctaggagtctactcttgattttttttttctgggcaagcaaagaataacggatgggtcatgtttgttttcctgttattctgaaatcgtgagca

SEQ ID NO: 2216 - DNA, 823 bp, Zea mays
  unsure (1)..(823): unsure at all n locations
  Clone ID: PAT_MRT4577_5235C.1
ccgggccgggtctctgacttggctcctccgtcgtcgccggaggcgcggcaagtgtaaaccagcccaccctcctccccgtctcctctccctccccatgcgctgttttgttctgtattgggttgtgcgcgggggacaggacgcctcctgcgccgaccgttccgttcgtgtttgtgcctgcctgtgccttcggttgttcctctgagcgacggcgagtcggcgaccgagggggaccacagacgcattagctgggtgaactctttcaaaaggggcaggtgcgctagtttgaatggctgctacaaagcttcaggccttttggaaccaccctgctggccccaaaaccattcatttctgggcgccaacattcaaatggggtatcagcattgccaacatagccgactttgcaaagccgcctgaaaagatatcttaccctcagcaagttgctgttgcatgcactggaatcatttggtcaaggtacagcttggttatcacaccgaaaaactggaaccttttcagtgttaacgttgcaatggcgggtacaggcctgtatcagctttcacggaagattaggcaagattacttgtctggtgagaaggatgctgctccacaactgcaagaatagataatgacaacacacaaagaataactgattgagaagtctgcggcctagggatcttactcttgatttttctgggcaggcaaggatatgtctcgatccaggacggggncatggtttgttttcttgttcttctgaaatcatgagcaggttaatgtgaaatctcctgccaaaaaaagaagcccatgaaagtatattttgtgcattttt

SEQ ID NO: 2217 - DNA, 1603 bp, Zea mays
  unsure (1)..(1603): unsure at all n locations
  Clone ID: PAT_MRT4577_52373C.1
ggccgggagtcctaaatcacgctcacacttnggcgaagcaaacagatcgagattcgagagaaatggcgatggcgacgccagctgccaaacaatcacttctcaccgtccaaccgtgcacaatgaattgaagcgccacgcggttccaatattctattgccacgggcaggtgcgtcgcgtcgattcctggtcttcgagaggagcggaggaggagggcggcgagtgtggaggagaggcgagttcagctgtagcgtttcgcttcttgcccgtggcggcggcggtgccacctcgaacgctgctccctgttctggggcttactgcggatcctgatctgagcatcattcagagaggaagaaatatgtttaggagaaagcatggctctgatgtcaactcagatgatgctgagcaaagagaagcaaagattagtgaactgaaagctgctcttgggactttgtctgcccgtggcgagaagtactgcagtgaagcatgcttgagaagatatctggaagcccgtaactggaatgttgctaagtcgagaaaaatgttggaagaaagtctcaagtggagggcagcttacaagccagaggatattcgttggcctgatgtttctgttgaagcggaaacaggtaaaatgtacagggcaagtttccgagacagggagggcagaactgttgttgtcatgaaacctacaaaacaaaatacttcatcccatgaagggcagatacggttcctagtatatactttggagaatgcaatcttcagcctgcctgaaggccaagaaaaaatggtatggctgattgatttcacaggatggacagtgtcccatgcttcgccgataaagacttgtagagaaactgcaaatatactgcaaaatcattttcctgaaaggctggccattggatttctatttaatccccccaaagtatttgaagctttttataaggtcatcaagattttcctcgatccaaaatcagtcgagaaggtgaacttcgtgtacgagaaggatgaggagagcatgaaggtcatgtacaaatacatcgatccggaagtccttcctgtagagtttggggggaagagcaatgtggtgtacaaccacgaggagtactccgagttaatgagacaagatgacatcaaaacagcaagcttttgggcggttgatgcgaaaactaaccatgctaaccctgccatcaatgggaccttggttcctgaggttgcgccacagtcgtcgctggctgctaaagctagttgaagagtatctgcattctctgagaaaattgagaagccgaggactaatggaaccttgagagaaacatatgaaataagaaacatggtatactcgttcatcctcaagagttgtttaagtactggaagtttattcagcacacaataagctactagagaatgtcaccatgtgtgatttgatgcccaaaagagatggtttacaaggtacagccaagtttttgtacttgaattaattactatatgtcagtgattatcacatggataagtaactagcacaagcttaaccgtttacttttctcttatttcttttacgatatactttgtcttctcgctaatcaatcgagtgtttctttcgatgatttaa

SEQ ID NO: 2218 - DNA, 708 bp, Zea mays
  Clone ID: PAT_MRT4577_5237C.1
cgattctcgagggagacgagcgccgccgcacccgaccgagtcagagcagagccagaggccccctccccgctgactcagctcctccgccgtcgccggaggcgaagcaagtgaggaccacggaagcattagctgggtgaactcactcaaaagaggcagggaatagtgcgctagtttgaatggctgctacaaagctgcaggcactttggaaccaccctgctggtcccaaaaccattcatttctgggcgccaacattcaaatggggtattagcattgccaacatagccgactttgctaagccgcctgaaaagatatcttaccctcagcaagttgctgttacatgcactggactcatttggtcaaggtacagcttggttattacaccgagaaacttgaaccttctcagtgttaatgttgcaatggcgggtacaggcctgtatcagctttcacggaagataaggcaagattacttctctgatgagaaggatgctgctccacaactggaagcatagatgtcagcagacaaagaataacggattgggaagtctgctgcctaggagtctactcttgattttttttctgggcaggcaaagaataacggatgggtcatgtttgttttcctgttattctgaaatcatgaccaggtcaatgtggaaatattctgccaaaaaagaaaacccataaagtaatcttttgtgcactttttgtggg

SEQ ID NO: 2219 - DNA, 1322 bp, Zea mays
  unsure (1)..(1322): unsure at all n locations
  Clone ID: PAT_MRT4577_5238C.1
ccggccggatgcgctgttttgttccgtatcgggttgtgcgcgggggacagggcgccacctgcgccgatcgttccgtttgtgttcgttgtttgtgtccgtttctgtgcctgtggcttcggttgttcctctgagcgacggcgatcgagccttaatcttagctcctgctgggctgcgcctgcgcaggctgaggtggggttccgtgcgccccggttcgtggtggaattgattttgcccggttgttgcttgccgtagcagcatgttttcctccccacaacatttctggtccgagtgcggcagcacagcacctgatccttagctatgccgatccgaactgtggcctgaccggctgaccgtgggcgaagcactcgaccctcagtatctgctgccgccatttcttgcccggagctgttgcgctttggcttgtagtaaactcgacacgttgtcgccccttgctcgcccgggcagttctgctcgagtgcttgtactccgtcgtcgtcactggcgacaagtagtttgatcggcgttacggnggaccacagaagcattagctgggtgaacccactcaaagggggcagggaattgtgtgctagtttgaatggctgctacaaagcttcaggccctttggaaccacccggctggccccaaaaccattcatttctgggcgccaacattcaaatggggcatcagcattgccaacatagccgactttgctaaaccacctgaaaagatatcttaccctcagcaagttgctgttgcatgcactggactcatttggtcaaggtacagcttggttatcacaccgagaaactggaaccttttcagtgttaacgttgcaatggcgggtacaggcctgtatcagctttcacggaagatcaggcaagattacttatccgatgagaaagatgctgcttcacaactggaagcatagataatgacaacaggcaaagaataacggattggaaagcctgcatcctaggagtctactcttgattttttttttctgggcaagcaaagaataacggatgggtcatgtttgttttcctgttattctgaaatcgtgagcaggctaatgtgaaaatcttccgccaaaaaagaaaaccaatgaagtgatgttttgagcattttttttgtgggaacaagtcatgaaagtacatggtttatctgttgaaaatctaaacccaaaaaaatgggaaaaaagtcatgccaggacatgattcgtatattgtccttttgtcactcttctcgttttgtgattgttttcgcgttattttgaaaaaaaaaaaaaaaaaaagcccctagggccgcggccgctctaatatatt

SEQ ID NO: 2220 - DNA, 346 bp, Zea mays
  Clone ID: PAT_MRT4577_52399C.1
tgaacatgaagcagcctctcgtgctgcccgcgcaccggtcgccccaggaccaggaaggaccccgaggcggaggtgcgccatgggcacaactacgtgccccgcgacgagcagttctcggaggtcaagcagctcacgttcggggccacgacgctgcgctcgggcctgcacgcgctgctcccggccatcaggccgatgctcatcaagagggagctgcgcttcccgcacttcccggccatcgacgacctctacagcgacggcatcccgctgccggcgcagaccgggttgggcgccatccgcagcatcgtcccgcgcgtggtcaagctggtggaggacaccaccgagcacg

SEQ ID NO: 2221 - DNA, 1232 bp, Zea mays
  unsure (1)..(1232): unsure at all n locations
  Clone ID: PAT_MRT4577_5241C.1
gggatcgattcccgagacacgagcgccagcggatcgatcattcgatccccaccactgcccgaggccccctcctcgctgacttggctcctccgccgtggccggaggcgaagcaagtgtaaaccagcccaccctcctccccgtctcctctccctccccatgcgctgttttgttctgtattgggttgtgcgcgggggacaggacgcctcctgcgccgaccgttccgttcgtgtttgtgcctgcctgtgccttcggttgttcctctgagcgacggcgagtcggcgaccgaggtggggttccgagcgccccagcccgtggtggaattcgtttggtctggttgttgcgggggaccacagaagcattagctgggtgaactctttcaaaaggggcaggtgcgctagtttgaatggctgctacaaagcttcaggccttttggaaccaccctgctggccccaaaaccattcatttctgggcgccaacattcaaatggggtatcagcattgccaacatagccgactttgcaaagccgcctgaaaagatatcttaccctcagcaagttgctgttgcatgcactggaatcatttggtcaaggtacagcttggttatcacaccgaaaaactggaaccttttcagtgttaacgttgcaatggcgggtacaggcctgtatcagctttcacggaagattaggcaagattacttgtctggtgagaaggatgctgctccacaactgcaagaatagataatgacaacacacaaagaataactgattgagaagtctgcggcctagggatcttactcttgatttttctgggcaggcaaggatatgtctcgatccaggacgggtcatgtttgttttcttgttcttctgaaatcatgagcaggtcaatgtgaaaatctcctgccaaaaaaagaagcccatgaagtaatattttgtgcatttttgtgggaaaaaagtcatgccaggacatgattcgtatattgtccttttgttcactctatctcgtatttgtgaactctaaattgtttgccaatttgattgatcatagcccagtgttcagagatgtcagtgcccttcaccgtcctcattttgttatgatcgtggtgaagctgaattgttatccctggagaatgagggcattcaataagaagtgtttggtttaagaaaatcactccctccaagatagagtggtgtatgtctatcccttcacggagtgtttggtttgagnaatcatatc

SEQ ID NO: 2222 - DNA, 232 bp, Zea mays
  Clone ID: PAT_MRT4577_52442C.1
gaaaacagagagccattaaagcattcactacgacattgaggtgctgctctgctagcgggcgtgctacagcatgtcacgtaaggtacacgacgacgacgacgacattgaacggagggacactagaccaagcagatcactagtgcatgcatgatccactacttgattatgggccagtccgatgcatgacacacacctagctaggacatctatggtactacgacaactgcatgct

SEQ ID NO: 2223 - DNA, 285 bp, Zea mays
  unsure (1)..(285): unsure at all n locations
  Clone ID: PAT_MRT4577_5249C.1
cctatagtgagtcgtattaantgtgctccttagggcgtctcgcggaccgggccggtggcgtgcgcgggcacgagattcaccgttcgcgcttttaagctatccctcggtcctgcagcggtagcataggactttgggggtggggaagccgatcagtgatctatttagcactagcaggtatggctgaatgtttgctgccatctacacatttgcatggaacacgaacaggtactagaaggcttggctacacagatcctggcagggttgcaggcctagctggagcagggt

SEQ ID NO: 2224 - DNA, 285 bp, Zea mays
  Clone ID: PAT_MRT4577_5251C.1
ggcttctcctccccctcttaccaagtcctcctcgggttagggttccttagggttttttggaggggcgagggccgcggctgatgtggagtaccgttgcttcctcggcggacttgcctgggccaccagcaacgagtggctgaagaatgccttcgccttctacggcgagagcctccactccaaggtcatgaccgaccgggatacaaccaggtcccgctgactcatgcttgggtaccttatcctacgagaactacatgctcgacgctttatagaacatgaaccgcttgg

SEQ ID NO: 2225 - DNA, 210 bp, Zea mays
  Clone ID: PAT_MRT4577_52526C.1
ccctattatcaagtcctgctcgggttagggttccttagggttttgtggaggggcgatggcggcggctgatgtggagtaccgttgctttgtcggaggacttgcctgggccaccaacaacgagtcgatggagaatgccttaggttattacggggagatccttgacatttaaggttatcaccgaccggtagacggggaggtcctaaggttttt

SEQ ID NO: 2226 - DNA, 2036 bp, Zea mays
  Clone ID: PAT_MRT4577_52559C.1
gccccggacaggcaggcgcacgcaacgcaactagtctccttcaccgtccgtccattcctccgatccgcaggaggattaggaacttaggatcggggaccggcggagcccgacgaccttctcggtccacccgcccggcgatcgaaccatggcgctcggcgagggcggggatcacggcgccgccctgcccctcatcgcggaccaggcgaaacatgccgccgccggtggcatcgtccgaagcgggagcatgtggacggcagcggcacacgtgatcacggcggtgatcgggtccggcgtgctgtcgctggcgtggagcatcgcgcagctggggtgggtggccgggccggccgccatgctcgtcttcgcggccgtgacggcgctccagtccacgctcttcgccgactgctaccggtcgccggaccccgagcacggccctcaccgcaaccgcacctacgccaaagccgtggaccgcaacctaggtagcaacagctcgtgggtgtgcatgcttctgcagcacacggccctgttcggctatggcatcgcctacaccatcacggcctccatcagctgcaggcaagaagcatacctgggcttgcggctcgctgcagtacgtgagcctgtacggctgcggcgtcgcctaccatcaccaccgccactagcataaggtagccgccgttggccgggcgatcctgaaggcgaactgctaccacgagcatgggcatgacgcgcactgcgactacgatggcaactactacatgctcatcttcggcggcgtccagctcctcctctccttcatacctgacttccacgacatggcgtggctctccgtcgtcgccgcggccatgtcgttctcgtacgccttcatcggcctcggcctcggcctcgcaagaaccattgctaacgggacgatcaaaggaagcataacaggtgttcggatgaggacgcctatgcagaaggtttggcgcgtctcgcaggccatcggcgacattgccttcgcgtacccctactctttgatcctcctggaaatacaggtacagtaacgtgtagccgcacgccattctttcagaaaacactgctggctaccaagcacccattagcagtatcagtttgaaggcttgaagcacagtaacgagttataccttttcactctccggcaatttaggacaccctgaagtcaccgccggccgagaacaagacgatgaagagggcgtcgatgatctcgatcctcgtcacgacattcttctacctctgctgcggctgcttgggctacgccgccttcggcagcgacgcgccgggcaacctccttaccggcttcggcttgtacggtccgtactggctcatcgacttcgccaacgcgtgcatcatcctccacctgctgggcgggtaccaggtgtacagccagccgatattccagttcgcggagcggctcttggcggagcggttcccggacagcgggttcgtgaacggcggctcctacaccgtccggttcgcgtgcctgcgggcgtgccgggtgaacccgctgcgcgtgtgcctccggacgctgtacgtggcgtccacgacggcggtggccgtggcgttaccctacttcaacgaggtgctggcgctgcttggcgcgctcagcttctggccgctggccatctacttccccgtggagatgtacttcatccagcggaacgtgcgccggtggtccgcccgctgggtcgtcctgcagaccttcagcgtcgtctgcctgctcgtcagcgccttcgcgctcgtcggctccatcgaggggctaatcagcaagaagctaggctaggctaggctagtccgatccagtggaacaccctatctgcaggtctgtcagagagtggcagcgggctcggttattttcacagtgttgccttcctcctgcatcgggttgtaagttgtaacatatatgtcgtactagtatagtgcccgtgcgttgctacggcatgtcaattatttgataaaatgttagttcacaacgattacaatgttttgtgacaatatgttagggtgaaaacagacaatttaccccc

SEQ ID NO: 2227 - DNA, 2024 bp, Zea mays
  Clone ID: PAT_MRT4577_52690C.1
ccaggcgggttaatttccttcgtttgggacaaggcgccgccttccgcaaatccgaattggaatctgggcctttgtttccgtaccacaaattcggtaaatatactcgggcaataaaaatccatctcgaggcaggaccgggatgatagatagctgcttgcctgctccggagtttcttccgctgttctctctcgcgcaaatttttatgctgggcaaagacggtgttcttcagcttcgaccccccaaaagggcgaagctttcgcgtccttccccacacacacaaaatacctgggagccgtagcttctgtttggtgcggccacggggtggaagaaatggtatgcgggatgctcgccaattggcatgctgcgctttccgtccctgcagccgcaagaggccttctcttttagatctgtgccgcgtgccgcgccttcctcttcctggtaccctgtgattggagccagtattgttagcgtttaatgaagctgcttttttctagccggcttttggatggtgcttactactacatcgtatcagttgccaccactctcgcgtgcttttgccttctttaggtttgctcgcagggcacacaaagccatttttactgctggaagactgccgcttttagtatctctgggctctggctcttgagtgatctccaagggaagggaagggaagtgatgggggagtgcgaggacggcaaggagtacaggtgctgggaggagctgctgccggacgcgctggggctcatcttccgcaacctgccgctccaggaggtgctcaccgtcctgccgcgggtgtgcaagtcctgggggcgggtggtcgccggcccctactgctggcaggagatcgacatcgaggagtggagccagcagcagagcaagcccgagcagatcggccgcatggtggagctgctcgtcggccgcagcggcggctcgtgccgccggatcagcgtctccgggctgccctgcgatccgctcttctcgttcatcgcagacaatgcgcgagctcttgggaccttggagatccccaggagtgagatcagcgactccgtagtggaagccgtggcgccgcggctatcgaacgtgacgttcctagacatcagcagctgcacgaagatcggagcccgcgcgctggaggcgttcggcaggcactgcaggtccctggtggggctccggcgggtgatgcacccgatcgacctggcggacaaggtgtgccagcacgacgaggcgcacgccatcgcgcgcagcatgccgaggctgcggcacctggagatggggtacatgctggtggcgacggaggcggtgctggagatcctggggcagtgccgcgagctcaagttcctggacctgcgcggctgctgggccgtggacgaccggttcctgcgggagcgccacccggggctgcgcgtcctgggcccgcgcgtcgtcgacgactgctacgagaacagctactgggaggagtgctccgactactactcggacgaggacgaggactacgacgacgacgtcgtctcgtgggggttgttcgtggacgacgacgacgactactactacgccgtcggcagcgacgacgacgaggctatctgggacgacgcgcagggcctggagaacctcgaggtgaggttctacggcggcggtggcttcggcgagagcttcgccggcttcgactggccgccgtcgccgtgacgcgtggcccgcgagagccgccgctgcgcttgcgttgcgcggaccgtttgcggctcttgcttatataccgcgtgcgtgcctgagtcgttgtttgttgttcgtccccaagctttgcttgcagatgtgtgctttcaatctttaagctctagcttgcagatatgtgaagtggactgctagtagtagtacactctagctgtaaaactccggtgtttacctgaagcaaaccagcatgcaccggtgagatttcaccggcgccatccccatcctactatctattgtcggctactcctagaaagaaaaaaaaagagagaataccccctgatctttgcgtcgtgtctcct

SEQ ID NO: 2228 - DNA, 395 bp, Zea mays
  Clone ID: PAT_MRT4577_52894C.1
cggacgcgtgggcagctagctgcggtctaccctcagcaatttcttccattcaaccaacgggcaggattgaactctgctgcttatttacaacagcaacagctaccaccattcatccagctagctgatgtgagccctgttgccttattgacacatcaacagttgttgtcgttctacctgcacgctgcgcctaacgcttgcacccttttacaactggaacaattgctggcattcaacccaattggtttgacaaacccaacaacgttctacccacaacccatcattggtggtgccctcctttagattgcttatgaattatacttcaataatgaagttttttggatgaaggttgcggctttccagaaattagaaagttcatttctagaaaaaaacacaga

SEQ ID NO: 2229 - DNA, 1236 bp, Zea mays
  Clone ID: PAT_MRT4577_52917C.1
cgtcctcctccggtcacgcacgcagctagcttacccgccccgccactataaaaatccacctccaccccaccgggcgcggacagttccacacacgcgtgcacgggcgggcaagcaccagaaaggaaaggcggaggccgcgcggcgggcgccagctgcagccaagagcccactagtagtagtagtagctagttcaccaccgcctgcttgcctcctttactttgccatatttgctagcgtttcctggattggggacgcttccgtttcgggaagccgtgaagggatcggccacgacgatggtgcgggggaagacggagctgaagcggatagagaacgcgacgagccggcaggtgaccttctcgaagcgccgcaacgggctgctcaagaaggccttcgagctctccgtgctctgcgatgctgaggtcgggctcgtcgtcttctccccgcgcggcaagctctacgagttcgccagcgccgccagcctccagaaaacaattgaccgctacaggacatacacaagggaaaatgtcaataacaagactgttcaacaagatatacagcaagtcaaagcagatgccgtaagcttggcaagtagactcgaagccctagaaaagaccaaacgaatgtttctgggtgaaaatttagaagaatgctccattgaagaactgcataatctggaggttaaactggcgaagagccttcacgtcatcagagggaagaagacacaactgctggagcagcagatatccaagctgaaggagaaggagaggaccctgctccaagacaacaaagagttgcgggataagcagcgcaacctccagtctccaccggaggcgccaccggacctgaaccgctgtgtccctccttggccgcgtagcctgccggcaccgagcaatgacatggacgtggagacggagctgtacataggattacccggcagggagcgctcctccaaccgggactctgattgaaccacggattttcagttcgatcggctaaaaggaataagctccctgaaattaaagcatcgaagggcacacgtcaatggttttatttgcaacttttgtatgcaaacttgtacttgaaaagtaaaaaaaataaaaataaatctgtagtatgtggatgcaagaaacggctggttagctagctgcaagccttctggggcctgaaaatgaaatccacccatggatacacccaaccaagcttgatgcgctacttttctttgaaactggggggggg

SEQ ID NO: 2230 - DNA, 1718 bp, Zea mays
  unsure (1)..(1718): unsure at all n locations
  Clone ID: PAT_MRT4577_52946C.1
gaacagatgcagtgtttatcaagtcagatgtaattttccaatgacggtgtcagaaaaggacattgctttgcactaacaaatatcgttacggcaataatgaaatgggagccttgcagcttgcgccaccagagagctactaaacacaattcgatcgagagcgcgcgcgagagagagagagagagagagcagggctgaagaagttggaggaatcgctgccagtggaaagcggcagcagcagaagcaagaaccagcaagaaagaggggagagaaagccgaaggacttttcctcggattgcatccttcgcttttgagggaaggagaaggaccctctctgtcctcgcggggggcggcaggaggagcagatgttcccgcctggcctgatccaccaccgccctgacgccaccgctcccggcgatgggccaccgcgctccggccccggtgggccgagccttgtactgacggcggaccccaagcccaggctacggtggacggccgacctccacgagcgtttcgtcgacgccgtggcccagctcggcggacccgagaaagcaacaccaaaaactatcttaaggacgatgggtgtcaagggtcttactcttttccacttgaagagtcatcttcagaaatataggttaggtaaacaatctggtaaagaggggtcagagcaatctaaagatgcttcctatcttctagatgctcaaagtggaatgagtgtgtcccctagagttgctgcccaggatatgaaagaaagccaagaagttaaagaagctctgagagcgcagatggaagtgcaacgaaggctgcatgaacaagtggagcaggtccaaaagcgcgtgcagatcagaatggaagcacttgagaagtacatcgacagtatcctagagagcgcatgcaagatggttactgaacaatttgcttcgagtggcttcagtatctccaaccctgatctcccggagatatcccctggaggggtcatgtgtggctccacggacacgttgggctcgtcggtgttgaaccagctttctgtgagctccatcgactcgcacagtccaggaggcaaaccttctccatcaggcatggaaggtccgacactgctccagaaatcgcctgagctcaagcggaggtcctcttgaactgtgacatcgaattctgaggttggtgatgatggctgtctctgtggagtgtctgaatatggtggtgacaagggaaatggtggcccagtcttgtggtagctgactctctctccaggtagcaggacgtgctgtgtttgttgatcaatccaagtatcaaacggacctactatgttcatgtgaacttcctcaagtgctagttaaaaagttttcatgcttctgtcatgagattatgatcctagtagcatccttagcacacttgaaacgttgactcgtgtcctagtgtcgtttgtgttagtccatatgtgaacaatgattcatgttggaacatgctagctaacaccagatgattcaagcccaaaaaaaaaaaaaaaaaagcggtatttttgtctcaattgtccatgcaggcttcccagcacttgctgcaatttattcccagcacttcctgcaatttattcgacttaaaggctactgtatttagctatgaaaggtccatgctgactttgtaatacacaaatggctagttgcaacttanaaaaaaaaaacaaaaaaaaaaaaccataaaatactaaattagcgttacaagat

SEQ ID NO: 2231 - DNA, 1159 bp, Zea mays
  Clone ID: PAT_MRT4577_52981C.1
catcaagtcccaactcccaactcgcactcgcccaacctcgaatgccaagctagcaagagaggcctcgatcgcagaacgaacccagcggcaaagcgagcacgcccgtctacaacgacgcacagatagctctgtccatggcgcccaagaggagcagcgaggagcgcgcggcggcggagcaggagcagccgaggctccgcggcgtgcggaagcggccgtggggcaggtacgcggcggagatccgggaccccgtgcggaaggcgcgcgtgtggctcggcaccttcgacacgcccgagcaggccgcgcgggcctacgacgccgccgcgcgcaggctccgcgggccgcgcgccaccaccaactaccccggcgacgtcgtccgagaagcgccgtgcacggcccctgctctggctgcgagcgcgagcggcagcaccgagtcgtcgtcgtcgtcgtcgtcaagggacgacggccacccgccaccgccgatgcctccggcgccgtcgtcgctcggcctgggcctcgggctcttcccggcgacggtggccacccagccgtgcctgttcctggacccggcgccggtggagagggaggaaggggagcgggagcggagctgctgctcccggtcgccgccgtcggtgctggcgggcctcgggttcgacttcgacctcaacctgcctccgcccgccgagatggtcatgtagcgttggagatagtaattctagcaaaaagggattgtgtagtaaataggaagggcaatcggtttgtgtagtagtagtgtagtactagctagccagtttgcctgtgcactagccactagccaatttgcgacttcgcaatgcaaatcaagaaatcgacgggcaaatatttttctcctgcaaaaaaaaaaaaaaaaaaaaaaaaaaaaaaaaaaaaaaaaaaaaaaaaaaaaaaaaaaaaaaaaaaaaaaaaaaaaaaaaaaaaaaaaaaaaaaaaaaataaaaaaaaaaaaaaaaaaaaaaaaaggggggcccgttttaagaacccaatgttaccatccttggcatgctacttcataacctttatatagggccacctaaatataatttacttgcccctttttaaaaaacgtgaaactggaaaaaccctggctttacccaatttaatcccctttaaagaaaatcccttt

SEQ ID NO: 2232 - DNA, 1442 bp, Zea mays
  Clone ID: PAT_MRT4577_53153C.1
accgcaccacagtacttctctccagtgtccacagaaacagaattccgctccctccccgtgtcctcctcccgcgcccgcgcatcgtgaggtggagttcccaccccgaggccgcaatggcgacggtggaggtggtggtggccaacggcttgggtggcgccgacaccaagaccgtgtttaaggaaacatacagcaagctcaaggaggagatgctagacgaccccgccttcgagttcaccgacgagtcgctacagtggatcgaccgcatgttggactacaatgtgctcggaggaaagtgcaatcgcgggctctctgtcattgatagctacaggatattgaagggtgttgatgttctgagcaaggaggagacatttcttgcttgcacccttggctggtgcattgaatggcttcaagcttattttcttgtgcttgatgatattatggacaactcccagacacggcgtggccaaccttgctggtttagagtgccacaggttggcctcattgctgtaaatgatgggattatccttcgcaatcatatttcacgaatccttcaacgccacttcaaggggaagccatattatgttgatgtaattgacctattcaatgaggttgagttcaagacagcttcagggcaaatgttggatcttatcactacccacgagggtgaaaaggatctaactaaatataacttgacagttcgccgccacatcgttcagtacaagacagcttattattcattttaccttcctgttgcatgtgccattgctgctggctggtgagaacttggataactttggcgatgtaaagaacattcttgtcgaaatgggaacatactttcaagttcaggatgattatttagattgtttcggtgatcctgaattcattggcaagatcggaactgacattgaagactacaagtgttcctggctagtcgtgcaagctcttgaacacgctgatgagaagcaaaagaacattctgtttgaaagttatggaaagtctgatccagcgtgtgttgcaaaggtgaaggacttgtacaaagagcttaaactggaggaggttttccaggcgtacgagagggagagttacaacaagctgattgccgacatcgaggcccagcccagcaaggcagtccagagtgttttgaagtccttccttcacaagatctacaagagggacaagtaaaaacccagatcgtgaagaagctgctccgtcgacgcttgcatcaaattagtagacttgattgatgcagatgagtaatttgtactatgttgtttcatgttttcattctcctgttgcgtgtactcctgaattataataaaacagagtgctattagggttacgtaaccagcttgtgcgaatgctctacaaacgacagtgctgactgctgagtgttgttagagcaacttcagcgctatatcataaaggattttaagggttttctc

SEQ ID NO: 2233 - DNA, 2693 bp, Zea mays
  unsure (1)..(2693): unsure at all n locations
  Clone ID: PAT_MRT4577_53154C.1
ctagagttaaaaaaacacttacagcacgcagttgtcgtcgtcattgtcttcgactcttcgtggcacctcccgtccataaaaataaacgtgtgcccaccaagccgggggctcgcattggcaactgaaccgcaccaggcaccacagtcccgtgcggcagtggcagacgcacagcagatcagcagcgcctccctctgcggctctgcctcttgccaaagccccccacagaattcttctccctccccgtctcctctcgcgctcgcgcgtggtgaggtgaggtggagttccgaccccgaggccgcaatggcgacagcggaggtggtggtggccaacggctcgggcggcgccgacaccaagaccgcgtttaaggagatatacagcaagctcaagcaggagatgctcgaggaccccgccttcgaattcactgacgagtcgctccagtggatcgaccgcatgttggattacaatgtgcttggaggaaagtgcaatcgtgggctatctgttgtcgatagctacaagattttgaagggtgttgacgttctgagcaaggaggagacatttctggcctgcacccttggctggtgtattgaatggcttcaagcttattttcttgtgcttgatgatattatggacaactcccagacacggcgtggccagccttgctggtttagagtgccacaggttggtctcattgcagtaaatgatgggattatccttcgcaatcatatctcacgaatccttcaacgccacttcaaaggaaagccatattatgttgatatcattgacttgttcaacgaggttgagttcaagacagcttcagggcaaatgttggatcttatcactacccacgagggtgaaaaggatctaactaaatataacttgacagttcaccgccgcatcgttcagtacaagacagcttattattcattctaccttcctgttgcatgtgcattgctgctggctggtgagaacttggaaaactttgttgatgtaaagaacattctcgttgaaatgggaacatactttcaagttcaggatgactatctagattgttttggtgatcctgaattcattggcaagatcggaactgacattgaagactacaaatgttcctggctagttgtgcaagctcttgagcgtgctgctgagaaccaaaagagcattctgtttgaaaattacggaaagtctgatccagcgtgtgttgcaaaggtgaaggacttgtacaaagagcttaaactggaggaggttttccatgagtacgagagggagagttacaacaagctgattgccgacatcgaggcccagccgagcaaggcagtccaaactgttttgaagtccttccttcacaagatctacaagagggacaagtagacccagatcgtcgacaagctgctccatcgacgcttgcatcaatcaaattactatacttgattgatgcggacgagtaattgtactatgttgttttgtgttttcattctcctgttgtacggtacaccttaatacggagtataataaagcacagtggtactagggatgcaaagccatcttgtgtcaccattccccnntgccgaattcggcacgagggtaaccaggcactcatctccttgggatatttccagccgccgcccagtcttcgtcttcttccccacgcgcgtcctccctggtgccgagtctctctctgccaatcgcccatggcgcccagccgcttggcctctctggtactcgctctccctcagtgccctggctcctgcttccctcgccggcgcgctccaatcccctgcacgcggagcttctcctctaccggtgctcctccgtgtgcgcgcgctccatctctctcgcgtcgctcggtctgcgcgtccctgcgtccggatcctctccctccagctcggcgcccatccctgccgcgttgccctctctctcatctccaagccgagaccccagccatgaagctccctggagcctcctcaccgggtgcccagccgtagagttcccctgcgcgcggagcttttccctccctgctcggaccgtgttcttggctccagctcagctctgtcttgtgccggcnnnnnnnnnnnnnnnnnnnnnnnnngcgcgcgctggtattcgctcgctgctgcgcgcgctctcccctgcctgcttgtcgtggacacgggtcgctgcccatgccgagctccctgtgcgcacaaccatgtcctttgtatgttgtggccggttcccaactcgcgccgcggttctctcctagccccatgtgcacgcctctgttcatggtcgtggtgaggttgtggcgtggcgacgtcgtgtgcgttgtggcagccgtcctggccacggggcagtccgcgccatagagttcgcccgaccacgacctcactctactcctcgcgtcaatgttcgccgagtcttttcccagtccgcgatctctccctgcccgttgttgcgtccttcgtcatcgtgtcgtgtgtgcagcaacgtgattcctccatagtgcctgtcgacgaacttcgctacatcggtttctcgccttcggttcaggtcatgtatgcacgccgaacgcgttcgccgcttaaccctgtgtcgctagagctcgtgacctcgctgtcatcggagtcctcactgaattcgtgtcctcgccagagctcgcgctaacctgctcgaccatacctcgccagctcgctccagaattatctcgttgtcgtttt

SEQ ID NO: 2234 - DNA, 1271 bp, Zea mays
  Clone ID: PAT_MRT4577_531C.1
cccctcgggtcgacccacgcgtccgcgaaacacaaacgcacaaaagcgaaggccacgcgacgcgagggtgacgactgacgagagggggagagagagaggcgaggaaggagggagagagcacgggggcttgatcgaagatggatgccggagcaaaggtggtgaagaaggccgcggcggggcgtcgcggcgggggcggccccaagaagaagccggtctctcgctccgtgaaggccggcctccagttccccgtaggccgtatcggccgctacctcaagcagggtcgctactcccagcgtgtcggcaccggcgcccccgtctacctcgctgccgtcctcgagtacctcgccgccgagctcctcgagttggcggggaacgcagcgcgggacaacaagaagaaccggatcatcccgcggcacgtactgctggcgatccgcaacgacgaggagctcgggaagctactggccggcgtcaccatcgcacacggcggggttctgcccaacatcaaccctgtgctgctccccaagaaaaccgctgtcgctgctgccaaggaaggcaaagagaagaagtcacccaagaaggccgccgccgccaagtcgcccaaaaaggtggccgcctcgtaggtccctggcaatgctgatgcactgtctctctctgtcctctctgaactgaaacgctcctagctgtcgttgtcggtcatggtcgttgttgtttgatgcgcttttattgtggttgttcgtgtgtaattgcttgcctttcgcccatttggcatgcactgtgtagggtcacactggtctaggttttcaatctgggaaacaccggtttagattcaaggagcgtgaactgtgaaggcaggtgagagggtgggatctgtgaatcattaggtgctgtttgtaataagattgcaaagatgtgtaaaatttgttttgtgcttccaaaaaaaaaaaaaaaaaaaggaggccagcaccgccgccgacccggtcgatgtcatcgatcttcgaacaagcccccgtctctcaccctccttcctggcctctctctgagtttaaagtttaggcaaacaatgtggtgcatgttttgcaaaatgcctgagttgggttgttcgctgctgctggattaaagccgttcggactactgctgtctgtagaaaaaacagaagccggtggattaaagccgcaacgaacatgcttgtcatttctgttagttgatcactagtactatatagtccatttgggatgattacacaacattatgttggtgttaatgccaactgg

SEQ ID NO: 2235 - DNA, 320 bp, Zea mays
  Clone ID: PAT_MRT4577_53252C.1
cattgggtacctcgaggccggccggggtaccacctccatcaaccaccactaccatcaccgtaaaacgaatcccagaacagtaccgcagcgatagccatggtgctctcgcacgcgagctccggccggaacgacgacgcggtggcctccaccttcgcgtctcgctacgtgcgcaagcggctgccgcgctaccggatgccggagcggttcatccctgcgcaggcgtcgcagcagatcatcagcgtacgagctcatgctggacggctacccgtgcctgaacctgacgtccttcgtcaccacgtggatggagaccgagtgcgaca

SEQ ID NO: 2236 - DNA, 1337 bp, Zea mays
  Clone ID: PAT_MRT4577_53460C.1
aagctattaagaaaaaatttctacctgatctacttcaaaatagcacgactggccgggatttccggccggattgaacgtgcggcccactttcattgagagacgaacacgcgagtagagaatttctcctgcctgctcacgaccgccctctcgccggtcgccggtcgccgctcgcaacgcaagtcggaagaggaatctctccaagctccaatcctccgatcctgccccaacccaagtcccctccaccaggccgcacacctccgccgcccggcgcgaccttgcatccaccagcctgccctctccttcgcgtgaggcggccccggcgaccgcgtcggcagtgcaagaccagaccgaggcttctcccgttggaaggttccagccatggcgagcgccgatctgctgcggaaggaggaggagttctactcctccctctttgattccgcaaaaggcgacggcgtcaagtcgcgctcgcaggtgattgagaggaagattgaatccctcgaggacatggccaccaaggtcagcaaccggagatcaagaagatggttgaacgaccgcttgctgattgagcttgtcccacgccttcatgttgaagaaatcaaaggcctctttgctcctccaccatggggtgaggagctgcccttgtcagcattctgcaggacaagtgttagtgactgggaggccttcaggagcatcgacatggatgctgaggcaagattgatgcaacacatgaaacgatcatccgaaaaacaaaggactcatgtcgacgaagatgaattgattgctctgaatgcttggcgtcgtataggtcgccaaacaagagaagctattaagaaaaaatttctacctgatctacttcaaatatatgaagaacaggttagggccttcattgaaggtactggtgacagcgacgtgcttgtgctgaatgtccaggacccgttccagaggctgcttctgcacggtgtttgtgagttctataacgtaacctcaatgaccacaagcagtgtaagggacgggaagccatggaagagcaccaccatcaagaagaggcatgtcaccggtcttcctccgagaatcacattagttagcttcctgaggatgaggaagaattagtcgtcccagtaacatgtggatgtgagggtcctacactaattcgcctggatgtgtactaaaaagacaaatttgttgctttaggtcgcatctagcatgtaatcaaatgtaaaatatccatgtcaaatgtaaaatacattgcaagaccttgttccagatgaagaaactcaaaagtgtaagcccctacttctatcactgagtctatgaaagaggcttaagccaaattattt

SEQ ID NO: 2237 - DNA, 280 bp, Zea mays
  Clone ID: PAT_MRT4577_5370C.1
acaatacggcaactgaagcacggagtacatacaggatcttacagcactgcttgtgactactgacgaatcctggttcagtgtagttacacatacgagacagcgatacagatgtggcagctaagaccaccggatcctaccaacatacaatattaagaccattgttggcacctatatataaagatggaactgagtcatggtaagatcatcagtgatgatggggagcgcgggagagttgcaagggtgggcaacagatagttaggaagcaaccgggttgggatca

SEQ ID NO: 2238 - DNA, 1576 bp, Zea mays
  Clone ID: PAT_MRT4577_53779C.1
gagggacccctcgagccggccgggaattacacgccaccaccgctcgacctaccagccctccttcctcatccgcctgccctgcccgtcccgtccgtccacccccttcccttctttccccctttgcttgctgctgcctgcttctcgccgtcgccgcctcaattccctcctcgttgtccgtcgcctcgtccacgcgcacctcgtcctcctctccgttccctccacctcctcgaccgcaccgtcgtcgtctagctagcggagcgagctgcgaccagatcggagagccaagcacccaggaagagggggccggggaacaagaagaagccgccggaagccgggcgtggacgtgtggtggttttctgccggcggctgacaagtggtgtaggctacccgctctggccatggatccgtcgggcggcgcgttcctgccgccgctgcagcaagggagctcctccttcccgcggtcctccagcaacgcgtcgctcgccaggagcggcagcggcggcggcggcgttggcgccgggcgcgggaccaggggcaggaagatgatgcgcagggtctgccgcggcgtcatcaccttcatcttcgccatcgctgggctgttcctgggagcggtgaccggcggtctgatcgggctggcgacggagagcgggctgttccgcggcaccgggatcggcgccatcaccggcgcgctcgtctccatcgaggtcgtcgactcctccatccgcctctggcaggcgcgccgatccgggatctggagcatcctctacgtgctgaacgtgatctacagcctcctgacgggcaggctggtgcgcgagaaggtcgacccggcggtgcagcgggtggtccgcagccagatgaacgcggtggactcgtcgccgttcagggagtcgccggacctgttcgaggtggaggccaccaacggcatgccgcgggcgtccatcgacaagctccccgagtcgtggatcaccgaggagtacaggcgcgacgccgtcggcgacctctccggctgctccgtctgcctccaggatttccaggtcggggagaaggtgcggagcctgccggactgctggcacgtgttccacgtgccgtgcatcgacggctggctcatcaagcacggctcctgcccgctctgcaggaggaagctgtaggcggatcgaccggacgacgccatggacgatgttcttctctgcgatcgagccgatgatgtgtgtgtgtgtgtgcccgccgccgccaccaccgatagctgctgctaggatcggaggagggaggaggaagaagagactgacatctatagaacccttaatttatagagagggcttttgctttgctacttgtacgtgctctactacgtacctattgcatcttttttttttttgattcaccatgatcgacctccttcctcagatccatccatgcatgtaatataccctggaccggcttgtgcttcgttcgatccattccatgcatctccggactgtgatctcgatctggtgtaatatatataaaaaaactactagtatgtaccatcgcactttggacatctatacatgcatgctggttggtcatattttttttg

SEQ ID NO: 2239 - DNA, 376 bp, Zea mays
  Clone ID: PAT_MRT4577_53816C.1
gggggaaacgtaaacaactaaacatgtaagtaaatcagggttgcatacattttttggggccttggaccacgatcatacacaagcacatgcatacacacacgttttcatacgatagattacgttgccccgcttttttgggcattacacgagggcatacatacgtacgcgcgcacaacacggggggggcttgatatcacttttacacccacgcgttgcacacggggggggaccaccatacgggaggatcaatcagccgaagaagggggggttttttttgccgccggcctcctcgggctccttgggggccttcttcttctcggggggctcgtggaaggggaaacccccggagcccacgggcgcccccgccgggaccctc

SEQ ID NO: 2240 - DNA, 286 bp, Zea mays
  Clone ID: PAT_MRT4577_53953C.1
cttctgctccccctccggttcgggttcgagttcgtgaggttctccggggttcggtttcgtgggtgagctgatcgagatggcgtgcctctgatgttgagtaccgctgcttcgtcggctgcctcaactggaccacggacgaccactccttgcacaactccttcatcacctactgctaggtaacttagtccaagatcatcctatatcgagtgacacagatgtccctcatcttctgcttcgtcaccttatccacagatgatgcgttgcggtacgccttctacgtcatgaa

SEQ ID NO: 2241 - DNA, 276 bp, Zea mays
  unsure (1)..(276): unsure at all n locations
  Clone ID: PAT_MRT4577_54029C.1
ctagtttcccttggcgngcgtgaccggacgacaggggnaggnaggaaggnaggggtagctatttcggcgagcgagggagcaatccggacaacagcacacgcgtcgatcgccatgccgagaagcggcggcggcggaaatggcggaggtattagcagcagaagtagggtgatgaccaacctcccggacgggatacgcttccaccccacggacgaggatctgatggagcactacctcatgaggcaggccgcctccatgacgagaaacgcccccatcatc

SEQ ID NO: 2242 - DNA, 240 bp, Zea mays
  Clone ID: PAT_MRT4577_54131C.1
cgcgtacgtgggactatattgaaggctcatcacacggcacttctatatcatgggaagaatatagaccctgtgagatcgcaacaggagaaggagaggctggaaaagaggcagcacgaagagaaagcaaggatcgacgcccatgtgaaggctgctgaatcacctgcacaacaaaatgttgaggaagacatgaggatgaacagaacgcacgacaaggatgcacgccgcctggctctacgcatg

SEQ ID NO: 2243 - DNA, 470 bp, Zea mays
  Clone ID: PAT_MRT4577_54283C.1
cccacgcgttcggaccgtcggcgagtacttttactccgagacctatgtggtcaccgcctcgagcgtattcgactacgagaggtacaacatggaggataacgagtacaagcacaagcagcatctcagcgaggccgtcgccatcagacgcggctccttctcactctaccagaaacactaggcgaagaaggacccttagcacgcgcacagtcacaagatcaccgacgacgtcgctgcctctgcggccgtctgcgcctgcggctacgtattccacgagcaccactagatgaagaatgaccacaatgactccgatgaggctagctgcgagaataatcaccaccacctcttcggctgaccgtagtaccggacgtcgcgcgaccgagctagctagctttctcgcacacaaccacacacctgtttaattctgtactgcatgcgtgtgtaatttgatggttcacattaatgagtcccta

SEQ ID NO: 2244 - DNA, 1620 bp, Zea mays
  Clone ID: PAT_MRT4577_54302C.1
ctcgcgattactactgtaatccccaccacaccacctcccggatctcagggtgggtggagtgcttcttggcgacctttctttgcatgtcaacgcagacaaaaagaacagcgccgccgcctccacgaccacgaccacgccggtcgccgagcctccgtctcctcccgagagatctcgcagccagctagccgccgtacgtggccacatggaggcgccgcggccaaacaacggcaggaagcgcaagcccacgcctcccgccggcctgggggccctccacgacgacttgctcgagcgggtcctcgcgcgcctcccgccggccacctacttccgcctgcgcgccgtctgcagccgctggcgcgccgccgcggcgtccccgaccttcctccacgcctgcgctcgcgtcccctcccgggacccgtggttcctcatgctctccgactccgactccgggccccgcccgcccgtcgccttcgacgccgccggccgcagctggaaccgctgccacgccgcgccgggggctgccgtgcccgtggccgcgtcggccggcctcgtcctctaccgcgcgccggccacgggcgcgctcaccgtcgccaacccgctgacaggcgcgtcccgcgcgctcccctcgccgccgcagcaggccgcgcgccagctgcaggccatcgccatgtacggcgccggcggtccctaccgcgtggccctcttcgcgggcgacctccccgacgacctctccatggcggtctacgactcctccagcaactcgtgggaggggcccctgccgctcgcccgcaagcccggggacgactcctgccccgacgcgccggcgcccgacgacacggtctacttcctcagcaagtccggggacgtcgtggccaccaacatgcagcgcagcgcgtctaagcagtactcctcctcagtggtcgtgcgccgcgacggcgacggcgacgccgcctttgcctacttcctcagctactcgggcacagtcgtcgcctgcgacacggcgcgccgcaccttcgcggagctgccccgcatcctccccgtctacttcgagtactccatcgacgtcgtcgcgtgcggcgcagcggcctacgccgtcgtgctttcggaatacctcggcacggccagcctgcgcgtctgggagttcgccgggggcgcgtggcggcaggtggccgccatgccgcccgccatgtcgcacggattccacggcacgcggcccgatatcaactgcgtcggccacggcgaccgcctcatggtttgcgtcacctccgccgaggccaacgcctgcttcatgtgcgacgtggccagcaaccagtgggaggagctgcccaagtacgtcaatgccgacggcgaggccagcgagttcctggccgccttctccttcgagcccagagtggaggtcaccgtataagcgcttatggttatagtgttactacaattaattgctttcttcattaaggcgccttagttttggttcggctcctactccgtgtgattgatttcttcgtgtgtgtgtgtgtgtgcatgtacttacggtaccgaattgtaatgtcatttttcattgacattatttgtcttcaataaaattacagatttcgtgtgcagtccaaaataaaaaaagggcgg

SEQ ID NO: 2245 - DNA, 444 bp, Zea mays
  Clone ID: PAT_MRT4577_54510C.1
ggagggtctggcttctcctccccctcgggtacggattccggttcgcgaggcgatgccgggctcgtgttcgagcgtgagcggatcccgacggcggcgtcggacgttgagtaccgctgcttcgtcggccggcttgcctgggcacggacaccactccgtgcacacgccttcagcacctaccgagaggtcctggagtccaagatcatgctcgatcggtagacgcagacgtcccgcagcttcggcttaggcaccttatgcacggaggaggcgatgcggaacgccatcagagggcatgaacggcaaggaactggacggccgacacatcaccgtcatcgagggccagactgctgctgtcgcggaggcggcggcggtgagtacagaggtggccgtggaggcggcgcctactgctgttgcaggcgcccagatgcctgcagccgatacgggggg

SEQ ID NO: 2246 - DNA, 533 bp, Zea mays
  Clone ID: PAT_MRT4577_54533C.1
attgggtacctcgaggccggccgggttctcatccgtaaactctcaagcctagccgcctcctgcaagttgcagaggtcaggaatctgcgtcatgtcgagtgaaacggagaccttcgcatttcacgctgagatcaaccagctgctctcactcatcatcaacagcttctactccaacaaggagatcttcctccgcgagcttatctccaactcttccgatgtgctggacgagatcaggctcgtgagtctcactgcacaagagcaagctcgatgcgcagtctgagcttatcatccaccttgtcccagacaaggccacgaacacgctctccatcatcgacagcggcgtcggcgtgaccaagtccgaccttgtcaacaacctcggcaccatcgccaggtccgggaccaaggagttcatggaagcccttgctgctggcgctgatgtgtctatgattgggcagttcggtgtcggtttctactctgcctacctcgtcgccgagagggtcgtcgtgaccaccaagcataacgatgacgagcagt

SEQ ID NO: 2247 - DNA, 459 bp, Zea mays
  Clone ID: PAT_MRT4577_54762C.1
aacgccttcagcacctacggcgaggtcctcgagtccaagatcatcctggatcgggagacgcacaggtcccgcggcttcggcttacccaccttctccacagaggaggcgatgcggaacgccatcgagggcatgaacgtgcaaggagctggacggccgcaacatcaccgtcaacgaggcccacccccgccgcagccgtggaggcggcggcagtaggcacagtggtggccgcggaggcggacgatacggcggtggcaggcgccgggatggcggcagatgatactgcggtggcagcagctacggtggcggccgcggctactgcggtggcggcggtggataccgcagtggcaaccgtggctgctgctacgacaactcctgcaggaactggcagaactgagcggacgggcccgctcggccaatttatcctgttcgctaccgagatgttgaccctagtcctgaggg

SEQ ID NO: 2248 - DNA, 1999 bp, Zea mays
  Clone ID: PAT_MRT4577_54782C.1
ctctctatatctaatttctcgtggaggcgagcagatagacaggagagagaacgcacgcaagaacgcgctctcctcgcgattggacagggcgcgaacaccccgaggacgcgcgcgatccccgaggacacgggggtgacagcctcgccgtcgccggggcggccgtttcgagctccgtcccgcctcggcccggctcagatttggtgggatccggccaagaaatcccgcagttggtgaggaggagaggaggggagaggaagggagggcggaggggatgggcgtcggtgcggagcccaaggatcaggcggcgacggccgctggggtgccggcagagcaggacgaggcgggcgggaaggaggacaaggccgccgcggtgtcctgctcgatctgcctcgacgcggtgctcgctgcgtccggggagaggtccaccgccaggctgcactgcggccacgagttccacctagattgcattggatcagcatttaatgccaaaggggttatgcaatgccccaactgccgcaaaatcgagaaagggaattggctttatgcaaatggttctcgatctgcccatgatgttagcatggatgaatgggcccatgatgaagacctttatgatgttagctactcagatatgccatttcgcttccattggtgtccgtttgggcgcttaacccaacttccatctttatttgaggaaggagaatcatcacctccagttacatttcatgacttcatgggacaacatgtgtttacggagcaagtagctgtatctgctgcagcagggacaactaatccttgcccctatgtggcatacttgcatcctcttacaccattgacgtcattgtcaagctcccatgtccctgacagaactacggatcgtcctgcataccatgatcattggaaccccatggctgggccatcagatgttaggtccatgcaaacaatgcaacctgctgattttcatcatagccattgggcacatgtgccccattcttatggtcaacccaacagcaataacgagcagccaggaatcccttttggagcaagggctgtacgggtcgatggtgatagccaacgccgagcatctgttgtctctccatcttacttcagtaatggatctggttccagatctagacctcccaatgttcctcctctgatgcctcagttcatgagggctcatggcagcatcagcgaacagtaccaacagaattcatcatctagcttatttgctggggcccataggtcaggaggcatgcgacctgccccaacacctctaccagagaaccccacctttaccttgttcccgccaggttcatctggccatagctcgatggagactgatgatgctgggggaagccggttctacgcctgggagggtgaccggtttgccccatacccgttgatgccggtagactgcgagacaagctggcggacctcacagcagcagtcccaccagagcacatcagagcctacatctgctccaaggaggctgtttgggcaatggctcgctgtcggcaggccatccccatcacccgaggggtcttcgtatcgtcaattgcactcaccgcggatgtagaccctcgccgctgaaagaaacgatgggaagcccattgtattaagttaagccgggctgtgccgtgaaactttgggacgatgctcgaggggacagaaactggaaacgatccggctgaggatatttcgatttggtttatgtgaattccatctcgtacatatttgaaatcaagttgggatgctgggagcttcgaatgtaacgtgatttcttatgctgcaattctgttgattgacggattttcaaacgcgattgaatttccgttgcaatggtaaaaaaaaaaaaataggcgttacatgttggtgttgtagcatgtgaaggcctacgttccatgcagtttccaacaaagtagaatagaaatttggtgaaacactcgattgcagtggtttggcattcgtaatgttagtaaggcaaaatgttccaatcccgatt

SEQ ID NO: 2249 - DNA, 401 bp, Zea mays
  Clone ID: PAT_MRT4577_55015C.1
tttaccacaaggacgaggatgtcttgcatctgcggatcaagctgcggttgcggctcaagctgcaagtgcgggtaatatataataatatataagtgccccgggcatgattaatttctccagccttcttcttgtctagttaatttggatcgagtagttcaatccatttgcgcgctgtccttttttcagcaagaagtaccctgacctggaggagacgagcaccgccgtgcaggccaccgtcgtcctcggcgtggccccggagaagaaggccgcgcccgagttctttaaggccgcggcggattcctgcaaggccgcccacgcctgcggctgcggtagcgggttgaagtgcgacccctgcaactgttgttacatagaccgacgaccatggttatggatattatcta

SEQ ID NO: 2250 - DNA, 530 bp, Zea mays
  Clone ID: PAT_MRT4577_55137C.1
ggctcactcatttctgggaagccacaaacatcagacaaaaaatttattattgaactataactcataaaaaactaaaaaaggcaccaccaatgatgggttgttggtagaacgctgctgggtttgaaaaagtaagctggttgaatggcagcaattgttgcaggtgtaagagggagccatcgttaggcgcacagtgctggcataacggcaacaactgcggttgtctcaagaaggtagcaaggctcacaccagctagctggctaaatggcagtagttgttgctgctgttaataagcatgagaggacaatgctgccagttggttgaatggaagaaattgatgggggtaggcagcaggtagctggctgaatggcagatggtgccgttgcaaataacaagcagaggtcaatgcagcatagcaggtgtgaatggaagaaactgctgttgctgatagtaggcaacaagggttgctagcacaagatggtgtagttgctgtgccctgatgttttgcgctcataaatgcaccaaaggtaact

SEQ ID NO: 2251 - DNA, 1018 bp, Zea mays
  Clone ID: PAT_MRT4577_55297C.1
gctgttcgaagctttcagccgagcaccatcgtcacagtcagtagccaagcatatttctttctccgagtgatttgcgctgagcgatcagttccagagcgagcggagctgagctgagcgagcttgcgttgcttgagagaccctgccatggcttcccaccaggacaaggctagctaccaggccggcgagaccaaggcccgcaccgaggagaagaccgggcaggcggtgggggcgaccaaggacacggcgcagcacgccaaggaccgggcggcggacgcggcgggcaagggccaggacgccaaggaggccaccaagcagaaggcgtccgacaccggcagctacctgggcaagaagaccgacgaggccaagcacaaggccggcgagacgacggaggccgccaagcacaaggccggcgagacgacggaggccgccaagcagaaggccggcgagacgacggaggccgccaagcagaaggccggcgagacgacggaggccgccaagcagaaggcagccgacgccatggaggccgccaagcagaaggccgccgaggccgggcagtacgccaaggacaccgccgtctccggcaaggacaagtccggcggcgtcatccagcaggccactgagcaggtgaagagcgcggcggcgggcgccaaggacgcggtgatgagcacgctggggatgggcggggacaacaagcagggcgacgccaacaccaacactaacaccaacaccaacaaggactcctctaccatcaccagggatcactagacgctaagacgcgtgtatgcacacgcacttggtccgatcctgtccgtgaccctgtttgcttgttcgcgagtccagtatgggtttgtgcatgttttcagtgtcatggtttccttttctacgaatttggcgttgtaagtttgattcgcaggtacgttgctgtgttttttttgcgtcatcaggtgtctgtaaacgagtcgggcgggtttgagtgtcctttgttgtgataataaagttggtaaatcctaattaatat

SEQ ID NO: 2252 - DNA, 1169 bp, Zea mays
  Clone ID: PAT_MRT4577_55302C.1
aattcgaattcgcacggctgttcgaagctttcagccgcgagcaccatcgtcacagtcagtagccaagcatatttctttctccgagtgatttgcgctgagcgatcagttcatccagagcgagcggagctgagctgagctgagcgagcttgcgttgcttgagagaccctgccatggcttcccaccaggacaaggctagctaccaggccggcgagaccaaggcccgcaccgaggagaagaccgggcaggcggtgggggcgaccaaggacacggcgcagcacgccaaggaccgggcggcggacgcggcggggcacgcggcgggcaagggccaggacgccaaggaggccaccaagcagaaggcgtccgacaccggcagctacctgggcaagaagaccgacgaggccaagcacaaggccggcgagacgacggaggccaccaagcagaaggccggcgagacgacggaggcgaccaagcagaaggccggcgagacgacggaggccgccaggcagaaggcagccgacgccatggaggcagccaagcagaaggccgccgaggccgggcagtacgccaaggacaccgccgtctccggcaaggacaagtccggcggcgtcatccagcaggccactgagcaggtgaagagcgcggcggcgggcgccaaggacgcggtgatgagcacgctggggatgggcggggacgacaagcagggcgacgccaacaccaacaccaacaaggactcctctaccatcaccagggatcactagacgcgtgtatgcacacgcacttggtccgatcctgtcgtccgtgaccctgtttgcttgttcgcgagtccagtatgggtttgtgcatgttttcagtgtcatggtttccttttctacgaatttggcgttgtaagtttgattcgcaggtacgttgctgtgttttttctgcgtcatcaagtgtctgtaaacgagtcgggcgggtttgagtgtcctttgttgtgataataaagttggtaaatcgtaattaatatatagcatgcgactgtcttgctatggcctaaaaaaaaaaaaaagcgcaccatccagttcgtggactggtgcccgactggcttcaagtgcggaatcaactaccagcctcccagcgtcgtgcccggcggtgacctgggcaaggtgcagcgtgccgtgtgcatgatc

SEQ ID NO: 2253 - DNA, 1274 bp, Zea mays
  Clone ID: PAT_MRT4577_55304C.1
ccggtattcttgggttttcccacaattcgcacgctgttcgaagctttcagccgagcaccatcgtcacagtcagtagtagccaagcatatttctttctccgagtgatttgcgctgagcgatcagttcatccagagcgagcggagctgagctgagctgagcgagcttgcgttgcttgagagaccctgccatggcttcccaccaggacaaggctagctaccaggccggcgagaccaaggcccgcaccgaggagaagaccgggcaggcggtgggggcgaccaaggacacggcgcagcacgccaaggaccgggcggcggacgcggcggggcacgcggcgggcaagggccaggacgccaaggaggccaccaagcagaaggcgtccgacaccggcagctacctgggcaagaagaccgacgaggccaagcacaaggccggcgagacgacggaggccaccaagcagaaggccggcgagacgacggaggccgccaagcagaaggcagccgacgccatggaggccgccaagcagaaggccgccgaggccgggcagtacgccaaggacaccgctgtctccggcaaggacaagtccggcggcgtcatccagcaggccactgagcaggtgaagagcgcggcggcgggcgccaaggacgcggtgatgagcacgctggggatgggcggggacgacaagcagggcgacgccaacaccaacaaggactcctctaccatcaccagggatcactagacgcgtgtatgcacacgcacttggtccgatcctgtcgtccgtgaccctgtttgcttgttcgcgagtccagtatgggtttgtgcatgttttcagtgtcatggtttccttctctacgaaatttggtgttgtaagtttgattcgcaggtacgttgctgtgttttttctgcgtcatcatgtctgtaaacgagtcgggcgggtttgagtgtcctttgttgtgataataaagttggtaaatcgtaattaatatatagcatgcgactgtcttgctataaaaaaaaaaaaaaaaaaaaaaaaaaaaaaaaaaaaaaaaaaaaaaaaaaaaggcaagatttttaccaaccgtcttctaaggctaaaatcatagccaactgaaaaaaccttggggactggaaagcgtttccctttccacgaatttggcgttgtaagtttttttcccaggtgcgtttttttgttttttttgggcccccaaggggctgtaaacaagtcgggcgggtttaagtgccctttgttttgaaaaaaaagttggtaaaccccaatt

SEQ ID NO: 2254 - DNA, 355 bp, Zea mays
  Clone ID: PAT_MRT4577_55326C.1
agacaacttgttcaattgattctggaagagatcgatctacttttgcaccacagggtctaggatgtgttgcaactgcggatcaagctgcgattgctgctcaagctgcaagtgcgggaagaagtaccctaacctggaggagactagcaccgccgagcaggccaccgccgtcctcgtcctggcccgggagaagaaggccgagcccgaattcgtcaaggccgtggctgtttccggcaagggcccccacgcctgcttctgcggtagcagttgcaagtgctacccctgcaactgttgatcacattgatcgacggccatggatatggtttttatctatctagcttggggtggtgggtgaaca

SEQ ID NO: 2255 - DNA, 418 bp, Zea mays
  Clone ID: PAT_MRT4577_55853C.1
tctttttttttttgctgcccctattaccaagtcctactcgggttagggttccttagggatttgtggaggggcaatggcagaggatgatgtcgagtaccgatgctaaaggtgggggcttgactgggacaccagcagcgagtcgctggagaatgcctctgtctactacggagagatcctggactccaaggtcatgaccgaccgcaagacggcgaggagccgcggctatccgcttcggtaccttctactacgagaactccatgctcgacagctatcgagaacatgaacggcagggagctcgacggccgtaacatcagccgtaaccaggcccagtccagaggcggcggcagtggcggcggcggctacggcggcggccgcgggagcggcggctatggaggcgggcgcacgtgacggcggatat

SEQ ID NO: 2256 - DNA, 470 bp, Zea mays
  Clone ID: PAT_MRT4577_55898C.1
ccggccgggagcgcccgtcgcctccctttccccttgcctccctccctctgcccgagtgccggcagacgcactttggccctcaattcgatccctattcgtcctcccgcgaccgagattccctccgacaaacgcggatctgaacgctgcgctccgagtagccgctcgaatgcgacatgaagggggacaaattcaagggcgccgccaaggctgatgccaagctggcggcgaagagtaagagggcggaaaagcccgacaaggacacgaaagggaaggccggcatggaccccaacaagcctaagagggctcccagtgctttctatcggtctatggctgaattgcacaaggagcataaggataagaaccctaagaacaagctgtgatgctgcggaggaaaaagctgctggcgacaggtggaaatacctgagcgagtcgaacaatgatcgctatgtagccaaagctaacaagctcaa

SEQ ID NO: 2257 - DNA, 166 bp, Zea mays
  Clone ID: PAT_MRT4577_55906C.1
gggcacaacaactacaacaacttgagctagctaaccttgctgcctactgtcagacacagcacgttacttccatgtaaccaactagctgcattgagctctgagtgttatgtggaacaagaacaactaccatacatccagctacctgcttgctacaggcaggattgac

SEQ ID NO: 2258 - DNA, 4577 bp, Zea mays
  Clone ID: PAT_MRT4577_55970C.1
ccggccgggacgtccgcccctgccagtttgcgttcgccacccgtccaaaaccccccaaccaaagcccgctccggcagcccccaccccaccatcgcgtcaatggcggcgccgcctgtccagcctgtgccaaccgcggcggcggcggcggcggctgtgaacggggacgcgttccgtctgggcttcgtcggcgcgggcaacctggccgagagcatcgcccgcggcgtggcggcgtcgggcgtcctcccggcctccgccatccgcaccgcgccccaccgccgccccgagcgcggcgaggccttcgcgtccttcggcgcgtgcttgctccaaaccaatgcccatgttgtggacgacagcgatgtgatcgtcatctccgtgaagcctcagatcgtgaagcaagttctacttcagctgaggccacggctgtcagaaaaaaagcttctcgtgtccattgctgccggcatcaagatgcaagatttgcaggattggtctggtcaacgacgtattattagagtaatgcccaacaccccttcagctgttggacaagctgcatcagtcatgtgtttgggagagatggctactcaggatgatgaaaaccgtgtaagaaaactgttcagtgccattggaaaagtctggacagctgaagagaaatattttgatgctgtaactggtctgagtggtagtggcccggcctatatcttcctagcaatagaggccatggctgatggtggagttgctgctgggcttcctcgggaccttgcccttggtcttgcatctcaaacagttcttggtgctgcaactatggtgagccagacaggcaaacatccagggcaactgaaagatcaggttacttctccagcaggtactaccattgccgggattcaggagctcgagaagggcgcattccgtggaacgctgattagtgctgttgttgctgccgcaaaccgctgccgcgaactgtcatttcgaaaactcgagggccgggaggatcgatcaatcagcaccgaccactcgcgacccgattcgaatcgagccagagtcccaggcagcggcggcggcggcgcccgcctccaagaccacctccacccggaccccagccccaaccccaagttaacagatgggggacgttgcgaaggacttgacggctgggaccgtgggaggggctgccaacctcatcgtcgggcacccgttcgacaccatcaaggtcaagctccagagccagcccacccctgctcccggacagctccccaagtacgccggcgccatcgatgctgtgaagcagacggtcgcggctgaaggcccgaggggcctatacaaggggatgggggcacctctggccaccgtagcggccttcaacgctgtcttgttcagtgtcagggggcagatggaggcgtttctcaggtcagagcctggtgtgccgctgacagtgaagcagcaggttgttgcgggcgccggtgctggaatcgcagtctccttcttggcttgtccaacagaactgatcaagtgcaggttgcaagcccagagttccttagccgaggcagccaccgcttctggtgtggctcttcccaaaggtccgatcgacgtggcgaagcatgttgtccgggacgccggcgccaaaggtctcttcaagggcctggtcccgacgatgggacgcgaggtccctggcaacgcactgatgttcggcgtgtacgaagccacgaagcagtacctggccggcggcccggacacgtcgggcctcggcaggggctcccaggtcctggcgggcggcctcgccggcgccgccttctggctgtccgtgtacccgacggacgtggtgaagagcgtgatccaggtggacgattacaagaagcccaagtactccgggtccctcgacgcgctgaggaagatcgtggcggctgatggggtgaagggcctgtacaaggggttcggaccccacccccccgctccaggcgctgtcctgtgcccacggggacgccgggcttcgtcggcgcaacccttgtgacattttgccccctcttcccttcccaacccaacccattgcatttgcaagcccttttacattgcagagcgccagagcctcgctcgctctcggaacagagctaggcagctaacagacgaagaagaagcaagccaagcagaattgagagagaggcgaggacgtggcgacgacggcagccgcgatggcgacgacgacggacctggggttcgaggcgacggagctccgcctgggcctgcccggcgggggaggtggaggggagccggcgctgggcggcgaggggaggagctcttcctccgcctccggcaagaggggcttcgccgagaccatcgacctgaagctgaagctggagccagcggccgtcgtggaggcggaggaggaggaggaggaccacggcgttgctgttgcccttgagaaggaggaggaggccgggaagatgaagcggtccccgagccagagcagcgtcgccgccgccgccgccgccgtgctggctgaccccgccgagaagccgcgcgccgccaaggctcaggtggtgggatggccaccggtccggtcgttccggaagaacatcatgtccgtgcagtccgacaagggcgccgccgccgccaacggcgacaagtcctcgccggcggcaggcggcggtgccgcgttcgtgaaggtgagcttggacggcgcgccctacctgcgcaaagtggacctcaagatgtacaggagctaccagcagctgtccaaggcgctcgagaacatgttcagctccttcaccatcggaagctgtgggtctcaagggatgaacggcatgaacgagagcaagctggtggatctgctcaacggctccgagtacgtgccgacctacgaggacaaggacggggactggatgctcgtcggcgatgtgccgtgggagatgttcgtcgaatcatgcaagcgccttcggatcatgaaaggatcagaagccattggcctggcgccaagggccatggagaaatgcaagaacagaagctgaggagaagacggacggacggaagcttgcatctcagcaccaccaggggtggatggatgcaagaagaacaaatctccatggcttttgcagctctgctcgtctctgtatcatactcgtcgtccctgcccttcaggcctctgtatctccctgatcaatgaagtcgttttggtgtgtcaactgttctctccgtgcccagcttgtcagtgaaagagtcagtcagtgtccatcaagtctcatcttgtcctatacagaagagagaagccatgcatgaacatgtacctgtcctataacaatgtctttttttgctacctgtttttttttctctctctctctttttttggcacaagatgcaaaggcaccctgctcctgatcaaagggccttttgcatcataagctgtttgattataattaccatggtgtgtcagtggaacaaataactgttgcaaggtgttaaaaaaaagttgtattgtaatatgatcacctctcttccttgttgttttcaaaaaaaaaaaaaaaaaaaaaaaaagctagcaccagggcaactgcaagatcaggttgatgcaccaagagcaaatctccatggcttttgcagctctgctcgtctctgtatcatactcgtcgtccctgcccttcaggcctctgtatctccctgatcaatgaagtcgttttggtgtgtcaactgttctctccgtgcccagcttgtcagtgaaagagtcagtcagtgtccatcaagtctcatcttgtcctatacagaagagagaagccatgcatgaacatgtacctgtcctataacaatgtctttttttgctacctgtttttttttctctctctctctttttttggcacaagatgcaaaggcaccctgctcctgatcaaagggccttttgcatcataagctgtttgattataattaccatggtgtgtcagtggaacaaataactgttgcaaggtgttaaaaaaaagttgtattgtaatatgatcacctctcttccttgttgttttcgacccgccatggcacgcacgttccagccaatgccgcgacatgcggggcctacgagatcacgagatcggtgctaggttgatttgattggtgctggcctttgctatggccctttgcagtttattcattctccttgcgcggctggagcaacgcgaacaatgccagacaatttttagggaggaaagagagagagaaacttttcacttcaatgatgagattctttaatgaagcaaagcttacttaaaagtttgttcatgtggagccacagagtgagtggttggtgacagataagtaatactggccttgtcgtaatggttggttggcctggcctagagtgggcatccgacggtgatccgatggcgcgcgagtccgactggtggtgcttgtgatggtgagctgtgtggcccatggttttgttggcgtttgggggtgggtggccctcgtcagttcgcattcgggattcccttttgcccccacaattccacgttcgccttggcttctttttcttgttggcctaaattatattctttttctctttcacacacacaaatatattcagtttcccgttcttcctttattagtgccag

SEQ ID NO: 2259 - DNA, 333 bp, Zea mays
  Clone ID: PAT_MRT4577_55983C.1
ttttctttaggatttaacttaaaataaagccggactgtggtaacatcacccatcgatccgcattccatgcttgttgatgcatgggtctgctggaccctatgatgaacacattacttacttctgtcacagagcgaccttcaatcaaaaacacatatgggcaacaacaaactcgagacgaactattataaacactttggactagggtaaacaacacggtagctaacaggataacttggccgtgcgggccccaccgttcatttcctccatttcccgtctgagttgccgtatccgtcgccactgttgccacctccttttccgtcgtcaccaccaccg

SEQ ID NO: 2260 - DNA, 2687 bp, Zea mays
  Clone ID: PAT_MRT4577_56004C.1
cctcggggccgggggggacgtgtctcgctcgttctgcctttttcgtctctcctctgctcttcgccgccggctctccgtctacacctcatcataatcacagagcgctagggaggagagagggggaagagagagggctagggtttcgtgctccctcacgcaacgaatccgagccggatcggggggtgcgcggagtcaccggcggcccggcgttgcctgggctgtgatacagttgcaatggcatctgtaactgatgagacagctaagattgagggtttgacatctgctgcagcctttgtggagggtggcattcaggacgcatgtgatgatgcatgcagcatttgccttgaggctttctgtgagagtgacccttctgcattgactggctgcaaacatgagttccatctccaatgcattcttgaatggtgccagagaagttcacagtgcccaatgtgttggcagcctattactatgaaggatcctaccagtcaggagctgcttgaggcagtagagcgtgagaggaatataagaactaatcaaactcggaacacaactatatttcatcatcctgctcttggggattttgagctgcagcatctgcctgttggtaatgatgctgagcttgaagagcgtatactgcagcatctagctgctgctgctgcaatgggaagggcacaccatcttggaagaagggaggggcacaggggacgatctggctctcatggtcgtccacatttcctagttttctctacacaaccaaattcaccttctgctggcacaatctcttcatcttctgctcatatggagggagaaaatgattcaaatcctgccacacctagagctagcgagtcatctccacgagctattcgcattggagaagtgggaaaccaaagtcctgggatgcttacctacgatgctgaacaggatgctgtcgtttcttccggaaatagcactcctgtatcgagtcctaggttttttaacaggagacactccactggacagtcaactccagacagggctgggccatcggatattcagtctttctcagactccctgaagtcccgcttaaatgccgtctctatgaagtacaaagaatctattacaaagagtactcgagggtggaaggagagattgttttcacgtaattcatccgtggcggatcttggttctgaagtgagaagagaagttaatgctggaattgcgtccgtatcacggatgatggagcgtctggaaactagaggaaatagcagaacaagtgatagcccggcagcatccacttctgaagttccccctgctacagaatcaagcaatgaaagggttacagagagcaactctgctgctgctgctgtgtggtggtggtactaccactacgggtaccagcgctagcaacgcctccgccccttgtgttgcgacatccggttcaaattaggacatgtttgtgagcctggcggcagagcagaagtgcagtaacatgatgccgtcatttttttctcaaccactgcataaacggctgcaaggggaaaaaaaccaaacggtgatttgatgtattggctcgataaaatggtggtgcgtgtggcctaggagaagtcggatttcatcttctgttttcgtctctttgtaaaaaaaatcgtctgagggcagatgtttaccggtataaataacggatatgtcatcttcatagtacgtggatcagttataaatatgattggaacagcaaagcttgctgctgttataaagttgtaccgtggcacgatttcctgttctgttctgtgtgggtgaattgatggattttgctgtacacaagatatgcatctttccaggtctcatgcctatgtatacatatacatattacccaaacctaccttgaatccctcacccctgaagtcccaatgccgactaaaaagaatctattacaaaaatggaaggagagaattcatccgggcgatctttctaatatgctggaacagatggagttaatactataattaatagcgtaacaaggatgatcccggcagcagaaactagaggaaatagcagaacaagtgatagaaacgcagcatccactactgaagtcccctctgctacagaatcaagcaatgaaagggttacagagagcaactctgctgctgctgctgctggtggtggtactaccactacgggtaccagcgctagcaacgcctccgccccttgtgttgcgacatccggttcaaattaggacatgtaagggtctcagaaagaaggcttacacctgcaattcttcatcttcaaaggtttgtgagcctggcggcagagcagaagtgcagtaacatgatgccgtcatttttttctcaaccactgcataaacggctgcaaggggaaaaaaaccaaacggtgatttgatgtattggctcgataaaatggtggtgcgtgtggcctaggagaagtcggatttcatcttctgttttcgtctctttgtaaaaaaaatcgtctgagggcagatgtttaccggtataaataacggatatgtcatcttcatagtacgtggatcagttataaatatgattggaacagcaaagcttgctgctgttataaagttgtaccgtggcacgatttcctgttctgttctgtgtgggtgaattgatggattttgctgtacacaagatatgcatctttccaggtctcatgcctatgtatacatatacatattacac

SEQ ID NO: 2261 - DNA, 2210 bp, Zea mays
  unsure (1)..(2210): unsure at all n locations
  Clone ID: PAT_MRT4577_56005C.1
cctcgaggccggccgggctttttcgtctctcctctgcctttccccatcgtctctccgtctacacctcatcataatcacagattcacagagcgctagggaggagagagggctagggtttcgtgctccctcacgcaacgaatccgagccggatcggggggtgcgcggagtcaccggcggcccggcgttgcctgggctgtgatacagttgcaatggcatctgtaactgatgagacagctaagattgagggtttgacatctgctgcagcctttgtggagggtggcattcaggacgcatgtgatgatgcatgcagcatttgccttgaggctttctgtgagagtgacccttctgcattgactggctgcaaacatgagttccatctccaatgcattcttgaatggtgccagagaagttcacagtgcccaatgtgttggcagcctattactatgaaggatcctaccagtcaggagctgcttgaggcagtagagcgcgagaggaatataagaactaatcaaactcggaacacaactatatttcatcatcctgctcttggggattttgagctgcagcatctgcctgttggtaatgatgctgagcttgaagagcgtatactgcagcatctagctgctgctgctgcaatgggaagggcacaccatcttggaagaagggaggggcacaggggacgatctggctctcatggtcgtccacatttcctagttttctctacacaaccaaattcaccttctgctggcacaatctcttcatcttctgctcatatggagggagaaaatgattcaaatcctgccacacctagagctagcgagtcatctccacgagctattcgcattggagaagtgggaaaccaaagtcctgggatgcttacctacgatgctgaacaggatgctgtcgtttcttccggaaatagcactcctgtatcgagtcctaggttttttaacaggagacactccactggacagtcaactccagacagggctgggccatcggatattcagtctttctcagactccctgaagtcccgcttaaatgccgtctctatgaagtacaaagaatctattacaaagagtactcgagggtggaaggagagattgttttcacgtaattcatccgtggcggatcttggttctgaagtgagaagagaagttaatgctggaattgcgtccgtatcacggatgatggagcgtctggaaactagaggaaatagcagaacaagtgatagcccggcagcatccacttctgaagttccccctgctacagaatcaagcaatgaaagggttacagagagcaactctgctgctgctgctggtggtggtggtactaccactacgggtaccagcgctagcaacgcctccgccccttgtgttgcgacatccggttcaaattaggacatgtaagggtctcagaaagaaggcttacacctgcaattcttcatcttcaaaggtaccacatatatcttgtcctggagcttcggttggatgaaactaacaggtgccaaatgttgcaattccaggtttgtgagcctggcggcagagcagaagtgcagtaacatgatgccgtcatttttttctcaccactgcataaacgctgccgggggaaaaaaccaaacggtgatttgatgtattggctcgataaaatggtggtgcgtgtggcctaggagaagtcggatttcttcttctgttttcgtctctttgtaaaaaaaatcgtctgagggcagatgtttaccggtataaataacggatatgtcatcttcatagtacgtggatcagttataaatatgattggaacagcaaagcttgctgctgttataaaaaaaaaaaaaaaaaaaaaaaaaaaaaaaaaaaaaaaaaaaaaaaaaaaaaaaaaaaaaaaaaaaaaaaaaaaaaaaaaaaaaaaaaaaaaaaaaaaaaaacaaaaaaaaaacaaacaaaaaaaaaaaaaaaaaaaaaaaaaaaaaaaaaaaaaaaaaaaaaaaaaaaannccccccccccggggggccccccgggaaggaacccaaggttttgagacccaacccaagttggcggctttttgggggggccaatcaaaaaaccccaccggggaaccttccccttttttcccaaaaaacggccccccttttgggagggttttgccccccaatttgcccgggaacaaaatccccaaagggggaaaaccctcccccaaaaaaggccccttt

SEQ ID NO: 2262 - DNA, 344 bp, Zea mays
  unsure (1)..(344): unsure at all n locations
  Clone ID: PAT_MRT4577_56006C.1
gaattanntcgagggcttctcctccccctccggttctggatcggtttcgacaggntctccggcgttcgggttggggtgttttcagatccagatggcggcccctgatgttgagtaccgctgcttcttcagcagcctcacctgagccacggacgaccactccctccacaacgccttcagcacctactgcgaggtcctcgagtccaagatcatcctcaatcgggagactcataggtcccacaacttccgcttcatcaccttctacaccgatgatgcgatgcggaacgccatcgaaggcatgaacggcaatgagctggacggtcgcatcatcaccgtcaacgaagccc

SEQ ID NO: 2263 - DNA, 741 bp, Zea mays
  Clone ID: PAT_MRT4577_56071C.1
gggtacctcgaggccggccggggtacaccgtcaacgctgagttctagatcgtgatcatctaatccgcgacggggtacaggatgactgccagaacgaccgcaagatgaatgagaggcttgtcggcgtctctgaggataccaccacgggtgttaagaggctctaccacgatgcacgagaccggcgccctcctcttctctgccattaacgtcaacgataccgtcaccaacgagctagtttgactacctgtatgggtgccgccactcgctccctgatggtctgataagcgtcacagacgttatgatcgccggtaaggattgcgtcgagctgcggatacgtcgatgtccacaaaggtagtgccgctgcactgaagtagggtggggcccgggtcattgagacctaaatccacccattatgagccctccaggctctgatggatgtacttcaggtgcttcccttgtgggaggttgtctctgaaactgacatcttcatgaccaccactgtctacaaggatatcctcatggctgagcacatgaggaatatgtcgaatcatgccattggctgcaacagtggtcactttgacaatgagattgatatgctcggacttgagacctagcctgcgcggaagcgcatcaccatcaagccccaaactgaccgctggatgttgcccctagaccaacactgacatcattgtccttgatgagggtcgcctgaagaaccttgggtgagatactggccagccta

SEQ ID NO: 2264 - DNA, 614 bp, Zea mays
  Clone ID: PAT_MRT4577_56090C.1
ttatcatctagcggctctatatttcttctctctctgctcctccgcctccgcctgatccatccaagacagggatcgccatgccggactcggaggagcaccgcttcaaatcgaaggccgacgctggcgcgaccaacacctacccgcaacaagttgggaccgcccggaagaacgggttcatcgtcatcaagaaccgtccctgcaaggatgcggaggtttctacctccaaccactgtcaaccatgaccacgccaaatgacactttgtcaccgtacacatattcaatgcgaaaaagctggaagatattggtccttcatcacacaactgtgacattccgcatgcgaaccgtactgagtatcagctgattgatatatctgaggatggatttgcgatccttcttacttcacatggtaacagtaaagaggatcttagactcccaactgatgagactcttgtggcccaaattaatgaagggatcgaaagctgtaaggatcttgatgtgactgtccagtctgccacgtatgaggagcagatctgcacgttgaaggatgttggcgccgagcaacttccttgcctttggacactataccctactgtatctccactcaaatcggggaa

SEQ ID NO: 2265 - DNA, 2726 bp, Zea mays
  Clone ID: PAT_MRT4577_5615C.1
gggtccctcgaggccggccgggacgaactggcgtgccagtgccagtgccgagcgcccgagcccttactcctcttcttccgaccccccgctggcttggaaaaaaggggaagaaaactcgcgcagtcggtcaccgaagggaggagcgcggtcgaggtgccgcccacacggagctgcgaggtgtttgtaggatctcctaggtgagcccctgctgcttggagacagccatggccaccggcgtggctccagctcctctcccacatgtcagagtgcatcatgggggcgtcgggttcaccaggagcgtcgattttgcgaaggtcttgtctgctcccggtgccggcacgatgagggcaagctcctctagaggcagggcgctcgtggcgaagagctctagtactggctcggagaccatggagctcgagccatcttcagaaggaagcccacttttagtacccaggcagaagtactgtgaatcaacacaccagacaaggaggaggaaaactcgaactgtgatggtggggaatgtgccacttggcagtgatcatcccataaggattcaaaccatgacgacttcagataccaaggatgttgcaaaaacagtagaggaggtgatgaggatagcagataaaggagctgatcttgttagaataacagtccagggtaggaaggaagctgatgcctgctttgagatcaagaacactctggttcagaagaattacaacattccactagtggccgatattcattttgctcctacggtagctctaagggtggcagaatgttttgacaaaattcgtgtgaacccaggaaattttgctgatcgtcgtgctcaatttgaaaagctggaatatactgacgacgactaccaaaaagagctagagcatattgagaaggtgttttctccattagtcgagaaatgcaagcagtatggaagagcaatgcgaataggaacaaatcatggtagtctttctgaccgcataatgagctactatggtgattctccacggggaatggttgagtctgctttggaatttgctagaatatgtcggaagttggacttccacaactttgtattttcgatgaaagctagtaaccctgttatcatggtccaagcatatcgcctgcttgtggcagaaatgtataacctaggatgggattatcccttgcacttgggtgttacagaagctggagagggtgaagatggaaggatgaaatctgctattggcattgggacactgctaatggatggtttgggtgatacaatccgtgtctccctcacagaaccaccagaagaagagattgatccttgccaaaggttggcaaatcttgggacgcaggctgcaaaccttcaaattggggtggccccatttgaagaaaagcacaggcgttattttgatttccagcgtaggagtggtcaattgcctttgcagaaggagggtgaggaagttgactacagaaatgtcctgcatcgtgatggttctgtactgatgtcagtttccctggatcagttgaaggctcctgatctcctttataggtctcttgcagcaaagcttgtggttggcatgcctttcaaggatctggctactgtagattccattcttttgagggagctcccccctgtagaagatgctgaagctaggcttgcactcaaaagattagttgacatcagcatgggcgtgctggcccccttatcggagcagttgacaaagccactcccacatgcaattgtacttgtcaacctcgacgaattgtcaagtggtgcacacaaacttttgccagaaggcactagactagctgtcactcttcgtggtgatgaatcatacgagcagctagatattcttaaggatgttgatgatataacaatgttgttacataatgttccatatggtgaggagaagacaggcagggtgcatgctgctaggaggttatttgagtacttacaggccaatggcttgaacttccctgtaattcatcacataaatttccctgaaaccattgacagagatggtcttgtcattggtgctggggccaacgttggtgctctcttagtcgatggtcttggtgatggtgtattccttgaagctgctgaccaggaatttgagtttctgagggacacatctttcaacttgctccaaggttgcaggatgcgcaacacaaaaactgaatatgtgtcttgtccttcctgcggccgaacactctttgaccttcaggaaatcagcgctgagattagagaaaagacctctcatctgccaggtgtttcgatcgctatcatgggctgtattgtcaatggaccaggagagatggctgatgccgattttgggtacgttggaggcgctcccggaaagatcgacctttacgtcggcaagaccgttgtgcagcgcgccatcgccatggaaggtgccactgacgccttgatccagctgatcaaggaccatggccgatgggtggatcctcctgccgaggagtagggctgtaggctgtagccaagtctgtagtttatatattctgtaaagcgaaacacgcaatgcagtaactgagcatacgatgtacatcatccctacacattttgtacatttattgagatctgagaaataaactagaaaccgtcggtgacggcatgtctgcagcaccccaaatgaagcacatacgatttacatattagtagtagcccatgtgagcaagacataaaaaaaaaaaaaaaaaaggggcggtcgccgactagtgagctc

SEQ ID NO: 2266 - DNA, 762 bp, Zea mays
  Clone ID: PAT_MRT4577_56175C.1
cgtctccaacaaacttcactctgcaaacagtgtggaacagtataaattacagtgccgcattctctattttacacgatccgaagacagtcttaacagtgatagacatgtgatgcggattgtcgtgtggaagatggcacgcggactctcaccaagtcaagagctaaccttatacagaaagcagtggccactgtatatttttttggcaaacaaattcacttgtcactgatggtgcatcaggtcttgtaaatataagcatcaggccaccagctagtacagaacaccaatcacttttccgcgatcgtgtaatcgtgtgccaaggcaagaagcaaccggcatggcaatgcgatcgctgtgcttgccgctgctgttgttctccgtgtccatctcaatcccccccgccgtatcagcaaacgaagagctggcctcgcttctggccttcaaggtggcggcgatcagcggcgggtacggcgacccgcttgcttcgtggaacgagagcagcgccggtggcggtgggtactgtagctgggagggggtgagatgctggggcaagcaccggcaagtggtgaagctgagcctgccctcacgtgggctcacaggcgtcctctcgccagccatcggtaatctgtcatccctatggactctcaacctgagcaacaacgggttccacaacagcatcccggcgagcctcggccgcctgcaacgcctccataacctggacctaagccacaatgccttctctggtaagctccccgccaacctgag

SEQ ID NO: 2267 - DNA, 879 bp, Zea mays
  unsure (1)..(879): unsure at all n locations
  Clone ID: PAT_MRT4577_56505C.1
cctcggagccggccgggcctgtcaagtgcttatcacttatcatccccatccgcacctctctccatctccctgctcctccgcctccttcttgattcatgcaagccagggatcgacatgtcatgctccgaggaggacgacttccaatgcgaggccgacgccggagcgatgaacacctacccggaggaggatggcaccgcccggaacaacggcttcctcgccatccagaaccgaccctgcaaggctgtggagggtgctacctcaaagactgcaaagtgtgggcgtgccacatgccgctttgctgacctagacatattcgacgggaaaaagcttgaagatattgtgccttcatcacacaactgtgatattccgcatgtgaaccggactgagtaccagctgattgatatataagaggatggatttgtgagccttcttacttcacatgggaacactaaggatgatcttagactcccaactgatgagactcttgtgtgccagatcaaggaagggattgaaagcggataggtatcttgctgtgactgtccatcctgctatggcttaggagcagatatgactgttgaaggatggtgagctcctagtgacttaactggcttgtaatattgtatttacaaacctaaatctaaaaaagaagtgtatcaaggattgctacagagacatccatctggcttgagctggcttttgctatgntaaacactagagtaggacctcgcatgcttgtcgaagcgagactgtattatatgtgtgtacattctggaccctgaattatctatgantttatgccccctactgtttagtattattatcaataatttggtttgggacggttgaatgcaaaaaaaatgaaacaaggccctaaggccc

SEQ ID NO: 2268 - DNA, 1725 bp, Zea mays
  Clone ID: PAT_MRT4577_5661C.1
gacgggctggggttcaggaccgcccagctccattgccaacgcaacagttccgatcctccacaccagcacccgccgccgccgcctcttcccttgcgcacctgctgctgtgcggatcggtgaggcggaggagtaggatggcgagcgcggccggaggcggagcggcgggggaaggggagtggcttaaggtatcccagctcaggcccatggtggaagcgcaggaccccaacgccaaggcagtggacaacctgacgctgcgtcggttcctgcgcgcgcgcgaccacgacgtggacaaggcctccgccatgttcctcaagttcctcaagtggcggagggaggcggcgcccggcggctccgtgccggaggagcaggtgaggagggagctgtcgcaggacaagctgtgcatgggcggcgtcgacagggccggccgccccatcctcgtcgccttcgcggccaggcacttctccgccggccgtgacatggcagagttcaagactgctcttaattgtgcaggttttgttgtctacttcttcgacaagatctgtgccagaatccccagagggcaggagaaattcctctgcatcgttgatctcaagggctgggggtactcaaactgtgacgtccgggcatacattgccgctatagagatcttgcagaactactacccggagcggctcggcaaggcgctgatgatccacgtgccctacatcttcatgaaggcgtggaagatgatctaccccttcatcgacaccaacaccagggacaagttcgtgttcgtggaggacaagagcctgcaggagacgctgcggcgggagatcgacgaggggcagctcccggagttcctcggcggcaagatggacgtgatcccactcaaggactatggcgtgcagcagcagcctcaggccgtgtaatagccatgccatgcgtagcatacacgagttgtggctaggagcatagcatggcaataactgtgtagctgctgtgaaagtgaaaatgaaacgttgcgctgtttagccgggtcaattgaccagcccaactgcagatctctgggctaccactatgaacagcaagaactgtttcccttatccttttcagccaaactaatcaaaccagaaaatgtttcttgtatgactgctaattaaaatgtactcaatgattacaaatgtcgaaaaaaaaaaaaaaaagggggaaaaaaaaaaaaaaaaaaaaaaaaaaaaaaaaaaaaaaaaaaaaaaaaaaaaaaaaaaaaaaaaaaaaaaaaaaaaaaaaaaaaaaaaaaaaaaaaaaaaaaaaataaaaaaaaaaaaaaagataaggtcgtggggttccaacaagaaaatgcagctccattcgtccctccacctcacccgccggccatctctcgatttctttttgtgtgctcagttttttctttgtgtgtcatgagtttcagaacttgattgggatggtttttgtgccatgagaattagggtttgatagggatgatttgggtatcagttcttacggtcactggaatttgcatattgtcatagtctaatgccattaaattttgagggtagcgatattgttttcaacctattgaatagggtatatgatgatgttggcaagcgctgcaccaggtaatattttgttaaagttttcctaaaaaaaaaacactgccatggcttgagctgggaggatccatacatgcatatggtttttgcttgaaagtatttttctttccttgct

SEQ ID NO: 2269 - DNA, 474 bp, Zea mays
  Clone ID: PAT_MRT4577_56632C.1
tttcggacgcttgggtattatttagaccgactagcatcttagaaagcacaatagtgttccaacaatggcagacaaactattttgcttacttatgctacttggtctttctgcaagtgctgctaccggaaccattttgaccacaatgctcacaagctcctatagcttgctgttttgcaccatacctatcaccagcgttgtcttgagtatgggataacccatttattcaaccctacaggatccatcaagcgataccagcaagcatcttacctttatgacccttgttgctgcaacaacggtcagccctattacaacagttacctttggtggatatgttggcacaaaacatgaaggcacatcaactacaacaactagtgctatgaaaccctgcttgctactctcaggaatcagcagtttctctcatttaaccaactgggtgcatcgaactctgctgcttatttgcaacaacaactacca

SEQ ID NO: 2270 - DNA, 981 bp, Zea mays
  Clone ID: PAT_MRT4577_56642C.1
caggcgcacggctcacgttgtccgcctcacgtaaaggtcggtgccttcgtctcctatctctcctcgcgcagttccacttcccatttcctccttcgtccgcatcagggacacactgccatccgcatgcggcaagatcctccctcattccccaaacatgagaggagcagaggaggagagatctggcgccgccactgatgcgggaggagaggaggagaaacgggagaggagcgtcggcctgatggccggcctcatggacaaggccaagggcttcgtggtggagaaggtgacgcaaatccccaagcccgaggctgcgctggatcacgtctccttccggagcatcagccgcgagggcgtcgagctgcatagccacgtcgacatcagcaacccctactcgcaccgcatccccatctgcgagatcacctacacgttcaagagcgccggcaaggtgatagcgtcgggcacgatgcccgaccccgggtggatcgcggcgagcggcagcaccaagctagacctgccggtgaaggtgccgtacgacttcatcgtgtcgctgatgaaggatctcggaggggactgggacatcgactacatgatggaggtggggctcactgtcgacctccccgccattggcgcctttactatcccgctcaccaccgagggcgagatcaagctccccaccttccgggacctattgttctaagcaattcagatatttggtgtatgaatcgatttgttttcacaccataatcaatgctgatgtggatttgcaaaaaaaaaaaaaaaaaacaggcggccagggactttaaagctaaaactatctccccccaatgtgaaatagaggagtttaagcctcccgtcacaaaaaaatctaacccgatgtagcaaaaaaaaaaaaaaaaaaggggcgggccccgcgctccacctttggtccccccccgcacgccaattcccccttgtcctcaactcgccccccccgcctccccc

SEQ ID NO: 2271 - DNA, 244 bp, Zea mays
  Clone ID: PAT_MRT4577_56806C.1
tttctcggtccgtccggccccgaccccatcgggcagattttccagggccccggggtgtgaatcaagatcacgtccaaccccaccacacgcgcctaccttaacgagcccgactttatgcaaatgctgcgcgaagtgcaaaggaacccctacagcatcagcatgtacctttccgatccccgcatgatgcaggtatctatccttatgcttaatgtcaagatccatataccttatgcctttttaccat

SEQ ID NO: 2272 - DNA, 3952 bp, Zea mays
  Clone ID: PAT_MRT4577_56807C.1
aaaaaaaaaatatccacgtttaatccaaaaagagcatgaagcagcagcaataactggggtttatttcggggccctaaagcagaaaatacagggttttactagaaaggaagaaacgggccccactgatgatcccgagggagatattatataactgcttctctgggtcttgagctaaacagcgcgcacgttggggtcattggcctccaccaaatccgaagccttttttttcgctcttgctctgctctcatgggcaggggatgcccatttacatacttgggtcccattcccattggtgggaattgggaagcgtacatacatccttcccggggttaatgcattgatgaggctgcaacttccggatgctaatttggtttgtctaaataaacatgaattttgtataatctaaaactaagtattactaggcatttgtaatagaaatttgtggtcatattcaggctgtcgctgcacacatatacatgatttcggcacgaggatcgatctcacttagctgctgctggtggtggttggtggcctgggcctggctgctgtgtctgtatcgatgtgtccgtattttctccatctcgtctgcatacgctgcaattggtaaggagctagctggcctttcatgtcttccatgctgccatagccatacggccggccggcaggcaggataccccatcgctcgctgcacatgcatgtatgcatggggatacatgttcatcatcagcagcacagtggctctgtatcccccatcccaatccgatcctatataggaggaggagaaggaggagcagcagcagcagccaggcgcggccggcggccggagtagtatccgaatccgctcaacacccaccggctggtctctagctttcctatcgatcaatggctttcaaaggactcccgcgtgattcccgagggtccctcgaagtcttcaatccagacgcccctgtttcagatcgagcaaccacctccccgtttctcctccctcctgcggtcgcgtcccatcccagcctcctcgccgccggagatggcggcgatgctgacgtgggtcgggcgacacagagggccgccgagtggggcctcgtcctccagaccgacgagcacaccggccgcccccagggtgtcgtcgcccgtccctccggttccaaccgcaccagcgagagtggcaactccatcgacgagagggccgccgccgccggtgctggtagagctctcccccgggtgtcggaggagcttcgcgccgcgctctcagcgttccagcagaccttcgtcgtgtccgatgccacccgccctgaccaccccatcctctacgccagcgctggattcttcaacatgacgggctactcctccaatgaggtcgtcggaaggaactgccgcttccttcaaggttctgggaccgaccccgtagagatttccaagatcagacaggctctcgcagctgggtcaaattactgtggccgtatcctcaactacaagaaggatggtacaccattctggaacctcctaaccgttgcccccataaaggatgaggatggcagggtcctcaagttcattgggatgcaagtggaagtaagtaagtacacggaaggtaacaaagatactgctcttcgtccaaatggattgccagagtcactcatcaaatatgatgcaaggcagaaggatcatgctcgtagctcagtctcggagctcctacttgccctgaaggatccacggtcactgtcagaatcaagaaacaataccttaaaaaggaaatcacaggaatcagcaggttcagctctagttcccggcaagagaagctccgaaactggatcccgtcgtaactcacatagtggaatcagaaactctctacaaaaaatcagtgaagtacctgaaggagggaataagaccaggaaatctggtttgcgttcttttatgggccttattggtatgggacatgggaatgtagagaagaacattctaaaaccaagggaagatcccctacttgatagcgatgatgagagaccagatagcttcgatgacgatttcaggaagaaagaaatgagaaagggcatagatttggctaccacacttgaacgtattgaaaagaattttgtcatcaccgacccgaggttaccagataatccaattatatttgcatcggatagctttttgcgtttgacagagtattgccgcgaagaaatattgggaagaaactgcaggtttcttcaaggacctgaaactgaccgtgggacagtaaagaagataagagatgccatagataaccaaacagaagttactgttcagctgataaattatacaaagagcggtaagaaattctggaacctctttcacttgcagcctatgcgtgatcagaagggtgatgttcaatacttcattggggttcaattggatggaactgagcgtgttcgagaggctgctgcaaaagatggtgccatactggttaagaaaactgcagacaatattgatgaggctgcaaaggagcttccggatgctaatttgagacctgaggatctatgggctaatcactcaaaaccagtcttgccaaagccacatatgaaggatactgcatcgtggagagccatccaaaaggttcttgagaacggtgaaagcattgatttgaaacatttcagaccagtaaggcctttaggatctggtgatactggcagtgtccacttggtggagttgcttggcacaggtgaatactttgccatgaaagctatggataaaagtgtcatgcttaaccgaaacaaggtccatagagctaccgctgaacgacaaatccttgatatgttggaccacccattccttccgacattgtatgcatcatttcagacaaagacacatatatgtcttattgttgactattgtgctggtggggaactctttatgctccttgataggcaacctatgaaggttctgaaggaggatgcggtcaggttctatgctgcagaagtggtcacagcacttgaatacctacattgccaaggtataatctacagagacttaaagccagagaacattttacttcatagagatgggcacatttcattgacagactttgatttgtcttgcttgacatcctgccgaccacaagtgtttcttccacacgatattgataagaagaaaaagaggaggaagagcaggagtaatcccatattttttgctgaaccaatgcgagcatcaaattcttttgttggtacagaggagtacattgcaccggagattattaccggagctggccatacgagtgctgtagattggtgggcgctaggaattcttctatatgagatgttatatggttatacacccttcagagggaaaacaagacaaaggacatttgctaatattctgcacaaggatatcagatttcctgcgagcatacaggtgagcctggcggcaaggcagctgatataccggttgctacaccgagaccctgcaaataggctaggttcctatgagggcgctatggagatcaaacaacaccccttctttcgtggcataaactgggctctagttcgtgccgccacgcccccagagctggaggctcccctccaggatacattggaggccacactgcctcctcctgcagctgatgcggctcacaccgatatgttctgatcatacattgatccatgatgctacatgttaatttgcttaaaggaagaaaaaatattagatgatgaagatgcatgactttggcatagatgagaacaataatgtatgttaaggactaattatcttgatccatctatgcatgctcacaattagaataagattggatgtgtatattgtttctgtggttgcaatatacgcacgagtctatgaagggatctatggaaaaaaaggcttgaggggaaaaaaaaaaaaaaaaaagcggccctaggcatgttgattagtaccccgtttcgttttacaagtcgtttccaacagcttcgtgctgattaaggaaccc

SEQ ID NO: 2273 - DNA, 800 bp, Zea mays
  unsure (1)..(800): unsure at all n locations
  Clone ID: PAT_MRT4577_56816C.1
accacaccaccactgcaacggacttctcgccagtcgccaacgcagacctcagatctcgctctcgcctccttgcgcagccgtcgtcgagaggagcaagaaaatggcggcgagcaacctcgagggtgtgctcctggggatgggcaacccccttctcgacatctccgccgtcgtcgacgaggccttcctcgctaagtatgatgtcaagccgaacaatgccattctcgccgaggacaagcacttgcccatgtacgatgagttgtccagcaaggaaaatgttgaatacattgctggaggagccacgcagaactctatcagggttgcccaatggatgcttcaaactcctggtgcaacaagttacatgggttgcattggaaaggacaagtatggtgaggagatgaagagcgccgctaaagctgcaggagttactgctcattactatgaggatgaggctgctcctacaggcacatgtgctgtatgtgttgttggtggcgaaaggtcattgattgcaaacttatctgctgcgaactgctacaaatctgagcatctaaagaagccagagaactgggcactagttgagaaagcaaaatacatctacattgctggctttttccttacggtgtcccctgaatctattcagcttgttgctgagcatgctgctgccaataacaaggttttcttgatgaacctctccgctccctttatctgcgagtttttccgtgatgcccaagagaaggttcttccgtatgcggactatatctttggaaatgaaactgangcaaggatcttctctaagtccgagg

SEQ ID NO: 2274 - DNA, 598 bp, Zea mays
  Clone ID: PAT_MRT4577_56889C.1
cggacgcgtgggcggacgcgtgggcggacgcgtgggttctcctcctctcactgctgctgtgaccatcaaggtatcacactgaacccgcagctgcacccactcacccacccaatccgcgaagcactaatacaaagcttacgccatgtccgacactgcaggaaagaccatcacttgcaaagccgccgtagcatgggaggccggcaaggacctcgtggtcgaggacatcgaggttctgcctccacgagctcatgaagtccgcatacaagtctactacactggtgtgtgccacacagatgcgtacatgctgagcggaaaggaccccgagggtgctttcccagtcattgcaggacatgagggcgctggtatcgtcgagagcgtcggcgagggtgtcaccaacgtgaaggttggcgacactgtcgttgccctatacacgccagaatgcaaagagtgcaaattctgcaagtctggcaagaccaacctctgcggcaagattcgcgcaactcaaggaaagggtgtcatgcctgacggcacttcacgcttcaagtgcaagggcaaggacctcctccacttcatgggctgctccaccttctcgcaatac

SEQ ID NO: 2275 - DNA, 236 bp, Zea mays
  unsure (1)..(236): unsure at all n locations
  Clone ID: PAT_MRT4577_56932C.1
cttcaagcgnannngnctcctcctcgtcgtccggtcgtgannaganatggcgggccgtgnacaaggctatcggcgctggagccgcgaagaaggcaanntcgaggagctccaaggccggactccagttccnagtcggcaggattgcnaggttcctcaaggcggacaagtacgctnagcncgtcggcgccggcgnccccgnntanntcgncgccgtcntcgagnacctcacggcngag

SEQ ID NO: 2276 - DNA, 2002 bp, Zea mays
  Clone ID: PAT_MRT4577_5697C.1
cccggggcacgcccacacagcagcatcaacctcgggtgctctgcggccactggactgccctgccagtgctcggtgcccgtgcccgcgcgcgctagcctagctgctcctgcctggttcgccgtagcccgtagcccgtagcacaacaacaacaaaaaaaatctccgcggcgcggggggaggtggtctgttcaccttggggagcagcggcgggccgtcggccgagaaatgcccggtggcgccttcctcctcaacggcagcggcggcggcatggcggactacggcggcggcctcaccgtccccgtcgtcgtgacctgcctcatggcggcctccggcggcctcatcttcggctacgacattggcatctcaggaggtgtgtcggagatggaggatttcctgaacaagttcttccccgggttgctcaagaggacggcgcgcgccaacaaggacgtgtactgcatttacaacaaccaggcgctgacggccttcacgtcgtcgctgtacgcgttcggcatggtggggacgctgctggcgagccgcgtgacccggcggctggggcggcaggccgtcatgctgatcggcggcggcctgttcttggccggcgccctcgtcaacgccgccgcggccaacatcgccatgctcatcgtcgggaggatgctgctcggcctggggctcggcttctccggccaggccacgccggtgtacctcgccgaggtgtcgcccccgcgctggcgcggcggcttcatctcggccttccccctcttcatcagcgtcgggtacctggtggccaacctcatcaactacggcacctcgcggatcccgggctggggctggcgcctctcgctcggcctcgcctccgtcccggccgccgtcatggtggtcggcgccgcgttcatcccggacacccccagcagcctcgtcctgcgcgggaagcacgacgacgcccgcgccgcgctccagcgggtgcgcggcaagggcgtggacatcggccccgagttcgcggacatcctcgccgcggcggagaacgaccgccggaacgaggagggcgcgttccgccggatcctgcgccgggagtaccggccctacctggtgatggccgtggcgttcccggtgttcctcaacctcacaggggtggccgtcaccgccttcttctcgccgatactgttccggaccgtcggcttcgagagcgacgccgcgctcatgggcgccgtcatcctgggcctcatgaacatcggcggcatcctcgcgtcgggcttcgccatggaccgctacggccggaagctgctcttcatgatcggtggcgcgctcatgttcacgtgccaggtggcgatggcgagcataatcggatcacacctcggcaacgggagcaagatgcccaaggggtacgcggtgacggtgctggtggtggcgctgatcttctcggcgagcttcagctggtcgtggggcgcgctgtactggaccatccccggcgagatataccccgtggaggtgcggtcggcggggcagggcgcggccgtggcgctcaacctggggctcaacttcttgcaggcgcagttcttcctggccatgctgtgctgcttcaagtacggcaccttcctcttctacgcgtcgtggctggttgtcatgaccgccttcgccgtggcgttcgtgccggagaccaagggcgtgccgctcgagtccatggctcacgtcttcgcgcgccactggtactggggcaggttcgtcaaggaccaccagaagttgggcgaagagtccacctagctaagctaataattcggaatcagcgaacgacgtaccctactaccagtagcagattattgataagggagtcaaacacatattgcgtgtgtgtgtcttttaaagtgttcgtttagaatggcttgagaagctcatccgtgtagtaaatttggagacttcgaaatataataaatatgttcgtagttggcaagctataaaaaaaaaaaaaaagcggccagtcgacttgaaattgacatttttaacatttt

SEQ ID NO: 2277 - DNA, 855 bp, Zea mays
  Clone ID: PAT_MRT4577_570C.1
ctctacaaatctacaccatcgaactgcaaagcagagacagcgacagagatccatcttctttctcttcgagttcttggagctagcgaccgacagggacagcgatggcgaccgccgggaaggtgatcaagtgcaaagcggcggtggcatgggaggccgggaagccgctgtcgatcgaggaggtggaggtggcgccgccgcaggccatggaggtgcgcgtcaagatcctctacaccgccctctgccacaccgacgtctacttctgggaagccaaggggcaaactccggttttccctaggatcttgggccatgaagctggaggcattgttgaaagtgtcggagagggtgtgacggagctagtgccgggcgaccatgtcctcccggtgttcaccggcgagtgcaaagactgtgcccactgcaagtcagaggagagcaacctttgtgacctccttaggatcaacgtggatcgtggcgtgatgatcggggatgggcagtcacgcttcaccatcaacgggaaacccatcttccactttgtcgggacctccaccttcagtgagtacaccgtcattcatgtcggttgcctcgccaagatcaaccctgaggcgccccttgacaaagtttgtgttctcagctgtggtatctcaactggacttggtgctaccctcaatgtcgcgaaaccgaaaaagggttccacggtggccatattcggtcttggagctgtaggccttgctgccatggaaggggccaagatggctggggcagcagggatcatttggtggtggatttgaaccctgcaaaatacgaacaagctaagaaatttggatgcactgactttgtgaacccaagggaccaccaagc

SEQ ID NO: 2278 - DNA, 377 bp, Zea mays
  Clone ID: PAT_MRT4577_57211C.1
ctgacttttgtgcccttcttgctaatagaggctgcctaaacaacatgtatagggtttatggtggtaaacataagtgagtcatctgacctgcagatagagcctatgttcattcctacttcacaagttggcgcaggacgtttcatttacatgtcatttgcagctttgtacaaggacagctactttttatccttgaagctaagggacatcaaaagaatgacgcttcctataaagcttatgtggaactatggttcaagagaactgccgccaaaaactttgttcaagccaccaggtatttgagtggacaacctgtggtcctttttttgaggggggatcatgctttgaatcataccaacggctagaagcttatggccaaatgt

SEQ ID NO: 2279 - DNA, 842 bp, Zea mays
  Clone ID: PAT_MRT4577_572C.1
cgggctcgccaaaatctactagcaacgaaccgcaaagcagaaacagcgacagagatccatctttgtgtctcttcttcaactagcgacagggatggcgactgccgggaaggtgatcaagtgcaaagcggcggtggcatgggaggccgggaagccgctgtcgatcgaggaggtggaggtggcgccgccgcaggccatggaggtgcgcgtcaagatcctctacaccgccctctgccacaccgacgtctacttctgggaagccaagggtcaaactccggttttccctaggatcttgggccatgaagctggaggcatcgtggagagcgtcggagagggcgtgaccgagcttgtgccgggtgaccatgtcctcccagtgttcaccggcgagtgcaaggactgtgcccactgcaagtcagaggagagcaacctttgtgatctcctcaggatcaacgtggatcgtggcgtgatgatcggcgatgggcagtctcgcttcaccatcaacgggaagccgattttccacttcgtcgggacctccaccttcagcgagtacaccgtcatccatgttggttgcctcgcgaagatcaaccccgaggcgcccctcgacaaagtttgtgttctcagctgtggcatctctactggacttggcgccacgctcaatgtcgcaaaaccaaaaaagggttccacggtggcgattttcggtcttggagctgtaggacttgctgccatggaaggggccaggatggcttgggcatcaaggatcattggtgtggatttgaaccctgcaaatacgaacaagctaagaatttggatgcacagactttgtgaacccaaaggacacagtagcc

SEQ ID NO: 2280 - DNA, 282 bp, Zea mays
  Clone ID: PAT_MRT4577_57400C.1
acttcggaacgagggaggagccatgcctaagccaccacccaggccccagctcacctgtttcgtctcttgtcatgcccacgcgctcgcctagctgatagtccgtgcgcattccgcctctatagctggcctgtcgaggaccctggccatcctccccaggcgcaccaccaaacggtcctaacccccagtggcggccgctagagttggacgctcaggtgcgccgggaccgccaccgacaccaggggggatggcagggcaggagcggggggcattcgagccggggga

SEQ ID NO: 2281 - DNA, 415 bp, Zea mays
  Clone ID: PAT_MRT4577_57462C.1
aaacccaacatttacatccattatttgggggtcctggatcctgaacgttggcaccggggaccatgttgggggggggacacggtttcccctgctccttccttttgttctgccatttccttttgaacgccagacctgcaagcatgatcgcttccgaggatcccactgttcccaccccaatagctgtctcgtcctccttgatcggggcgttgaacaggggagcttttatgtttacccaggggttttggggctcaggggggacggggtactcggccatgtcgacctagtttttggtggtggagtccatgatgagcttgtcgcacttgggctccatccacctggggaccaaggaccccaggttcaggcgcgggttggcgtccagcatgagctcggtcctgatgatctgttggaccccctc

SEQ ID NO: 2282 - DNA, 344 bp, Zea mays
  Clone ID: PAT_MRT4577_5758C.1
ggtcaactcgaaaaacaacaaatcttattcataaacaaaatggggtcacagatatttcttcatacgtacatgctcattgggggagacgcagctgaccacctagagctgcatacttacttattcagactgatccagcatgtggcaacatcggaagttcacatgcttacagacgacaaattttcataacaatagcctggcttggctggttcacagaataaccaaacgacatccacgaaattgcgacgatctcaaattaacgactcctaaggagatcggcacccggagcccgttttactcatgaagcacttcggacttcttgtgcatggggttcgctttcttcttcc

SEQ ID NO: 2283 - DNA, 603 bp, Zea mays
  Clone ID: PAT_MRT4577_5760C.1
ccccctcggatttttttttttttttttttttttttttttttttttttttttttttttttttttttttttttttttttttttaaacccaaaaaaacaaattttattcataaacaaaaggggttcacagatttttctccatacgttcatgcccattgggggaaacccagctgaccacctaaagctgcatacttacttattcaaactgacccagcatggggcaacatcggaagttcacatgcttacagacaacaaattttcataacaatagcctggcttggctgcttcacaaaataaccaaacgacacccacgaaattgcgacgatttaaaataaacaactcaaaagcaaatcgaccccaaaagcccgttttactaataaagcactcccgccttttcctccatgggatccgtttcctcctcccagaaaaaaaaattacccagcttgtagcccttcttcataggaggaggagcactctccacgttctcgccgtcaaagcaggggaaaacaaatttgggcgaggtaacaacagcgttttcagcaacacaaaagctctggtacacgaggagcccgcctccaggcagctcctgctccaccatgttgttgc

SEQ ID NO: 2284 - DNA, 521 bp, Zea mays
  Clone ID: PAT_MRT4577_5761C.1
aaactcgaaaaaacaaattttattcataaacaaaaggggttcacagatatttctccatacgtacatgctcattggggtaaacgcagctgaccacctaaagctgcatacttacttattcaaactgacccagcatggggcaacgtcggaagttcacatgcttacagacgacaaattttcataacaatagcttggctgggctgcttcacagaataaccaaacgacaaccacgaaattgcgacgatttaaaataaacaactcaaaagcaaatcgaccccaaaagcccgttttactcataaagcactcccgccttctcctccatggcatccgtttcctcctcccagcataaaaaattagccagttggtagcccttcttcataggaggaggagcactctccacgttctcgcgcggaaagcaggggaaaacagatttgggcgaggtggcaacagggtgttgaggaagacaaaaactctgggacacgaggagcccgcctgcagaggagtgctgctcgcccggtgggggg

SEQ ID NO: 2285 - DNA, 386 bp, Zea mays
  Clone ID: PAT_MRT4577_5765C.1
aacctcgaaaaaaacaaatcttattcataaacaaaatgggttcacagatttttctccatacgttcatgctcattggggtagacccagctgaccacctagagctgcatacttacttattcagactgatccagcatgtggcaacatcggaagttcacatgcttacagaccacaaattttcataacaatagcctggcttggctgcttcacagaataaccaaacgacaaccacgaaattgcgacgatttaaaataaacaactcaaaagcaaatcgaccccaaaagcccgtcttactcataaagcactcccgccttttcctccatgggatccgcttcctcctcccagcaaaaaaaattagcccgcttggagtcctttttcataggaggagg

SEQ ID NO: 2286 - DNA, 396 bp, Zea mays
  Clone ID: PAT_MRT4577_5767C.1
tttttttttttttttttgaatgatttattttttgtgggtttttttttttggtttttttcgaaaaaaaacaaattttattcataaacaaaaggggttcacagatttttttccatacgtacatgcccattgggggagacccagttgaccacctagagctgcttacttacttattcaaactgatccagcttgtggcaacatcggaggttcacatgcttacagacgacaaattttaataacaatagcctggtttggctgtgttacagaataaccaaacgacacccccgaaattgcgacgatttaaaataaacaacttaaaagcaaatcgaccccagaagcccgttttactcataaagcactcccgccttctcctccatggaatccgcttcctcctcccag

SEQ ID NO: 2287 - DNA, 416 bp, Zea mays
  Clone ID: PAT_MRT4577_5768C.1
ggccgcttttttttttttttttttatttgtttttttttttttttttttttttttttttttttttttttttttaaactcgaaaaaaacaaatcttattcataaacaaaatgggttcacagatatttctccataccttcatgcccattgggggagacccagctgaccacctaaagcagcatacttacttgggggggctggtccaacctggggcaacatcggaaggtcacatgcttacaaaccacaaatttttataacaataagcccggcttggctggttcacagaataacccaacgaccaccaccaaattgggacgatttaaaataaacaactcaaaagcaaattgacccccaaagcccgtcttacttattaagcactcccgccttctcctccatgggatacgctttctcctcccaac

SEQ ID NO: 2288 - DNA, 840 bp, Zea mays
  Clone ID: PAT_MRT4577_57694C.1
ggggccgcccctgcccggagcccatcttcactccctcccgatgccctaacccatggttacgactccgacgacgcgaccccggcggcctgctgcccagctccctctgccttcgcgccgtgcctcctaccctcctgaatccgcgccgtgccacccgagtccaggcccccccagggtgcgagggcggcaccggcgcaggcgaaccgcagtccgcgcctccgcactccgccccatccgaagctccgagcacagcaggagcagcaaagcaagcgagcgtcagactggctgaatcgagaggtggaggcagcaaccaacaaggtagcactatgaaggtcaagattcttcagtggcatgcagtggcttcttggacgtgggatgcacaggatgagacatgtggcatatgcaggatggcttttgatggctgctgtcctgactgtaagttccctggtgatgattgcccactcatttggggtgtctgcaaccatgcttatcatcttcactgcatactgaagtgggtcaattctcaaacatccacacccctttgccccatgtgccgtagagagtggcagtttaagggctaaggtactatggacatctagaactgcaccaagcgactctcagttctcagagaagactgatgtttttctggtacttctgtgatgctttattttaactactacatattgttttccgtatctagtataaatcctgatgtcagcgcctgatcctgtgtatgcttccgagcttgtagtggaacaaatgaaattattgcttttcttagggctgatttcctaatcttatcccatattggtttgttcgaaaaaaaaaaaaaaaaaagcggcc

SEQ ID NO: 2289 - DNA, 760 bp, Zea mays
  Clone ID: PAT_MRT4577_57695C.1
caccggcgcaggcgaaccgcagtccgcgcctccgcactccgccccatccgaagctccgagcagagcaggagcagcaaagcaagcgagcgtcaggttagcactctgcagcccaccaggcacaaggccacggctaccgggcgggcactggcgaccgctacctggccgccagcagcgctgtcctccaaccgctattgcgtatctactgtcttccggcttctgcgtctgagcatctcttgtgacggactggctgaatcgagaggtggaggcagcaaccaacaaggtagcactatgaaggtcaagattcttcagtggcatgcagtggcttcttggacgtgggatgcacaggatgagacatgtggcatatgcaggatggcttttgatggctgctgtcctgactgtaagttccctggtgatgattgcccactcatttggggtgtctgcaaccatgcttatcatcttcactgcatactgaagtgggtcaattctcaaacatccacacccctttgccccatgtgccgtagagagtggcagtttaagggctaaggtactatggacatctagaactgcaccaagcgactctcagttctcagagaagactgatgtttttctggtacttctgtgatgctttattttaactactacatattgttttccgtacttagtataaatcctgatgtcagcgcctgatcctgtgtatgcttccaagcttgtagtggaacaaatgaaattattgcttttcttagggctgatttcctaaaaa

SEQ ID NO: 2290 - DNA, 366 bp, Zea mays
  Clone ID: PAT_MRT4577_5769C.1
aaacccgaaaaaacaaagggtggtcataaacaaaagggggtcacagatatttctccatacctacatgctcattggggtagacccagctgaccacctagagctgcatacttacttattcagactgatccagcatgtggcaacgtcggaagttcacatgcttacagacgacaaattttcataacaatagcttggcttggctgcttcacagaataaccaaacgacaaccacgaaattgcgacgatttaaaataaacaactcaaaagcaaatcgaccccagaagcccgttttactcattaagcactcccgccttctcctccatgggatccgcttcctcctcccagcataaaagattagccagtttgtagt

SEQ ID NO: 2291 - DNA, 324 bp, Zea mays
  Clone ID: PAT_MRT4577_5772C.1
aacccgaaaaaaacaaatcttattcataaacaaaatgggttcacagatttttctccataccttcatgcccattgggggagacccagctgaccccctaaagctgcatacttacttattcaaactgatccaccttggggcaacatcggaaggtcacatgcttaccgaccacaaattttcataacaatagcccggcttggctggttcacaaaataaccaaacccccccccccaaattgcgcccttttaaaataaacaactcaaaagcaaatcgcccccaaaagcccgttttactcataaagcactcccgccttttcctccatgggat

SEQ ID NO: 2292 - DNA, 571 bp, Zea mays
  Clone ID: PAT_MRT4577_5774C.1
ggccgcttttttttttttttttttcttttttttttttttttttttttttttttttttttttttttttttttttttttaacccgaaaaaaacaaatcttattcataaacaaaaggggttcacagatatttctccataccttcatgctcattgggggagacccagctgaccacctagagctgcatacttacttattcaaactgatccagcatggggcaacatcggaagttcacatgcttacagaccacaaattttcataacaatagcctggcttggctgcttcacagaatacccaaacgccacccccgaaattgcgacgatttaaaataaacaactcaaaagcaaatcgcccccagaagcccgttttactcataaagcactcccgccttctcctccatgggatccgcttcctcctcccagcagaaaaaattacccagcttgaagccctttttcataggggggggagcactctccacgttttcgccggcaaagcaggggaaaacagattggggcgaggtagcaacagcgtctttagcaccacagaagctttggtccacaaggagcccgcctcca

SEQ ID NO: 2293 - DNA, 446 bp, Zea mays
  Clone ID: PAT_MRT4577_57862C.1
cccacgcatgcagggcaatagaacactcacaaccttactttaaaaacaggcctacatatgctccgcgggctctcttcaaacgctgctacggcgaccatactcccgcaatgctcccaagctcctataactcccctacatcccccttacctctcaccaacatcgcattcgctatgtcaaaacccaattctacaaccctacatgatccatcaagcaatcacaactcacatctatacctttatcacccttgttcctccaacaatcatcaaccctattacatcactaacctttgatgcatctattgtcacaaaacatcaacacacaacaactacaacaactcgacctaacaaaccttgctgcctactctcagcatcagcagattctcacaatcaaccaactatctaccattaactttgattctaatttgcaacaacaacaactaccatcaa

SEQ ID NO: 2294 - DNA, 769 bp, Zea mays
  unsure (1)..(769): unsure at all n locations
  Clone ID: PAT_MRT4577_57865C.1
actccctcatccctcctggcctaggccgtcctctctctcgtctctcagcgtcacctcgctccagcagcttcgagctcgatctcaagcgaggaaagggcagcagcaatggcggacgcggtggatgcccgtcgggtctgcgggatgccggagaaggcgcagctccacgtggcgatgctggcgctgcagttcggctacgccggcttccacgtcgtgtcgcgcctcgcgctcaacatgggcatcagcaagctcgtcttccccgtctaccgcaacatcatcgcgctcttcctcctcgtccccttcgcctacttcctcgagaagaaggaccggccgaggctcaccctcagcttcgccgtccagttcttcttcctcgccctctgcggcatcaccgccaaccagggcttctacctgctcggcctcgacaacacctcccccaccttcgcctccgccatccagaactccgtgccggccatcaccttcggcatggccgccgcgctccgcatcgagaaggtgcgcctcgaccgccgcgacggcgtcgccaaggtgctgggcacgctcgcgtgcgtcgccggcgcgtccgtcatcacgctctaccagggcccaaccatcttcgcccctgccgacgacaagccgtcgttgcagcaggaggtgccgtttctggcggccgtggccgnggagggcaagaactggacgctggggtgcgtgtacctcatcggccactgcctctcgtggtccggctggctggtgctgcaggcgcccgtgctcaagaagt

SEQ ID NO: 2295 - DNA, 451 bp, Zea mays
  Clone ID: PAT_MRT4577_57880C.1
attccccgtccagccactcgtccatcacattaccaacatacccactttgctaaaccaccttaaaagatatcttaggctcatcaaagaacttttgcatgcactggactcatttgctcaaagtacaacttggttatcacacctataaacttgaaccttttcaatgttaaccttgcaatggcttttacaggcctgtatcatctttcactgaagatcatgcaacattacttatcccatgataaagatgctgcttcacaactgtaatcatatataatgacaacaatcaaagaataactgattgtaaatcctgcatcctatgagtctactcttgattttttttttctgtgcaagcaaacaataacttatctttcatgtttgttttcctgttattctgaaatcttgagcattctaattttaaaatctttccccaaaaataaaaaccaattaaatcatt

SEQ ID NO: 2296 - DNA, 260 bp, Zea mays
  unsure (1)..(260): unsure at all n locations
  Clone ID: PAT_MRT4577_57930C.1
gttccagccgctggaggagctgctcatccactcgttcccgctgcnctccttcntcanctngccgggctacnacgtnctctaccgcttcatcgagaagcacggcnccgaagccgtggcntacgccgaggcgcacacgacatcggcaagaaggacgccatcaacaacntgctgttcgtgctcggcttcaacgcctncggcggcttntccgtgttcntgcccttcctcgnggccaaggtcggnggcgcccggcgtgcgcgagg

SEQ ID NO: 2297 - DNA, 563 bp, Zea mays
  Clone ID: PAT_MRT4577_57991C.1
gcagcaccaataagcaccatttcttccttaggatcaactgacaacaaatcctgacaggagtcacagcctccatggatccacagtccatgctggttgatgcatgggtcatgctggagccgaggatgaacacagcactaacaactgacaaagagcgaccttgcaatcaaaacacacagatgggcaacaccaaacgatacaaacgaagataaaccctgtggactagggtaaacatcacggaatcaaacaggataacttggccgcccggtccccaccggtaaattcctccagttcccgtcggaattgccgtagccaacgccacggttgacaccgccgtagccttcaccaccaccaccgtatccacctgtcgccaccgtagacggcgacggcaccgtcgtattcgccgccggcatcacggagcccggcaccgacgtagccaccgtcttcacggccaccaccgtaaacgccggcgtcgtcttcactgacggcgcgggactggacctccttgacggtgatgttgcggacgcccaactccttgacgttcatgccctcgatggcgttcctca

SEQ ID NO: 2298 - DNA, 357 bp, Zea mays
  Clone ID: PAT_MRT4577_58107C.1
gcggcggaggctacggaggttgtcgttgcggcggaggttatggtggcgggcgccgtgactgcggttatggtggttgtggctgctacggtggtcggtgcgagggtggtggcggttgctaccgtggctgtggcggctactgtggctggtgcgagggtggtggtggcggctaccgctgtggtggtcgccgttggagggactgatgtgtgggcccattctggcttcggccgagttattttatctatctattgtatcgcgttacccgttcgctttttataccggggttagtgtccgttctaccttttggattacgtgttgggccccctcgttgctcccctttgtctgctcccttttttcaac

SEQ ID NO: 2299 - DNA, 283 bp, Zea mays
  Clone ID: PAT_MRT4577_58174C.1
aaaaaaaaaaacccttttttgttttttacgggggaagcaacaaaatccatttccggggaaaaaaaagcccagcataccttagtttccatcctcctaggactagatcccagtccaagcaaccccgaaatttattattgcactacactacacctccgttacagtacgtgggccctacagtttattacggtccacaagcggttggtggtaacagtaaccacatttggaccctttgccttttttacagtcacgcgggatgcaaagtaaccagccaccggggacagtc

SEQ ID NO: 2300 - DNA, 358 bp, Zea mays
  Clone ID: PAT_MRT4577_58203C.1
acggcgacatagaaagcacaagcctgcgcctacattgtcagccaaaagaagtggccggcttatgcttcttggtctttctgcaagagcagctacaggaaccattttgccgcaaagctcccaagctcctataggttcccttgtttccccgtacctctcaccagcggtgtctttgtgatgggataacccaactcttgaaccctacacgatccaacaagcaatgacagctggcatgttacctttatcaccctagctgctgcaacaatcatcagccctattacatgagttacctttggtgcatttattggctcaaaacatcaaggcacaacaactacaacaacttgtgctaggaaaccttgct

SEQ ID NO: 2301 - DNA, 261 bp, Zea mays
  Clone ID: PAT_MRT4577_58342C.1
acgcggggagccgaacgcttcttgtggccaaagaattacctcccctagccgccgccgtcggtcgtctccctgagaggagccgggaccgacgatgaggccgagttctacgtagagaatcggttttgcttgcctcattccggggtctgctgcgcctggtggtggcgaaggggagaaattcgagagatctgttccggatcaggcgtgcgagctcgggaatcaaggggttgacacatagctgccgcgatttgaatctgatgtacg

SEQ ID NO: 2302 - DNA, 244 bp, Zea mays
  Clone ID: PAT_MRT4577_58516C.1
gcacgagccttcaagcggaagtgcctcctcctcgtcgtccggtcgtgataagatatggctggccgtggaaacgctatcggcgctggacgccgcgaagaaggcaatatcgaggagctccaaggccggactccagttccccgtcggcaggattgctaggttcctcaaggcgggcaagtacgctgagcgcgtcggcgccggcgcccccgtgtacatcgtcgccgtcatcgagtatctcacggctgag

SEQ ID NO: 2303 - DNA, 1397 bp, Zea mays
  unsure (1)..(1397): unsure at all n locations
  Clone ID: PAT_MRT4577_58620C.1
aggctcctcccacctctaggccaacaggtgaagccgccgccgctgcagtgtccatagccaccgcaggagactgagattgtgggttttgtcaagacccacaagagcaatgcgtacttcaagcgtttccaggtgaagttcaagagaaggcgcgctggcaagacagactacagggccaggataaggctgattaaccaagacnnnnncaagtacaatacacccaaatacagatttgttgtgcgatttaccaacaaggacatcacagcacaaatcatctctgctagtatagcaggtgatatggttcttgcttctgcttactcgcatgagttgccacgatatggtcttgaagttggtctgaccaactatgcagctgcctactgcactggccttctgttggctcgccgtgtgctcaagacccgtggtttagataaggaatatgagggcaatgttgaggccactggtgaggatttctctgttgagccagctgatgagaggaggcctttccgtgctctcttggatgttggccttattaggactacaactgggaaccgtgtctttggtgccctcaagggagctttggatggtggcctggatattcctcacagcgagaagaggtttgctggtttcaagaaggatgacaagcagctggatgctgatatccatcgcaagtacatctatggtggccatgttgctgactacatgaggaacctcgctgaagaggagccagagaagtaccagtctcacttcagtgagtacattaagaagggaattgaggctgatgacatggaagctctgtacaagaaggtccatgctgccatccgtgctgatccttccattgtcaagtcaaccaagcagccaccaaaggagcataagaggtacaaccccaagaagctgacatatgagcagaggaaggccagcctcattgaaaggctcaaccaactcaactcctcgggcggcgcagatgacgacgatgaggatgacgagtaaagttaagtcccatcgaagtagtgctatcttatgcggcgatcagcaattgtgcaatggcatatgcggggacctgtagtactgcaataggcagtttggtttaagttttgcgaggtgaacaaaactgtttctgttagtttcgagcttgagctctcaatgtttactctttacattgaaatgctgccgtttggacatggtttatctgagttctacacctgcttgtcttgcttatgtgacggtgcagtattgtgcctttaatatcaacctaaacattgactggttcgtcactgnnnnnnnnnnnnnnnnnnnnnnnnnnnaaatatctcgatggagttgtgtttagatagaagcgtttggaaagaagcgttgagatggtttgggaatgggatatctaataaaattgtgtttagataaag

SEQ ID NO: 2304 - DNA, 495 bp, Zea mays
  Clone ID: PAT_MRT4577_58622C.1
ggtttctatgctgcttacgagtccacagaatggggggtatggtgaagactcataagtccaatgcgtatttcaaacggtagcaagtgaaattcaagagaaggcgggctggcaagacagactacagggccaggataaggctgattaaccaagacagaaacaagtgcaacacacccaaatacagatttgttgagcgatttaccaacaaggacatcactgcccaaatcatatctgctagtatagcgggtgatatggttcttgcttctgcctactcacatgaggtgccacgatatggtcttgaagttggtctgaccaactatgctgctgcctactgcactggccttctgttggctcgccgtgagctcaagatccgcggtttggatcaggagtatgaaggacatgttgaggccactggcgaggacttttgtgttgagccaactgatgagaggagggcatttcgtgctctatcgggatgtggcttatcaggactacaacagg

SEQ ID NO: 2305 - DNA, 1253 bp, Zea mays
  Clone ID: PAT_MRT4577_58623C.1
atggccggatcaacccacgcgtttggtttgccgtcgctgctgcttccgcgtccacagaatggggggtcacgagaggactcataggtccaatgcgtatttcaaacgtttccaagtgaaattcaagagaaggcgggctgtcaggacacactacagggccaggataaggctgattaaccaagacagaaacaagtacaacacacccaaatacagatttgttgtgcgatctaccaacaaggacatcactgcccagatcatatctgctagtatagcgggtgacatggttcttgcttctgactactcgcatgagttgccacgatatggacttgaagttggtctgaccaactatgctgctgcctactgcactggccttctgttggctcgccgtgtgctcaagatccgtggtttggatcaggagtatgagggaaatgttgaggccactggtgaggacttctctgttgagccagctgatgagaggaggccattccgtgctctcttggatgttggccttatcaggactacaacagggaaccgtgtctttggtgccctcaagggagctttggatgggggcctggatattcctcacagcgagaagaggtttgctggatttaagaaggacgacaagcagttggatgctgatacccaccgcaggtacatctatggtggccatgttgctgactacatgaagaaccttgctgaagaggagccagaaaagtaccagagccacttcagtgcgtacattaagaagggagttgaggctgaggaaattgaagccctgtacaagaaggttcatgctgccatccgtgcagatccttccgttgttaagtcaaccaagcagccaccaaaggagcataagaggtacaaccccaagaagctgacatatgagcagaggaaggccagcctcattgaaaggctcaaccaactcaactcctccggtggtgctgatgacgacgatgaggacgacgagtgaagtttagtgccatcgaagtagtgctatctcaatccagcgatcagcaattgtgtactgtcttatgcggggacctgtagtactgcaataggcatttttgttttaaagttttgcgaggtgaacaaaactgtttctgttagtttcgagcttgagctctcaatgtttactctttacattgaaacgctgtcgtttggacatgttttttctgtgttctacacctgcttgtcttgcttatgtgacggtggagtattgtgcctttaatatcaacctaatcatggactggttcatc

SEQ ID NO: 2306 - DNA, 1330 bp, Zea mays
  Clone ID: PAT_MRT4577_58624C.1
catccgtccaccgggtagggtttctccagaattaaaagggccgaaggaggcgcccttaaaaacccttccattcacccgcagctcccatcctctcgctcgccaggagaagcagccgccgttgctgcttccgcgtccacagaatggggggtttcgtgaagactcataagtccaatgcgtatttcaaacgtttccaagtgaaattcaagagaaggcgggctggcaagacagactacagggccaggataaggctgattaaccaagacaaaaacaagtacaacacacccaaatacagatttgttgtgcgatttaccaacaaggacatcactgcccaaatcatatctgctagtatagcgggtgatatggttcttgcttctgcctactcgcatgagttgccacgatatggtcttgaagttggtctgaccaactatgcagctgcctactgcactggccttctgttggctcgccgtgtgctcaagatccgtggtttggatcaggagtatgagggaaatgttgaggccactggtgaggacttctctgttgagccagctgatgagaggaggcctttccgtgctctcttggatgttggccttatcaggactacaacagggaaccgtgtctttggtgccctcaagggagctttggatgggggcctggatattcctcacagcgagaagaggtttgctggattcaagaaggacgacaagcagttggatgctgatacccaccgcaggtacatctatggtggccatgttgctgactacatgaagaaccttgctgaagaggagccagaaaagtaccagagccacttcagtgagtacattaagaagggagttgaggctgaggaaattgaagccctgtacaagaaggtccatgctgccatccgtgccgatccttctgttgttaagtcaaccaagcagcccccaaaggagcataagaggtacaaccccaagaagctgacatatgagcagaggaaggccagcctcattgaaaggctcaaccaactcaactcctccggtggtgctgatgacgacgatgaggacgacgagtaaagtttagtgccatcgaagtagtgctttctcaatccagcgatcagcaattgtgtactgtcttatgcggggacctgtagtactgcaataggcatttttgtttaagttttgcgaggtgaacaaaactgtttctgttagtttcgagcttgagctctcaatgtttactctttacattgaaatgctgccgtttggacatgttttttctgagttctacacctgcttgtcttgcttatgtgacggtgcagtattgtgcctttaatatcaacctaaacattgactggttt

SEQ ID NO: 2307 - DNA, 1718 bp, Zea mays
  Clone ID: PAT_MRT4577_58626C.1
cccaaaccatttcaacttgatgttaaataagcttttttcaattgacactattcctaaccgaccgcgtatgccatagtttctcgctagctctctaatcttgtgtgcccaaactaaaataaactttgttcaactcggtccaattttaatattataaaagtaaatattcagaactccagctccaaactaacagaaacaactttgttcgcatcgacaaacttaaacaaaaatgcatgttgcacgactacaggtagcgataaatgccatagcacaaatactgatcgccgcataagatagcactacttcgatgggaccaaactttactcgtcatcctcatcgtcgtcatctgcgccgcccgaggagttgagttggttgagcctttcaatgagactggccttcctctgctcgtacgtcagtttcttggggttgtacctcttgtgctcctttggtggctgcttggttgacttgaccacagaaggatcagcacggatggcagcatggaccttcttgtacagagcttccatgtcatcagcctcaattcccttcttaatgtactcactgaagtgagactggtacttctctggctcctcttcagcgaggttcctcatgtagtcagcaacatggccaccatagatgtacttgcgatggatatcagcatccagctgcttgtcatccttcttgaaaccagcaaacctcttctcgctgtgaggaatatccagtccaccatccaaagctcccttgagggcaccaaagacacggttcccagttgtagtcctaataaggccaacatccaagagagcacggaaaggcctcctctcatcagctggctcaacagagaagtcctcaccagtggcctcaacattgccctcatattccttatctaaaccacgggtcttgagcacacggcgagccaacagaaggccagtgcagtaggcagctgcatagttggtcagaccaacttcaagaccatatcgtggcaactcatgcgagtaagcagaagcaagaaccatatcacctgctatactagcagagatgatttgtgctgtgatgtccttgttggtctaaggaggtctagttaagaggtacaatattatgccactggagctcaagtaccatagtaataagcagaaaccagatgattaaagaacaaagaaaacaaatgatgaaggaatcaaaggatacaaatcgcacaacaaatctgtatttgggtgtattgtacttgtttttgtcttggttaatcagccttatcctggccctgtagtctgtcttgccagcgcgccttctcttgaacttcacctggaaacgcttgaagtacgcattggtcttgtgggtcttgacaaaaccccccctggggagataaccgaaaggtacacaaatagttaaacgcacaggtaaggttgagcatgaattctgtcaagtatgcatacaacagacttcactaagttgtcaaccaaaaactattcagtaagtgtcatactcaaacaaagctgcaaatgcatatttatcaagagtcacagctgtgtcaataatatagatgcagtacatatggcgagaacattctaccaatagtccaatacttgtcaaggaaccgtgacaccaaattaagatagctctcatgacacatcaacatcaatagaaagaatccgcaaaattttgcagaggcataaaaacagttatatccattatagtgtacagatctagtaaacataacagagtttttt

SEQ ID NO: 2308 - DNA, 1125 bp, Zea mays
  Clone ID: PAT_MRT4577_58629C.1
cggccgggaaaaacattacaacacacccaaatacagatttgttgtgcgatttgtatcctttgattatttgaccatctggtttctacctattgctatggtactttgagctccagaagcatatattgtatctcttaactagatattcttagaccaacaaggacatcactgcccaaatcatatctgctagtatagcgggtgatatggttcttgcttctgcctactcgcatgagttgccacgatatggtcttgaagttggtctgaccaactatgcagctgcctaccgcactggccttctgttggctcgccgtgtgctcaagatccgtggtttggatcaggagtacgagggcaatgttgaggccactggtgaggacttctctgttgagccagctgatgagaggaggcctttccgtgctctcttggatgttggccttatcaggactacaacagggaaccgtgtctttggtgccctcaagggagcattggatggaggcctggatattcctcacagcgagaagaggtttgctggattcaagaaggacgacaagcagttggatgctgatacccaccgcaggtacatctatggtggccatgttgctgactacatgaagaaccttgctgaagaggagccagaaaagtaccagagccacttcagtgcgtacattaagaagggagttgaggctgatgaaatagaagcgctgtacaagaaggtccatgctgccatccgtgccgatccttccattgttaagtcaaccaagcagccaccaaaggagcataagaggtacaaccccaagaagctgacatatgagcagaggaaggccagcctcattgaaaggctcaaccaactcaactcctccggtggtgctgatgacgacgatgaggacgacgagtaaagttaattgccatcgaagtagtgctatctcaatccagcgatcagcaattgtgtactgtcttatgcggggacctgtagtactgcaataggcatttttgtttaagttttgcgaggtgaacaaaactgtttctgttagtttcgagcttgagctctcaatgtttactctttacattgaaatgctgccgtttggacaaaaaaaaaaaaaaaaaagtaaaaaaaaaaaaaaaaaagcggcc

SEQ ID NO: 2309 - DNA, 1365 bp, Zea mays
  Clone ID: PAT_MRT4577_58631C.1
catccgtccaccgggtagggtttctccagaattaaaagggccgaaggaggcgcccttaaaaacccttccattcatcacccgcagctcccatcctctcgctcgccaggagaagcagccgccgttgctgctgccgcgtccacagaatggggggtttcgtgaagactcataagaccaatgcgtatttcaaacgtttccaagtgaaattcaagagaaggcgggctggcaagacagactacagggccaggataaggctgattaaccaagacaaaaacaagtacaacacacccaaatacagatttgttgtgcgatttaccaacaaggacatcactgcccaaatcatatctgctagtatagcgggtgatatggttcttgcttctgcctactcgcatgagttgccacgatatggtcttgaagttggtctgaccaactatgcagctgcctactgcactggccttctgttggctcgccgtgtgctcaagatccgtggtttggatcaggagtacgagggcaatgttgaggccactggtgaggacttctctgttgagccagctgatgagaggaggcctttccgtgctctcttggatgttggccttatcaggactacaacagggaaccgtgtctttggtgccctcaagggagcattggatggaggcctggatattcctcacagcgagaagaggtttgctggattcaagaaggacgacaagcagttggatgctgatacccaccgcaggtacatctatggtggccatgttgctgactacatgaagaaccttgctgaagaggagccagaaaagtaccagagccacttcagtgcgtacattaagaagggagttgaggctgatgaaatagaagcgctgtacaagaaggtccatgctgccatccgtgccgatccttccattgttaagtcaaccaagcagccaccaaaggagcataagaggtacaaccccaagaagctgacatatgagcagaggaaggccagcctcattgaaaggctcaaccaactcaactcctccggtggtgctgatgacgacgatgaggacgacgagtaaagttaattgccatcgaagtagtgctatctcaatccagcgatcagcaattgtgtactgtcttatgcggggacctgtagtactgcaataggcatttttgttttaaagttttgcgaggtgaacaaaactgtttctgttagtttcgagcttgagctctcaatgtttactctttacattgaaatgctgtcgtttggacatgttttttctgagttctacacctgcttgtcttgcttatgtgacggtggagtattgtgcctttaatatcaacctaatcatggactggctaaaaaaaaaaaaaaaaaaggcccctagggcc

SEQ ID NO: 2310 - DNA, 401 bp, Zea mays
  Clone ID: PAT_MRT4577_58700C.1
gcacgcaggcttttccggcaacggttcgactttccaatagctggcgttcttcaggcgtacgtgtcaccatcggtgtcttcgctatgtgaaaacccaattcttcaaccctacacgatccaacaggcaatctcatctgtcattttacctttatcacccttgttcctccaacaatcatcagccctattacagcagcaacctttggtgcatttattgtcacataacataatagcacatcaactacaacatcttgagctagcatacctttatacctactctcagcaacatcaattttttacatttaaccaactatctgcatataactcttgttcttatttgcaacaactactactaccattcaatcagcttcctgttgcctacactcaacaattttttccattaac

SEQ ID NO: 2311 - DNA, 388 bp, Zea mays
  Clone ID: PAT_MRT4577_58744C.1
cggacgcgtgggcgaggaaggagggagtgtgcacggcggcttgatcgaacatggatgccggatcaatggtggtgaagaaggccgctgcggcgcttcgaggcgggggcggccccaagaagaagcctgtctctcgctccgtgaaggcctgcctccaattccccgtaggccgtataggacgctacctcaagcacggtcgctactgccagcgtgtctgcaccggctcacccgtctaccttgctgccgtgctctagtacctcgccgccgagctccttgagttgtcggggaacgcagcgcgggacaacatgaagaaccggatcatgccgcgacacttactgctgtcgatccgcatcgatgaggatctctggaagctactgtccggcttgaccat

SEQ ID NO: 2312 - DNA, 408 bp, Zea mays
  Clone ID: PAT_MRT4577_58840C.1
tttataatttttttttttttttttttttttttttggttttttttaaaattttgagcgggaaaaaaaaacaaattttattcataaacaaaatgggttcacagatatttttccatacgtacatgctcattggggtagacgcagttgaccacctagggctgcatacttacttattcagactgatccagcttggggcaacattggagggttacatgcttacagacgacaaatttttataacaatagcccggcttggctgttttacagaataaccatacgccaaccacgaaattgggacgatttaaaataaacaactcagaagcaaatcgaccccagaagcccgttttacttataaagcacttccgcctttttctacatggaatccgctttctcctcccagcaaagaagatta

SEQ ID NO: 2313 - DNA, 718 bp, Zea mays
  Clone ID: PAT_MRT4577_58945C.1
cttcggatctgtgctgtctctactggcatcgtcacaacctgtattgctcaaattatgaccaatacaattcaaaagaagttcaaagtatcttcaactcagctgctgtaccaatcatgcccataccaagcattgaccctgttcattgttggtccattcctcgatggatttctgactaacaaaaatgtctttgcttttgcatacacacctcaagttctgttcttcatcgtgctgtcgtgtctgatatcagtctcggtgaacttcagcactttccttgtgattgggaagacatctcccgtaacttaccaagtccttggccatctaaagacatgcttggttcttgccttcggctatgtcttgctgcacgatccgtttagctggagaaatatacttggaatcctgattgcagaggttgagatgggactatattcatacttctgcacccgtgaagctccaaagcccactgaagcctctccacaagtcactcaggtgaaggaaggcgaatcagaccctttgatcgcagactccttgaacgccgccgagaatggagctgctgcaaccaccgacgagcctctgaaggtccccatgtggagctccaagtacgcgcgagcatgaacgctgctgctccgacctctgaaggtgcccatgtggagctccaagcgctcgcgggcatgaacgccgcttcggaccttggttcatggtattatatacataattattc

SEQ ID NO: 2314 - DNA, 344 bp, Zea mays
  unsure (1)..(344): unsure at all n locations
  Clone ID: PAT_MRT4577_59057C.1
acgaagatgtgactgaacaaatcctgccaatctttgtctatagcaccannagcgaatcttaagggtgggcgcctatcatncgcaaagatgatnggccaagnttcaaatgggtcccacgtgatggttattgtcgcagtcgaggttttgtgagcagcaagcaaaggtttgtgtggaccagtgaacccaggtgttctctttcgtgcattctggtctgaggagtgtgtttacgcttgtgatgaaagaacatgagntgtgtagtgttgtgtcgtggtgcatcttggagcgtgcgatgagcatcgtgatgaaaaaacacgcacacggctctattgaagatgtcatgcaaa

SEQ ID NO: 2315 - DNA, 686 bp, Zea mays
  Clone ID: PAT_MRT4577_59249C.1
acttcgcaccgaccgatccgatggaccgcgccggcgtgctcgccgtggtggactcgaggaccgggaagcggtacgaggtcaaggtctcggaggacggcaccgtccgcgccactgacttcaagaagattaccgctggaaaagatgacaagggtcttaagacttatgatcctggttatctcaacactgcccctgtgcgttcttccatctgctacattgatggggatgagggaattcttcgctacaggggttatccaattgaggaggttgctgaaagcagttcgtttgttgaggtcgcctacctcttaatgtatgggaatttgccttctcagagtcaactggcagcctgggggtttgcaatttcacagcactctgctgttcctcaaggactcttggatatcatacaatcaatgcctcatgatgcccaccccatgggtgtccttgccagtgcaatgagcacactttctgtcttccacccagatgcaaaccctgcccttagagggcaagatctgtacaactcaaagcaggttagggataagcaaattgtgcgagttcttgggaaggcaccagcaatagcagctgcagcctacctgagactagcaggaaggcctgccgtccttccttcaaaaaatctttcttattcacagaactcctggatatgctagactctttgggtgaccaaaaatata

SEQ ID NO: 2316 - DNA, 436 bp, Zea mays
  unsure (1)..(436): unsure at all n locations
  Clone ID: PAT_MRT4577_59359C.1
ccggggttggcttctccttctcctccggttcgggttcnggttcgggaggggcgcggggttcggtttcgtgggtgagcgggtcgagatggcggcgtcggatgttgagtaccgctgcttcgtcggcggcctcgcctgggcgccggacgaccgctccctccgcacgccttcagcacctgcggcggggtcctcgtgtccaagatgcatcctcgctcgggagacgcggaggtcccgcggcttcggcttcgtgcccttctccgcgggggaggcgntgcggaccgccntcgagggcntgaacggcctggagctggacggccgctcatctccgtcttcgtggcccactcccgcggcggccgtggtggcggcggcggcggcgggtacggtggtggccgtggcggcggcggcttctgtggtggcgggcgccgtggtggcggcgggg

SEQ ID NO: 2317 - DNA, 1295 bp, Zea mays
  Clone ID: PAT_MRT4577_59489C.1
ctcgaggccggccgggagggtttccccagagttaaaaggcccggaggaggcgcccctataaacccttcccttctgtcgctgctcccacctctagcccgacaggtgaagccgccgccgctgcagtgtccatagccaccgcaggagactgagatggggggttttgtcaagacccacaagaccaatgcgtacttcaagcgtttccaggtgaagttcaagagaaggcgcgctggcaagacagactacagggccaggataaggctgattaaccaagacaaaaacaagtacaatacacccaaatacagatttgttgtgcgatttaccaacaaggacatcacagcacaaatcatctctgctagtatagcaggtgatatggttcttgcttctgcttactcgcatgagttgccacgatatggtcttgaagttggtctgaccaactatgcagctgcctactgcactggccttctgttggctcgccgtgtgctcaagacccgtggtttagataaggaatatgagggcaatgttgaggccactggtgaggacttctctgttgagccagctgatgagaggaggcctttccgtgctctcttggatgttggccttattaggactacaactgggaaccgtgtctttggtgccctcaagggagctttggatggtggactggatattcctcacagcgagaagaggtttgctggtttcaagaaggatgacaagcagctggatgctgatatccatcgcaagtacatctatggtggccatgttgctgactacatgaggaacctcgctgaagaggagccagagaagtaccagtctcacttcagtgagtacattaagaagggaattgaggctgatgacatggaagctctgtacaagaaggtccatgctgccatccgtgctgatccttctgtggtcaagtcaaccaagcagccaccaaaggagcacaagaggtacaaccccaagaaactgacatacgagcagaggaaggccagtctcattgaaaggctcaaccaactcaactcctcgggcggcgcagatgacgacgatgaggatgacgagtaaagtttggtcccatcgaagtagtgctatcttatgcggcgatcagtatttgtgctatggcatttatcgctacctgtagtcgtgcaacacgcatttttgtttaagtttgtcgatgcgaacaaagttgtttctgttagtttggagctggagttctgaatatttacttttataatattaaaattggaccgagttgaacaaaaaaaaaaaaaaaaaataaaaaaaaaaaaaaaaaagcggcc

SEQ ID NO: 2318 - DNA, 1541 bp, Zea mays
  Clone ID: PAT_MRT4577_59492C.1
ctccaagggctaagtaccttaggtgcgcaacacagaatttgttgtagtgtgaaaagcggatgcctccctcccttttctccccctttgatgaatagtataagcacaggagataccttcacgtctagttcgcttttgactcgattaccctctttgcaaaagaaggcaaacagaatgatgccgtgtggatctccgaggccgccgccgctgcagtgtccatagccaccgcaggagactgagatggggggttttgtcaagacccacaagagcaatgcatacttcaagcgtttccaggtgaagttcaagagaaggcgcgctggcaagacagactacagggccaggataaggctgattaaccaagacaaaaacaagtacaatacacccaaatacagatttgttgtgcgatttaccaacaaggacatcacagcacaaatcatctctgctagtatagcaggtgatatggttcttgcttctgcttactcgcatgagttgccacgatatggtcttgaagttggtctgaccaactatgcagctgcctactgcactggccttctgttggctcgccgtgtgctcaagacccgtggtttagataaggaatatgagggcaatgttgaggccactggtgaggatttctctgttgagccagctgatgagaggaggcctttccgtgctctcttggatgttggccttattaggactacaactgggaacccgtgtctttggtgccctcaagggagctttggatggtggcctggatattcctcacagcgagaagaggtttgctggtttcaagaaggatgacaagcagctggatgctgatatccatcgcaagtacatctatggtggccatgttgctgactacatgaggaacctcgctgaagaggagccagagaagtaccagtctcacttcagtgagtacattaagaagggaattgaggctgacgacatggaagctctgtacaagaaggtccatgctgccatccgtgctgatccttctgtggtcaagtcaaccaagcagccaccaaaggagcacaagaggtacaaccccaagaaactgacatacgagcagaggaaggccagtctcattgaaaggctcaaccaactcaactcctcgggcggcgcagatgacgatgacgaggatgacgagtaaagtttcgtcccatcgaagtagtgctatcttatgcggcgatcagtatttgtgctatggcatttatcgctacctgtagtcgtgcaacatgcatttttgtttaagtttgtcgatgcgaacaaagttgtttctgttagtttggagctggagttctgaatatttacttttataatattaaaattggaccgagtcgaacaaagttgtttattttagtttgggcacacaagattagagagctagcgagaaactatgacatacgctatcgggttaggaatagtgtcaattgaagaaaagcttattcaacatcaagttgagatggtttgggaatgaaatatctcgatggagttgtgtttagatagaagcgtttggaaagaagcgttgagatggtttgggaatg

SEQ ID NO: 2319 - DNA, 171 bp, Zea mays
  Clone ID: PAT_MRT4577_59534C.1
acccacgcgtccgggcaaaactgactctgtggcaagcattttctttgcggagaggagaaacaaaaggattggggggtcttttaggcggagtcggcacgtctattatggcactgctgcgttctactatctgctactgagggtgatccgagggctgccatgacggagtacttt

SEQ ID NO: 2320 - DNA, 396 bp, Zea mays
  Clone ID: PAT_MRT4577_59635C.1
cattcccaacccgcaaatccatccacgatcatcacaactttgggggtttcccatcttacaacaacactttcccatcaaccactactcctcttcatcaagatgactggacgcggaaagggcggcaagggcctcggcaagggcggtgccaagcgtcatcgcaagattcttcgcgacaacatccagggtatcaccaagcccgctatccgccgtctggcgcgtcgtggcggtgtcaagcgtatctctgctatgatctacgaggagacccgcggtgttctcaagtccttcctcgagggtgtcatccgtgacgccgtcacctacaccgagcacgccaagcgcaagaccgtcacgtcgctcgacgtcgtctacgccctcaagcgccagggccgcaccctctac

SEQ ID NO: 2321 - DNA, 705 bp, Zea mays
  Clone ID: PAT_MRT4577_59654C.1
gggaccctcgagggcgggcggggcctcactctctttcctttcccatgtacagattcattatggagttctccctcctctgccggcatggcgctctctgtggagaagacctcttctggaccggagtacaaggtacaaggatctctgctagggggacttcggacggctcaagattgagctggccgaggtcgaaatggctctggactcatggcgtgccgcggccagttccgcccgtcgaaggccttcgctggcgctaggatctcggggtctctccacatgaccatccagaccgccgtctctcatcgagaccctcagcgcgttctgcgccgaggtccgctggtgctcctgcaacatcttctccacgcaggaccacggcggcgccgccatcgcgcgagactctgacgacgtgctcgcctgggagggggagaccctcgaggagcactggcggcgcaccgagcgctgcctcgactggggtgaggcgggcggcccccatctcatcgacgacgacggtgtgcgcgccacgctgctcatccacgagggtgtcaaggccgaggaggattacgagaagtacggaaagatccccgatccggagtccaccgacaacgctgagttcaagatcgtgctcaccatcatccgcgacgggctcaaggctgacccccagaagtaccgcaagatgaaggagaggcttgtcggcgtctctgaggagac

SEQ ID NO: 2322 - DNA, 609 bp, Zea mays
  Clone ID: PAT_MRT4577_59729C.1
atacgacaagagtcgggacggtgggcgaggtggcgaagaatgaaaaggagtcgaaagaaaaggggaaggggtcatttgctcttgcatggaccatggatgagagcagtgaagaaagggaacggggtgtgacaatgactgtggctgtggcttatttggagaccaagaaattccgtgtggttttgcttgactcacctggtcacaaagattttgtgccaaatatgatatctggtgcaacacaagctgatgcagctattcttgtcgttgatgcttcaactggttcttttgaagctggcatggatggcgaaggaggaaaaagtgttggccagactaaagagcatgctcagcttgttagaagctttggtgttgaacagcttgttgtcgcagtcaacaagatggatgctgttgattatgcaaaagaaaggtttgatttcatcaagctacaacttggtagtttcctgcggtcatgcaacttcaaggactcagctattaactggattcctcctagtgctgtagaaaaccaaaatttgatccaagctccttcagatgctcgtttgaactcctggtatcaagggttttgcctcctggatgctatagattttctgcagcttc

SEQ ID NO: 2323 - DNA, 1584 bp, Zea mays
  Clone ID: PAT_MRT4577_59850C.1
gaaaaaaaaaagccgaaaaaaaaaaaaaggtagaggctctctggcgccgacggccgacccacacgcgcgtccagcgatttcgccggggggagatcttgccattccgtggagcaccatccgcggtagcctagccgcgactggggatcggggcttgcgggccgtggagccacccagaaggtagccgggaaaagcttgatccggccggggacggggccttcggaggttcgtccctcgatcgggtgtcgtctgcgaaagccgggtcgaacaaatcgtcgcgactggaggcggcgcggggtcatgggggcgtgggtctcggtcctgctcgggatggacggagccgcggcggccgggcctgctgctgtgggcctgggcgacctgccggagctctgcgccgcccaggtgctgctccggctcgacccgccggagatctgcaggctcgcgcaggtcaaccacgcgttccgcggcgccgcgggggctgacttcgtgtgggaagccaagctgccggagaactacaactatctgatggagttcgtggggagcggcgacgaggggaagcggaggcggcggcgggccgggaagaaggagatctacgcgaggctcgccaggcctgtgccttttggcgacggcaagaaggaattctggttggacaagaacaaaggcatgatctgtatggcactgtcgtccaaagcactggtgattactgggattgatgacagaagatactggcaacacatgccaacttcagaatcgagattccagtctgtagcctaccttcagcaaatctggtggtttgaggtggttggtgaagtcgatttctgcttccctgttggaacatatagcttgtacttcagggtccatcttgggaagttctacagacgatttggccgccgccagtgcacctcagagcatgttcatggttgggacaagaagcctgttcgcttccagctatcgacctctgacgggcagcaggcattgtctcagtgctacctggaggagcccgggagctgggtcctgtaccatgctggcgattttgtggcctcaaagcctgaccagctgatgaagctgaagttctccatggcacagatcgactgcacgcacacaaaaggcgggctgtgcatcgactcggttcttatctatccaaaagggaaggggtttcaccaggagagggtggtcaggtctcagaaatgagggttgtagatgttgtggaggtattcacattaggatgttagagcaaatgcagcttgcagcctgatcttatttttactttgggctctagttcgcagcagaggtgaagtgtatgtggttgtagaactcaggtattgtgtggtcaggtgaccaccagagtgctctgtcagtcctttggcaaggtcgttttcgccccccttcagctgaatttggacagcgagatagccatgaaactgtactgaaatgagttcgaaggtgtcattcccagtttctaatttgctttctactgcttagtttcggatgctccctttttcctatttgtcatgatccggtcttgacttggtcaaaaaaaaaaaaaacccccaaaaaaaaaaaaaaaaaaaaaaaaaaaaaaaaaaa

SEQ ID NO: 2324 - DNA, 2011 bp, Zea mays
  Clone ID: PAT_MRT4577_59C.1
ccggccgggaccagggaaggcggcacagccagactagcagatagagaggcggagccgcggaggccagcatatctccctcgttttggtttgcgcccaagcaagcgcctcacgcgagcaccgccgctgccgccgttcactttccccctgaacaccagccgccgccgccgccgccgccgtcgccgccgcatgcacgcacgctgcctctgcacgagcggcaagcggcgatccggcgatcctcgtcgatccccgccctaacgcgctgcggtggtccgtgcagcacaagatgaagttcggcgccacatatgaggagtatctccgggcagagcgggacaaattcctagggcaatgctcccatgtagaatacaaacgcctcaaaaaggtattgaagaaatgtagagttggtcgctcactgcaagcagatggcacaaatggtgatgagcagcaggaggggagagacgaatcttcaaacatttgtgaatgcaactcatgcacattgtgtgatgagatgttctttacagaactcaacaaggaagcatcagaaatagcaggttgtttcagatctagagtacaacgtctcctccatcttcatgttccttcaggactacaacgctgtatatggcgttttaggcagtgtttcatagatgatcagcaaataatggttcaagaaggcagaatgcttctcaattatgtgaccatgaatgctattgctattcgcaaaattctcaagaaatatgacaagatacatggttctgtgagtggcagagatttcaagagcaagatgcaaactgagcatattgaactgttgcagtcaccttggctgatagagcttgctgctttccatcttaactgcgatgattcagatgctgatgaacctagagctggagagttcttcaagaatggattcttcaagaatttttcctgtgacctgagtggagcacagccactactaacaatgaccatttctgaaactctgaagtatgagtacagcctaacttgtccaatttgcttggacactttgttcaacccttatgcgcttagctgtgggcatctgttctgcaaagcctgtgcatgtggtgctgcttctgtctacatcttccagggtgtcaagtcggcacctccggaggccaagtgccctgtctgccgagcggttggtgtgtttgatcgtgctgtgcgtatgactgaactagaattgctcctcaagagaagggacaaagattactttctgcagagactgcgcgaagagcgaagtgtgatggtgaagcaggccaaagaatactgggactcacaggcaatgctatcgatggggatttgaaagctacaatgttcttaccagttcaattgttgtggctaattacatctgaaggttctctggctaattacatattttagttcctggcaagcgtcaatcaattaagttaactgcgctcacataacagaaattgacatagcagaagctgagcccatcgaagaagcaaacaaaatcagttgcattctatcattctccgcctgattcagatttggaagaatcgaacggatttaactaatttctttgttccttccgttctactacaagcttgaaatgacgaaactcatattgtatttacatatctactgattattgggttatttaccctatttactgattgttggtgtgttatttgcctgtaaaagtgaagtcaaatgttgtccagctgccctgaacctcttaagaccatctccaaagttcaacccccacctcatattcagtgtactatggcgacaacggctccaacagttccctatagtgctccttgtctagggctaaaaaaaagctagaggctcgcgagccgactcggactccctcagactcagagaggctcatgagcctaaatgaatttgagccatccgagctgaaacagcgagctaagcctaaacaagtctgatccagtctaatgacacggtgctatattgttacattattacgttattatgttattatttatttttagtggacgaaaaaaaaaaaaaaaaa

SEQ ID NO: 2325 - DNA, 293 bp, Zea mays
  Clone ID: PAT_MRT4577_60029C.1
gccaaaacaaatgtattgataattaatactaaacagggggggcataaaagcttagaaattaccgggcccatattgtaaccacagatattgcagacccggtggatcacccagcgatccctgcacttgggtttgacataccaaatgccagctcaagccagatggatgtgtgtgtagcaatccttgatacacttacttttacgatttagggtgcgagatacagctttccaaggcacaggaagttacttggggccaacatccttcagggcgcaaatatgctcctcccccatagcaga

SEQ ID NO: 2326 - DNA, 273 bp, Zea mays
  Clone ID: PAT_MRT4577_60030C.1
aggacgcgtgggcaggctgcggccggcgggtacggtttgtccacctagtacacggacgccagggtgagggacgtcgcgtccacgggcgagaacgagtacgacgagtacaagaaggaggagatgcagcacatgcacaagcaggaccttggcgaggtcggcaccatcgcacgtgggcgccttcgcactatacgagaagcacgaagcgaagaaagactcggagcacgcgcaccgacacaagatcgaggaggaggtcctggaggaggttgtcgtcag

SEQ ID NO: 2327 - DNA, 291 bp, Zea mays
  Clone ID: PAT_MRT4577_60119C.1
gaaaaggtgatttccttgattgttagtatctacctgtattttccctccttttgggagtgcaggttataatactatttgcttccctctattgccaacctcactacaaaatttcctctttttgtttttttggtacaaagcactttttaattgattcatgtgccagaaaaatgttttttatctacaggactatggtgcctatgagaaaaagcaggccttgtcgaatattcatcagcaggaatccagtcttcagtcaagctttaccgaagtcatagataacacttgtgcatcaat

SEQ ID NO: 2328 - DNA, 150 bp, Zea mays
  unsure (1)..(150): unsure at all n locations
  Clone ID: PAT_MRT4577_60194C.1
ggctcccactcttccgctcaccggcaccaccaccaaccgagcttctccaggctcctnctcaggaangggagaatatgggagcgcggtgcttgggaantctcatgatgagagaatgggaacaaagatggggcgcggcaagatcgagatcaa

SEQ ID NO: 2329 - DNA, 308 bp, Zea mays
  Clone ID: PAT_MRT4577_60373C.1
gagactacaccacagccacttttgaaggatgactttgaattcaacggaaggaaactaacaaaggctggtgtgagacaaatgatataacgggatattttggagtatcatcgccagatgcttcaggactacatcgaatgtgcagatcacattcacttcctatacccaagtggggttgatcgcgtccaacgacagattgctcatctcgacgagaactacaggagacgagtatctagcagcccgtcgcgaacgcagcccacatcgctgccaagggagcgagtctgctcatcagatcatggtcacagtcacga

SEQ ID NO: 2330 - DNA, 611 bp, Zea mays
  Clone ID: PAT_MRT4577_60466C.1
tcgctcatcctcccagagcttgtctcgacgggggtcctaggagcggcgctggtgctgctgccggcagaggctcggtacggcgtcggaagcggcgagctgcggagaggtgacgttgtcggaggctgcgtacctcgagtacgcaatgcgcagcgcggcgtcgccctccacaagatgctgcagcgggttgagctcgctcaacagacgagcgtcggcgacggaggaccggaaggccacctgcaactgcctcaagagcatgacgggccggctcggaggcggacgcagcatgaccaacgccgccaacatccccggcaagtgcgctgcctccgccggtgtgcccatcagacccaccgacgactgcaccaagatcaactgatctacgctaccatataggaggcagctcgctcgttggatgtcagcgtacgcggccatctgcagcatgcagtgctcgtccaagcagagaggccctagctaccagtgtgtcatcaggctggcacataataaagaagtatatcatgcacctattagtgagcacttcgactgagtgtcactcgtgtcctcgtcgactataccgagtacctcgcacgtgacatggtgtagaacgtactactgta

SEQ ID NO: 2331 - DNA, 492 bp, Zea mays
  Clone ID: PAT_MRT4577_60473C.1
caaaagggaccccaaaattttgatttacatacaggcagcaataattagtaaacgtccaaggccaggcagcacaacggggggcggggcggggtcataaattaggggggtataattctacgtaggagtatcagcgattttgattttaaacgtatcgcccaaactaaccccctgttttgccggccaagccctgacaacaacaaggagccacccccccccccttgttggccaaatcctcctttgcctcccattgccatggaaagctgttaatgttgctgctgctgctgctggggcggctaaggctgcggcggttttttttgcggttgcaaccccccaaacatgggctgccccataataataataataatgcccccggaaccaggccccccgaacccggggtacccgggggaattggcggcccctttgggaaactccccctgctgttgttgctgttgaaaacccaaggccccggcggacccgggggccctttcgccc

SEQ ID NO: 2332 - DNA, 254 bp, Zea mays
  Clone ID: PAT_MRT4577_60532C.1
tccgcaccaccaagaggggccacttgaggctttggtgggacccaaaacaaaacccgacaggacgaacaacaaccatcggaccacaagccatgctggttgatgcacgggctcgcctgagccccggacgaacacaacactaacaactgtcacagaacgaccttgcaatcaaaaacacacaagggcaacaacaaacgggacacacgaagataaaccctctggactagggtaaacatcacagcagcgaacaggataac

SEQ ID NO: 2333 - DNA, 280 bp, Zea mays
  Clone ID: PAT_MRT4577_60548C.1
gatctggcaggaccacaaagcaccatttttttcctttgggtttaacttacaataaagcctggcgggggtaacagcacccatggatccgcacagcatgctggttgatgcctggttctggtgggaccacggatgaacacagcactaacaactgacacagagcgaccttccatcaaaaacacagatgggcaacaacgaacgcgagacgaacgaagataaacactctgggcttgggtaaacaacacgggagccaacatggttacatgggcgcccgggccccacc

SEQ ID NO: 2334 - DNA, 103 bp, Zea mays
  Clone ID: PAT_MRT4577_60573C.1
cccacgcgtccggtctcatgtggctggacctcaatagcaaccgactcagaggcgagatcccgcgacggctcggccggcagctcgggtcgaccccgctcagcgg

SEQ ID NO: 2335 - DNA, 846 bp, Zea mays
  Clone ID: PAT_MRT4577_60636C.1
aaagccctttcgctcgcccgcccgcccgcgccgccgccgccgcctccttccgcaggagctccctcctcgcaggcgcgatggtgtacatcaagaaccagaagacaagggcgtactccaagcgtttccaagtcaagttcaagagaaggcgccaggggaagaccgactacagggccaggctgaggctcacaaaccaggacaagaacaaatacaatacccccaagtaccgttttgttgtgcgatttaccaacaaggatgtcactgcacaaattgtgtatgctaccattgctggtgatattgtgatggccgctgcctactcccatgagttgcctcgctatggtcttgaagttggcctcaccaactatgctgcagcctactgcactggtctgcttttggctcgtcgtgtgctcaagaaccgtgatcttgatgaggagtatgaaggcaatgttgaggccactggtgaggacttctctgttgagccttctgatgagaggaggcctttccgtgcgcttttggatgttggtcttattaggaccaccactggaaaccgtgtgtttggtgcccttaagggagctttggatggtggccttgacattccccacagtgacaagagatttgctggtttcaaaaaggacgagaagtcgctggatgctgagattcaccgcaagtacatctttggagggcatgttgctgactacatgaggtcactagcagatgaggaaccagagaagttccaaactcatttcagtgagtacatcaagaggggaatctcagctgatgacatggaagcagtttacaagaaggttcatgctgccatccgtgctgatcccacatgggcaaatcaccaag

SEQ ID NO: 2336 - DNA, 303 bp, Zea mays
  Clone ID: PAT_MRT4577_60647C.1
cgaactctagacctcgcccgcccaaatacaaaagactcagatctcagtgaccagcgccgccgcgttcgttcgtgtcgaatagagaagagaggaaatggcggcgagcgagggcgtgctcctgaggatagggaaccccctcctcgaatctccgccggtgcacgaggacgccttcctggcaaaaaatgacgtcaagccagaacaatgacatgtctcgctgaagagaagcactcgactatgtatgatgagttggctatcatcagcaacgtcgaatatatagctgcgaggactcacccagaaccctat

SEQ ID NO: 2337 - DNA, 341 bp, Zea mays
  Clone ID: PAT_MRT4577_6075C.1
tcgaactaacaacatagaaagcgcactagtgctccaacaatggcagccaaaatattttgccggcttatgctcctcggtctttctgcaagtgctgctacctcgaccatctttccgcgatgctcacaagctcccatagattaccttcttgcgccgatcctctcaccatcggtgtcttcggtatgtgaaaacccaattcttcaaccctataagatccaacaggctatcgcatctggcatcttacccttatcaccctcggtactccaacaatcatgagacctattacagcacttacctttggtgcatttattggcacattacatcagggctcagcaactactaca

SEQ ID NO: 2338 - DNA, 316 bp, Zea mays
  Clone ID: PAT_MRT4577_60822C.1
ctcctgagaagtcctagacagtcaaacaacgcagcagcaatgctttagaagctccggtgaaacgacgagactacttatcgctagtctcccataccattggattacgggaagatcatatgaaggcaattagaatggacgaacagagcagcatatgtagcccatctacaatgcaagaagactggaaacgctccgatagtaacgggaactcatgtaccagatcattgtcctgatgcatcatctgtttgcctccatcaatatggagatgctgctcgattgctcctcatggagttgttttccttagaccatattgaaaatg

SEQ ID NO: 2339 - DNA, 1917 bp, Zea mays
  Clone ID: PAT_MRT4577_60917C.1
cattgggtacctcgaggccggccgggccgggagcgaatcacgtgacttcccctccccttctcccctctccactccatcgtcaaggaaggaacacggccctaactaaaccctagctaagggaagggaaacaagaccatggatgcctccaagctccgcgagcttcgcgacttcgtcgaggcgtgcaagaagaatccttcgctcctcgccgaccccaacctctccttcttccgggattacctccagagtttgggtgccaaaattcccgccgccgccccctctttcgaaagtcccaagagatcttccatggacgacattgatgacgacggtgatgacgacgacgatttggatatgagggatcccactcctgagcgagacgagctcgatgaagagattgttgagtctgatcttgagctcgaaggagaaattgtacagtctgaccatgatgacccaccacagaagatgggaaatccttcagtggaggtgactgaggaaaaccgtgatgcttcccaagaagcaaaaggcaaggctatggaagcaatttctgaaggaaaacttgaagatgctattgaacaccttaccaacgcaatagtgctgaatccactctcagcaatcatgtatggtactagagcatctgtgtttataaaaatgaagaaaccagctgctgccattcgtgatgccaatgctgctctagagatcaacccagactctgcaaaaggctataaaactcgtggaatggcatatgccatgcttggcaaatgggaggaagctgctcatgatctgcacacagcatctaacatggattacgacgaggagatcaatgctgtgctcaagaaggtggagcctaatgctcacaagatagtggaacatcgcaggaagtatgagaggttgagaaaagagagggaggaaaagagagcgcagcgtgatcggcttcgtcaacgtgcagaggcgcaggctgcttacgacaaggccaagaggaaggagcaatcgtcaagtcgctcatcaggaggtgcatctcccagaggctttcctggagggatgcctggtggtggtttccctagagggatgcccggtggaggtttccccgggggtggcatgcctgggggtttccctgggggtggcatgcctggaggtttccctggtggtgttcccggtaatgttgatatgagtaaaatcctgaatgaccctgacctgatggcagcattcagtgacccagaggtcatggcggctttacaagatgtgatgaacaatcctgccaactttgctaagcaccaagcgaatcctaaggtgggccctatcatcgcaaagatgatggccaagttcaatgggtcccagtgatggttatgtcgcagtcaggttttgtgagcagcaagcaaaggtttgttggacagtgaacaggtgttcttttcgtgcatctggtctgggagtgtgtttagcttgtgatgaagaacatgagtgtgtgtgttggtcgtggtgcatctggaggtgcgatgagcatgtgatgaaaaaaaaaaccaaacggctctatggtgatgtatgcaaaaagttgctttcgaacttgatttctcaattcacagatggtttgacagtttcttgaattatagaatgcttgtgtgctgctaaaaaaaaaaaaaaaaaaaaaaaaaaaaaaaaaaaaaaaaaaaaaaaaaaaaaaaaaaaaaaaaaaaaaaaaaaaaaaaaaaaaaaaaaaaaaaaaaaaaaaaaaaaaaaaaaaaaaaaaaaaaaaaaaaaaaaggggggccccttttaaagaaccaaattttacttccccggccttgcaaggtaaaattttttttttagggcccccaaaataaaatcaatggcccgggttttaaaaacggcggacttggaaaacccttgggttacccaaattaaatccctttgaaaaaattccccttt

SEQ ID NO: 2340 - DNA, 469 bp, Zea mays
  unsure (1)..(469): unsure at all n locations
  Clone ID: PAT_MRT4577_60944C.1
gggaggagnaccacaacgaaacgaaggccgacgacggagcggccaagaccaacccgaaggaggctggcaccgagcggaagaacggcatcatcgtcatcaagaaccgcccctgcaagggtgtggagggtactacctcaaagactggaaagaatggccatgccaaaggccactgggcggccatagacatagtcaaggggaaaaagctcgaagagattgccccttcatcacacaacggagatattccgcatgtgaaccgtactgagtaccagctgagggacatatcagaggatggattcgagagccgtcttacttcagagggcaacactaaggatgagcgtagactcccaactgaagagactcttgaggcccagatcaaggaagggattgaaagaggcaaggatcttgatgtgactgaccagtctgctatgggggaggagcagatctgcgcgctgaaggatggtggccccaa

SEQ ID NO: 2341 - DNA, 2576 bp, Zea mays
  Clone ID: PAT_MRT4577_61009C.1
ccggccgggatttctcgtgtaagtttctattaattattattactacaggctccgtggcttttgcctgtcctgtggcagcgaatcggagagcggaggggaggggaaagcgcagcaacgccggcgagcgagcgggccgttcgaggatcgcaatgtgagcacgagcagggacacacaagatgcttcatcctagctgggtcggtgtctcggcacacgtctcggagtattggtctgtgataatcgccactgttgttttcgcatttgttggcgcggtgacaatttactatacagtcaatcagttgaacaagaacatcagcttgagcctgataagggctatcaaggccagggccaagaggtacaagaaatcgaaggacaaggtgcccgctgcatcccacatctggaggaaagaagttgtctcccgcagcaaaggcctgaaatgctgcgtgtgcttgaagtccgtttcacctcctcagtactctggggggaccatccatcagtgcgatatctgcggggccgctgcgcatccgagctgctcggggaatgcacacaaggattgcaagtgtgtatctatggctggtttgggccatgtgcttcaccagtgggctgtacaatggattgacagcgcggatcactctgaagaagactctttctgttgccactgtgatgaatcttgcaatggagctttccttgcaggctcaccagtttggtactgtatgtggtgtcagcgactggtgcatgttgattgtcacagcagcttggccaaggaaactggtgatatctgtgacttgggaccattgaaacgattgatattatcacctctttgtgttaaggagcttcattggacaggtgctgggattttgagttctatcacaaatggggctaatgaattggcttccagtgtccgagagacaattcggattcgtagtaaaaggtacaaaaggggtagcgcttctgctgattcagatagctctggggctattgagctaccatctgatgctgaaggagattcacaagaagtaaacagcaaagcaaaggtgagggatgatcatgccaattgcaaactcaatgaggtacaccaaagctctgaatcagagaaagataagcaacttgtaccagataacgcagcaacaaccaatatgtcagatgtacaacgtgaaaattctcatgtacagaacaatcagaagtacgaaattatcaatgtgccttctgattctaggccacttctagttttcattaacaagagaagtggggcacagagtggtgattcactgagacagcgtctgcaaattcttcttaatcctgtgcaggttttcgagttgagcaaacagcaaggtccagatgttggtttagctttatttcggaaggtaacccatttcagagttcttgtatgtggtggagatggcactgctggttgggttttggatgccattgagaaacagaagtttgaaaccccgcctcctgtagccatccttccagctggtactggtaatgatcttgcgagggttttatgttggggtggtggccttggtgttattgagaagcggggaggtctattctcagttttgcaagatgtagagcatgctgcagtcactgttcttgacagatggaagatcacaataaaggacaaccaagggaaacttatgagaccaccaaaatttatgaacaactactttggggttggctgtgatgcaaaggttgccttagatatacacaacctgagggaagagaaccctgaacggttttatagccagtttatgaacaaggtgctgtatgcaagagagggagcaaagaacataatggataacacatttgattgttttccttgggatgtcaagcttgagatagatggatccaaaattgatattcctcaggactccgaaggtatccttgttgccaatatcaggagttacatgggaggggttgacctttggaagaacgaggatgatgtctctgacacttacctccctcagtccatgcatgacaagaagctggaagttgttagcttcacaggaatgctgcatctcgggaaactgcaggttgggctttctcgtgcaaaaagattagcccaaggccatcatataaaggttgaagtcagtactacaatgccgatccaagttgatggagagccatggtcccaggagccgggaaccatagaggtttctcatcatagccaggccttcatgcttaagagagtctccgaagaaccgctgggtcatgccgcttcggtaatggccgacatcttggaaaacgctgagagcagtggcattatctcagccttgcagaagaggactttgctccaggagatagcgtctaggcttttgtaggacacagttctaacgccagtagttgtgtgtagctcaccctatagctctctcacgtcttcagcagccagaggcttgcttctgggctactagagaattgcgcctggtcgttgtacatacaccatcatggtattttaccctgattcggattgtgttgtgtatgattctgtaaaattttgtacaccctattgggtgagcacacactgacactgttgcggtcggaaattctggtaccagttgtctggattgctgaaactt

SEQ ID NO: 2342 - DNA, 538 bp, Zea mays
  Clone ID: PAT_MRT4577_61277C.1
tcccctcctcttttctcgtttagaacctctaaaatttcccctcctcgccagtcgcagcagcacctgtagcagccatggacgccagcggagccggtagcaaggcgaacaacggggcagccgggcgcaaggcacgccccccctgcaataagtccgtgaccccctccgtaaaggacgggatgcagttccccgttagccggatcgggagctacctcaataagggcggtacgcgccgcgcgtgggcactgccgcccccgtctacctcgccgccgttctggagtacctcttcgccgaggttctggagttggcacggaacccggcccaagacaaccagaagacgcgcatcatcccgcgccacgtgctcctggcgatccgcaacgacaatgacctcgccacgctgctggccggcgtcccatcgcgcacggtggcgtcctccccaaacattccactccgtcctcctgcccaataatgcgtcgcataatgcggccatcggtgttagcaaggagcctaagttccccaaagaagggcgccaagtccccca

SEQ ID NO: 2343 - DNA, 3162 bp, Zea mays
  Clone ID: PAT_MRT4577_61285C.1
gagacggaagccaagcctccaagggggccgtcgcagaactcgcgccaccgcccgccatggcttcgtcatctaaggcctccgactcctcctcccaacgatccaagcggtcggatcaagggacgggcagggaagccgctcccgcctctgttgtcccgatccacgggaacctgacgcagttgatacgccaaatcaaatcgaggcgcctcttgtacatcaaggagaaattggaggcgaacaggaagacgctgcagaggcactcctgcgcgctgttcgacgtggcagcggcggcggaggtggcgtcgaggggcagcgatggcggcaacgctttgtcgcagcgagcggcggagggacagttcaggctcgctgggtcagacctggcacacgggataggggagagggacgtggtgtacatgcaggaggagaacctggcgtccgggacgctcgtgctctccagctcgggcgctgccgcgcagcggacagtcgtgcggttcgtgaagctgccgttggttgagaggatccctccgtacaccacttggatcttcctggacaaaaatcaaagaatggctgatgatcagtcagttgttggtaggagaagaatttactatgatccagtcggaaacgaggctctgatctgcagtgacagcgatgaagaaattccagaaccagaggaagagaaacactttttcacagagggagaagatcaattgatatggagagctactcaagagcatgggttaaaccgagaggttgttaatgtcctctgccagtttattgattcaactccatcagaaattgaggaaagatctgaagtcctatttgagaaaaatgagaaaaactctggatcttcagataagatagagaggcaactttctcttgacaaaactatggatgccgttctggattcttttgataatctcttctgccgcagatgcttggtttttgattgtcgcctccatggttgctcacagaatttggtattcccaactgagaagcaaccctacagctttgagcctgatgaaaacaagaagccatgtggtcgtcagtgctaccttcgatggagaggaggatttcaagagattcatgatgttggtcttagtggctgtgcaacatataatatggaatcaggaactgtctcacacaaagttgatgttagtattatgtctgaatcagaagattcaaaccgtgagaaaggcaacattaggtccatgacactagttggaaccagtggatcaaaaataatttcttctgttagtgctgaagaaagcactactccgccttcagcagatacctctgaaacagagaatgcatcctctgatatgcctcccagtagtttaaggaaatacaagatttcaaaacgtggacctaggtacagggagcgttctcctggcaaaaggcagaaggtttttacttatgacatttcttttgcaagcaatatactgaataaactttcgattccggagattcgcgacacaagactagagtctagagaacctggaggtgataaactacaaattcttgacgagtccactaagaaaacttcaagcaaagatatctgtggagaaagcccaattactactactgaaaatgtgggaagagagagtaaaaaagtatcttcaacaaagaatttcttggagcacactctttcatgttggagtgccttagagcgagatctatacttgaagggcatagagatatttggaaagaacagctgtctcattgccagaaacttactatctggtatgaagacctgcatggaagtggccaactacatgtataacaatggtgcagcaatggcgaagagacctctcttgaataaatccatctcaggcgactttgcagaaactgaacaagactacatggagcaagacatggttgccagaacaagaatctatcgtcggaggggccgcaatcgaaagctgaaatatacttggaagtctgcagggcatccaactgttagaaaaagaattggtgatgggaagcaatggtacacacaatataacccatgcgtgtgccagcaaatgtgtggtaaagattgcccctgtgtggaaaatggaacttgctgcgaaaagtactgtgggtgttcgaagagctgcaaaaacaagtttagaggctgtcattgtgcaaaaagtcaatgcagaagcagacagtgcccctgttttgcagccagtcgtgaatgtgatccagatgtttgtaggaattgttgggtgagctgtggagatggttcactaggtgagccacctgccagaggtgatggttatcagtgtggaaatatgaagctccttttgaaacaacaacaaaggattttgttaggaagatctgatgttgcaggttggggtgcattcatcaagaatcctgtaaataaaaatgattatcttggagaatatactggtgaattgatctctcacaaggaagcagacaaacgtggcaaaatttatgaccgggcaaactcatcatttctgtttgatttaaatgaccagtatgtgttggatgcttatcgcaagggggacaaattaaagtttgcaaatcactcatctaaccccaactgctatgcaaaggtgatgctggtggctggcgaccatcgggttggtatctatgcgaaggagcatattgaggctagtgaggaactcttctatgattatcgttatgggcctgaccaggctccagcttgggctaggagacccgaagggtcaaagaaggacgaagcatccgtctctcaccatcgagcacacaaagttgctcgatagctgaagagcagctccggatgatacaatatgcagtaaattatatatttaatacatgatttagtcctagttcattatacgaggacttcgttggtagataagcatattgtatattcattagtgaataaactcccatacatcaagttggggaataagtgcatataaatattttttaccttaggtcggaaggtgacaaactgacaaccttgttaggttgagtaaagttagtgcttacaggttttcaaactggtgtggccattgctagagtatcaaatagctgagatggctacaactatagccttgtttgtatttttttttggcaagagggatggaatttatttgccaaatgtacacattgttgctggaagtatttaatgattcaggtggtcttcttcagtcaccctcctaaattttagaaatt

SEQ ID NO: 2344 - DNA, 3154 bp, Zea mays
  Clone ID: PAT_MRT4577_61287C.1
cattgggaccctcgaccagggccggcgggtgggggtctttcgcaacgcaagtagtgctggagattggagagtggagacagaaggcaagggggccgtcgcagaattcgcgccaccgcccgcgatggcttcgtcctcgaaggcctccgattcctcccaacgatccaagcggtcggatcaggggatgggcaaggacgccgctgccgcctctgttgtcccgatccacgcgaacctgacgcagctgatacggcaagtccaatcggggcgcctcgcgtacatcaaggagaaattggaggtgaacaggaaaacgctgcagaggcactcctgctcgctgttcgacgtggcagcggcggcggaggtggcgtcgaggggcaccgatggcggcaacgcgctgtcacagcgcgcggcggagagacagtgtgggtcagacctggcaaacgggataggggagagggacgtggtttccgttcaggaggagaacctggctaccggtacgctcgcgctctccagctcgggcgctaccgcgcagcggacaattgtgcggttcgtgaagctgccgctggttgagaagatccctccgtacaccacttggatcttcctggacaaaaaccaaagaatggctgacgatcagtcagttgttggtaggagaaggatatactatgatacagttggaaacgaggctctgatctgcagtgacagtgatgaagaaattccagaaccagaggaagagaaacactttttcacaaagggagaagatcatttgatatggagagctactcaagaccatgggttaaaccaagaggttgttaatgtcctttgcctttattggtgcaaccccatcagaaattgaggaaagatctgaagtcctatttgagaaaaatgagaagcactcaggatcttcagataagatagagagccgactttctcttgacaaaactatggatgccgttctggattcttttgataatctcttctgccgcagatgcttggtttttgattgccgccttcatggttgttcacagaatttggtatttccatgtgagaagcaaccctacagctttgaccctgatgaaaacaagaagccatgtggtcatttgtgctaccttcgatttccccagtggagagaaggatttaaagagatgcatgatgatggtcttgctggtggtgcaacatatactatggaatcgggaactgcctcacagagagttgatgttaatgttatgtatgaatcagaagattcaaaccgacagaaaggcaacattaggtccatgacactagttggaaccagtggatcaaaaataatttcttctgtcagtgcggaagaaagcactactactccttcagcagatatctctgaaacagagaatgtatcctctgatttgcctcccagtagtttaaggaaacacaagatttcaaaacatggacctaggtacagggagcattctcctggcaaaaggcagaaggttttcacttctgacatttcttttgaaggcaatataatgaataaactttccattccggagattcgtgacacaagactagagtccagagaatctggtggtgataaactacgaattcttgacgagtccactaagaagacttcaaggaaagatatgtgtggggaaagcccagctactaccatggaaaatgtgggaagacagagtaataaagtgtcttcaacaaagaatttcttggagtccactctttcttgttggagtgccttagagcgagatctatacttgaagggcatagagatatttggaaagaacagctgtctcatcgccagaaacttactatctggtcttaagacctgcatagaagtggcaaactacatgtataacaatggtgcagcgatggcgaagagacctctcttgaataaatccatctcaggcgactttgcagaaaatgaacaagactacatggagcaagacatggctgccagaacaagaatctatcgtcggaggggccgcaatcgaaagctgaaatatacttggaaatctgcagggcatccaactgttagaaaaagaactgatgacgggaagcaatgttacacacaatatagcccatgtgcgtgccagcaaatgtgtggtaaagattgcccctgtgcggacaagggaacttgctgtgagaagtactgtgggtgttcgaagagctgcaaaaacaagtttagaggctgtcattgtgcaaaaagccaatgcagaagcagacagtgcccctgttttgcagccagtcgtgaatgtgatccagatgtttgtaggaattgctgggtgagctgtggagatggttcactaggtgagccacttgcaagaggtgatggttatcagtgtggaaatatgaagctccttttgaaacaaaagcaacggattttgttaggaagatctgatgttgcaggttggggtgcattcattaagaatcctgtaaataaaaatgattatcttggagaatatactggtgaattgatctctcacaaggaagcagacaaacgcggcaaaatttatgaccgggcaaactcatcttttctgttcgatttaaatgaccagtatgtgttggatgcttatcgcaagggggacaaattgaagttcgcaaatcactcatctaaccccaactgctatgcaaaggtgatgctggtggctggcgaccatcgggttggtatatatgcgaaggagcatattgaggctagcgaggaactcttttatgattatcgttatggacctgaccaggctccagcttgggctaggagacccgaaggatcaaagaaggacgaggcatccgtctctcaccgtcgagcacacaaagtggctcgatagctgaagagtcgctccggatgatacaatatgcagtaaacttaatacttaatacatgattcagtcctagttcattggtagataaacatgctatatactatccattagtaaataaactctcattcatcgagttggagaataaatgcgtataaacatatgtggacctcaggtcgggaaggtggcaaccttgttagtttgagcaccaacaggttctcaaacttgagtggctattgctagagtatcaaataatggctgcgactatagccttgtttgtatattttcttggtgagatgaaataatttgtcaaacactcaaatgtacactttattcctgaaagtatttgatgattcatt

SEQ ID NO: 2345 - DNA, 602 bp, Zea mays
  Clone ID: PAT_MRT4577_61348C.1
acgcacatatacattcgagaaccaactagtcaacatcataaagtacaatacctgtaccaacaacggcagccaaaaatggtgcctacttatgctccttggtctttctgcaagagctagctacggcgaccatatgtcccgcaatgctcgcaagctcctatagctagccttcttccaccgtacctcttaccagcgtgagatgccgaatgtgaaaacccaattcttcaaccctacatgatccaacaagcaatcacaggtggcatactacctttatcacccttgttcctgcaacaatcatcacccctattacatcagttacctttggagcatcaatcgccacaaaatatcacggcacaacaaccacaacaacttgagctagcaaaccttgctggctactctacaaaacagcagtgtacttacattcaaccaactacatggattgaactatgcttgttattagcaacaccaacaactaccattcattcatgtacctgatgcctacccccagaaatatcttacattcaaccaactatgagcatcgaactctcctgctgattaacagcgagaacaactactaccattcaaccagctagctggagtgagcc

SEQ ID NO: 2346 - DNA, 257 bp, Zea mays
  Clone ID: PAT_MRT4577_61382C.1
ggcttctcctccccctcttaccaagtcctcctcgggttagggttccttagggttttgtcgatgtgcgatggcggcggctgatgtggagtaccgttgcttcgtcggctggcttgcctgggccaccagcatcgagtctctggagaatgccttcggctcctactgcgagattctcgactccaaggtcatctccgaccggtagacgtggatgtctcgcggcttcggcatcgctatcttctcctccttaaggtccatgctcg

SEQ ID NO: 2347 - DNA, 408 bp, Zea mays
  Clone ID: PAT_MRT4577_61462C.1
cccagatccaattcgcgagttctccctcctgtgaggccatggtgctatatgtggagaagacctcgactggacgggagtacaaggtcaaggatctctcgcaggcggacttctgacgcctcgagattgcactggccatggtcgaaatgcccggccttatggcgtgccgcgccgagataggcccgtacaagcccttctccggcgctaggatctcggggcctttccacatgaccattcagaccgtgcgtcttatagagaccctcaccgcgctcggagcccaggtccgctggtgctcctgcaacatattctccacgcaggaccacgcgcgctgcggcatcgtgcgcgactggtacgacgcgttcgcctggaaggtggagaccctcgtggagtactgcgggtgcaccgagcgct

SEQ ID NO: 2348 - DNA, 1891 bp, Zea mays
  Clone ID: PAT_MRT4577_61799C.1
cctgccggatctctctcttgtcattgggtacctcgaggccggccgggaacccagtgtgcgcacttcaccccccctctcggtctcaccctcctggcgacgactgggcggccgaccggccgtcgccgccgccccacgccaggtttcaaagtcttcgtcaggcccttctccggcgactcgagcaccacagggtgacaaggatagctttctcgggtcactgaaggaagacatcttctcgacgcgttagaccttctgacggttggctggttgtgctttaagtgttcaaggggtggattaggaccgggaaactctgtactgaagggaaggtcaaaagtgtcaagagagcttgttccaagatggatgaaggtcagggagttaggtattggtgccacatgtgtcaggaggtgatagatcccatgcccgagatgaagtgcccaggctgcgagggcgggtttgtggaggagatggactctgaagactttgagccagctgcgaacgcgaggtctgatcgctccgtctctctcttggctccactgctgcttggtatgatggggggttcgtcgcgcagatcaagactcaggagggaggccatggttgaagctgatgccgaccaggatgacgaagaggatgattcagaccatgagcttgaactttccaggaggaggcggaggaggaggcgctcatcagcgcttttcagtgtgcttgaggctatgcgtgaccgtgatgaagtaaggggctcggatgacaccgacagtgatacagagagagacctggagagagggagaagggagaggatggagaggcagagggagaggttaaggcagatcgagagggtgagtgctcgtggcagagagaggacggaaagcttaatactgatcaactccaacaacgaggctattattctgcagggaacattcggatctgatgacaaccaggaggactcaagcaacacaagttctggtgtatcacttggggattactttcttggtcctgccttagacactctcttgcagcgtttggcggagagtgacctcagtcgttctggcacaccgcctgccaagaaggaagcagtcgccgcgctaccaaccgtgaacatcgaggaagcgttgggctgttcagtctgtcttgaggatttcgagatgggaggagaagcgaagcagatgccctgtcagcataagttccactcgcactgcatactcccgtggctggagctccacagctcttgcccaatctgccggtttcagttgcctactgaggagacgaagaacaacccatgcgaatcagccagcaccgcagggaccgtgaacggcggtggagacaacgctgctgcaagcggcagcgatacagaaagtactaaccacaatgaagatgaccattccgatagccctatcttctctgctctgagcacactcttctctgatccgttctcatccgacgatgatgaaagtgttccacactcttacgagaactgaagatagcgtcggacgcaggcttgcaatatggtgaagacgttctgcttctgaggctggcatctttatattgtagcttctgtacatatctctctgaacggtcgccccccataagacaaactattacctctccgttttactgaaaactatgtggcttgtaatctgctagtgcttgctatgttcacttgcctcgaataaatgttatcctttagcgtgcttattaccatctccggacggccctaaacgtgcatgtggacgcagatttggttgacagtatggccaatgtaaggcatatatgtatgcagtggcgttgcgtcttactcctaaaatttaacagtcaaagagaaggtccttggaagtcgttttggagaaggagagaagagagaggagggggagaaaaaactcgagagagggcgccggtaccc

SEQ ID NO: 2349 - DNA, 563 bp, Zea mays
  Clone ID: PAT_MRT4577_61820C.1
cgtttagaacctctaaatttcccccatcgccatccagatccctgtgcacctgtcgccatcggccggtgcaggggaataaggggcggccgggcgcaaggcaggcggccccagaaatagtcggtgacgcggtccgtcaaggccgggctgcatttccccgtcggccggatcgtgcgctacctcaagaagggccggtacgcgcagcgcgtgggcactggcgcccctgtctacctctccgacgtcctggagtacctcgccgccgatgttctggatttggcatggaactcggccatagacaacaagaagactcgcatcatcccgcgccacgtgcttctggcgatccgtaacgtctaggagctcgttaagctgctgtccggcgtcaccatctctcacggaggcgtcctccccatcatccactccgtgctcctgcccaataaggcggaggataaggctgccatctgcctcagcaatgagcccaagtcccccaagaaggtcgccaattcccccaagaaggcttagaatgtagggtcttcatttgctctgtgtgctgtatcatgttcgtgtct

SEQ ID NO: 2350 - DNA, 348 bp, Zea mays
  Clone ID: PAT_MRT4577_61834C.1
ttagtacctgccaaaaacaaggagtcccctggggggctatattaaacagttggggggttgaccccgatcgatccgactaggcatgacaggactgacacaattcgcaaggctcttgtccttggcgttaacgataacatgatcaccgccgatcagctcgctattgttacggagactgcaaggaggctcggcatgagtaccaacatgtatccatcctatgcactgatagggcaaaacaaggatgcgactctagaaccgctttctgtagatgaactcattgacaaggcctatggattagccgcactctttcctgaacacaagtacgagatcgtgcagagactgcacgagaag

SEQ ID NO: 2351 - DNA, 409 bp, Zea mays
  Clone ID: PAT_MRT4577_61892C.1
caactagcatcatagaaagcacaatcttgtaccaacaatggcaggcaaaatatgttggttccctatgctccttggtctgtctgcaagtgctgctaccgtaaccatcttcccacaatgctcacaagctcctatagctttctttcttgccagatacctgtcaccagcgctgtcttcagtatgtgaaaacccaactcttcaaccctacaggatccatcaggcaatcgcaacaggcatcttacctttatcacccttgttcattcaacaaccgatagccctattacagcaattacctatgaagcatttcatggcacctaacatcaaggcacatcacctacaacaactagggctatgaaaccttgctgcctactctcagtaaccgccgtctctttctttcaaccaactggctgca

SEQ ID NO: 2352 - DNA, 401 bp, Zea mays
  unsure (1)..(401): unsure at all n locations
  Clone ID: PAT_MRT4577_61933C.1
ncgagcacagtgcccatcccctccgctcccccctcccccctccgcctccccgcgctcgaatcctctgcggttaacaatggacgcgcagtacaaccccaggacggtggaggaggtcttccgggactacaagggccgccgcaacggcctcgcccgcgcgctcaccaccgatgtggaggagttcttccggcaatgcgacccggaaaaagaaaatttgtgcctttatgggtttcccaatgagcattgggaagtaaacttacctgctgaagaagtgccacctgagctcccagagccagcattgggcatcaactttgcacgagatggaatgcaggaaaaagattggctatccatggttgcagcacacagcgacgcatggttactatctgttgcattctactttggtg

SEQ ID NO: 2353 - DNA, 776 bp, Zea mays
  Clone ID: PAT_MRT4577_62309C.1
atacgaagggcattgaaccttggtgttagtgtaaaaatgatcacaggtgatcagctagcaattgggaaggaaacaggacgtcgcttaggcatgggtactaacatgtacccttcctctgctttgctgggacagaataaggatgagtctattgctgctttacctgttgacgatttaattgagaaagcggatggttttgctggcgtattccctgagcacaaatatgagattgtaaaacgtttgcaagcacgaaaacacatttgtgggatgactggtgatggagtaaatgatgcccctgccctaaagaaagctgatattggtatagcagttgctgatgccactgatgcagccaggagtgcttctgacattgtcctgacagaacctggcttgagtgtgataattagtgccgttcttaccagccgggcaattttccagaggatgaagaactacacgatctatgctgtttccatcacaatacgtattgtgctaggatttatgctacttgccctcatatgggagttcgatttcccaccatttatggtacttattattgcaattctaaatgacggtaccataatgaccatatcgaaggatcgagtgaagccttcgcctctaccggacagctggaagctggccgagattttcacaactggaattgtgcttggtggatacctggcagtgatgactgtcatcttcttctgggctgcatataagacaaactttttccctaggatcttccacgttgaaagccttgagaagacagctcaagatgattacca

SEQ ID NO: 2354 - DNA, 1212 bp, Zea mays
  Clone ID: PAT_MRT4577_62540C.1
ctgtatgcttgtggaaatgggcagcagagcagctttcgtggtcgcgtttctcctgagggctatatatgcaggcacgcagatactcaccaaggctgccttcgatgaaggcatgaacacgtcggtctttgttttctacaggcatctgactggtatcctcttcttggtgcctattgcttttgtgcttgagaggaaaactgcccctccactgtcattcagagtctctctgaaattgtttttccatgcactatacgggatctctggagcaataaacatatacggcctcggtctcagctattcttcagcaacatcatcgtctgcgatatttaacctcctgccagctgtggctttctttctggctgttcttttggggatggagacactgaacttgaagcggttccacgggatcgcaaaggctgcaggcgtgttgttcagcactgctggcgtgactgtgctggcgttctaccaaggccccgcattcagatcgttcatccaccacaccgctttctcccatcacaacgtccacgctggggtcgttaccgccgctcatcctaaaagcgtctggatactggggattttcctgacgaccttgtcgactgcatcgtgggctctctggacggttcttcaggggccaatgctggaagcgtacccatccaagctgctcaacacgaccctccagatgatcttcgcgacggtccagtgcttcttcatcgccctagcggccgagagggacttgtcgaggtggaagctggcgctggacatacgcctttacgctgtgatctactctggaatacttgtctcgggagtcgcttactacatgcaagtatgggtgatcgagaagagcgggcctgtcttcttggccatgacgatgccgataaccttgcttgtcaccatcattctgtccctgtttctcggagagccggttaccctgggaagcatcttgggtggactgatcatggtcggtggtctgtacagtgtgctctgggccaagaggtctgagcaggtgcatgccagcaagcagcaaatggcagcgcctactcctcctccagcaggcgacacaagtgtaggccgagcttagcttgtttattttgcagtgactgagatcgagagaactgtgaagttctgtttttagataatggaaacctgaatgagcacatgcatcaggcccctaaggactctcctaacagctgctaaaaggaaaaaaaaaaaaaaaaa

SEQ ID NO: 2355 - DNA, 2202 bp, Zea mays
  Clone ID: PAT_MRT4577_62558C.1
acctcgagggaggccggccggggcatactggtcttcaccctttctcttgccacctcgggcatcctcagccgccctaaaaaggatacatgcttcatacctagatcatttggtgttcagttttgtttttaagccatggcgaattcccggactggacgttacaagatgtctaatctctcacacacctcaaaggaagatacttcacctgagggttcaggtactaccgagagaactggagcctggagtaacatgttgaacactcttatgcagcaagcctcaatctatggtgtggctgctgggtattgtttatcagcgtcgctgctctcgatcatcaacaaatgggcaatcatgaaatttccatatcctggagccctgacagctctgcagtatttcactagtgttgctggagttctcctatgcggacagctctggctcattgagcatgacgccctcacgagataagttaacagggctagctgctaggtggttgctgcatactggtcttccctctttctcttgccacctcgggcatcctctctggcttagaaaaaaaatatgcgcttcatagtccatacctagatcttttggtgttcagttttggtttcaagccatggcgaattctcggattggacgttacaagatgtctactctctcagacccctcaaaagaagatacttcacctgagggttcaggtactacccagagaaatggagcctggagtaacacattgaacactcttctgcagcaagcctcagtatatggtgtggccgctgggtattgtttatcagcgtccctgctctcgatcatcaataaatgggcaatcatgaaatttccatatcctggagccctgacagctctgcagtacttcactagtgttgctggagttctcctatgtggacagctcaagctcattgagcacgatggacttaacttgaggacaatgtggaagttcttacctgctgctgtgatgttctacatctccatcttcacaaatagtgaactcctgcttcatgccaatgtggatactttcattgtgttccgctctgctgtgcctatatttgtcgcgatcggagagacgctgtatcttcatcagccatggccatcgctcaagacatggctttcactctccacaatacttggtggaagtgtgatctatgttttcacagacaaccaattcactgtgactgcttacacctgggcagtggcctacctagcaagcatgtccattgatttcgtgtacatcaagcacgtcgtaatgaccattgggctgaacacatggggccttgtgctatacaacaacctcgaggctttgatgctattcccccttgagctccttataatgggagaatttgatcagatgaaggtcgacagctccaaggtgtcaaactggctgtcattcgatgtggtcctccctgttgctctttcatgcctgtttggactatcgatatcattctttggattctcctgcagacgggctatttctgctaccgggttcacagtgcttggcatagtgaacaagctcctgactgttgttattaatttgcttatctgggacaagcatgcctcttttgtgggcaccattgggctcttgatatgcatgtcaggtggcgtgctctaccagcaatccaccatgaagccgaaggcgcccaaggttgagccgaaggaagagaacgacaacgacgaggagcagcagaaattgctgcagatgcagggtgttcaagagagcaatccaactcagaaataaagctcttcataaaccttacaacgaagtaatgctttgatggattaccttctttgcaacagcctcacctgaaacgtttttgtattggctaatacttggaaaaaagcatatggatgagtagtcatgaattaggagctacaaaatatcatgtttttgatattagaagtcgtgaggggacctaattatcactatgcaattctttattactgtattaccacttacatttgtaacgcaaaatcgttatgataggataccaggtactcggcaaatacctgcattgaatacttcctatacaaaagcatccgtctcatacagttcgggggtgacagtggtagtatgatctgtttttaggcatttctctgctggagttagcctatatgttctgtaacttattgttggtgatgaagacattggttcttgtgctaaatagagttttcttaccaaaaaaaaaaaaaaaagcggcc

SEQ ID NO: 2356 - DNA, 1966 bp, Zea mays
  unsure (1)..(1966): unsure at all n locations
  Clone ID: PAT_MRT4577_62559C.1
ttgggtacctcgaggccggccggggcaatcggaatcgcaagcgtccggatccgggctcacacctccgaccgacagccaccgcgcagaaaacaaggcggagacccggcgataaatccccgcgccccatccttttccgttccccacaccaccaccgagttcaccggggctggactggaggaagcgtctacaagacaaggatcagcagcgcttcatgtgactgattggttggttgcgccggcttgcgaggatctagcaccgagttcagggagcacttcgtgagacttgttcattcgtcttgaggtgctggagccgtcacgttgtggtagttgagaggaacctgtccaatttccatagttgcgaggaaagattcctgagatgtctactctctcagacccctcaaaagaagatacttcacctgagggttcaggtactacccagagaaatggagcctggagtaacacattgaacactcttctgcagcaagcctcagtatatggtgtggccgctgggtattgtttatcagcgtccctgctctcgatcatcaataaatgggcaatcatgaaatttccatatcctggagccctgacagctctgcagtacttcactagtgttgctggagttctcctatgtggacagctcaagctcattgagcacgatggacttaacttgaggacaatgtggaagtttttacctctcgaggccggccgggatcttctcactctttctcttgcacctcggcgcgcccgagccgccctaaaaaggatacatgcttcatacctagatcatttggtgttcagttttgtttttaagccatggcgaattcccggactggacgttacaagatgtctaatctctcacacacctcaaaggaagatacttcacctgagggttcaggtactaccgagagaactggagcctggagtaacatgttgaacactcttatgcagcaagcctcaatctatggtgtggctgctgggtattgtttatcagcgtcgctgctctcgatcatcaacaaatgggcaatcatgaaatttccatatcctggagccctgacagctctgcagtatttcactagtgttgctggagttctcctatgcggacagctcaagctcattgagcatgacggccttaatttgaggacaatgtggaagttcttacctgctgctgtgatgttctatatctccatcttcacaaacagtgaactcctgcttcacgccaacgtggatactttcattgtgttccgctctgctgtgcctatatttgtcgcgataggagagacgttgtatctccatcagccatggccatcactcaagacatggctttcactctccacaatacttggtggaagtgtgatctatgttttcacagacaaccaattcactgtgactgcttacacctgggcagtggcctacctagcaagcatgtccattgatttcgtgtacatcaagcatgttgtaatgaccattgggctgaacacatggggccttgtgctatacaacaaccttgaggctttgatgctattcccactcgagcttctagtaatgggagaatttgatcagatgaaggtcgacagctccaaagtgtcaaactggctttcatttgatgtggtcctccctgttgctctctcatgcctgtttggactatcaatatccttcttcggattctcctgcagacgagctatttctgctactgggttcacagtgcttggcatagtgaacaagctcctaactgttgtgattaatttgcttatctgggacaagcatgcctcttttgtgggtaccattgggctcttgatatgcatgtcaggtggtgtgctctatcagcaatccaccacgaaaaccgaangcaccaaggttgagccgaaagaaaaaaacgacgaagaagcagcagaaattgctgccagatgccagggaagttccaagaaaagtccataaacccttacaaaagaaaantacaactaccaaag

SEQ ID NO: 2357 - DNA, 1409 bp, Zea mays
  Clone ID: PAT_MRT4577_62561C.1
ctcgaggccggccgggatactggtcttccctctttctcttgcacctcgggcatcctttctggcttagaaaaaaaatcgcttcatagttcatacctagatcgtttggtgttcagttttggtttcaagccatggcgaattctcggattgggcgttacaagatgtctactctctcagacccctcaaaagaagatacttcacctgagggttcaggtactacccagagaaatggagcctggagtaacacattgaacactcttctgcagcaagcctcagtatatggtgtggccgctgggtattgtttatcagcgtccctgctctcgatcatcaataaatgggcaatcatgaaatttccatatcctggagccctgacagctctgcagtacttcactagtgttgctggagttctcctatgtggacagctcaagctcattgagcacgatggacttaacttgaggacaatgtggaagttcttacctgctgctgtgatgttctacatctccatcttcacaaatagtgaactcctgcttcatgccaatgtggatactttcattgtgttccgctctgctgtgcctatatttgtcgcgatcggtgagacgctgtatcttcatcagccatggccatcgctcaagacatggctttcactctccacaatacttggtggaagtgtgatctatgttttcacagacaaccaattcactgtgactgcttacacctaaaaagtggcctacctagcgagtatgtccattgatttcgtatacatcaagcacgttgtcatgaccattgggctgaatacatggggccttgtgctttacaacaatcttgaggccttgatgctgttccccattgagctccttgtaatgggagagttcagtcagatgaaggtcgacagctctaagatgacaaactggctgtcattcgacatgattcttccggttgctttgtcgtgcctttttgggttagcaatatccttctttgggttctcctgcagacgggctatctcagctactggatttacggtccttggtatagtaaacaagctcctcactgtcgtgattaatctgcttatctgggacaagcattcatcccttgtgggaacaattgggctgttgatctgcatgtctggtggtgttctgtaccagcaatccaccacaaagcccaaggcaccaaattttgagccgaaggaagagaatgatgaggaggaacagaagttgcttgagatgcagcaagggcgtgacatcagttcaactgtagagcattcctcataagcctcatcgctgaagtttgttattgatacttcacttctggcaacagcttgcgtggaccattggaaagaaaagtttatctacagggcatagttgagattagttaggaaatgcagaggaacctcagtatcattctacgattctttt

SEQ ID NO: 2358 - DNA, 2882 bp, Zea mays
  Clone ID: PAT_MRT4577_62565C.1
cattgggaccctcgagccggccgggaaatcggaaggtcacgcgtgcccgcgagcgtgccacgcaagggcgagggagcccgcgaggcggaatgcccctcgagatctcctctgcgcggctcgcgggccagaccatcagaagcagcaagtcgcattagtaaattcaatcatcgtccccgcctgcaaaagatctgccgtggcctcctcgtttacctattgctggttctcaaatcgcacgccctcactgctagtgctaggctccccttcgcgcgcgcgcgcagttattaccccgtccacggccgcgtgttcgcaagcatccagatccggcttcccacctccggcgaccaccgcgcagagaacaattccgtccaacgggaaaccccgcgataaatcgccgcgcccatcgtttggcgtccccccacaccaccgaattcaccagggctggaggaagcgtctgaaagactcagcaacgcttcatgtgactgattggttggctgcgccggctctctagcaccgagttcagggagcacttcgtgagcttacacgacttcttcgttcgtcttgaggcgctggagctctgtcacgttgtggtagttgagagggatctgtccaatttgcatagctgcgaaggaagattcctgagatgtctaatctctcacacacctcaaaggaagatacttcacctgagggttcaggtactaccgagagaactggagcctggagtaacatgttgaacactcttatgcagcaagcctcaatctatggtgtggctgctgggtattgtttatcagcgtcgctgctctcgatcatcaacaaatgggcaatcatgaaatttccatatcctggagccctgacagctctgcagtatttcactagtggttgctggagttctcctatgcggaccggggttcgcttattaggcggaagaacatgacaaatcggaaggttcacgcgtgaccgcgagcgtgccacgcaagggcgagggagcccgcgaggcggaatgcgcctcgagatctcctctgcgcggctcgcgggtcagaccatcagaagcagaaagtcgcattagtaaattcaatcatcgtccccgcctgcaaaagatctgccgtggcctcctcgtttacctattgctggttctcaaatcgcacgccctcactgctagtgctaggctccccttcgcgcgcgcgcgcagttattacccgtccacggccgcgtgttcgcaagtatccagatccggctccccacctccggcgaccaccgcgcagagaacaattccgtccaacgggaaaccccgcgataaatcgccgcgcccatcgtttggcgtcccccacagcaccgaattcaccagggctggaggaagtgtctgaaagatgtctaatctctcacacacctcaaaggaagatacttcacctgagggttcaggtactaccgagagaactggagcctggagtaacatgttgaacactcttatgcagcaagcctcaatctatggtgtggctgctgggtattgtttatcagcgtcgctgctctcgatcatcaacaaatgggcaatcatgaaatttccatatcctggagccctgacagctctgcagtatttcactagtgttgctggagttctcctatgcggacagctcaagctcattgagcatgacggccttaatttgaggacaatgtggaagttcttacctgctgctgtgatgttctatatctccatcttcacaaacagtgaactcctgcttcatgccaacgtggatactttcattgtgttccgctctgctgtgcctatatttgtcgcgataggagagacgctgtatctccatcagccatggccatcactcaagacatggctttcactctccacaatacttggtggaagtgtgatctatgttttcacagacaaccaattcactgtgactgcttacacctgggcagtggcctacctagcaagcatgtccattgatttcgtgtacatcaagcatgttgtaatgaccattgggctgaacacatggggccttgtgctatacaacaaccttgaggccttgatgctattcccactcgagcttctcgtaatgggagaatttgatcagatgaaggtcgacagctccaaagtgtcaaactggctttcatttgatgtggtcctccctgttgctctctcatgcctgtttggactatcaatatccttcttcggattctcctgcagacgagctatttctgctactgggttcacagtgcttggcatagtgaacaagctcctaactgttgtgattaatttgcttatctgggacaagcatgcctcttttgtgggtaccattgggctcttgatatgcatgtcaggtggtgtgctctaccagcaatccaccacgaaaccgaaggcacccaaggttgagccgaaggaagagaacgacgaggagcagcagaaattgctgcagatgcagggagttcaagagagttcataaaccttacaaagaaagtacaactacaaagaagcatatggctagtacttggaaagaggacagcctcacctgaacgtttttgtattggctagtacttgggaagaagcatatggatgaatgtagtcatgaactaggagctacaaaatcccatgttttagatattagaagtcatggaggggacctaattatcactgtgcaattctttattactatactaccacttccatttgtaacgcaaaattgttatgataggatggcaaatatacctgcatcgaatacttcctatacgaaagcacctatctcatacagttaggtgacggtgatactatgatctatgtttagtcatttctctgctggagtttgcctatttgttctgtaccttattgttggtgatgaagccattggttcttttgctgaaaagaaagttttgttatc

SEQ ID NO: 2359 - DNA, 840 bp, Zea mays
  Clone ID: PAT_MRT4577_62747C.1
ttgatgaatcgccatcacagcaagctacgcgcactgaaatcctccaatccacaaggacacagctctacttccgcagttcgcactcgcacgcaccgagcggctagcgatcaacggagaaatgtcgctggtgaggcgcagcagcgtgttcgacccattctccgtggacctcttcgaccccttcgacagcatgttccgctccatcgtgccgtcgtcgtcgtcggcggcggcggcggcctccgagaccgccgccttcgccagcgcccgcatcgactggaaggagacgcccgaggcgcacgtgttcaaggccgacctccccggcgtgaagaaggaggaggtcaaggtggaggtggaggacggcaacgtgctgctcatcagcgggcagcgcagcagggagaaggaggacaagggcgacaagtggcatcgcgtggagcgcagcagcggccagttcgtgcggcgcttccgcctccccgagaacgccaagacggaggaggtgagggccgcgcttgagaacggcgtgctcacggtcaccgtgcccaaggccgaggtcaagaagcccgaggtgaagagcatccagatctccggctgaagaagacatggacgcgaggtgaatggtcgcgtcgcggcgtcggatcttgggtttcagcgacgcgactcgtgtgtgtgtggtttctctgctttggtatgtttggtgtgtacgtgtgctgttcagtgtttcgtggtcatcgtctgtacaatgtgcgttgttcggtgagcttcccggctcagtatgttgtgatctgcgagtgaataaataagaataaaccagctgtcatctcgtgtagtaaaaaaaaaaaaaaaaaa

SEQ ID NO: 2360 - DNA, 878 bp, Zea mays
  Clone ID: PAT_MRT4577_62749C.1
cattgggtacctcgaggccggccgggaaaactcttcccaaccagagcgaagaagaatcgccatcacagcaagctacgcgcactgaaatcctccaatccacaggacacagctctacttccacagttcgcagactcgcacgcaccgagcggctagcgatcaacgagaaatgtcgctggtgaggcgcagcagcgtgttcgacccattctctgtggacctcttcgaccccttcgacagcatgttccgctccatcgtgccgccgtcgttgtcgtcgtcggcggcctccgagaccgccgccttcgccagcgcccgcatcgactggaaggagacgcccgaggcgcacgtgttcaaggccgacctccccggcgtgaagaaggaggaggtgaaggtggaggtggaggacggcaacgtgctgctcatcagcgggcagcgcagcagggagaaggaggacaagggcgacaagtggcatcgcgtggagcgcagcagcggccagttcgtgcggcgcttccgcctccccgagaacgccaagacggaggaggtgagggccgcgcttgagaacggcgtgctcacggtcaccgtgcccaaagccgaggtcaagaagcctgaggttaagagcatccagatctccggctgaagaagacatggacgcgaggtgaatggtcgcgtcgccttcgcgtcgcggcgtcgggtcttgggtttcagcgacgcgactcgtgtgtgtgtgtggtactgtggttgctctgctttggtatgtttggtgtgtacgtgtgctgttcagtgtttcgtggtcctcgtctgtactttgcgctgttcggtgagcttcccggctcagtatgctgtgttctgcgagtgaataactaaaaccaaaccagctgtcgtct

SEQ ID NO: 2361 - DNA, 823 bp, Zea mays
  Clone ID: PAT_MRT4577_62752C.1
aatcgccatcacagcaagctacgcgcactgaaatcctccaatccacaggacacagctctacttccgcagttcgcactcgcacgcaccaagccgctagcaacgaagcagaaatgtcgctggtgaggcgcagcagcgtgttcgacccattctccgtggacctcttcgaccccttcgacagcatgttccgctccatcgtgccgtcgtcgccgtcgtcggcggcggcctccgagactgccgccttcgccagcgcccgcatcgactggaaggagacgcccgaggcgcacgtgttcaaggccgacctccccggcgtgaagaaggaggaggtgaaggtggaggtggaggacggcaacgtgctgctcatcagcgggcagcgcagcagggagaaggaggacaagggcgacaagtggcaccgcgtggagcgcagcagcggccagttcgtgcggcgcttccgcctccccgagaacgccaagaccgaggaggtgagggccgcgctggagaacggcgtgctcacggtcaccgtgcccaaggccgaggtcaagaagcccgaggttaagagcatccagatctccggctgaagaagacatggacgcgaggtgaatggtcgcgtcgcgttcgcgtcgcggcgtcgggtcttgggtttcagcgacgcgactcgtgtgtgtggtactgtggttgctctgctttggtatgtctggtgtgtacgtgtgctgttcagtgtttcgtggtcatcgtctgtacattgtgctgttcggtgagctccccgactcagtgtgttgtgttctgcgagtgaataaataaaaacaaaccagctgtcgtctcgtgt

SEQ ID NO: 2362 - DNA, 894 bp, Zea mays
  Clone ID: PAT_MRT4577_62754C.1
tgggaccctcgaggccggccggggccggggagtcccaacccaatcccaatccagagcgaagatcgcgatcagagcaggagcaggcaacgcgcaccgaaatcttccaatccacaagactcgctacttcgcagttggcagactcgcccgcagcgagccgctagcaaccaagcagaaatgtcgctggtgaggcgcggcagcgtgttcgacccattctccgtggacctcttcgaccccttcgacagcgtgttccgctccatcgtgccgtcgtcgtcgtcggcggcggcggcctccgagaccgccgccttcgccagcgcccgcatcgactggaaggagacgcccgaggcgcacgtgttcaaggccgacctccccggcgtgaagaaggaggaggtgaaggtggaggtggaggacggcaacgtgctgctcatcagcgggcagcgcagcagggagaaggaggacaagggcgacaagtggcatcgcgtggagcgcagcagcggccagttcgtgcggcgcttccgcctccccgagaacgccaagacggaggaggtgagggccgcgcttgagaacggcgtgctcacggtcaccgtgcccaaggccgaggtcaagaagcccgaggtgaagagcatccagatctccggctgaagaagacatggacgcgaggtgaatggtcgcgtcgcggcgtcggatcttgggtttcagcgacgcgactcgtgtggtgtgtggtttctctgctttggtatgtttggtgtgtacgtgtgctgttcagtgtttcgtggtcatcgtctgtacaatgtgcgttgttcggtgagcttcccggctcagtatgttgtgatctgcgagtgaataaataagaataaaccagcaaaaaaaaaaaaaaaaaaaaaaaaaaaaaaaaaa

SEQ ID NO: 2363 - DNA, 883 bp, Zea mays
  Clone ID: PAT_MRT4577_62755C.1
aaaaaaaaaaaaaaaaaaaaaaaaaaaaaaaaaaaaatcccaaaccagagcgaagaatcgccatcacagcaagctacgcgcactgaaatcctccaatccacaggacacagctctacttccgcagttcgcactcgcacgcaccgagccgctagcaacgaagcagaaatgtcgctggtgaggcgcagcagcgtgttcgacccattctccatggacctcttcgaccccttcgacagcatgttccgctccatcgtgccgtcgtcgtcgtcggcggcggcggcctccgagaccgccgccttcgccagcgcccgcatcgactggaaggagacgcccgaggcgcacgtgttcaaggccgacctccccggcgtgaagaaggaggaggtcaaggtggaggtggaggacggcaacgtgctgctcatcagcgggcagcgcagcagggagaaggaggacaagggcgacaagtggcaccgcgtggagcgcagcagcggccagttcgtgcggcgcttccgcctgccggagaacgccaagacggaggaggtgagggccgcgctggagaacggcgtgctcacggtcaccgtgcccaaggccgaggtcaagaagcccgaggttaagagcatccagatctccggctgaagaagacatggacgcgaggtgaatggtcgcgtcgcgttcgcgtcgcggcgtcgggtcttgggtttcagcgacgcgactcgtgtgtgtggtactgtggttgctctgctttggtatgtctggtgtgtacgtgtgctgttcagtgtttcgtggtcatcgtctgtacattgtgctgttcggtgagctccccgactcagtgtgttgtgttctgcgagtgaataaataaaaacaaaaaaaaaaaaaaaaaaggccccta

SEQ ID NO: 2364 - DNA, 882 bp, Zea mays
  Clone ID: PAT_MRT4577_62757C.1
gccggccgggccgggaactcatcccaaaccagagcgaagaagaatcgccatcacagcaagctacgcgcactgaaatcctccaatccacaggacacagctctacttccacagttcgcagactcgcacgcaccgagcggctagcgatcaacgagaaatgtcgctggtgaggcgcagcagcgtgttcgacccattctctgtggacctcttcgaccccttcgacagcatgttccgctccatcgtgccgccgtcgttgtcgtcgtcggcggcctccgagaccgccgccttcgccagcgcccgcatcgactggaaggagacgcccgaggcgcacgtgttcaaggccgacctccccggcgtgaagaaggaggaggtcaaggtggaggtggaggacggcaacgtgctgctcatcagcgggcagcgcagcagggagaaggaggacaagggcgacaagtggcaccgcgtggagcgcagcagcggccagttcgtgcggcgcttccgcctgccggagaacgccaagacggaggaggtgagggccgcgctggagaacggcgtgctcacggtcaccgtgcccaaggccgaggtcaagaagcccgaggttaagagcatccagatctccggctgaagaagacatggacgcgaggtgaatggtcgcgtcgcgttcgcgtcgcggcgtcgggtcttgggtttcagcgacgcgactcgtgtgtgtggtactgtggttgctctgctttggtatgtctggtgtgtacgtgtgctgttcagtgtttcgtggtcatcgtctgtacattgtgctgttcggtgagctccccgactcagtgtgttgtgttctgcgagtgaataaataaaaacaaaccagctgtcgtctcgtgtagtatattggcctcg

SEQ ID NO: 2365 - DNA, 967 bp, Zea mays
  Clone ID: PAT_MRT4577_62758C.1
ccggccggggagagaatccagacgattcagcgaccgctcttgacgaagctataaaagcgtcaccccacaaggccacagctcatccgaaaccagagcgaagaatcgccatcacagcaagctacgcgcactgaaatcctccaatccacaggacacagctctacttccgcagttcgcactcgcacgcaccaagccgctagcaacgaagcagaaatgtcgctggtgaggcgcagcagcgtgttcgacccattctccgtggacctcttcgacccgttcgacagcatgttccgctccatcgtgccgtcgtcgtcgtcgtcgggctccgagaccgccgccttcgccagcgcccgcatcgactggaaggagacgcccgaggcgcacgtgtttaaggccgacctccccggcgtgaagaaagaggaggtcaaggtggaggtggaggacggcaacgtgctgctcatcagcgggcagcgcagcagggagaaggaggacaagggcgacaagtggcaccgcgtggagcgcagcagcggccagttcgtgcggcgcttccgcctgccggagaacgccaagacggaggaggtgagggccgcgctggagaacggcgtgctcacggtcaccgtgcccaaggccgaggtcaagaagcccgaggtgaagagcatccagatctccggctgaagaagacatggacgggaggtgaatggtcgcgtcgcgttcgcgtcgcggcgtcggatcttgggtttcagcgacgcgactcgtgtgtgtgtgctgtgtggttgctctgctttggtatgtttggtgtgtacgtgtgctgttcagtgtttcctggtcctcgtctgtactttgcgctgttcggtgagcttcctggctcagtatgttgtgttgtgcgagtgaataaataaaaacaaaccagctgtagtatattcacctaaaaaaaaaaaaaaaaaaaaaaagggcggcgctcgcgatctagaac

SEQ ID NO: 2366 - DNA, 1285 bp, Zea mays
  Clone ID: PAT_MRT4577_62761C.1
ctaaaacctagaccacgcgcgacgacggccgcctgaccgatcgaccaccattccgccgtcgccgccggccggatcatcgatcgtcgtcatgatgatatctatcaatctacgcgtgatgatcgatgactacttgtctactgctatgtactactaaataaaatctctccgtgtgtacacgtacgcttgcatgtgcatggtagcatgtacgtacgacgtcgtccatgtatgtgtgtgtgacgtgtgagacggacagagagagagagacaggatcgatcgagagacggtcatgtccttttggctgtttggtttattcatatcacaacttttgagtgtaaaaaaaaaaaaaagaaaccactatgccatagaagagatgcaaaaaagctaaagcaaaattgaaaagaaatccccaatcccaatccagagcgaagatcgcgatcagagcaggagcaggcaacgcgcaccgaaatcttccaatccacaagactcgctacttcgcagttggcagactcgcccgcagcgagccgctagcaaccaagcagaaatgtcgctggtgaggcgcggcagcgtgttcgacccattctccgtggacctcttcgaccccttcgacagcgtgttccgctccatcgtgccgtcgtcgtcgtcggcggcggcggcctccgagaccgccgccttcgccagcgcccgcatcgactggaaggagacgcccgaggcgcacgtgttcaaggccgacctccccggcgtgaagaaggaggaggtgaaggtggaggtggaggacggcaacgtgctgctcatcagcgggcagcgcagcagggagaaggaggacaagggcgacaagtggcaccgcgtggagcgcagcagcggccagttcgtgcggcgcttccgcctccccgagaacgccaagaccgaggaggtgagggccgcgctggagaacggcgtgctcacggtcaccgtgcccaaggccgaggtcaagaagcctgaggttaagagcatccagatctccggctgaagaagacatggacgcgaggtgaatggtcgcgtcgcgttcgcgtcgcggcgtcgggtcttgggtttcagcgacgcgactcgtgtgtgtggtactgtggttgctctgctttggtatgtctggtgtgtacgtgtgctgttcagtgtttcgtggtcatcgtctgtacattgtgctgttcggtgagctccccgactcagtgtgttgtgttctgcgagtgaataaataaaaacaaaccagctgtcgtctcgtgtagcaaaaaaaaaaaaaaaaaaatttgcggcc

SEQ ID NO: 2367 - DNA, 103 bp, Zea mays
  Clone ID: PAT_MRT4577_62928C.1
gagcttcagaccgggacggctccctgtactgtccgacgcgccgtcgcggatggccgtagccaccatgctggcatcaggacgtcctcgttaggctctgactgcc

SEQ ID NO: 2368 - DNA, 170 bp, Zea mays
  Clone ID: PAT_MRT4577_62955C.1
tgaaagagcaacatgaacattctactattagattgagacacaccaacaccaataacaagtggcgctaaatggcacaataatagcaaaatgactacccgaatcagagggccaaaaaaaaaggccactcggccatggaattaaggggggattagctaaaacaaccccccccc

SEQ ID NO: 2369 - DNA, 371 bp, Zea mays
  Clone ID: PAT_MRT4577_63094C.1
cgttcggtgagaacccaattgttcaaccctacatgatccaacaggcgatcgcaacatgcatattgccattatcacccgtgtgcgtgggacaaccgtcagccctattacagcagttacctttggtccatttggtggcacaaaacatcagggcacaacaactactacatcttgtgctagcaaaccttgctgcatactctcagcaacatcagtttcttccattcaaccaactggctgcattgaactctgctgcttatttgcaacaacaattaccattcagccaactagttgctgcctacccccagcgattggggtgctttcaaccaacttgcaacatttgactctgctggttatttacagggagcaacaacttc

SEQ ID NO: 2370 - DNA, 281 bp, Zea mays
  Clone ID: PAT_MRT4577_63141C.1
attgccacataattccttcccctagccgccgccgccgccgctagtatccctgagaggtagcccgatcgatgaactagccgagtactaggtagagaatcggttgatcttatctcagcccggggtctgctgcatctggtggtggtgaagtgggagaaattcgtgagatctgttccggatcatgcgtgacgagctctggaatcaggggtttcacacatagcttcgtcgatttgaatgtgatgtactaatggagtctaagagtcggcacaactctagcagtagtc

SEQ ID NO: 2371 - DNA, 570 bp, Zea mays
  unsure (1)..(570): unsure at all n locations
  Clone ID: PAT_MRT4577_63173C.1
acccctgtgctggcttctcctccccctcttaccacatcctcctcgggttaggggtgcggaggggtgtgataaagggcgatggcggcggctgatgtggagtaccgttgcttcgtcggcgggcttgcctgggccaccagcaacgagtcgctggagaatgccttcccctcctaggcgagacctcgatccaagtcatcagggaccgggggaggggnangtccctctgcttcngcttcnttaccttctcctccgagaactccatgctccacgctatcgagaacatgaacggcaaggagctccacggccgtaacatcaccgttaaccaggcccagtcccttggcggtggcggtggcggcggtggctacggggggggtctcggcggcggcggctgttatggtggcgggcgccctgactgcggttatggcggcggtggcggctactgcggtccgcgctaaggtggcggcggcggctactgaggcggtgacggatactgcggtccgcgcgagggtggcggtggcggctaccgcggcggtggcggcggcggcttgaaggactgatgtgtgggcccatcct

SEQ ID NO: 2372 - DNA, 739 bp, Zea mays
  Clone ID: PAT_MRT4577_63185C.1
aattcggcacgaggcccggcctccccccaccccacccgcacccgcccgcgcgcccctcattcattcgcctcgatctcgccggcgatgtacggcaacgacaactggatcaacagctacctcgacgccatcctcgatgccggcaagggcgccggccccgccaggggccggggaggcggcggcggggaccggccctcgctgctcctgcgcgagcgcggccacttctccccggcgcgctacttcgtcgaggaggtcatcaccggctacgacgagaccgacctctacaagacctggctccgggcgaacgcgatgcggagcccgcaggagaagaacacgcgcctggagaacatgacctggaggatctggaacctcgccaggaagaagaaggagtttgagaaagaggaagccaatcgcttgtccaaacgccgtctagaggctgagaagccacaaaatgatgctactgcagacatgtctgaagatctttttgaaggtgtgaagggagaagacgttggtgatccatctgttgcctacggtgacagcacagctgggaacacacctaggatcagttcatttgacaagctatacatagtggtattcagtcttcatggcctgatacgtggagagaatatggagcttggccgtgattcagatactggtggccaggtcaaatatgtcgtgggacttgctaagcattaaggtcatgtcctggagtttacgggttgatctattggcaggacaatca

SEQ ID NO: 2373 - DNA, 711 bp, Zea mays
  Clone ID: PAT_MRT4577_63188C.1
aattcggcacgaggcctcgtgccgttgctctcctctccatacccgtcgccgccctcgccctcgccaccacccgcacccgccgcgcggcccccattcgcctcgatttcgccggcggcgatgtacggcaacgacaactggatcaacagctatctcgacgccatcctcgatgccggcaagggcgtcgcggccgcggccgcgggcgccgccaggggccggggcggaggctggggcggggaccggccctcgctgctcctccgcgagcgcggccacttctcccccgcgcgctactttgtcgaggaggtcatcaccggctacgacgagaccgacctctacaagacctggctccgggcgaacgcgatgcggagcccgcaggagaagaacacgcggctggagaacatgacctggaggatctggaacctcgccaggaagaagaaggagtttgagaaagaggaagccattcgcttgtccaaacaccgtttagagactaagaagccacggaatgatgctactgcagaaatgtctgaagatctttttgaaggagtgaagggagaagacgctggtgatccatctgttgcctacggtgacagcacaactgggaacacacctaggaccagtttatttgacaagctatacatagtggttgatcagtctgcatggcctggtgcgtggagagaacatggagcttggccgggttgcgatcctgggggccag

SEQ ID NO: 2374 - DNA, 474 bp, Zea mays
  Clone ID: PAT_MRT4577_63251C.1
attcggctcgtgggtacatagtcgacctgattttgttttacctgaccctctagaaggggtgcggcgggcttcctgtggacgtgacgggcaccctgttccacaaggccatgaaggctcgcatgctcctgggcgccgccggggaccacatcatctaggaccgacacgagggcgagcggcatcgcgggagcgacctcctggcctcctatctggacgaccgcgaggcgctcaccgactcccagatcgccgacaacctgatcggcgtaatctgcggcgaccgcgacaccacacacagagtgctcacctggatggtcaagttacttgggcaccaccctgcagttcacaaggctcatatcgtggagcagcaggagaatctgcggtccaaaggctcatccggggagctcctgacctgggcggacaccaggcggatgcgcacgactagccgtgtgatccaggagactatgcaggtggcgtcca

SEQ ID NO: 2375 - DNA, 1185 bp, Zea mays
  Clone ID: PAT_MRT4577_63260C.1
tgatggtgttaagcgccggtggaaaaggcaggcctctccgtccccaatcccccatccggattgcccaccatggcgtcgcagtgcgccctactgccgtgcggcgggaccgtcgcggtgcgcgacgacgcactcgccgctctcgcgcgccgtctccgagtgctccgactgcgcccgaatcgtccccacgcgacacctccgcacttagagagagatgtgaaggtaaacgcagagtactttttttttttttttttttttcattggcgccctcgaggccggccgggacacatattccctacgcctcgctagcgccttccgcgaactgaggactcccgagaggccgagaccaccccgatgtccgccatggagaccgacatcaacgcgccgccgcccgccccagccggcgagggatcctccgtggtcggtccgtcctcctcctcccgcaagcccaacaagcgcttcgagatcaagaagtggaacgccgtcgcgctctgggcatgggatatcgtcgtcgacaactgcgccatctgccgcaaccacatcatggatctatgcatcgagtgccaggcgaaccaagctagcgcgaccagcgaggagtgcactgtcgcttggggagtctgtaatcatgcttttcacttccactgcatcagcaggtggcttaagactcgccaagtgtgcccattagataacagtgagtgggagttccagaaatatggccactagttcctgggcaccctcatgtgatgttggggctttgctgccactcaagtgtttttttctgccaaacagctccatctcttactgctttcgatgcttgcatctatcacacgtcaattataactagctagcagtacgtccacctgggactgtatttggatgattcattgagaggatagtaggcccattttatcaatggtatgtggatcttcataagtgagcttgtattgtgctgtggtaccattttctgaagtcatgtttttttatacgtgcctgtcttgatgttatgaagtgggtttgcctttcggccgcatgtatataggttactgaatgttgcggacatgccctgaaattatgttgggcactatatcctgtcttgcaaaaaaaaaaaaaaaaaaaaaaaaaaaaaaaaaaaaaaaaaaaaaaaaaaaaaaaaaaaaaaaaaaagtactctgcgttgttaccactgct

SEQ ID NO: 2376 - DNA, 828 bp, Zea mays
  Clone ID: PAT_MRT4577_63263C.1
ggaccctcgaggccggccgggacatattccctacgcctcgctagcgccttccgcgaactgaggactcccgagaggccgagaccaccccgatgtccgccatggagaccgacatcaacgcgccgccgcccgccccagccggcgagggatcctccgtggtcggtccgtcctcctcatcctcccgcaagcccaacaagcgcttcgagatcaagaagtggaacgccgtcgcgctctgggcatgggatatcgtcgtcgacaactgcgccatctgccgcaaccacatcatggatctatgcatcgagtgccaggcgaaccaagctagcgcgaccagcgaggagtgcactgtcgcttggggtgtctgtaatcatgcttttcacttccactgcatcagcaggtggcttaagactcgccaagtgtgcccattagataacagtgagtgggagttccagaaatatggccactagttcctgggcaccgtcatgtgatgttggggctttgctgccactcaagtgtttttgtctgccaaacagctccatctcttactgctttcgatgcttgcatctatccacctgggactgtatttggatgatccattgagaggatagtaggcccattttatcaatggtatgtggatcttcataagtgagcttgtattgtgctgtggtaccattttctgaagtcatgtttttttatacgtgcctgtcttgatgttatgaagtgggtttgcctttcggccgcatgtatataggttactgaatgttgcggacaatgtcctgaaattacgttgggcactaaaacaaaaaaaaaaaaaaaaaaaaaaaaaaagcggcc

SEQ ID NO: 2377 - DNA, 326 bp, Zea mays
  Clone ID: PAT_MRT4577_63267C.1
tgcaacataaaaagcacaatatttgtttctacaatggcagcctatatattatggcgggttatgctcctaggtatctcttcaagtgctgctactgcgaccattttcacgcattgcccacaagctccaatagcttcccttctttccccgtaacctcttaccatcgatgtcttcgtgatgtgaaaacccaattcttcaaccctacaggatccaacaagctatcactactggcatcttaccttttttacccatgtgcttcaacaatcattatccctatttcatcagttacctttggtgcatttattggatcaaatcattatggcacaaca

SEQ ID NO: 2378 - DNA, 358 bp, Zea mays
  Clone ID: PAT_MRT4577_63382C.1
gcagcaccaatatacaccttttttttcttaattataatttataataaatctgtatggggttaacagcttccattgatccgcaatccatgctggtatgagcatgggtctgctggaaacccagggatgaacacattactaacaactgtacacagtaacgaccttggctatcaaaaacacagatggggcaacaacaaacaccacacgcaacgaagataaaccctctggactatggtaaacattacggtaaccaacaggataacttggccgagcgggccccaccgctcaattcctccagttcccgtcgtgaatgacgtaaccgccaccacaattgccacagccgtaaccgtcgtcaccacca

SEQ ID NO: 2379 - DNA, 266 bp, Zea mays
  Clone ID: PAT_MRT4577_63385C.1
tttgtgatggatagtccaataacagtgttttgccatggggattggagtgtcttcagcatagtactccctgtttcctcggttctccaaagtctgcgtcctttgcggtggactgtggtggtagtagagcaatatcaggttcagataattccgtctatcaagctgataatgccaaccttagtgctgcatcatactatgttgcgggtgcacctacatgggccgttagcagcgttgggttattcttggacgcagatgcaccaatgcaagtt

SEQ ID NO: 2380 - DNA, 186 bp, Zea mays
  Clone ID: PAT_MRT4577_63436C.1
gatgaggcctttgcgaagaggttggattcagattggaaggagttacatattggcggaaattggtctgcacggagatttcctgagtttaatcacatgtgagtgttaagctggtaggatcagaagtcagaagcagaggagatttgtggacatacagcctggaagagagtaaaaaataccaaacagggg

SEQ ID NO: 2381 - DNA, 2874 bp, Zea mays
  Clone ID: PAT_MRT4577_63582C.1
agctcgccacgacgctcgttcgtcgctgctccctcctccaccaccttccagtcctgtccagtgccgccgccttgccctgccctcccctcccttcccccgattaccctcgcggttgacctcgccaatccggtcccgcctccgtataaatccgcccttctcgcccccgctccgaccacaaaccctagcggcgcgccccggcatgggctagggttcccgcggcgatggagtgggacagcgattctgacggcggcgatgacgaggaggaagaagaggtccgccccgggggtggggacgcgggcccggggttctcgctggccatcgagggcgtgctgggcgcgtgcggcatggtggtctccgacgcgctcgagcccgacttccccatcatctacgtcaaccgcgggttcgagagctccactggatacagcgccgaggaggtgcttgggaggaactgccggttcctacaatgcagaggaccatttgctcagaggaggcatccccttgttgatgcagcagttgttactaggattcggagatgtttagatgaagggactgaatttcatggtgatctgttaaattttagaaaagattgttctccatacatggccaggctgcaattaacacccatatacggagacgatgaagtaataacacactatatgggcattcagtttttcaatgattctaatgttgacttggggccatcttctggctctgtgacaaaggaacttgcaagatctacatggattgcacctggcaacactgactcaccaactccagtaggcaagggtaatttgtgggaacattctagtctctttctgctgagtgatgaggtaatttgccagaagatcttgtccaaactgtcgcccagggatatagcatcagtaaactctgtttgcaagcgacttcatcacatgacaaggaatgaagacctttggaggatggtttgtcagaatgcatggggcactgaagctactcgggcccttgagactgtggcaggatcaagaagtttggcatggggccggctagcacgagagttaaccacccttgaagctgttgcctggaggaaattgacagtcggtggtgcagttgagccatctcgctgcaacttcagtgcctgtgccgtagggaaccgtgttgttctatttggtggagagggtgttaacatgcagccgatgaatgatacatttgtgctggacttgagtgccagcaagccagaatggaggcacatcaacgtgagcgcagctcctcctggtcgctggggccataccctgtcatgcctgaatggatcacggctgattctgtttggtggctgtggggggcagggtctgcttaatgacgtcttcattttggatcttgatgcacagcatccaacttggcgtgagattcctggccttgcaccccctgtaccacggtcatggcatagctcctgcactgttgatggaaccaagctggtggtttctggtggatgtgcggactctggtgttcttctcagcgatacctacctcctagatgtgacaatggaaagacctgtttggagggagatacctgcatcttggtctccaccttcaaggctggggcactcgctatctgtctatgatggcaggaaaatcctgatgtttggtggccttgctaaaagtggtcctctacgacttagatctagtgatgtgttcactctagatttaagtgaagacaagccttgctggcggtgcataactggcagcaggatgccaggagctggtaatcctgctggggtcggcccaccacctcgcctcgaccatgttgtcgtgagccttcctggtgggagagttctgatatttggtggttctgtggcgggtcttcactctgcttcaaaactttacctcctggatccaacggaagataagccaacctggaggcttctgaatgttccagggcatcctccacggttcgcctggggccacagtacttgtgttgtcggagggacaaaggcaatagttcttggaggacaaactggagaagagtggacgctaactgaaatacacgagctttctctagcaagctcattagtctgaagatgggaaggtcccagcaagctttccagcttccttgaagcaatgtctctggagacagctacctgttcatatgacttgaggcagattttttttccaacagtggtgtgcaagcacaagcacaaaagggttggtgaagtggacaaccagacctgattacttgtgccatgcctgggagtcagctggtctaaaagtaggaataagttacctctgctgctgctgttcgtatgatctgaaatgatggaatagctggcatccataagctaatctcagttcttatcatgtttcaaatgggacactggcattatgtcgctggagcccctgatgcaacaggtaccctgccttctggttgcgcctgccttcggtgacaactgatgctgtggtcttctgttttttgacccatcaactgctgtgaagcttctttgttatgcttttgcgccacttcgtgcttactcaattgctgctttctggagaagctgtaacacagacacacctgctgtatttaattttgcctttcgtatcactttgtgcttacctcagctgttagtgatacctataacattttctttttaatctgattatcaaaggatgaattatgaatatcaacagttccatcttaccgcgacatttatcttacctgggatcagggtttggtgctggcaaaccaacaacaggcgacggccatgtatgtgtcgtgtctagagtttctgttatttgatttttatcgtcttactatgattcaatgtgtaaatattgttatcgtgacctgccgaactgcctggttggctgcttatattatcgacaactataaccgttccaaaaaaaa

SEQ ID NO: 2382 - DNA, 398 bp, Zea mays
  Clone ID: PAT_MRT4577_63852C.1
aaacattcatgagcaatatctcctacgtcacctgctgtgcaaccattgtggctactgtgagcaacagcagttacctttggtgcatttgtaggcacaaaacatcacggcacaacaactacaacaactcgtgctagcaaaccttgatgactactctaatcagcaacagattctgtcattcaaccaactagctgcattgaactctgctgcttattcgcatcaacaacaactactaccattcagccagctagctgctgcctacccgcggcaattccttacattcaactaactggcagcattgaactctcatgcttatgtacaacatacaacaactactaccattcagccagctagctgctgcgagcactgttgccttcttgacacagcaacatttgatgtcg

SEQ ID NO: 2383 - DNA, 605 bp, Zea mays
  Clone ID: PAT_MRT4577_63854C.1
cactatcttatttctgggaagccacaaacatcaaacataaaactttattattgaactgtaactcataagaaatctaaaagagggcaccaccaatgatgggttgccaggtataacactgctgggtttgtcaaagcaagttggctgaatggcaacaattgttgcagttgtaagagggtgccagcgttaggcgcagcgtgctggtagaacggcaacaactgtggtctagtgtcaagaaggcagcagggctcacaccagctagctggctaaatggtagtagttgttgctgctgtaaataagcaggagagttcaatgctgccagttggttgaatggaagaaactgctgggggtaggcagcagctagctggttgaatggtagttgttgttgctgcaaataagaagcaaagttcaaagcatcttggtggttgaatggaagaaactgatgttgcttatagtaagcaacaaggtttgctagcacaagttgttgtagacgcagcgccctgatgtttcgtgccaacaaaagcctcaaaggtaactgttgcaatatggctcgatgattgcaggaggaacaagggtgataaatgtgatatgccaaatgcgattggctg

SEQ ID NO: 2384 - DNA, 338 bp, Zea mays
  Clone ID: PAT_MRT4577_63857C.1
accgtcttgattcccggacgagaccaactgcacatagaagcacaatagtgtaccaacaatggcagccaaaatattttgcctccttatgctccgtggtctttctgcaagtgctgctacggcgaccattttcccgcaatgctcgcaagctcctatagcttcccttcttcccccgtccctctcaccaccggtgtcttcggtatgtgaaaccccaattcttaaaccctccaggatcccacaagcaatcgcagcttgccatctaacctttataaccctggttcttcaaccattattaaccctattacaacagttaccttttgtgcatttattggcacaaaaca

SEQ ID NO: 2385 - DNA, 477 bp, Zea mays
  Clone ID: PAT_MRT4577_63860C.1
ctcaccagcggagtcttagggtatgagaaaacccacttctgcaaccctacaggatccaacaggcaatgacagctggcatcttacctttatcagccttggtcctcctacaatcatcaggcctattacatcatatacctttggtgcatttattggcacaaaacataagggcgcaacaactacaacaactcgcgctagcaaaccttgatgcctactatcaggaacagaagtttgttacattaaaccaactagcttggttgaactctgcttcttatttgcaacaacaacaactaccattcaggcagctacctgctgcctacccccagcaatttcttccattcaaccaactggcagcattgaactctcctgcttatttacagcagcaacaactactaccattcagccagctagctggtgcgagccctgctaccttcttgatacaaccacagctgttgccgatctaccagcacgctgcgccta

SEQ ID NO: 2386 - DNA, 428 bp, Zea mays
  Clone ID: PAT_MRT4577_63862C.1
gcaacatagaaagcacaacagtgtaccaacaatggcagccaaaatattttgcctccttatgctacgggggctttctgcaagtgctgctacggcgaccattttcccgcaatgctcgcaagctcctatagcttgccttcttccaccgtacctatcaccagcggagtcttacgtatgtgaaaacccaattcttcaaccctacaggatccaacaagcaatcgcagctggcatattacctttatcacccttgttacttcaacaatcatcaggcctattacaacagttacctttggtgcatttattggcaccaaacatcaaggctcaacaactaccacaacttgtgctaacaaaccttggtggctactgttagcaacagcaggttccttcattcgacccacttggctcattgaactccgcttcttaattgcaac

SEQ ID NO: 2387 - DNA, 495 bp, Zea mays
  Clone ID: PAT_MRT4577_63865C.1
tagcaaatagaattccaatagtgtaccaacaatggcagccaaaatattttgcctccttatgctccttggtctttctgcaagtgctgctacggtgaccattttcccacaatgctcacaagctcctatagcttcccttcttcccccgtacctctcaccagcgctgtcttcggtatgtagaaaacccaattcttcaaccctataggatccaacaggaaatcgcagatggcatcttacctttatcacccttgtatctccaacaatcatcacccctattacagaagttaccttcggagcatttactgcgcacaaaacatctgtgtactaccactacaacaacttgtgccagcataccttgctgcctactctcagcaacaacagcttcttcaattcaatcaattacctgcatggaactctgcttcttatttgcgactacaaagaactaccaatcaacccaactatgctgctgcctacccccaagaaatttccttcaattca

SEQ ID NO: 2388 - DNA, 450 bp, Zea mays
  Clone ID: PAT_MRT4577_63866C.1
caactagcaacatagaaagcacaatagtgtaccaacaatggcagctaaaatattttgcctccttatgctccttggtctttctgcaagtgctgctacggcgaccattttcccacaatgctcacaagctcctatagcttcccttcttcccccgtacctctcaccaacggtgtcttcggtatgtgaaaacccaattcttcaaccctacaggatccaacaggcaatcgcagctggcatcttacctttatcacccttgttcctccaccattaataagccttattacagcagttaccttgggggcattaattggcccaaaaaataagggcccaccacttccaacaactggggttagcaaacttggttgcttattttaacaacaacaagttttttcatttaacccactaactggattggactctgcttcttatttggaacaacaacaactaccattt

SEQ ID NO: 2389 - DNA, 475 bp, Zea mays
  Clone ID: PAT_MRT4577_63868C.1
agcatagagaccaactaacaacatatttagcacttttttggaccaacaatggcagccggggtatgtgtgcatcttatgctgcctgatatttctacacgagctgctacggtgaccattttcccgcaatgctcacaagctcctatagctatccttgttgccccgtacctctcaccagcggcgtcttcggtatgtgaaaacccaattcatcaaccctacatgatccaacaggcaatcgcagctggcatcttacctttatcacacttggtccttcaacaatcatgacccctattacagcatgtacctctggtgcatttattggcacaaaacatgatggcacaacaactacaacaacttgcgctatcaaaccttgctgcctactcttagcaacagcagtttcttacattcaaccaactaactgcattgaactctgcttcttatttgcaagaacaacaactaccattcaggcagctacctg

SEQ ID NO: 2390 - DNA, 396 bp, Zea mays
  Clone ID: PAT_MRT4577_63888C.1
acgcggacgcgtgggcgcaaccatttttccacaatgctcacacgctcctagcgcttactttctttccccatacctgttaccagcggggtcttcagtatgtgaaaacccaattcttcaaccctacaggatccaacaggcagtggctgaaggcatcttacctttataacccttgctactgcaacaaccggcagacctattacagccgttacctttggtgcatttgttggcacaaaacatcaagggacaacaactacaacaacttgtgctaggaaaccttgctgcctactctcagtaacaggagtttcttgcattcaaccaactggctgcattgaactctgctgcttatttgcaacaacaactaccattcagtcagctagctgctgcctacccccagca

SEQ ID NO: 2391 - DNA, 1436 bp, Zea mays
  Clone ID: PAT_MRT4577_6388C.1
gcgttccgaagcgccgtgctagattccacacctagacaggacgccgcacacggcagccaccctcgtgtgcgtgactgcgtctcgcgcgggcaagagtgcgcaggcagagccatggacgtagaagcgcgtaagtccgacgcgccgcccgcgcgcggcaaggcgatgcaccgctttctcgtagcgctcaactgcgggatgctggcggtgggagccatcggcgggccgctcctgagccggctctacttcagcaagggcgggcaccggcagtggctgtccgcgtggctggagaccggcgggtggccgctgctggtgattcccgtggcggcgtcgttcgtggcccgccgcgcgcgcgacaggggcgccccggtcctgctcgcgccgccgcggatcctgctggccgccgcgggcctcggcgtggccacgggcgcggacgacttcatctacgccttcgggctcgcgtacctcccggtgtccacgtccgcgatcctgatctcgacgcagctggcgttcacggtgttcttcgcgttcctcgtggtgcggcagcgcctgacggccgcgtccgtgaacgccgtggcgctgctgacggtgggcgccgtggtgctgggcctgcacgtctcgtcggaccggcccccgggcgtcaccaggggccagtactggctgggcttcgtgctgacgctcggcgccgcggcgctctacggcctcgtcctgccgctcgtggagctcgcctacaggcgcgccgcgggcgctggccgcgccgtgacgtacgcgctggtggtggagatgcagctggtgatggggttcttcgccaccgccttctgcacggtaggcatggtcgtgaacaaagacttccaggcgatcccgagggaggcgaggcagtacgagctgggggaggcccggtactacatggtgctggcgtgggcggcggtgctgtggcagtgcttcttcctgggcgcggtgggcgtcatcttctgcgtgcacacgctgctggcgggcatcctcatcgccgtgttcatcccggtgacggaggtggcggccgtcatcttcctgcacgagaagttcagcagcgagaagggcgtggcgctggcgctctcgctctggggcctcgcgtcctactcctacggcgagtggagccaggccaaggccaagaaggagaagaagagcgaggaggacgacggcgaagtggcccaggcagtcccatgatccgtgccccacacacacaaacacaatggtctgccccgttgtactctctgtctgtgtgtatgtaaatgttgtgttgattgcggccgtgttggtcctgtgaatggcgtcctgagtcgtcggttgtcagtgatgtttgatttccagggattaatcttttgtctcaaaattttcattttatttaataatttacatattaccatacaatagaatatatgaactaaaacgagttagacaag

SEQ ID NO: 2392 - DNA, 858 bp, Zea mays
  Clone ID: PAT_MRT4577_63892C.1
acagcagtatattgagaccactagtcaacgtaggaaagcactaatagtgtaccaacatatggcagtataacatattgcgcctacttatgctgcttggtctttctggaagcgctgctacggcgaccattttgccacaatgctgacaagctcctataggttagcttgttgccccggacctttcaccaacggggttttccgtgtgagaaaacccaattcttcaaccctacaggatccaacaggcaatcgcaggtggcgttttacctttatcacccttgttcctgcaacaatcatcagccctattacagcaggtacctttggtgcatttattggcacaaaacatcagggcacaacaactacaacaacttgtgctagcaaaccttgctgcctactctcagcaacagcagtttcttccattcaaccaactagctgcattgaactctgcttcttatttgcaacaacaacaactaccattcagccagctatctgctgcctacccccagcaatttcttccattcaaccaactgacagcatttgaactctcctgcttatttacagcagcaacaactactaccattcagccagctagctggtgtgagccctgctaccttcttgacacacccaccagttgttgccgtttctaccagcacgttgcgccctaacgctgggccctttcttacaactgccaccaattgctgccatttcaaccaaccttgcttttgccaaacccagccagccattctacccaccaaccccatcattggtggtgccctcttttagatttcttatgagttatagtccaataataaagttttttgtctgatgtttgtggcttcccagaaataagaaaggtccatttct

SEQ ID NO: 2393 - DNA, 662 bp, Zea mays
  unsure (1)..(662): unsure at all n locations
  Clone ID: PAT_MRT4577_63894C.1
acccttctttttaccttagaaggaccattattgtcccaggcggtgccatcacaaaatattttgggctccttatgctcccttggtcttttctgcaagtggctgcttaccggcgacacattttcccgaaatgctcgcaagctcctatagcttccctttttcccccgtacctttaaccagcggtgtcttgggtgtgggagaaacccaattcttcaaccctacaggatccaacaggcaatcacagctggcatcttacctttatcacccttgttcctccaacaatcatcagccctattacatcagttacctttggtgcatttattggcacaaaacatcagggcacaacaactacaacaacttgtgctagcaaaccttgctgcctactctcagcaacagcagtttcttccattcaaccaactagctgcattgaactctgcttcttatttgcaacaacaccaactacctttcagcctgttacctgctgcctgcccccagtcctttcttcctttcatcccactggccgcattgaactctcctgcttttttacagcccctacaactcctaccattcagcctgctttctggtgtgtgccctgctgccttcttgntccatccccaatctgttgccggtccttccggctcgctgcccctccccctggctcccct

SEQ ID NO: 2394 - DNA, 883 bp, Zea mays
  Clone ID: PAT_MRT4577_63895C.1
tcttaactagcaacatagaaagcgcaatagggtaccaacaatggcaggcaaaatattttggctccttatgctccttgggctttttgcaagggctggtacggggaccatttttcccgaaaggttggaaggttctatagctttccttttttccccgtaccttttaacaacgggggctttgggattgggaaaacccaatttttaacccttcaggattcaacaagcaattacaggtggcattttacctttatcacccttgttccttcaacaatcatcagccctattacgacgagttacctttggtgcatttattggcacaaaacattagggcacaacaatctacaacaacttgtgctagcaaaccttgttgcttactctcagcaacagcagtttcttccattcaaccaaataggttcattgaactctgcttcttatttgcaacaacaacaactaccattcagccagctacttgctgcctacccccagcaatttcttccattcaaccaactagcagcattgaattctcctgcttatttacagcagcaacaactactaccattcagccagctagctggtgtgagccctgctaccttcttgacacaaccacagttgttgccgttctaccagcacgttgcgcctaacgctggcaccttcttacaactgcaacaattgctgccattcaaccaacttgttttgacaaacccagcagtgttctaccaacaacccatcattggtggtgccctcttttagatttcttatgagttagagttcaataataaagtttttatcgatgtttgtggctcccagaaaaagaaatactcggccggaccacgtaggggaattcaatatccacacatggggcgtccgagctgcatagagggccata

SEQ ID NO: 2395 - DNA, 1134 bp, Zea mays
  Clone ID: PAT_MRT4577_63896C.1
ccaactagcatcatagaaagctcaataacgttccaacaatggctgctaaaatattttgactacttatgcttctaggtctttctgcaacgtctgctaccgctaccattttcccacaaggctcacaagcattctatagcttccattcttcccccgtacctatcaccaacagtgtgtatggtatgtgaaaacccaattctttaaccctacaggatccaacaggcaatcgcagctggcatcttacctttatcacccttggtcctccaacaatcatcagccctattacagcagttacctttggtgcctttattggcacaaaacatcagggcacaacaactacaacaacttgtgctagcaaaccttgctgcatactctcagcaacatcagtttcttccattcaaccaactggctgcattgaactctgctgcttatttgcaacaacaaacaacaactaccattcagccagctacctgctgcctacccccagcaatttcttccattcaaccaactagcagcattgaactctcctgcttatttacagcagcaacaactactaccattcagccagctagctggtgtgagccctgctaccttcttgacacaaccacagttgttgccgttctaccagcacgctgcgcctaacgctggcaccctcttacaactgcaacaattgctgccattcaaccaacttgctttgacaaacccaacagcattctaccaacaacccatcattggtggtgccctcttttagatttcttatgagttatagttcaataataaagttttttgtctgatgtttgtggcttcccagaaataagaaagtacatttctagattcttatgtgcttctagtctccaaatgtggttgatagttattttgctctaagatcagcagtaatgaagtataaatcatcgttgtggtgtgctactcggttaattgagcattaacacacacaaacatgacgaggatggtataatctccaaaaatatgtactttgttaggtgggaccctatagccttgcataatgtgctatgttaggcatgcctggaaacgtgtgacgcatatgttttgtgaacctgttgatattatatgtgcttttaaaaaaaaaaaaaaaaaagcggattaatatttattact

SEQ ID NO: 2396 - DNA, 743 bp, Zea mays
  Clone ID: PAT_MRT4577_63901C.1
attgataccaaactgcctccttaaaaggcccattgtgtcccacattgcacttaggtatgtgcctcctatcctcctggccttctgcagtgctgctacagcgaccatgtttccacattgctcacaagctcctatagcttcccttcttacaccgtacctctcaccaacggtgtcttcggtatgtgaaaacccaattcttcaaccctacatgatccaacaggcaatcgcagctggcatcttacctttatcacccttgttcctccaacaatcatcagccctattacagcagttaccttaggtgcatttattggcacaaaacatcagggcacaacaactacaacaacttgtgctagcaaaccttgctgtctactctcagcaacagcagtttcttccattcaaccaactagctgcattgaactctgcttcttatttgcaacaacaacaactaccattcagccagctatctgctgcctacccccagcaatttcttccattcaaccaactgacaaatttgaactcttctgcttatttacaggagcaacaactactaccattcagccagctagctggggtgagccctggtacctttttgacacaaccacaattgatggcggtctaccagaacgctgggcctaacgcttgcacccttttacaactggaacaattgctggcatttaacccacttggtttgacaaaaccaacaagattctaccaaccacccaatattgggggggccctcttttaaa

SEQ ID NO: 2397 - DNA, 905 bp, Zea mays
  Clone ID: PAT_MRT4577_63923C.1
gctcttatacgactaactatacggaaagctggcacgcccgcaggcaccgatcctgtatagcgggcgcgatccacgcgttcgattgagaccaactagcaacatatactgcacaatagtggccaacaatggccgtcaaactataaagcctacttatgctccttgctctttctgaaagtgctgctacggccaccattttaccgaaatgctcgcaagctcctatagcttcccttcttcccccgtacctctcaccagcggtgtcttcggtatgtgaaaacccaattcttcaaccctacaggatccaacaggcactcacagcatggcatcttacctatatcacccttgttcctccaacaatcatcagccctattacatcagttacctttggtgcatttattggcacaaaacatcagggcacaacaactacaacaacttgtactagcaaaccttgctgcctactctcagcaacagcaggttcttccattcaaccaactagctgcattgaactctgctgcttatttgcaacagcaacaactaccattcagccagctacctgctgcctacccccagcaatatctaccattcaaccaagtgacagctttgaactctcctgcattatttacagcagcagcaactactaccattcagccagatagatggtgtgagccctggtacgttcttgacacaaccacaagtgtccccgttcacacagcacggtgcgcgtaacgctggcagcatgtatcaactgcacccaatgctgccattcagccaccttgctttgacaagcccggcagcattcggccagcaacccatcataggtggagccctgtaagagatttctcatgagcatagtcaagaataaagtcatctggtagatgcggtggattcgcggaaataaggaagaccct

SEQ ID NO: 2398 - DNA, 669 bp, Zea mays
  unsure (1)..(669): unsure at all n locations
  Clone ID: PAT_MRT4577_63926C.1
caaccatggccttcaaaatattttggcctcctaatcctcctgggccgttttgcaagtcctgttacggcacccattttcccgcattgctcgcaggctccaatagcttccttttttcccccgtacctttaaccagcggtgtcttcggtttgtgaaaacccaattcttcaaccctacaggatccaacaggcaatcgcagctggcatcttacctttatcacccttgttcctccaacaatcatcagccctattacaacagttacctttggtgcatttattggcacaaaacatcagggcacaacaactacaacaacttgtgctagcaaaccttgctgcctactctcagcaacagcagtttcttccattcaaccaactaggttcattgaactctgcttcttatttgcaacaacaacaactaccattcagccaggtacctgctgcctacccccagcaatttcttccattcaaccaactgggagaattgaactctcctgcttatttacaacagcaacaactactaccatttagncagctagctggtgtgagccctgctaccttttttggcacaaccacaggtggtggcggtctaccagcacggtgggcctaacgctggcacccctctttcaacttggaacaaattggttggcctttcaaccccaattnggttttgaac

SEQ ID NO: 2399 - DNA, 872 bp, Zea mays
  Clone ID: PAT_MRT4577_63927C.1
cacgcctgcgtgtaccgggcccctaattacacggtcgacctagcgttctttttataccactgcacatagaagcacattagtgtaccaacaatggcagccaaaaatttagactacttatgctccttggaatttctgcaagtgctgctacggtgaccattttaacgcaatgctcacaagactcctatagctgccgttcttcccccatacctctcaccagcggtgccttcggtttgtgaaaacccaattcttgaaccctacaggatccaacaggcaatctcagactggcatacttacctttatcacccttgttcctccaacaatcatcagccctattacagcagttacctttggtgcatttattggcacaaaacatcagggcacaacaactacaacaacttgtgctagcaaaccttgctgcctactctcagcaacagcagtttcttccattcaaccaactagctgcattgaactctgcttcttatttgcaacaacaacaactaccattcagccagctacctgttgcctacccccaacaatttcttccattcaaccaactggcagcattgaactctcctgcttatttacagcagcaacaactactaccattcagccagctagctggtgtgagccctgctaccttcttgacgcaaccacagttgttgccgttctaccagcacgctgcgcctaacgctggcaccataaaacagctgcagcaatcgctgccattcaaccgtcgtgctttgacaacccgagcagtgttctaccagcatcccatcgttggtggcgccctcttttagatttcttatgaggtatagttcggataataacgtttttttgtgtgaggtggttggcttcccagggataagagagtg

SEQ ID NO: 2400 - DNA, 697 bp, Zea mays
  unsure (1)..(697): unsure at all n locations
  Clone ID: PAT_MRT4577_63929C.1
caacaacggccgccaaaatatttagcctccttatgctccttggtctttctgctagtgctgtgtacggtgaccattttcctcgcatgctcacaagctcctataggttcccttcttaccactacctgtcaccagaagagtcttcggtatgtggaaaacccaattcttcaaccccacaagatccaacaggcaatggcaggtggcatcttacctttatcacccttgttcctccaacaataatcagccctattacagcaagtacctttggtgcatttattggcacaaaacatcagggcacaacaactacaacaacttgtgctaacaaaccttgctgcctactcttagcaacatcaggtacttccattcaaccaactagctgcattgaactctgcttcttatttgcaacaacaacaactaccattcaaccagctagctgctgcctacccccaggagtttcttccattcaaccaactggcagcattggactctcttgcttatttacagcagcaacaactactaccatttaaccagctaactggtgtgagccctgctaccttgttgatacaaccacagntggtgccggtctaccagcacgctgcgcctaacgctggcaccctgttacaactgcaacaattgctgccatggaaccaacttggctttgacaaacncagcagggtgtgtactacaacccatcatgggg

SEQ ID NO: 2401 - DNA, 782 bp, Zea mays
  Clone ID: PAT_MRT4577_63935C.1
atacgacttctatgaggaaagctgccgcgcccgcaggctccgatcctgtatagccggcgcgacccacgcgtccgattgagaccaactagcaacatagaaagcacaatagtgtaccaacaatggcagccaagaaattacgcctccttatgctgctaggcctttctgcaagagctgatactgcgaccattatcccgaactgctcgcaagctcctatagctccccttcttcccccgtacctctcaccaacggcgtcttgggtatgtgaaaacccaattcttcaaccctacaggatccaacaggcaatcacaggtggcatcttacctttatcacccttgttcctccaacaatcatcaggcctattacatcagttacctttggtgcatccattggcacagaacatcagggcacaacaactacaacgggctggtgctagcaaaccttgctgcctactctcagcaacagcagtttcttccattcaaccaactagctgcattgaactctgcttcttatttgcaacaacaacaactaccattcagccagctacctgctgcctacccccaacaatttctttcattcaaccaactggcagcattgaactctcctgcttatttacaacaacaacaactactaacattcaaccaactagcttgtgttaacccttcttacttctttatacaaccacaattggtgcccttctaacaacaaccttggcctaacgcttgcaaccttttaacacttcaaccattgcttgcattcaacccaattgctttgaccaaaccaac

SEQ ID NO: 2402 - DNA, 711 bp, Zea mays
  Clone ID: PAT_MRT4577_63936C.1
cacacattgaagacaccgctggtgagaggtatgggggaagaagggaagctataggagcttgtgagcattgtgggaaaacccaattgttcaaccctacaggatccaacaggcaatcgcaacaggcatcttaccattatcacccttgttcctccaacaaccgtcagccctattacagcagttacctttggtccatttggtggcacaaaacatcagggcacaacaactacaacaacttgtgctagcaaaccttgctgcatactctcagcaacatcagtttcttccattcaaccaactggctgcattgaactctgctgcttatttgcaacaacaattaccattcagccagctagttgctgcctacccccagcaatttcttccattcaaccaactagcagcattgaactctgctgcttatttacagcagcaacaactactaccattcagccagctagctgatgtgagccctgctgccttcttgacacaacaacagttgttgccgttctacctgcacgctatgcctaacgctggcaccctcttacaactgcaacaattgctgccattcaaccaacttgctttgacaaactcaacagtgttctaccaacaacccatcattggtggtgccctcttttagattgcttatgagttatagttcaataatgaagttttttggatgatgtttgtggcgtcccagaaataagaaagtacatttct

SEQ ID NO: 2403 - DNA, 638 bp, Zea mays
  Clone ID: PAT_MRT4577_63951C.1
gacgaactagcaacatagaaagcacaattttgtaccaacaatggcagccaaaatatttgggtgccttatgctccttgggctttctgcaagtggtgctaccggaaccatttttccacaatggttacaagcttctatagctttccttctttccccataccttttaacaacgggggcttcaatgggggaaaacccaattggtcaacccttacaggtcccaccaggcatcggaaccaggcattctaccattataacccttgttcctccaacaaccgtcagccctattacagcagttacctttggtccatttggtggcacaaaacatcagggcacaacaactacaacaacttgtgctagcaaaccttgctgcatactctcagcaacatcagtttcttccattcaaccaactggctgcattgaactctgctgcttatttgcaacaacaattaccattcagccagctagttgctgcctacccccagcaatttcttccattcaaccaactagcagcattgaactctgctgcttatttacagcagcaacaactactaccattcagccagctaacttatgtgaacccttgttgctttttgacacaacaaccagtggtggccgtcttacctgcacgctatgcctaacgc

SEQ ID NO: 2404 - DNA, 807 bp, Zea mays
  Clone ID: PAT_MRT4577_63957C.1
accaacaatggcagccaaaatattttgcctccttatgctccttggtctttctgcaagtgctgctacggcgaccattttcccgcaatgctcacaagctcctatagcttcccttcttcccccatacctctcaccagtggtgtcttcggtatgtgaaaacccaattcttcaaccccacaggatccaacaggcaatcgcagctggcatcttacctttatcacccttgttcctccaacaatcatcagccctattacagcagttacctttggtgcatttattggcacaaaacatcagggcacaacaactacaacaacttgtgctagcaaaccttgctgcctactctcagcaacatcagtttcttccattcaaccaactagctgcattgaactctgtttcttatttgcaacaacaacaactaccattcaaccagctagctgctgcctacccccagcagtttctttccattcaaccaactggcagcattgaactctcctgcttatttacagcagcaacaactactaccatttagccagctagctggtgtgagccctgctgtcttcttgacacaaccacagttgttgccgttctaccagcacgctgcgcctaacgctggcaccctcttacaactgcaacaattgttgccattcaaccaacttgctttgacaaacccagcagtgttataccaacaacccatcattggtggtgccctcttttagatttcttatgagttacagttcaataataaagttttttgtctgatgtttgtggcttcccagaaataagaaagtacctgcccgggcggccgctcga

SEQ ID NO: 2405 - DNA, 679 bp, Zea mays
  unsure (1)..(679): unsure at all n locations
  Clone ID: PAT_MRT4577_63959C.1
ctacaggatcgcaacccaggcaatcgcagctttggcatcttaacctttatcaacccttgnttcctccaacaatcatcagcccctattacagcagttacctttggtgcattaattggcacaaaacatcagggcacaacaactacaacaacttgtgctagcaaaccttgctgcctactctcagcaacagcagtttcttccattcaaccaactagctgcattgaactctgcttcttatttgcaacaacaacaactaccattcagccagctacctgttgcctacccccaacaatttcttccattcaaccaactggcagcattgaactctcctgcttatttacagcagcagcaactactaccattcagccagctagctggggtgagccctgctaccttcttgacacaaccacagttgttgccgttctaccagcacgcttggcctaaagcttggacccttttacaactgcaacaattggtggcattcaaccaacttggtttgacaaaactaacaatggtctaacaacaacccatcattggtgggggcctcttttaaaattcttatgaagtataagtcaataataaaagtttttggctgatggttggggcttcccaaaaataagaaaggacatttctagatttaaaaaaaaaaaanaaaaaaaaaaaaaaaaaannnnnnnccccc

SEQ ID NO: 2406 - DNA, 765 bp, Zea mays
  Clone ID: PAT_MRT4577_63961C.1
cattggcagccaaaaaagatggcctaccttactgctcacttagctcctttctcgcaagtgactgatacgtgcgaccatattttccgaaatgctcgcaagctcctatagctcacgttcttccaatgtacctctaaccagcggtgtcttcggtatgtgaaaacccaaatcttcaaccctacaggatccaacaggaaatcacagctggcatattaactatatcacccttgttcctacaacaatcatcagccctataacatcagttaccttaggcgcatttattggcacagataatcagggcacaacaactacaacaacttgtgctaccaaaccttgctgcctactgtaagcaacagcagtttcttccattcaaccaactaactgcattgaactttggttcttatatgcaacaacaacaactaccatgcagccagctacctgctggctacccccagcaatttctttcattcaaccaactggcagcattgaactcttctggttatttacaggagcaacaactactaccattcaaccaactaactggtgggaaccctggttactttttgatacaaccacaagtggtggcggtctaacaacacgctgggcctaaagctggcacccttttacaactgcaacaattggtggcctttaacccacttggtttgacaaaaccaacaagggtctaacaacaacccattattggtggtggcctcttttaaaattcttaagaggtataagtcaataataaagatttttatttgaaggttg

SEQ ID NO: 2407 - DNA, 815 bp, Zea mays
  Clone ID: PAT_MRT4577_63967C.1
tgaccaggatctagatggtgagatcttcgtcagaaaggcagccatggccatgatgaggctgtgaagggttttaggtggacgatgaacatatatgaatatatagttgtactgttctagggcttcagtagaagccatgctaccgtgttaaaaaaaaaattatcacacatattattaagaccaactagcaacatagaaagcacaatagtgtaccaacaatggcagccaaaatattttgcttccttatgctccttggtctttctgcaagtgctgctaccgcaaccattttcccacaatgctcacaagctcctatagcttcctttcttcccccatacctctcaccagcggtgtcttcagtatgtgaaaacccaattcttcaaccctacaggatccaacaggcaatcgcagcaggcatcttacctttatcacccttgttcctccaacaaccgtcagccctattacagcagttacctttggtgcatttgttggcacaaaacatcaaggcacaacaactacaacaacttgtgctaggaaaccttgctgcctactctcagcaacagcagtttcttccattcaaccaactggctgcattgaactctgctgcttatttgcaacaacaactaccattcagtcagctagctgctgcctacccccagcaatttcttccattcaaccaactggcagcattgaactctgctgcttatttacaacagcaacaactaccaccattcagccagctagctgatgtgagccctattggccttcttgacacagcacagttgttgccgttctacctgcacgctgcgcctaaacgctgc

SEQ ID NO: 2408 - DNA, 706 bp, Zea mays
  Clone ID: PAT_MRT4577_63970C.1
aaggaaagcacaatagcgtaccgagaatggcagacaaaaacatcaggctgattatgatcgttggtgtttctggacgggctgttacagctaccattttctctgaaaggtagaaagcttgtataggttccgttcttcaggcgtagctctgaccagcggcgtgtttggcatgtgaaaacccaattcttcaaccctacaggatccaacaggcaatcacagctggcatcttacctttatcacccttgttcctccaacaatcatcagccctattacatcagttacctttggtgcatttattggcacaaaacatcagggcacagcaacttacaacaacttgtgctagcaaaccttgctgcctattttcagcaacagcagttttttccattcaaccaacttagctgcattgaactctgcttttattttgcaacaacaacaacttaccattcagccagctatctgctgcctacccctagcattttttccattcaaccaacttacagcattgaactttcctgcttatttacagcagcaacaactactaccattcagccagctagttggttgtgagccctgctaccttcttgatacaaccacagttgatgccgttctaccagcacgctgcgcctaacgctggcaccctcttacaactgcaacaattgctgccattcaaccaactttgctttgacaaacccagcagcgttctaccaac

SEQ ID NO: 2409 - DNA, 2985 bp, Zea mays
  unsure (1)..(2985): unsure at all n locations
  Clone ID: PAT_MRT4577_63975C.1
atcctccctctctctctctcatcgtcctcctccgcgttctctcgtctccatctgcctctctttctgccaccacagagaactcttcttggagagcctgtgaatctcgagaggcattgagtccgtcttgagttgttgttagtgtcgccttggtctttcgtttttggctttcgtgccgatcaactccggtgctgttcggcggcagtcgcgatggccggcggcgcggttgtgaacaccggcggggggaaggactaccccggcaagctcaccatgttcgtgctcttcgcctgcatcgtcgccgccaccggcggcctcatcttcggatacgacataggcatctccggtggcgtgacctcgatgaaccccttcctgatgaagttcttcccgggcgtgtaccaccaggagcaggaggcggagcggaaccagagcaaccagtactgcaagttcgacagccagctgctcaccatgttcacctcctcgctctacctcgccgcgctcgtcgcctccttcttcgccgccaccgtcacccgcgtcgccggccgcaagtggtccatgttcgccggcggggtcacctttcctcgtcggcgccgcgctcaacggcgccgccaagaacgtcctcatgctcatcctcggacgcgtcctgtcggnnatcgggggtcggcttcgccaaccagtccgcccccggccgggagggacctgcaggccacctcgacctccttccgttcctcgtcgtctcgtgttgtttctcgcgttgccattgccccagctgtccgcccgcgcccgcggcaatggcaggcggcgtggtggtgaacgcggccgggggcaagacgtaccccggccgcatgacgccgttcgtgttcttcacctgcctggtggcgtcatcgggcggcctcatcttcgggtacgacatcggcatctccggcggtgtcacgtccatggcgtcgttcctcaaggagttcttcccttccgtgtacgccaaggcggcggcgaacaaggacacgaaccagtactgcaagttcgacagccagctgctgacgctgttcacgtcgtcgctgtacctggcggcgctggcgacgtcgttcgtggcggcgtccgtgacgcgggtgttcgggcgcaagtggtccatgttctgcggcggggtgaccttcctggccgggtcggcgctgaacggcgccgccaccgacgtgatgatgctcatcatgggccgcatcctgctgggcgtgggcgtcggcttcgccaaccagtcggtgccgctgtacctgtcggagatggcgccggcgaagctgcgcggcatgctcaacatcgggttccagctgatgaccaccatcggcatcctggcggcgaacctgatcaacttctggacggcgggcatcgagggcgggtggggctggcgcatcgggctggggctcgcgggcgtgccggcgctcatcatcaccctgggcgcgctggtgctccccgacacgcccaactcccttatcgcccgcgggttcaacgacgacgccaaggcggtgctggtgaagatccgcggcacggacgacgtgcaggacgagtacgacgacatggtggcggcgagcgaggaggcgaacgccatcgagcacccgtggcgcaacatcctggagcgcaggtaccggccgcagctgacggtggcagcgctgatccccttcttccagcagctgacgggcatcaacgtgatcatgttctacgcgccggtgctgttcctgaccatcggcttcggcgacgacgcgtcgctgatggcggccgtcatcacggggctggtcaacatgttcgccaccgtggtgtccatcgtgtgcgtggaccgcctgggccggcgcgcgctgttcctgcagggcggtacgcagatgttcgtctcccagatcgtggtgggcacgctgatcgcgctccagttcggcaccgccggcgtgggcgagatgtcccgctccaacgcctggctgctggtgctcttcatctgcctctacgtcgccgggttcgcctggtcgtgggggccgctgggctggctcgtcccctcggaggtgttcgcgctggaggtccggtcggcggggcagagcatcgccgtgtgcgtcaacatgctgctcaccttcatcatcggccaggccttcctcagcatgctgtgctcgctcaagttcgggctcttctacttcttcgccgggtggatgttcatcatgaccaccttcatcgccctcttcctgccggagaccaagggggtgcccatcgaggagatgaacctcgtctggagccgccactggttctggggcaagtacgtcaacgtcgacacacaacacggcggcgccagcccgagatccaacggcgtctgatctgagcaagctgcagcaacacctcggcacctgacctggccatgcatgcacacgtatactataatctaacaacgtagctgacctgggcaaattgccagcctgacaggggccagggtgctcgaatgtctcactctcaccgccgactaactttccatcaaaattgattcttgttcatactccatagcatgcacagattgattgaactgctacttgagattcttgtcattgttattagagagagagacagagacagaacgattggcatagcatgcagaattgtttggaagaagctagcaaagcagttccttgtttgtatcctctgtaccagaagatgagtttgatctaggattaatccctgcaaggcaaggtaaagtaaattcatgttgtactcaaaactaacttctcccatatctgtacgtcgtataaaacaaatccctgcaatgtgcaaagattgtcccgcgtagtgattttttcgtctccagcaagatctcaaacaagccccaaatctaagtgtaacatgtttgcattcgaattaaaaaattgaatcccttattgtgacaaaaaaaaaactgaacccggccgcgacagctgtttttgtaatggttgaatatatgctaaaatagtgccttggcgaaaaaaaaaaaaaaaagcggcc

SEQ ID NO: 2410 - DNA, 780 bp, Zea mays
  unsure (1)..(780): unsure at all n locations
  Clone ID: PAT_MRT4577_63994C.1
tggcatcttataaagcccactattgtgccaacaatggcggccaaaattttttgcctccttatgctccttggactttctgcaagcgctgttaccgggaccattttcccgaaatgctcgcaagctcctatagctatccttctttcgccgcacctctcaccagcggtgtcttcggtatggggaatcccaattcttcaaccctacaggatccaacaggcaatcgcagctggcatcttacctttatcacccttgttcctccaacaatcatcagccctattacaacagttacctcttggtgcatgtggttggggcagaacatcagggcacaacaactacaacaacttgtgctagcaaaccttgctgcctactctcagcaacagcagtttcttccattcaaccaactaggttcattgaaccttgcttcttatttgcaacaacaacaactaccattcagccagctacctgctgnctacccccagcaatttttttcattcaaccaactagcagcattgaactcatctgcttattacagcggcaacaactactaccattcagccagctagctggtgtgagccctgctaccttcttgacacaaccacagttggttgccggtctaccaggacggttgcgcctaacgcgtggggccctcttacaactgcgacaattgctggcctttgaccaacttgctttggcaaacccagcaggggtgtaccaacaacccctcattgggggggggctcttttggatgtagcttgggggggtagggagaggaaccccccccca

SEQ ID NO: 2411 - DNA, 879 bp, Zea mays
  Clone ID: PAT_MRT4577_63998C.1
aaaaaaaaaatacacatattattaagaccaactagcaacatagaaagcacaatagtgtaccaacaatggcagccaaaatattttgcttccttatgctccttggtctttctgcaagtgctgctaccgcgaccattttcccgcaatgctcacaagctcctatagcttcccttcttcccccatacctctcatcagcggtgtcttcagtatgtgaaaacccaattcttcaaccctacaggatccaacaggcaatcgcagcaggcatcttacctttatcacccttgttcctccaacaaccgtcatccctattacagcagttacctttggtgcatttgttggcacaaaacatcagggcacaacaactacaacaacttgtgctagcaaaccttgctgcctactctcagcaacagcagtttcttccattcaaccaactggctgcattgaactctgctgcttatttgcaacaacaactaccattcagccagctagctgctgcctacccccagcaattacttccattcaaccaactggcagcattgaactctgctgcttatttacaacaacagcagctaccaccattcagccagctagctgatgtgagccctgctgccttcttgacacagcaacagttgctgtcgttctactcgcacgctgcgcctaacgctggcaccctcttacaactgcaacaattgctgccattcaaccaacttgctttgacaaacccagcagcgttctaccaacaacccatcattggtggtgccctcttttagattgcttatgagttatagttcaataatgatgttttttggatgatgtttgtggcttcccagaaataagaaagtacatttctaaaaaaagaaaaaaaaaaaaaaaaaagcggcc

SEQ ID NO: 2412 - DNA, 904 bp, Zea mays
  Clone ID: PAT_MRT4577_63999C.1
ctttttactcggctcggatccctagtaacggcgcgccagtgtagctggcaatagggccttatcttcatagtggcgtgaggctgtttggttatcttctagcaaacctccagcatgctccaaaaaactctattattgaactataactcataagcaatctaaaagagggcaccaccaatgatgggttgttggtagaacgctgttgggtttgtcaaagcaagttggttgaatggcagcaattgttgcagttgtaagagggtgccagcgttaggcgcagcgtgcaggtagaacggcaacaactgttgctgtgtcaagaaggcaatagggctcacatcagctagctggctgaatggtggtagttgttgctgttgtaaataagcagcagagttcaatgctgccagttggttgaatggaagaaattgctgggggtaggcagcagctagctgactgaatggtagttgttgttgcaaataagcagcagagttcaatgcagccagttggttgaatggaagaaactgctgttgctgagagtaggcagcaaggtttcctagcacaagttgttgtagttgttgcgccttgatgttttgtgccaacaaatgcacataaggtaagtgctgtaatagggctgacggttgttggaggaacaagggtgataaaggtaagatgcttgctgagattgcgtgttggatagtgtagggttgaagaattgggttttcacatactgtagataccggtggtgagaggtatgggggaagaaaggaagctataggagcttgtgagcattgtgggaaaatggttgaggtaggagcgcttgcagaaataccaaggagcctaaggaaggggaatattttgactgtgattaaaggtacgattattgtgctttatatgctgccgcaggcgtgggtcg

SEQ ID NO: 2413 - DNA, 735 bp, Zea mays
  Clone ID: PAT_MRT4577_64005C.1
acccaatggcccagccaaaatatttgtggcctgggcttatgctccttgggtcttgtctggcaagtgccctgctacgcgcgaccccattttcccgcaatggctcgcaagactcctatagcttcccttcttcccccgtaccctctccaccagctggtgtctttcggtatgtgaaaacccaattcttcaaccctacaggatccaacccaggcaatcgcagctggcatcttacctttatcacccttgttcctccaacaatcatcagccctattacaacagttacctttggtgcatttattggcacaaaacatcagggcacaacaactacaacaacttgtgctagcaaaccttgctgcctactctcagcaacagcagtttcttccattcaaccaactaggttcattgaactctgcttcttatttgcaacaacaacaactaccattcagccagctacctgctgcctacccccagcaatttcttccattcaaccaactagcagcattgaactctcctgcttatttacagcagcaacaactaccaccattcaggcagctagctgatgtgagccctattgccttcttgacacagtgacagttgttgccgttctacctgcacgctgagcctaatgctggtaccctgttacaactgaaacaatggtgtggcttcaaacaacttgctgtgacaaacccaacaggggtctaccaacaacccatcatgtggtggtgccctccttttaga

SEQ ID NO: 2414 - DNA, 1303 bp, Zea mays
  unsure (1)..(1303): unsure at all n locations
  Clone ID: PAT_MRT4577_64024C.1
gctatagtccacaatctcgaggaaagagcagccctgaggcagccaagtctttcgtccagtgggangacagaggacagtttggcaccaagggcacacaacaacagtgtgggagtgcctgaaagcagcggctacgctgaagcccccctggcagttaacacgccacgaagagcgcagggatcgcacatattattgagaccaactagcaacatagaaagcacaatagtgtaccaacaatggcagctaaaatattttgcctccttatgctccttggtctttctgcaagtgctgctacggcgaccattttcccacaatgctcacaagctcctatagcttcccttcttcccccgtacctctcaccaacggtgtcttcggtatgtgaaaacccaattcttcaaccctacaggatccaacaggcaatcgcagctggcatcttacctttatcacccttgttcctccaacaatcatcagccctattacagcagttacctttggtgcatttattggcacaaaacatcagggcacaacaactacaacaacttgtgctagcaaaccttgctgcctactctcagcaacagcagtttcttccattcaaccaactagctgcattgaactctgcttcttatttgcaacaacaacaactaccattcagccagctatctgctgcctacccccagcaatttcttccattcaaccaactgacagcattgaactctcctgcttatttacagcagcaacaactactaccattcagccagctagctggtgtgagccctgctaccttcttgacacaaccacagttgttgccgttctaccagcacgctgcgcctaacgctggcaccctcttacaactgcaacaattgctgccattcaaccaacttgctttgacaaacccagcagcattctaccaacaacccatcattggtggtgccctcttttagatttcttatgagttatagttcaataataaagttttttgtctgatgtttgtggcttcccagaaataagaaagtacattggtcgattctaaataaaaataacaaattcacaaaaaacgcaggtgtacccaaacttgcaacaccagaaggagctgttgtagttcatctaacaattgcatacttttgctttgtacgtcaatattctatgggccatgaatacattttctgttaagtacaatggtcaatgttcacacttcactcgtggtttcattgttgatgagaaaaaaatnanagactgtaatatgtgtacattgtatttgngtatggnctattatttgtatgcccatggggtgtgttactacctgctg

SEQ ID NO: 2415 - DNA, 1272 bp, Zea mays
  Clone ID: PAT_MRT4577_64025C.1
agatgcatccacacatacaagggtcatacccaacgaattaatgtgcttaaatttactcctgatggccgatggattgtttctggtggggctgataactcagtgaaggtccagtcaactgcttatcacacatattattgagaccaactagcaacatagaaagcacaatagtgtaccaacaatggcagccaaaatattttgcctccttatgctccttggtctttctgcaagtgctgctacggcgaccattttcccacaatgctcacaagctcctatagcttcccttcttcccccgtacctctcaccagcggtgtcttcggtatgtgaaaacccaattcttcaaccctataggatccaacaggcaatcgcagctggcatcttacctttatcacccttgttcctccaacaatcatcagccctattacagcagttacctttggtgcatttattggcacaaaacatcagggcacaacaactacaacaacttgtgctagcaaaccttgctgcctactctcagcaacaacagtttcttccattcaaccaactagctgcattgaactctgcttcttatttgcaacaacaacaactaccattcagccagctatctgctgcctacccccagcaatttcttccattcaaccaactgacagctttgaactctcctgcttatttacagcagcaacaactactaccattcagccagctagctggtgtgagccctgctaccttcttgacacaaccacaattgttgccgttctaccagcacgctgcgcctaacgctggcaccctcttacaactgcaacaattgctgccattcaaccaacttgctttgacaaacccaacagcattctaccaacaacccatcattggtggtgccctcttttagatttcttatgagttatagttcaataataaagttttttgtctagaaatgtactttcttatttctgggaagccacaaacatcagacaaaaaactttattattgaactataactcataagaaatctaaaagagggcaccaccaatgatgggttgttggtagaatgctgctgggttttcacatactaaagcggtcattgatggaaggtatgggggaagaagggcagctataggagcttgtgagtattgagggaaaattgtcgcgttagcaacacatgtagaaagagcaaggagcataaggagggaaaatatcttggtcgccattgttgctctattgttgctaatggattctactttctatgttgcttgccggacgcgtgggcggacgcgtggg

SEQ ID NO: 2416 - DNA, 1493 bp, Zea mays
  Clone ID: PAT_MRT4577_64028C.1
ggccgcttttttttttttttttttaagaatctagaaatgtactttcttatttctgggaagccacaaacatcatccaaaaaaacttcattattgaactataactcataagcaatctaaaagagggcaccaccaatgatgggttgttggtagaacactgctgggtttgtcaaagcaagttggttgaatggcagcaattgttgcagttgtaagagggtgccagcgttaggcatagcgtgtaggtagaacggcaacaactgttgttgtgtcaagaaggcagcagggctcacatcagctagctggctgaatggtagtagttgttgctgctgtaaataagcagcagagttcaatgctgctagttggttgaatggaagaaattgctgggggtaggcagcagctagctggctgaatggtagttgttgttgcaaataagcagcagagttcaatgcagccagttggttgaatggaagaaactgatgttgctgagagtatgcagcaaggtttgctagcacaagttgttgtagttgttgtgccctgatgttttgtgccaccaaatggaccaaaggtaactcttgtaatagggctgacggttgttggaggaacaagggtgataatggtaagatgcctgttgcgattgcctgttggatcctgtagggttgaacaattgggttttcacacactgaagacaccgctggtgagaggtatggggaaagaagggaagctataggagcttgtgagcattgtgggaaaatggttgcggtagcaacacttgcagaaagaccaaggagcataagctcctatagcttcctttcttcccccatacctctcaccagcggtgtcttcagtatgtgaaaacccaattcttcaaccctacaggatccaacaggcaatcgcagcaggcatcttacctttatcacccttgttcctccaacaaccgtcagccctattacagcagttacctttggtgcatttgttggcacaaaacatcaaggcacaacaactacaacaacttgtgctaggaaaccttgctgcctactctcagcaacagcagtttcttccattcaaccaactggctgcattgaactctgctgcttatttgcaacaacaactaccattcagtcagctagctgctgcctacccccagcaatttcttccattcaaccaactagcagcattgaactctgctgcttatttacaacagcaacagctaccaccattcagccagctagctgatgtgagccctgctgccttcttgacacaacaacagttgttgccgttctacctgcacgctgcgcctaacgctggcaccctcttacaactgcaacaattgctgccattcaaccaacttgctttgacaaacccaacagcgttctaccaacaacccatcattggcggtgccctcttttagattgcttatgagttatagttcaataatgaagttttttggatgatgtttgtggcttcccagaaataagaaagtacatttctagattctt

SEQ ID NO: 2417 - DNA, 862 bp, Zea mays
  Clone ID: PAT_MRT4577_64032C.1
ccgggccgggaatcgcacatattatttagaccaactagcaacatagaaagcacaatagtgtaccaacaatgcgcagccaaaatattttgcctccttatgctccttggtatttctgcaagtgctgctacggcgaccattttcccgcaatgctcacaagctcctatagcttcccttcttcccccgtacctctcaccagcggtgtcttcggtatgtgaaaacccaattcttcaaccctacaggatccaacaggcaatcgcagctggcatcttacctttatcacccttgttcctccaacaatcatcagccctattacagcagttacctttggtgcatttattggcacaaaacatcagggcacaacaactacaacaacttgtgctagcaaaccttgctgcctactctcagcaacagcagtttcttccattcaaccaactagctgcattgaactctgcttcttatttgcaacaacaacaactaccattcagccagctacctgttgcctacccccagcaatttcttccattcaaccaactggcagcattgaactctcctgcttatttacagcagcaacaactactaccattcagccagctagctggtgtgagccctgctaccttcttgacacaaccacagttgttgccgttctaccagcacgctgcgcctaacgctggcaccctcttacaactgcaacaattgctgccattcaaccaacttgctttgacaaacctagcagtgttctaccaacaacccatcattggtggtgccctcttttagatttcttatgagttatagttcaataataaagttttttgtctgatgtttgtggcttcccagaaataagaaagtacatttctagattctt

SEQ ID NO: 2418 - DNA, 873 bp, Zea mays
  Clone ID: PAT_MRT4577_64035C.1
atcgcacatattattgagaccaactagcaacatagaaagcacaatagtgtaccaacaatggcagccaaaatattttgcctccttatgctccttggtctttctgcaagtgctgctacggcgaccattttcccgcaatgctcgcaagctcctatagcttcccttcttcccccgtacctctcaccagcggtgtcttcggtatgtgaaaacccaattcttcaaccctacaggatccaacaggcaatcacagctggcatcttacctttatcacccttgttcctccaacaatcatcagccctattacatcagttacctttggtgcatttattggcacaaaacatcagggcacaacaactacaacaacttgtgctagcaaaccttgctgcctactctcagcaacagcagtttcttccattcaaccaactagctgcattgaactctgcttcttatttgcaacaacaacaactaccattcagccagctacctgctgcctacccccagcaatttcttccattcaaccaactggcagcattgaactctcctgcttatttacagcagcaacaactactaccattcagccagctagctggtgtgagccctgctaccttcttgatacaaccacagttgttgccgttctaccagcacgctgcgcctaacgctggcaccctcttacaactgcaacaattgctgccattcaaccaacttgctttgacaaacccagcagcgttctaccaacaacccatcattggtggtgccctcttttagatttcttatgagttatagttcaataataaagttttttgtctgatgtttgtggcttcccagaaataagaaagtacatttctagattctaaaaaaaaaaaaaaaaaagcggcc

SEQ ID NO: 2419 - DNA, 500 bp, Zea mays
  Clone ID: PAT_MRT4577_64087C.1
cccacgcgtccggcttgctggtttcaacaaggatgacaagcagctggatgctgatatccatcgcaagtacatctatggtggccatgttgctaactacatgaagaacctcgctgaataggagcccgacaagtaccagtctcacttcagagagtacattaagaaaggaattgaggctgatgacatggaagctctgttcaagaaggtccatgctgccatccgagctgatccttctgtggacaagtgaacgaagcaaccaccaaaggagctcaagatgctcaagctccagaaactgacgtacgagacagaggaaggccagacttattgaaaggctctagccaatcaactcctcggacggcgcatatgacgacgatgaggatgacgagtctggtctggacctatcgaagaagtgctatcttatgcggcgatcactatttgagctatagcattaatcgctacctgtagtcaggctgcatgcattattgttcaaggctgtcaatgcg

SEQ ID NO: 2420 - DNA, 409 bp, Zea mays
  Clone ID: PAT_MRT4577_64111C.1
ccggctctagccactcgtccttcgacatataaagcacaatattttaccttcaatggcagccaaaatattttgcgtccttgtgctccggggactgtctgcaaccgctgctaccgtgaccattttaccacaatgctcacaagcttctatagcttaccttcttcccccatacctctcatcatcggtgtcttcagtatgtgaaaacccaattcttcaaccctacaggatccaacacgcaatctcatcattcattatacctttatcacccttgatccttcaacaaccttcatccctattacagcacttacctttgatgcatttgatggcacaaaacatcaagacacaacaactacaacaacttgtgctatcaaaccttactgcctactctcataacaatcaaataattcaatta

SEQ ID NO: 2421 - DNA, 120 bp, Zea mays
  Clone ID: PAT_MRT4577_64349C.1
agaggtgggctggcttgtcctgcccctgttaccaagtcgtcctcgggtcagggttccttagggctttgtggaagggctatggcggccgctgatgtggagcaccgttggctcgtcggccgg

SEQ ID NO: 2422 - DNA, 652 bp, Zea mays
  unsure (1)..(652): unsure at all n locations
  Clone ID: PAT_MRT4577_64409C.1
aatatatctncgaacgggaatttgagctcaacacaaacatgatgcctaatgaagatgatttgcaagattttgctgcaacaagtgtgaaggccaaaaactggaaacgcatggcaacaaattcaagcaaacatcggcacctcggcagattttattaatggagacaagagtagaaatggttcttttgggcatcaccatgctcgaactctgaaagggccgtgccgtagtctaacgttaagcacatactatgtgcctgccactacgagcagcagaaagtggagtggcacgcaagcaggaatacaggatggacaaaatcggcaggccattgtgcgttagtctatcttagcgaaatgtacacttggtccagcaggtacacaagtccatctttatttcacatggtcaaacagccgaaaacaaacccgcgcagatgagtattgtccattaagacaattcaagcaagaacattttcgtacacctctccagcatatttccagttcatcaccttccagatgttgttcaggtaatccggcctaacattcttgtactgcaggtagtacgcatgctcccagacatcaatccccaacagcggaaccaagcttgcacctttagtcaccagaggatcctgattaactgtagtttcaactgaaagcttttt

SEQ ID NO: 2423 - DNA, 219 bp, Zea mays
  Clone ID: PAT_MRT4577_64410C.1
tttttgatacctcccgtattgtcgaacatccccaagtgcgtacgcgtgcgtgtgagagtgatatcgagcgcccgccgtgttgtgcgcgcgtacgtatgtatgcgctcgtgtgatgcacgaataagcgtggctacttaatctatcgtatggatacgtgtgtgtatgcatgagcttgtgtatgatcatggtacaaggaccgaaataatgtattcatctctg

SEQ ID NO: 2424 - DNA, 212 bp, Zea mays
  Clone ID: PAT_MRT4577_64472C.1
gggggcgcatgagggaggcatataaactctgaccaaaaattggagcagcaggtcacaagggtcagccaaaaactaagaccgcccaacgggtttgggatcccttacttcaaaaggcagggggggattcgacccccagattttaccccaaaaatccgggggaacctttagcctagctagagcccggggccccccagggggcgaagcaaaggcaa

SEQ ID NO: 2425 - DNA, 368 bp, Zea mays
  Clone ID: PAT_MRT4577_64503C.1
acgacggcgggccgcgggggccggcgatgaagcctgcgggaggaacggaacgtgaccctcgaggcgggcaaatctggatgcttccttccagccgacgcatcccatcccatacagccccgggacgtacggtgatcggtgaccccactccatcccacggccacgccacacctcctctccacctcctcgtcctcgattcccaagcagtcagtcttcctcgtcactcgcctcctcccgttaggtacgctggcgagccgtcggccgccgtcccttcctccctggatttgattggtgctcgcggctgcagcccagcgagttccttgattcggctgggagcaccgccatcgccatgggatggcaccgctggctgt

SEQ ID NO: 2426 - DNA, 474 bp, Zea mays
  Clone ID: PAT_MRT4577_64568C.1
cacccgccccaaccaattttattgatatttaatactaaacagtggggggcttaaaaccataaaaaatacagggtccaaaatgtaaccacagataatgcaaacacggggcaacacccaacaatccctgcatttgtttttgccataccaaaagccacctaaacccaaatggatgtctttgaagcattccttgaaacactttttttttcaatttaggttttgaaatacagtattccaaggcaggaaagttatttggggccaaaatccttaagggcccaaatctgctcttcccccttagcaaactggacagtcacaacaagatccttgccgttttaaaacctttccttgttttgggccacaagagtctaataagttgggagtctaagaccatccttagcgtcgccatcggaagtaaaaaggctaacaaatccatcctctgatatattaataagctggtcctcaggacggttcacatgc

SEQ ID NO: 2427 - DNA, 2938 bp, Zea mays
  Clone ID: PAT_MRT4577_64622C.1
ccgtccgggaaaaaaaaaaaaaaaaaaaaaaaaaaaaaataccctcgaggccggccgggtcctctccgctctgctccctccgccgtgcgctcgaacgaactccacacgaaattctccgcgtaaagttggggagcagcgaacccgtagcgcgcgccccggatccctccacggggggcaatggcctcgtcggcgttcctgcccgagctgggcacgcaggtggtggtgcccgtcgcggccgtggtaggcatcgcgttcgcggtgctgcagtgggtgctggtctccaaggtgaagctctcccccgagccgcgccgcggcgacggctccgccgggaagagcggcgccggcgccggcgccagcgagtacctcatcgaggaggaggaggggctcaacgagcacaacgtcgtcgtcaagtgcgccgagatccagaacgccatctccgaaggagcaacttctttccttttcaccgaatacaagtatgtgggactattcatgggcatttttgctgtcctgatcttcctcttccttggttctgttgagagcttcagtaccaagagtcagccatgccactacagcaagggcaagacgtgcaagcctgcccttgccaatgctatcttcagcaccattgcctttgtgcttggtgcagtcacctctcttgtttctggtttccttggaatgaagattgccacatatgcaaatgccaggacaactcttgaggctaggaagggtgttggaaaggcattcattactgctttccgctctggtgctgtgatgggcttcctgcttgctgctagtggcctttttgttctttatattgcaatcaacttgtttggaatttattatggtgatgactgggagggcctttatgaggctatcactggttatggtcttggtggttcttctatggctctttttggtcgtgttggtggtgggatttacactaaagctgctgatgttggtgctgatcttgttgggaaagtcgaaaggaatatccctgaagatgatccgagaaacccagctgtcattgcggacaatgttggtgacaatgttggagatattgctggtatggggtcagatctctttggctcttatgctgagtcttcatgcgctgcacttgtcgttgcctcaatctcttcattcgggatcaatcatgaattcacccctatgttgtacccactcctcattagctctgtgggtatcatagcttgcttgataaccactctttttgcaactgatttctttgagatcaaggctgtagatgaaattgagccggctctcaagaagcagcttataatttccactgctgtgatgactgttggcattgcacttgtcagttggttagggcttccatatacattcacaatcttcaactttggtgtgcagaagacggtgtataactggcaattattcctatgcgtggcagttggtctgtgggcaggactagttattggatttgttacggagtattacacaagcaatgcatacagtcctgtacaggatgttgctgactcctgcagaactggagctgctacgaatgtcatctttggccttgctctgggatataaatccgtcattatccctatttttgctattgcttttagtattttcctcagcttcagtcttgctgccatgtacggtgttgctgtggctgctcttggaatgctcagcacaatcgctactggccttgccattgatgcctatggtcctatcagtgacaatgctggaggaattgctgaaatggctggcatgagccacagaatccgtgagagaactgatgctcttgatgctgctggaaatactactgctgccattgggaagggttttgcaataggttcagcagccttggtgtctcttgccctctttggtgcttttgtcagccgtgctgagatctcgactgttgatgttctgacacccaaagttttcattggactgattgttggtgccatgctcccatactggttctcagcgatgacaatgaagagtgttggaagtgcagcactcaagatggttgaggaagtccgcaggcagttcaacaccatccctgggctcatggagggcattaccaagcctgactatgcgacgtgtgttaagatctctactgatgcatctatcaaggagatgatcccacctggtgcacttgtcatgcttacacctcttattgtggggatcttctttggtgttgaaaccctctctggagttcttgctggtgctcttgtttctggtgtccagattgccatctctgcatccaacactggaggtgcctgggacaacgcaaagaaatacattgaggctggtgcatctgagcatgcaagaaccttgggcccgaaaggttcagacccacacaaggctgctgtcatcggtgacaccatcggtgatcccctcaaggacacctcaggcccctcgctgaacatcctcatcaagctcatggctgtcgagtcccttgtctttgctcccttcttcgccacccatggaggcatcctcttcaaatggctttagaggaagaatggaagatggatgggtagtttatttttgccgggggagagcactagatatatgtcatagagaagtttcagtttacccatatggtgcacttcatccttttttgtttcgcttgtactgtgtcgcagtcttgttgaacttgtcagccgtggtatcacctagtttttgggtctagatgcagtagccgagtggagcaaaaacgtctagcattctacaggattggaatttggacatggatgtgttgggaagtttgatactgcatgtagatatttcgaaaaaaaaaaaaaaaaaccgtccacatccgtcctccagcactccacctgcatcgacgaggaacgccgtagcgatttgcgaagcgaagcgggacgggagaggaaccccgaggaaggccaaaatgatctaccgctactggacgctgctctcgactacagactaaatttgg

SEQ ID NO: 2428 - DNA, 399 bp, Zea mays
  unsure (1)..(399): unsure at all n locations
  Clone ID: PAT_MRT4577_64676C.1
ggtgatagtaaatgatcaatggggagacagccggctgtgacaaggagggggtgaagcgagggccatggacagcggagaggacaagaagctcattagcttcatcctgacacatggccggtgctgctggcgggcagtgcctaaactcgcagggctgcttcgttgcggcaagagctgccgtctgcggtggactaactatcttcgccctgacctcaagcgtggcctcctcagcactgccgaggagcagcttgtcattgacctccatgccaagctcggaaatagatggtcccagattgctgccaagttgcctgngagaacagacaacgagatcaagaaccactggaacacgcacatcaagaagaagcttgtcaagatgggtgtcgacccggccacacacgagcc

SEQ ID NO: 2429 - DNA, 2991 bp, Zea mays
  unsure (1)..(2991): unsure at all n locations
  Clone ID: PAT_MRT4577_64700C.1
cgcacgcgtccgcccacgcgtccgctgtaaaaggattggctctgagggttgggctggggggttccggccccgaacccgtcngctgctggcggaatgctcgagctgctcgcgcggcgagagcgggccgccgcgtgccggccgggggacggaccgggaacggccccctcgggggccttccccgggcgtcgaacaaccgactcagaactggtacggacagtccagtccctgtacctccgtataaaccctagtacctcttatccgttcgtcactccccaagcgtcacaccgaatcaccacagtcgagctcgagcaggaacaagccgtgagcgcctgcccccggtgctcaatatctattccacacctcatggcgccggcgctgagcaggaccctggggccgtcgtcggtggccgcgctgcgcccgagcccgtcgtgccggggtctgttacgggccgcgctcgcgccgcagggcaggggcgcctccgcgaggtgcgcggtaggggtgagatgggaggcagccaggcggaggaggatggccggggtgaggtgcgacgccgccgtcgctgagaagcctgccggcgaggaggagacggccggcgagaagtacgagtaccaggctgaggttacccgcttgatggacttaattgtacacagtttatacagccacaaggaagtatttttacgtgagcttgtaagtaacgcgagtgatgcactggataagctgagattcctcagcgtaactgatccttctgtgttggctgatggcggtgagttggagataaggattaaacccgacctagaggcggggacaatcactatcacagatactggcattggaatgactaaagatgagctcaaagactgtcttggaaccattgcacaaagtggcacctcaaagtttttgaaggctctaaaggagaacaaagaccttggtgcagataatggactcattggtcaattcggtgttgggttctattccgctttccttgttgcagagagggttgtggtgtctactaaaagtccaaaggcagataagcagtatgtgtgggaagcagaggctgacagcagctcgtatgttatcaaggaagaaaatgatcctgagaaaatgctttcacgtggaacagaaattactctttatttgagagatgatgacaaatatgagtttgctgaccctaccaggattcaaggcttagttaagaactactcgcagtttgtctcattccccatatatacatggcaggaaaaatcaagaacagttgaggttgaagaggaggaagaatcaaaaggtgaagaggctactgaagaatcaaaaagtgaagaggctactgagggtgaaaagcagaaaaagaagaaaaccataactgagaagtactgggactgggaattggctaatgaaacgaagcccatatggatgaggaatccaaaggaagttgagaaaactgagtacaatgaattctacaagaagacatttaatgagtttctggatccgcttgcttacactcacttcaccactgagggagaggtggaatttcggagtgttctctatgtcccagggatggcgcctcttagtaatgaggagataatgaatccaaagaccaaaaacatccgattgtatgtcaaaagagtgttcatatcagatgattttgatggcgagctgtttcccagatacttgagctttgtgaaaggtgtagttgactcaaatgatctccctctcaatgtttctcgtgagatccttcaagaaagtagaattgtcagaattatgcgtaagagacttgttaggaagacatttgacatgattcaagagattgccgagaaggatggcaaagaggactacaacaaattctgggagagctttggcaagttcatgaagcttggttgcatcgaggacacaggaaaccacaagcgtcttgcaccattgctgagattctactcttccaaaaacgagacagatttaataagtctggaccagtatgtagaaaacatgcctgaaaaccagaaggcgatctattatatcgctactgatagtctccagagcgcgaagactgctcctttcttggaaaagctggttcagaaagatattgaggttctttacctcattgagccaattgatgaggttgccattcagaatttacagacatacaaagagaagaagtttgtagatattagcaaagaggatttggaattgggtgatgaagatgaggacaaggagaaagaaagcaagcaggagtatactcttctatgcgactggataaagcagcagcttggcgataaagtcgccaaggtccagatctcgaagcgactcagctcttctccatgtgttcttgtttctggtaaatttggctggtcagccaacatggaaaggctcatgaaggcacagacccttggtgacacatcaagcctggagttcatgagaggtagacgaatttttgagatcaaccctgaccatcctatcatcaaggacctgaacgctgcttgcaaaaacgagcctgaaagtactgaagccaagagggcggcagagttgctatacgaggctgcgctgatctccagtgggtatactcctgacagtccagcggagctgggaggcaagatctacgagatgatgaccatggccctcggcgggagatgggggaggttggagacagaggaggctgaagtcatcgccagcatcgacgacgcggactcgtctgaaggtgccacgaccacgacagaggtagtcgagccctctgaggtcaggacagagagcgacccgtggaaggattagatagttctgtatgcaaggattatgccctggtgtggtgtatgagcactggatgtaacgaaagtacgaaccagagccaggatagaggaatgcagcgtttgataagaacactggtgttaaaagtgtagatctctggtttgggttgtgctgataaatttttgtaggctataaccatccaatgaaaaatgccctctgcgctttcgtgcattctttctaaaataattataattataattt

SEQ ID NO: 2430 - DNA, 3298 bp, Zea mays
  Clone ID: PAT_MRT4577_64728C.1
tttcctgtcctctcctctcctcaattcggcacgaggctccgaaccctcacaacagtgcatcgtctctcctgtccccgccatttggttcggaactctcgcggcctcatctcctcctcgtcatcgtaacacccacgcttagagttcgtgagggtcgcccccaggggatctcgagacgtccgtttccaagagtggaccggctcggaggcgctgctgttaccttgggtggagctcggacctgcggatcagttggattctcaagggagacggagtcgggagcaactggttttgggcgtcgcggagcacatggcttaagaataatttcttccagcccggcgacaaattcgcagttggattcagcatatgcattttttatgctgacataggatgtgctcaaccatccgtggactccctctagttgcacaaaccacctcagtgctctctctttcttcgaatcgggctaataatgggcagtgcttgccaagctggcacagacgggccttcccgcaaggatgtgttagggatagggaatgccgccttagagaatggccaccatcaggctgaagctgacgcagatgaatggagggaaaaggaagaggacttggccaacaacgggcacagtgcgccaccgccaggcatgcagcaggtggatgagcataaggaggaacaaagacaaagcattcactgggagaggttcctacctgtgaagacactgagagtcttgctggtggagaatgatgactctactcgtcaggtggtcagtgccctgctccgtaagtgctgctatgaagttattcctgctgaaaatggtttgcatgcatggcgatatcttgaagatctgcagaacaacatcgaccttgtattgactgaggttttcatgccttgtctatctggtatcggtctgcttagcaaaatcacaagtcacaaaatttgcaaagacattcctgtgattatgatgtctacgaatgattctatgagtatggtgtttaagtgtttgtcgaagggagcagttgatttcttggtaaaaccactacgtaagaatgagcttaagaacctttggcagcatgtttggaggcgatgccacagttccagtggaagtgaaagtggcatccagacacagaagtgtgccaaactaaatactggcgacgagtatgagaacggcagtgacagcaatcatgatgatgaagaaaatgatgacggcgacgatgacgacttcagtgttggactcaatgctagggatggaagtgacaatggcagtggtactcaaagctcatggacaaagcgtgctgtggagattgacagcccacaacctatatctcccgatcaactagttgatccacctgatagtacatgtgcacaagtaattcaccctagatcagagatatgcagtaacaagtggttaccgacagcaaacaaaaggaatgtcaagaaacagaaggagaataaagatgaatctatgggaagatacttaggaataggtgctcctaggaactcaagtgcagaatatcaatcatctctcaatgatgtatctgttaatccaatagaaaaaggacatgagaatcacatgtccaaatgcaaatctaaaaaggaaacaatggcagaagatgattgtacaaacatgcctagtgcaacaaatgctgaaactgctgatttgattagctcaatagccagaaacacagaaggccaacaagcagtacaagccgttgacgcaccagatggcccttccaaaatggctaatggaaatgataagaatcatgattctcatatcgaagtgacaccccatgagttgggtttgaagagatcgagaacaaatggagctacagcggaaatccatgatgagcgaaatattctgaaaagatcagatcagtcagccttcaccaggtaccatacatctgtggcttccaatcaaggtggagcaagatatggggaaagctcttcaccacaagataacagttctgaggccatgaaaacggactctacatgcaagatgaagtcaaattcagatgctgctccaataaagcagggctccaatggcagtagcaataacgatgtgggatccagtacaaagaatgttgctgcaaggccttcgggtgacagggagagagtagcgtcaccattagccatcaaatctacccagcatgcctcagcatttcatactatacagaatcaaacgtcaccagctaatctgattggggaagacaaagctgatgaaggaatttccaatacagtgaaaatgagccacccaacagaggttccacaaggctgcgtccagcatcatcatcatgtgcattattacctccatgttatgacacagaaacagccatcaacagaccgtggatcatcagatgttcactgtggttcgtcaaatgtgtttgatcctcctgttgaaggacatgctgcaaactacagtgtgaatgggggtgtctcagttggtcataatgggtgcaatgggcagaatggaagtagcgctgtccccaatattgcaagaccaaacatagagagtattaatggtaccatgagccaaaatattgccggaggtggcattgtaagtgggagtgggagtggcaatgacatgtatcagaatcggttcctgcaacgagaagctgcattgaacaaattcagactgaagcggaaagatcggaactttggtaaaaaggttcgctaccaaagcaggaagaggcttgctgagcagcggccacgggtccgaggacagtttgtgcgacaatctgagcaagaagatcaaacagcgcaaggttcagaaagatgacacgtaatttctaatacaacgtatcatcttcttcggcagatctgagaattaggcggttcttcctattgcgcatcttcgtcgacagatctgagaattaagtggtccttcccattgctgatagtagcccactgattcccaacgttagagtacacaataaataagactctagttgtcaatttctgtggttgactgcagatgatcaccctagcgctatggagtcaacaatgtaatatttatatactatgttcgtgccttggcgccttggcggtttgcaatcttcagtttcctttctgagagattcttggccaagtgccttgaggaggagcaaactagcagcgtcgccattgctatattaatagctggaatcatgtagtagtagttcatccattcattcgaagatcgtgttccaaatcaacacaagtaggggtttgcttctcctctttccaagaaaagtggttgtagcgtgagatgcaaataggtctcttgtgctagatcaagctcaataaactttaggccgtgttaggcagctgatct

SEQ ID NO: 2431 - DNA, 4063 bp, Zea mays
  Clone ID: PAT_MRT4577_64730C.1
ctctcctctccccgccatttggctccgaaccctcacaacagtgcatcgtctctcctgtccccgccatttggttcggaactctcgcggcctcaactcctcctcgtcatcgtaacacccacgcttagagttcgtgagggtcgcccccaggggatctcgagacgtccgtttccaagagtggaccggctcgcaggcgctgctgttaccttgggtggagctcggacctgcggatcagttggattctcaagggagacggtggtttctgatttcctttctctaagcataccaaatcctttgtctcgagtcgggagcaactggttttgggcgtcgcggagcacatggcttaagaataatttcttccagcccggcgacaaattcgcagttggattcagcatatgcattttttatgctgacataggatgtgctcaaccatccgtggactccctctagttgcacaaaccacctcagtgctctctctttcttcgaatcgggctaataatgggcagtgcttgccaagctggcacagacgggccttcccgcaaggatgtgttagggatagggaatgccgccttagagaatggccaccatcaggctgaagctgacgcagatgaatggagggaaaaggaagaggacttggccaacaacgggcacagtgcgccaccgccaggcatgcagcaggtggatgagcataaggaggaacaaagacaaagcattcactgggagaggttcctacctgtgaagacactgagagtcttgctggtggagaatgatgactctactcgtcaggtggtcagtgccctgctccgtaagtgctgctatgaagttattcctgctgaaaatggtttgcatgcatggcgatatcttgaagatctgcagaacaacatcgaccttgtattgactgaggttttcatgccttgtctatctggtatcggtctgcttagcaaaatcacaagtcacaaaatttgcaaagacattcctgtgattatgatgtctacgaatgattctatgagtatggtgtttaagtgtttgtcgaagggagcagttgatttcttggtaaaaccactacgtaagaatgagcttaagaacctttggcagcatgtttggaggcgatgccacagttccagtggaagtgaaagtggcatccagacacagaagtgtgccaaactaaatactggcgacgagtatgagaacggcagtgacagcaatcatgatgatgaagaaaatgatgacggcgacgatgacgacttcagtgttggactcaatgctagggatggaagtgacaatggcagtggtactcaaagctcatggacaaagcgtgctgtggagattgacagcccacaacctatatctcccgatcaactagttgatccacctgatagtacatgtgcacaagtaattcaccctagatcagagatatgcagtaacaagtggttaccgacagcaaacaaaaggaatgtcaagaaacagaaggagaataaagatgaatctatgggaagatacttaggaataggtgctcctaggaactcaagtgcagaatatcaatcatctctcaatgatgtatctgttaatccaatagaaaaaggacatgagaatcacatgtccaaatgcaaatctaaaaaggaaacaatggcagaagatgattgtacaaacatgcctagtgcaacaaatgctgaaactgctgatttgattagctcaatagccagaaacacagaaggccaacaagcagtacaagccgttgacgcaccagatggcccttccaaaatggctaatggaaatgataagaatcatgattctcatatcgaagtgacaccccatgagttgggtttgaagagatcgagaacaaatggagctacagcggaaatccatgatgagcgaaatattctgaaaagatcagatcagtcagccttcaccaggtaccatacatctgtggcttccaatcaaggtggagcaagatatggggaaagctcttcaccacaagataacagttctgaggccatgaaaacggactctacatgcaagatgaagtcaaattcagatgctgctccaataaagcagggctccaatggcagtagcaataacgatgtgggatccagtacaaagaatgttgctgcaaggccttcgggtgacagggagagagtagcgtcaccattagccatcaaatctacccagcatgcctcagcatttcatactatacagaatcaaacgtcaccagctaatctgattggggaagacaaagctgatgaaggaatttccaatacagtgaaaatgagccacccaacagaggttccacaaggctgcgtccagcatcatcatcatgtgcattattacctccatgttatgacacagaaacagccatcaacagaccgtggatcatcagatgttcactgtggttcgtcaaatgtgtttgatcctcctgttgaaggacatgctgcaaactacagtgtgaatgggggtgtctcagttggtcataatgggtgcaatgggcagaatggaagtagcgctgtccccaatattgcaagaccaaacatagagagtattaatggtaccatgagccaaaatattgccggaggtggcattgtaagtgggagtgggagtggcaatgacatgtatcagaatcggttcctgcaacgagaagctgcattgaacaaattcagactgaagcggaaagatcggaactttggtaaaaaggtagcctgttttcagttacatgcctgttgtagctatgacttgaaatcagtaatagttatttgagggttgaagggccttccacttaatatataaaagtaagggtagggattcaaatggtttgcacaattataatcagaaaaaagatagaagtgattattaataatctctacctttggaggatataaaaatgcttatgctacttccagctatgccttttgtctttttttagaaaaacttccagttatgacttaattgttaatattgacaataccagtgtaggaatactgaaattagtcttgaaagtaagacattagttgctgctgtttgcgtgatggcccctagcttgaggatactttgccgctactcttgcggatgctttgccgctccatgtcatctctagcggacgctctgctgtcgtgctgctggatgtttgtctcgtctcctctcaggggatgctctgccactgcagtgtcttcgtctttattggcaacctggagttgatgtgcttttccttctgcaggttcagtcggttagattttaggtggagagtccttcttactgcattttctttctctggttctttgggtcggtttaggttgctaaccacttctgtgcttttgtaatatgggcgacggggtctctcagtagctttgtcataaaacaattctacttccccttaatatagtacatgtgactctgacatgttatcgaacaaaaaaaaacattgctcgctctaaattttatgagatctggcatgatttcaaactattcttcttttcaaaatcctgttttctgactgcagtttttacaagattttatggtcttgccgcttcatttttctgactgtttgcattggaccgataccttctgatggccttgtccgcctattttcaggttcgctaccaaagcaggaagaggcttgctgagcagcggccacgggtccgaggacagtttgtgcgacaatctgagcaagaagatcaaacagcgcaaggttcagaaagatgacacgtaatttctaatacaacgtatcatcttcttcggcagatctgagaattaggcggttcttcctattgcgcatcttcgtcgacagatctgagaattaagtggtccttcccattgctgatagtagcccactgattcccaacgttagagtacacaataaataagactctagttgtcaatttctgtggttgactgcagatgatcaccctagcgctatggagtcaacaatgtaatatttatatactatgttcgtgccttggcgccttggcggtttgcaatcttcagtttcctttttgagagaaaaaaaaaaaaaaaaaaaaaaaaaaaaaaaaaaaaaaaaaaaaaaaaaaaaaactcgaggaggggcggcggtacc

SEQ ID NO: 2432 - DNA, 930 bp, Zea mays
  Clone ID: PAT_MRT4577_64777C.1
actctgcaaggcctcaatcagaatcatctaggacatcttgtgatgggagtcgcagcaacactagtcgcagaatcaatttgttgaacagaagtccttttgatcctcagatacccctgcaaagcacttttgcatccaggataacgaatttggctaccaaggtcacaaataaagttcgttctcgggtcagcacagacgattatggcatagaacgggaaggtggcagtggtgagagtcattgttcggatcgtggtgcaaaggaagaaccaacatctagcggaacaaatacacctagagggaatgcaccacatggtcccttttctacagatgagaactcccctgggaaatcaacgaacccaagcagtgatgaattagaaggaaaagtaggtctgcacaagtttttgagttcaaaggcagaggcactactgaacaagaaagggatatcatggccttggaaagtgcgcgagaatgacggacctgatgaaagaaatcatgtgatattgttgcatggagaccaagagaatgttatgaatcatcagaaggtttcagattctagcatagctccagattcccaaggcgctgaacacaacctacctagcaaaaatgaggcatcaggttcctggtcctcttacaacaataacagcacaagcagtgcaagcagcacaggaagcactaatagcagtgctctctacaaagtagatcatgaagcggattgtctggattatgagatcttatgggaagaccttgtcattggagaacaaatagggcaaggctcttgtgggacagtatatcatgctttgtggtatggttcggatgtggctgttaaagttttctccaggcaagaatattcagaagatgtgatactgtcctttcgacaagaggtgtcccttatgaaaaaactgcgccattctaacatactgcttttcatgggtg

SEQ ID NO: 2433 - DNA, 1921 bp, Zea mays
  Clone ID: PAT_MRT4577_64810C.1
ccacgcgtccggattccttttcaccccgccccgcccgcgcagtcgtcctccccaccccacccaccccaccccacccggtccccactttccactcccaaccccaccagaccttcaaccgctacatttccgtcactaccggagccgccactcccacgaacgcgggcggcggagcggaagcgaaccagttatctagtggagttgcctccttcaagctactctaatgtcctttctattcaagtctagcaatggcggcaccactgaaaaaatcccatccccagaagaacagcgagaaaaaataaatgaattacgcaaggagcttggtgaacactcatcagcagccattaaagacttcctttcagatgcctcgttagcgagatttcttcgagcaaggaactggaatgtgcagaaagctagtaaaatgatgaaagcagctgtgaagtggcggcttgcattcaaacctgaaaacatctgttgggatgatattgcagaggaagcagagactggaaagatatatagggcggattataaggacaaacatggcagaactgttcttgtattgaggcctggcttagagaacactacctcagcaataggacagatcaaatatctagtctactctctggagaaagcaattatgaacctgacggaagatcaagagaagatggtatggctgacagatttccagtgctggacattgggaagcacaccactgaaggtgacccgtgagactgtcaatgtcttgcaagactgctatcctgagaggttggggcttgcaatcctttacaaccctcctaggatatttgaatcattctggaagatagtgaagccgttcctagaccatgagacccgcaagaaggtgaagtttgtgtactccaacgacaaggagagccagaagataatggcagaagtctttgacatggaggagctcgactcggcattcgggggaaagaacccagcgacatttgagtacaacagctacgcagagcagatgcaggacgacgacaagaagatgggatcttcgcacggctcagccaatagcttgcttggatcagctgggaaggaggctaatggcgcagactcggacgcctcaagcgaggcctccttctacagtggaactgactctccgacacatgagaacggtgaacacagcatcgcgaagaagaatggttgagctgagttgaactgctttgattgctcaaactgagggagctgactaatgtagttggtcaacataacagttatatctagcttgaacgattgtcaggaccgatggcgatgacagattccaggctggttagatcaccttgtcgggtctaggcggaatgtatatttgctgctcatgatattatagtatgtaagaccataaacggtgagtttgtgatgcgctatatatcttggaataaagttcaacttcttcgttttcttaaaaaaaaaaaaaaaaaaaaaaaaaaaaaaaactcgtgccactggtgccttcccggcgtgcctgacacctggaacgagatccttgcggcccagctatagcctgtagctgaatttgaagatgccaagggttatgtcgaattgtttatgggtgaagctcgtatatacagtaactaccacggagtactacgtcgttgccggagacccaatgctgctggtagtgaaacactgagctgcagtacattctttcgggaccgtgcttaactgtagaaaatacagggccttttttttgtgtaagtacatgttgtgtttgcctactgttacctgtgtacgccagttgttaattggagaactggattgatagatagtttggaagtgttgcctgagaggtagggcaacgcatcttgcagcatccagtcctttgagaactcatctgttatgtaccaaacacgaacagagagcatcatgcattgctgatccatgtgatgtggttgttggt

SEQ ID NO: 2434 - DNA, 396 bp, Zea mays
  Clone ID: PAT_MRT4577_64914C.1
cctatagtgagtcgtattatctggacaacgggttcaagttcgacgccaccaccgcgcgggggcgtgacgtccacaggctccagggatgtctaggcgagccacgcagtcgcgacgggctccacgtgggcactgaactgcacaggtcacgtcggtatatcggtgctgctgcccgagaagccgccgcgaccgtctggagtgaaggccacgtggtgggcatggcccgtgggtgtccgcgccggtggggtgctgggaaccagcgccttgacgctctctgtaggcggcgcggtgagctggaccaggatacgggcaatggatgagatggatcagcgggccatgggcggggaggagccggggaggatgacggtgcgctggagcaggatgccatcggcgaccgtg

SEQ ID NO: 2435 - DNA, 211 bp, Zea mays
  Clone ID: PAT_MRT4577_64958C.1
gccacaccacgaagggggattttttccttaggattaacttagaacaaatcctgacaggagtaacagcatccatggatccacagtccatgctggttgatgcacgggtttgctggggccaaggatgaacacaagactaactacctgcacaaagggaccttgacactcaaaacacagatgggtgacaacaaacgtgacgtaccaagataaaccc

SEQ ID NO: 2436 - DNA, 301 bp, Zea mays
  Clone ID: PAT_MRT4577_65052C.1
ggttcgtgaggctctccgagttcggttcgtggtgacggacgagatgccgcgggggatgttgagtaccgctgcttcatcggcggactcgcctgggccacggacgaccactctctccacaacgccttcagcacctacggcgaggtcctcgagtccaagatcatcctggatcgggagacgcagatgtcccgctgcttctggttcgtcaccttctacacggaggatgctatgcggaacgccatcgagggcatgaacggcaaggagctggactgacgcatcatcaccgtcaacgaggtccagtccc

SEQ ID NO: 2437 - DNA, 315 bp, Zea mays
  Clone ID: PAT_MRT4577_65128C.1
gaactagcaacatagaaagcacacttgtgtattaacactggcagccaaaatatggcggtgccttatgctccttggtcgtgctgcaagtgttgctaccgcaaccattttcccacaatgctcacaagctcctaaagcttcccttcttcccccatacctctcaccagcggtgtcttcaatgtgtgaaaacccaattgttcaaccctacacgatccaacaggcaatcgcaacaggcatcttaccactatcacccttggtcctacaacatctcgtagccctattacagcagctaccttgggtctcatttggtggcacaaa

SEQ ID NO: 2438 - DNA, 322 bp, Zea mays
  Clone ID: PAT_MRT4577_65136C.1
ggaccttcagtaaaatattagtgttatgtgagccattaaaatatacatacatatagaccatagaagcttatcctagaccgatgaaagagaacttcttcaatgacaataaaataaactaaactcatccagactaatttttaaaaaatcaatcatcgttttttttttttttatactgacggaccgatacgactcaggaacaaactgaaagtcgatgattcacaaacatgacatagggcgcatatataggacgtaaaacagagagggacgaacgaaccatatttgtgcaagtgcaaccaaaagaagtcatcagtcgtcctttttg

SEQ ID NO: 2439 - DNA, 651 bp, Zea mays
  Clone ID: PAT_MRT4577_65217C.1
gccctctcctcgagtttttttttttttttttttttttttttttttttttttttttttttttttttttttttttttttggcagcaccaaaaaccaccattttttccttaggattaacttaaaacaaatcctgacgggggtaacagcttccatcgacccacagcccatgctggttgaggcatgggtctgctggacccgaggataaacccagcattaacaactgacacagggggaccttgcaatcaaaaacccaggggggcaacaccaaacgagacgaacgaagataacccctttggactagggaaaacatcacgggagcaaacaggataacttggccgggcgggccccaccgttaatttcctccagttcccgggggagttgccgaacccccccccacggttgccaccgccgtacccgccaccaccaccaccgtagccaccgccgccaccgtaaccgccgccgccaccgccgtaacccccgccgccatcacggggcccgccaccgccgtaaccgccgcctccacggccaccaccgtagccgccgccgccgcctccacggccgccggggaactggccctctttgacggggatgttgcggccgtccagctctttgccgttaatgccctcgagggcgttccgaatcgcctcctccgg

SEQ ID NO: 2440 - DNA, 248 bp, Zea mays
  Clone ID: PAT_MRT4577_6533C.1
gccaatgaattccctcccctatccgccgccttctccgctcgtctccctgagaggtggcgtagccgatgtactggccgagtactacgtatagaatctgtttttcttgtctcatcccggtgtctgctgcgtctggtggtggtgaaggggagaaattcttgagatctgttccggatcaggcgtgcgagctcgttaatcatgtgtttcacacatagcttcgtcgatttgaatttgatgtactaatggagtct

SEQ ID NO: 2441 - DNA, 1764 bp, Zea mays
  Clone ID: PAT_MRT4577_65496C.1
cattgggtacctcgaggccggccgggtccgctgtggtgtgactgcctgcccccttgcgcctcgcttcatcttcttgtgcaaagcccacctaccgcactcccgtcgtcctcttcttcctcctcgccctcgtcgcggagcggagtggaggcgcgcgttccgggacggcacgggacagagcagaagctcatctgggtgttggcctcatcccctgcacaagctgaggaatggggcaaaaggactccaagccttcaaatggatatggctactcttctgattacgggggtacttcatcgggatataacttgagaaatactggaagtacgtcctccagttatggcgcgaggtatgtgccttcttcagagaacaatgtacagccagaaacacatgccaggttgcagaggaagtattccaggattggtgatgactatcgttctctgagtcaggtgactgaagctttggcgcaagcaggccttgaatcttcaaatcttatcgtaggcattgattttacaaagagcaatgaatggacaggtaaaatttcatttaatcgccgctgcctacatgatattggaaacactccgaacccatatgagcaagctatatctattattggaaggacactttcagtatttgatgaagataacttgattccctgctttggatttggtgacgcatcaactcatgatcaggaggtattcagcttttacccagagaaccgcccatgcaacggatttgaagaggcactagacagatacagagaaatcgttccaactcttcgattagcaggacctacatctttcgctccgatgatcgagacagcaattggaattgttgacagcactggtggtcaatatcatgttcttctgataatcgcagatggacaggttacccgaagtgtcgatacacaatctggacaattgagtccacaggagcgggatactatagatgcaatagtaagagcaagccagttccccctgtcaattgttcttgttggggttggtgatggaccatgggacatgatgcaccagtttgatgacaatatacctgctcggtcatttgacaatttccagtttgtgaacttcacggagattatgtcaaagagcatagcagctgacagaaaggaggcagaatttgcattgtcagcgctgatggaaatccctacacaccgccgccaaagaataactccaagaattgctctgccgccaccaacaaggactgcttattcacggactactagctttagccaacagtctggtgtttattcgcgatcaagtagctttgaccaacaaacaagtgtctaccagcaacgttctgagagcttgaaacagcagcaacctgcagccccaaagggacctgacacttacgtatcagaaagtgctctggaggacagaattctgtgccccatctgcatgtataaatcgaaggaccttgcatttgggtgtggacatcagacttgctatgaatgcgggagagatttggagcgctgccctctgtgccagcaacacataaccacgaggatcaggctctactgatttgaagccaatgggattgaaaaatgttcagaaccagctttgatgctactgtgcttcatcattttgtaattctgaatgagataacactgtctcagtagtttcgctacactagttatgccaaaaggaagcgcaccagaaaataatgtacagatttttcctccttttatctcttttgttaggtaaacaagttagacagcagtaaaattctgaatgagataatggatattgtgaagca

SEQ ID NO: 2442 - DNA, 2056 bp, Zea mays
  unsure (1)..(2056): unsure at all n locations
  Clone ID: PAT_MRT4577_65499C.1
ccggccggggcggcactgcctccggcgccgggagtaattgacttgacctcacttcccctgtggggaggctttaattttcttccgatcgatcatagtatccgctgcggtgtgactgcctgcccccaccccattgcgcctgcgcctgcgcctcgcttcatccggtgcgcaccccgcctcactcccgtcgtcctcttcctcgtcctcgctctcgtcgcggagcggtgtggaggcgcgcgctccttgaaggcacggggcaagagcggaggaagatcatctgggtgttggagtcatccagaggcacaagctgaggaatggggcaaaaggactccaagccttcacatggatatggctactcttcttatgattacgggagtgcttcatcgggatacacctcgagaaacactgggaattcgtcctccagttatagcgtcaggtacgcgccttcttcggagaacagtgtacagccggagacacatgccaggttgcagaggaagtattccaagatcggtgatgactaccgttctttgagccaggtgactgaagctttggcacaggcaggccttgaatcttcaaatcttattgtaggcattgattttacaaagagcaatgaatggacaggtaaaatttccttcaatcgccgctgcctgcatgatattggaaaacactccaaacccatatgagcaagctatatctattattggaaggacactttcagcatttgatgaagataatttgattccctgcttcggatttggtgacgcgtcaactcatgatcaggaggtattcagcttttaccctgaggcccatcaatgacacagatttgaagaggcgctagacagatacagagaaatcgttccaactcttcgattagcaggacctacatcttttgcgccgatgattgagacagcaattggaattgttgacagcactggtggtcaatatcatgttcttctgataatcgccgatggacaggttacccgaagtgtcgatacacaatctggacagttgagtccacaggagcgggatactattgatgcaatagtaagagcaagccagttccccctgtcaattgttcttgtcggggttggtgatggaccatgggacatgatgcaccagtttgatgacaatatacctgctcggtcatttgacaatttccagtttgtgaatttcacggagattatgtcgaagagcatagcagctgacagaaaggaggcagaatttgcattgtcagcgctgatggaaatccctacacagtacaaagcaacaattgatctccaactcttaggccgtcgccaaagaataaccccaagaattgctctgccaccaccaacaaggaccgcgtattcgcggtccagtagctttagccaacagtctggtgtttattcgcgatcaagtagctttgaccaacaaacaagtggcgcctctcagcaacgttctgagagcttgaaacagcagaagaaacctgcagccccgaagagacctgacacttatgcttcagaaagagctttagaggacagaattctgtgccccatctgcatgtataaatccaaggaccttgcatttggatgtggacatcagacttgctacgaatgcgggagaaatttggagcgctgccctctgtgccagcagaacataaccacgaggatcaggctctactgatttgatcaggctatgaattagaaaaatgttggaacaacagactcccgggcaagatgttcagaaccagctttgtttgtaccgtgcttcattttgtaattggtgtcacttttctctgtagttatgccaaaggaaagcgcaccagaaaaaaataatgtacatatttatcttccagtagtactgtacattgcgagctgcacataaataaaggtgtttttttttaaaatatttgtgtgcgtgtgggtgtgtctgaccccatggattaaagcttcagtaataagtaagatggtcccttctatatatattgcatatatgttccagtaaaaaataaaaaaaaaagcatttcttggtattgccanatggaccccccnatggggatttaaaaagcctttcaggttaa

SEQ ID NO: 2443 - DNA, 771 bp, Zea mays
  Clone ID: PAT_MRT4577_65500C.1
tcggccgggaaaaaaaaaaaaaaaaaaaaaaaaaaaaaaaggtgacgtgcctgccccaccccattgcgcctgcgcctcgcttcatccggtgcgctgcccacctcacctcactcccgtcgtcctcttcctgctcctcgctctcgctctcgtcgcggagcggtgtggaggcgcgcgctcctggaaggcacggggcaagagcggaggaagatcatctgggtgttggagtcatccagaggcacaagctgaggaatggggcaaaaggactccaagccttcacatggatatggctactcttcttatgattacgggagtgcttcatcgggatacacctcgagaaacactgggaattcgtcctccagttatagcgtcaggtacgcgccttcttcggagaacagtgtacagccggagacacatgccaggttgcagaggaagtattctaagatcggtgatgactaccgttctttgagccaggtgactgaagctttggcacaggcaggccttgaatcttcaaatcttattgtaggcattgattttacaaagagcaatgaatggacaggtaaaatttccttcaatcgccgctgcctgcatgatattggaaacactccaaacccatatgagcaagctatatctattattggaaggacactttcagcatttgatgaagataatttgattccctgcttcggatttggtgacgcatcaactcatgatcaggaggtattcagcttttacccagagaaccgcccatgcaatggatttgaagaggcgcta

SEQ ID NO: 2444 - DNA, 2180 bp, Zea mays
  Clone ID: PAT_MRT4577_65503C.1
aaattgcagcattgcctccggcttgagcaataattgacttgacctcacttcccctgtggggaggcttttcttccgatcgatcatagtatccgctgcggtgtgattgcctgccccaccccattgcgcctgcgcctgcgcctcgcttcatccggtgcgctgcccgcctcactcccgtcgtcctcttcctcgtcctcgctctcgtcgcggagcggtgtggaggcgcgcgctccttgaaggcacggggcaagagcggaggtgagtgagtccgagccccgtggattgctggttcggtggtcggaactcgtggagtagcaagagcggcggcggttacgatatctcacgccagcagtttgtcctcatctaccacccacttcccctgatcccctccccagtacccacttctctcatatcccctcccgcatcatctctctttttttcctcctcttagcgaggacgccgaattcgcgattggcttaggcggtgtgtgcggatcaaatcgagtctggaagatcatctgggtgttggagtcatccagaggcacaagctgaggaatggggcaaaaggactccaagccttcacatggatatggctactcttcttatgattacgggagtgcttcatcgggatacacctcgagaaacactgggaattcgtcctccagttatagcgtcaggtacgcgccttcttcggagaacagtgtacagccggagacacatgccaggttgcagaggaagtattctaagatcggtgatgactaccgttctttgagccaggtgactgaagctttggcacaggcaggccttgaatcttcaaatcttattgtaggcattgattttacaaagagcaatgaatggacaggtaaaatttccttcaatcgccgctgcctgcatgatattggaaacactccaaacccatatgagcaagctatatctattattggaaggacactttcagcatttgatgaagataatttaattccctgcttcggatttggtgacgcgtcaactcatgatcaggaggtatttagcttttacccagagaaccgcccatgcaatggatttgaagaggcgctagacagatacagagaaatcgttccaactcttcgattagcaggacctacatcttttgcgccgatgattgagacagcaattggaattgttgacagcactggtggtcaatatcatgttcttctgataatagcagatggacaggttacccgaagtgtcgatacacaatctggacagttgagtccacaggagcgggctactattgatgcaatagtaagagcaagccagttccccctgtcaattgttcttgtcggggttggtgatggaccatgggacatgatgcaccagtttgatgacaatatacctgctcggtcatttgacaatttccagtttgtgaatttcacggaaattatgtcgaagagcatagcagctgacagaaaggaggcagaatttgcattgtcagcgctgatggaaatccctacacagtacaaagcaacaattgatctccaactcttaggccgtcgccaaagaataaccccaagaattgctctgccaccaccaacaaggaccgcgtattcgcggtccagtagctttagccaacagtctggtgtttattcgcgatcaagtagctttgaccaacaaacaagtggcgcctctcagcaacgttctgagagcttgaaacagcagaagaaacctgcagccacgaagagacctgacacttatgcttcagaaagagctttagaggacagaattctgtgccccatctgcatgtataaatccaaggaccttgcatttggatgtggacatcagacttgctacgaatgcgggagaaatttggagcgctgccctctgtgccagcagaacataaccacgaggatcaggctctactgatttgatcaggctatggattagaaagtgttggaacaacagactcccgggcaagatgttcagaaccagctttgttggtaccgtgcttcattttgtaattggtgtcacttttctctgtagttatgccaaaggaaagcgcaccagaaaaataatgtacatatttatcttccagtagtactgtacattgcgagctgcacatagatcaaggtgttttttttttgtgtgtgggtgtgggggtgttcaaataggggccgggtgaagggaagaaatcaaggtgtcatatat

SEQ ID NO: 2445 - DNA, 2244 bp, Zea mays
  Clone ID: PAT_MRT4577_65505C.1
attgggacctcgagccggccgggaaaaaatgatacccacctcaccagcaaacgtcttgagctcgtgctggtgatcgtgacaagcattgtcccttttaccaaatcatcgtcttctcctctcccgcgccgaagcttcctcggacaagtgcggcgtgagtaagagacccggcggacaagaaacctctccccccaccttcgttgcggaattgcatcgccttcggcttgagccaattgacttgacctcactccctcccgaagctcatctgggtgttggcctcatcccctgcacaagctgaggaatggggcaaaaggactccaagccttcaaatggatatggctactcttctgattacgggggtacttcatcgggatataacttgagaaatactggaagtacgtcctccagttatggcgcgaggtatgtgccttcttcagagaacaatgtacagccagaaacacatgccaggttgcagaggaagtattccaggattggtgatgactatcgttctctgagtcaggtgactgaagctttggcgcaagcaggccttgaatcttcaaatcttatcgtaggcattgattttacaaagagcaatgaatggacaggtaaaatttcatttaatcgccgctgcctacatgatattggaaacactccgaacccatatgagcaagctatatctattattggaaggacactttcagtatttgatgaagataacttgattccctgctttggatttggtgacgcatcaactcatgatcaggaggtattcagcttttacccagagaaccgcccatgcaacggatttgaagaggcactagacagatacagagaaatcgttccaactcttcgattagcaggacctacatctttcgctccgatgatcgagacagcaattggaattgttgacagcactggtggtcaatatcatgttcttctgataatcgcagatggacaggttacccgaagtgtcgatacacaatctggacaattgagtccacaggagcgggatactatagatgcaatagtaagagcaagccagttccccctgtcaattgttcttgttggggttggtgatggaccatgggacatgatgcaccagtttgatgacaatatacctgctcggtcatttgacaatttccagtttgtgaacttcacggagattatgtcaaagagcatagcagctgacagaaaggaggcagaatttgcattgtcagcgctgatggaaatccctacacagtacaaagcaacacttgatctccaactcttaggccgccgccaaagaataactccaagaattgctctgccgccaccaacaaggactgcttattcacggactactagctttagccaacagtctggtgtttattcgcgatcaagtagctttgaccaacaaacaagtgtctaccagcaacgttctgagagcttgaaacagcagcaacctgcagccccaaagggacctgacacttgcgcatcagaaagtgctttggaggacagaattctgtgccccatctgcatgtataaatcgaaggaccttgcatttgggtgtggacatcagacttgctatgaatgcgggagagatttggagcgctgccctctgtgccagcaacacataaccacgaggatcaggctctactgatttgaagccaatgggattgaaaaatgttcagaaccagctttgatgctactgtgcttcatcattttgtaattctgaatgagataacactgtctcagtagtttcgctacactagttatgccaaaaggaagcgcaccagaaaataatgtacagatttttcctccttttatctcttttgttaggtaaacaagttagacagcagtaaaattctgaatgagataatggatattgtgaagcaaaactatcgccatggaaaatatgcattctgtatgcaatgaccccatggattaaagcttcagtaataagtaagatggtcacatctatatcttgctgcataggcatatactaagaactagtaccagttttagtgtttggtaacattgtctcagtagtttcgctacactagttatgccaaaaggaaacgccccagataataatgtacataattttcccccctttatctcttttgttaggtaaataagttagacagcagtaaaattctgaatgagatgagataatggatattgtgaagcaaaactatggccatttttgagccatggaaaaaaaaaaaaaaaaaaaaaaatatgaaatttgaatgccatttttatcta

SEQ ID NO: 2446 - DNA, 123 bp, Zea mays
  Clone ID: PAT_MRT4577_65624C.1
aagagactgggacatcaagtgactcttatccgccgagttgcggataaagtgttgcgccaaggtgtgcaatactatcgggtacaaagtttggtctatgattgagctccccagggcaactctggt

SEQ ID NO: 2447 - DNA, 2361 bp, Zea mays
  Clone ID: PAT_MRT4577_65639C.1
ccggccgggcttgccacccttacttggcatcacttcatgacataagtgatgagccagtctgctcaatgcccttcagcttcgacttcgagcagcatgcattatctgaagaacagatgaaggatctgatctaccaagaggctcttgcattcaacccagattaccagtagccaaagttcggttccagccggtgattgcgttcattgacatggagatttttatcccacctgatgtcactgcaaaaagtcgccaactccgattgctagctgtaaataattgccttccccgaagacccccccattccttccttgattaaaaaaagcaggagacggtggccattcaagggtagaaaagagcgagcttgtgaaggtcaaatttctgcgcagctatggattcttgtgcttacaatatgttgtttttaatcaggttttcctttctttttcttcttaagtacttctcggtgttgtctgtaagagaggtagctcatgaacgatggctgcctgaattcagtggctgtcgtcaaagtgaacagttctagtcgacttaagaattcttgttttaaaaacggtgcgccccgcaacggattgggctgatgccccccaccggcaccccccacttttggctctcgcagcaacgaattgggcatattccccgcgcctgcacccccacttttggcactttcccttccggccccctctcctcggcgcgatctaaatccggtccggcgatggacggcggggggcagcccccggacacggagatgacagacgccggcgcgggcggcggggggcagccgccgcagcagccactgccgccggtgggcgggggcgtgatgttggacaacatccaggcgacgctcagccacggcggccgcttcatccagtacaacatcttcggcaacgtgttcgaggtcaccgccaagtacaagccccccgtcctccccatcggcaagggcgcctacggcatcgtctgctcggcgctcaactccgagacggcggagcaggtggccatcaagaagatcgccaacgccttcgacaacaagatcgatgccaagcgcacgctccgcgagatcaagctgctccgccacatggaccacgagaatattgttgcaataagggatatcatacctcctgcgcagagggctgcattcaatgatgtgtatattgcatatgaattgatggatactgatctgcatcaaattattcgttcaaatcaagctttgtcagaggagcactgtcagtattttctttatcaaattcttcgtggcttgaagtatatacattcagcaaatgttcttcaccgtgacttgaagcctagcaatcttcttttgaatgcaaactgtgacctcaagatatgtgattttgggcttgctcgcaccacctcagaaactgattttatgactgaatatgttgtcacaagatggtatagagcaccagagcttttgttgaactcctcagaatatactgctgccatcgatgtgtggtctgtgggctgtatatttatggaactgatggaccgcaaacccttgtttcctggaagagaccatgtccatcagctacgtcttctaatggagctcattggcacgccaaatgagggtgatcttgattttgtaaatgaaaatgcaagaagatatatccgccaacttcctcgtcaccctagacagtccttacctgaaaaatttccacatgtacaacccttagcaattgacctggtggaaaagatgctgacttttgatcctagacagagaataactgttgaaggcgcacttgcacacccttacttggcatcacttcatgacataagtgatgagccaggctgctcaatgcccttcagctttgacttcgagcagcatgcattgtctgaagaacaaatgaaggatcttatctaccaagaggctcttgcattcaaccctgattatcagtagccaaagttcaatttcagccggtgattggcttcattgacatggagattttttccccacctgatgtcagtgcaaaaagtcaccaactccgattgctagctgtaaataactgccttacctgaagatactccattcctctgattaaaagctggtgacggtgtcattaagggtagaaaagaacgagcttgtgaaggtcaaatttctgcgaagccatggatttctgtgcttacaatatgttgttttcaatcggactttccttcctttttcttgtcaaaaacgtctcgatgttgtctgtgagaggtagttcatgaacgatggctgcctgaattcagtggctgtcgtcaaagttaacagttctggtcgacttaagaattcttgttttatctacttcattgtttatataaatggacctgtatctcaaaaaaaaaaaaaaaaaatcccgg

SEQ ID NO: 2448 - DNA, 330 bp, Zea mays
  unsure (1)..(330): unsure at all n locations
  Clone ID: PAT_MRT4577_65653C.1
agcaactagcggcatcgatactgaagaagggggagctaattttgcaccacaaggctcaaggatgtcttacaactgccaatcaagctgctgctgcggctcaagctgcaagtgcggcaagaactaccctaacctgaaggagacgagcaccgccgcgcaagccaccaccatcctcagggggggcccgcaaaaaaaagcctcccccgacttattcnaggccgcagaggactccagcgaggccgcccacggctgcagctgcggaggcaactgcaagtgcgacccctgcacctgctgaacacatcgatccacaaccatggatatgacgattatcta

SEQ ID NO: 2449 - DNA, 378 bp, Zea mays
  Clone ID: PAT_MRT4577_6566C.1
acgctttcgtataactttgaacctttttcttgtgctctgtctgtgtgttttcaaagcatattaatgatgttttggttgtcgagcaacagcgtgtcatgttttttctgcggctcaagctgcaactgcggggagatgtaccctcacctgggggcgaagagcggcgggggccctcaggccagcaccgcccccatcgttctcggccgctgcccctgagacgaagaacgcgccccaattctaggcggggggcgagtctggcgaggccccccacgggtgcagctgctgtgacagctgcaagcgcagcccctgcaactgctgatcctgatgcggtgcttcgtttgcggcctgcatggatgacaccttttttgtactgcctgcttt

SEQ ID NO: 2450 - DNA, 310 bp, Zea mays
  Clone ID: PAT_MRT4577_65816C.1
ccccccttaaaaaatccccttgaggaaagcaattttttcataaaccacaaataacttgaccaaatcctttacaaatgataatcaaataagtggagtcaacaaaacaaaactttttttggaaacccaaattgccttaccccagccgattacaccattttttttaaaaaaaagaaaacaattccttccctcccccttagttaaagcgataaccataaggaaaccttctcccccactgcgtatataaaaatgcatatgcctccaaaaaaaaactgacaggccagtgtagcaaacttcatatcccacaaccccc

SEQ ID NO: 2451 - DNA, 1661 bp, Zea mays
  Clone ID: PAT_MRT4577_6582C.1
ggatcccaacacattcctccctcagtccctcttcccccccggttgcatcccttcacacccacagcccacctggtctgtcatcccctttgctacgctccccttgccctgtcccctcgccgcccgcgcccgtggagttcttcgatcgagtcctcggagcccggagcacctggtgcaacaatccggacccgcgcgaggaagggcggagagagagccgaatctgagcctcggcacaagttgggcacccgtcaagattctcggcccgatctgctgcggaacatggagctggacagcatcgagtgcatgtcctactccgacagcatgggggacgacgacaccgacgccgtcacctcgtcccagctccctcgccccttcctcaaatcctcctccaccgccggtactgccgccgtcaacgtggtcgtcgtctccgaccgcgtcggtgccgccgggccggtagcgggagcgggttcgctggtgatttcgccagccacgggcgtgcacgagctgctcgagtgccccgtctgcaccaattccatgtacccgcctatccaccagtgccaaaatggtcatactctatgttccacctgcaaaactcgggtgcacaaccgctgcccaacttgtcgacaagagctaggtgacatcaggtgtctggcattagagaaggtggctgaatcacttgagctcccctgcaaatactactctcttggatgttcagaagtcttcccatactacagcaaactcaagcatgaatcacagtgtaattttaggccatacaactgcccttatgctggttctgaatgctcagttgttggggatatttcttttcttgtggcacatctgcgagatgatcataaagtggacatgcactctggatgtacatttaatcaccgctatgtcaagtccaatccaagagaggttgaaaatgcaacttggatgctaactgtttttcattgttttgggcagtacttttgcttgcactttgaggcatttcagcttggaatggcaccagtatacatggctttcctccggtttatgggcgatgaaaatgatgctaggaactacagctatagccttgaggttggtgcaaatggcaggaagatgatatgggagggaactccccgcagcatccgggacagccaccggaaggttagggacagccatgatggtctaataattcagcgcaacatggctctcttcttctcaggtggagaaaggaaagagctgaaactgcgagtcacaggccgtatctggaaggagcagcagaatcctgactcaggagcctgcattcccaatttgttcagctgagctcagtaacaagaggatggatccaggtgtatattgatacggccgatgtgtttgtgtgagcgtgtgcctgtgctttgcgttttgtcctgccaagctgccattgcagcccgccctaaattagtcagggcgtatttactgttggcaggataatgaaaatactggcttactccttttgtgggctgtgactaagctcccatgaatctcacgataagcatttttctcgatccaatggtgtatactgtatcgttttgggctgaaggctgcagcttttttgctgttatgtttgtctcggtgtatttgtgtgtctgcaaataaagtattgaacagtaactgggtaccttgcataaggtttggttggc

SEQ ID NO: 2452 - DNA, 352 bp, Zea mays
  Clone ID: PAT_MRT4577_65893C.1
gcttcgaggaaggaaaaccctaccgctgtgggagtagcctgcagcgatggttgcggcgcgatcctgcctgatctggcgactcaggtgctcatcccggtcgcggcggccgtgggcatcgcgttcgcaggggggcattgggtgctgggctccaaggtgcggggtacccccgagcgccgatcggaccgagggcccgtgaacagcgcgcccacgcactacctcatggcggaggaggagggactcaacgaccacatcgtggccggccagtgcccccagatccagaccgccctgtctgaaggagctacactctttccttttcactgatcacaagtatgctggattattcatgggcatc

SEQ ID NO: 2453 - DNA, 362 bp, Zea mays
  Clone ID: PAT_MRT4577_65914C.1
acaattcttaaaccctacaggttccaacatgcaatcgcagcaggcatcttacctttatgacccttgttccttcaacaaccgtcaggcgtattacagaagttacctttggtgcatacgatggtacatagcatcaagggacaacatctacaacaacttgtgctaggaaaccttgctggctactgtaagcaacagtagtttattccattcaaccaactgggtgcattgaactctggtgcttatttgcaacaacaactaccatgtaagtagatagctgctgcctaccaccagccatttcttccattcaacccactggcagcattgcactctgctgcttatttacaacagcatcagctaccaccatt

SEQ ID NO: 2454 - DNA, 394 bp, Zea mays
  Clone ID: PAT_MRT4577_65929C.1
ggtgggttggcttcttctccccctccggttcgggttcgggtacgtgaggggctccggggttcggtttcatggatgagcggatcgaaatggctgcgtcagatgttgagtaccgatgcttcgccggcggcctcgcctgggccacggacgaccactcattccacaacgccttcagcacctacggcgaggtcctcgagtacaagattatcctcgatcgggagacgcagaggacccgcagcttcggcttcatcaccttcttcacggaggaagcgatgcggaacgccatcgacgacatgaacggcaaggagctggactgccgcaacatcaccgacaacgaggcccagtcccgcagcaaccgcagaggcggcggccgccgctactaccaaggccgatgagg

SEQ ID NO: 2455 - DNA, 379 bp, Zea mays
  unsure (1)..(379): unsure at all n locations
  Clone ID: PAT_MRT4577_65932C.1
gttgctccaagaagcacctttttttccttaagattaacttaaaataaagcccgacgggggtaacagcttccatcgatccgcaanccatgctgtttgatagcatgggtctgcgtgaaaccgaggatgaacacagccctttcaactgacacagagcgaccttgccatcaaaaacacagatgggcaacaacaaacaccacccgaacgaagataaaccctctggacttggggaaacatcacgggagcgaacaggataacttggccgggcgggccccaccggtcaggtcctccagttcccgccggagttgccgtatccgccgccacggttgccaccgccatagccggcggcacctccaccgtagccggcgccggctccgtagcc

SEQ ID NO: 2456 - DNA, 464 bp, Zea mays
  Clone ID: PAT_MRT4577_65936C.1
gcagcaccaagaagcaccattttttccttaagattaacttagaataaagcctgacgggggtaacagcatccatcgatccgcagtccatgctggttgatgcatgggtctgctggagccgaggatgaacacagctctatcaactgacccagagcgaccttgcaatcaaaaacacagatgggcaacaacaaacacgacaagaacgaagataaaccgtgtggactagggtaaacaacacggcagcaaacaggataacttggccgtgcgtgccccaccggtcagctcctccagttaccatcggagttgccgtagccgccggcacggttgccaccgccgtagccggcgtcgccaccaccgtagccgtcgtcccaccgtagccgtcgtcccgacgtagccgtcgtcggcatacggaggccggcaccgccgtagccgtcggcttcacgggcaccaccgtacccaccggcggc

SEQ ID NO: 2457 - DNA, 383 bp, Zea mays
  Clone ID: PAT_MRT4577_65937C.1
taactcacaataaagggtgaggggggtaacagcatccatcgatccgcagaccatgctgtttgatgcatgggtctggtgaagccgcggatgaacacagcagtaacaactgacacagagcgaccttgcgatgaaaaacacagatggggaacaacaaacacgacacgaacgaagataaaccctgtggactagggcaaacaacacggcagcgaacaggattacttggccgggcgggccccaccgctcagttcctccagttcccatcggagttgctcgagcctccgccacggttgccatccgtcgtgtcgtcgccaccaccaccggatgctgctccggcacctgaggctgacgcgccagcgtcgttgccgccggcggcatcacgggga

SEQ ID NO: 2458 - DNA, 427 bp, Zea mays
  Clone ID: PAT_MRT4577_65975C.1
agagcaactatcatcatagaaagcacattattgtaccaacactggcacccaaaatatttggcctccttatgcttcttggtctttatgcaagtcctgataccgcgaccattttcccacaatgctcacatgctcctataactacccttactaccccgtacctctcaccaacattgtattcggtatgtgaaaacccacttcttcaacactatacgatccaacaggcaatatgcactggcatcatacctttatcacccttactacttcaacactcatcacacctattacagcagttacctttgctgcatacatttgcacaaaacatcactgcacaacatctacaacaactcgtgctagcaaaccttgctgtctactctcagcaacagcaagttcttccattcaaccaactacctgcatagaactatgctgc

SEQ ID NO: 2459 - DNA, 542 bp, Zea mays
  Clone ID: PAT_MRT4577_659C.1
gacgacttgctatattgttctcgaagagatcgacttcttttgcaccacatggtccaggatgtcttgcaactgcggatcaagctgcggctgcggctcaagctgcaagtgcggcaagaagtaccctgacctgcaggagacgagcaccgccgcacaggccaccgtagttctcggcgtggccccggcgaagaaggccgcgcccgagttcgtcgaggcctgcgtcggagtccggcgaggcgcgaccacgcctgcggctgccgtagcaggtgctagtgcgacccctgcaactgctgatcacatccatcgacaaccatggatatgattattatctatctagctggaggcggcggttgaacaataataagcgatgccgagctatgctgccatacatacgtatagcttggcgtgtacagagagagagagaaacatatttctttagatcgatatctttttctctgcatgatcggagtgagaccatgggctcatgtacgtgtgtctacatacatgttggttgatccaattgcgtatcgggtaaccatatatta

SEQ ID NO: 2460 - DNA, 1945 bp, Zea mays
  Clone ID: PAT_MRT4577_66050C.1
ttgggaccctcgaggccggccctatagaatcctgctcctgctcctgcctgcgcccgtccccttttcatgttgctttccctttcctcctcctcctcttcttcctcctcacctcacctcctatttagccgtccgaattgcttgtcagcatcttcccagcttcttcttcttcttccaaccgcgctacgctctcttgtccccggtgctcgcttggattcttctctcttcataggaaggaaggattggctaccgagatattcctactagtccagggctgtagtgcatcctgcgcgcttggtttattctgcagccagtaccagtaccagtaccccagctgagccggtgaggagaggagatagagagagcgagcgggagcgggagcgggagcgggagcagaggaggagggccatggaaggcgacagcttctccggcggcgccatggccaacggcggcggcggcggcggcggcggcagcgggcaggtggtggacgggaagctgatccacacgttccacaggagcttcgtgcaggtgcagagcctgctggaccagaaccggatgctcatcagcgagatcaaccagaaccacgagtcccgcgcgcccgacaacctcacccgcaacgtcggcctcatccgcgagctcaacaacaacatccgccgcgtcgtcggcctctacgccgacctctccgcctccttcgcgcgcaccatggaccacgcgtcctccgagggcgactcctccggcaccggcaataacggccgcgccggcgccggcgccggccacaagcgcgtccgccccgcctagagctagcttttagtttttttcttcttcttcttctgctgggtctagcttggcgtggcaatcctaggtgttgccattgccactaggaggcgtatttagtcttttctcttgcggttcttcttgttcgccttcttcctttgtgctcgctagctgcgacgaacgccggtgattagtgtatggtaatttagtgtcaaacagagagctgccatgtggatgttgctcctataacaacaataaaaacgatgaagaaacaccagagaagcggcacacggtaggcagccttgctgctgcgcttagctagcaagcatcttgaatggaaactattttgcagcgtactaggacacactcatgtcatggtggagcgaatgcgttggaggcgaggctggctgctcactctattatgtcactgcagatgggtcaggtcaggtagtaggcagttcatgttcatgttcagttcggcagggcaggacagatcttgagagggcaatgtttaccatctgacactacccctcgccctttccatccacctgcctacctacctgagctccgaatcgaatctggtgaagtgcatggccactttggagacgcgcatgggtcggtcggtcgatcgatcgatcgatctccccaactctgaatctgatgattgagttgcaaaatggtgtctagtactggcagtgcaaagtgcaatgctttacagctttacaaaacctgctcctcgctcgctcgctggctcgactcctgccgtgtctttccttcctgtcctgatgagttatcatgaaaaaaagctcagcaacatggccaagctagctagtacgttgttgtaccctgaaaattttctagtagctttttttctcccctctttctgttcctgctactaaactgaacagtatggtttggatgagggcaggctctccttttctttctgaatgccaaaacggtgaaagaaagaaagaaagaaaagcagggtctgtctgtctagtggccgtctatctgcgagatgcatgctgctgggcagcatcagcattcagcaggagcaggacgggagaaagcttcgatgattttttttttctggttggttggttgccaatcatggcgtgccacaccatggcatggccagaatcttactcctagaaaaaaaaaaaaaaaagcggcc

SEQ ID NO: 2461 - DNA, 726 bp, Zea mays
  Clone ID: PAT_MRT4577_66051C.1
ctctcgtccccgttgctcggttggattcttcttctctcttcataggaaggaaggattggctaccgagatattcctactagggctgtagtgcagccagtaccagtaccagtaccagtaccccagcagccggtgaggagaggagacagagagagcgagcggaggagagccatggaaggcgacagcttctccggcggcgccatggcgaacggcggcggcggcgggcaggtggtggacgggaagctgatccacacgttccacaggagcttcgtgcaggtgcagagcctgctggaccagaaccggatgctcatcagcgagatcaaccagaaccacgagtcccgcgcgcccgacaacctcacccgcaacgtcggcctcatccgcgagctcaacaacaacatccgccgcgtcgtcggcctctacgccgacctctccgcctccttcgcgcgcaccatggaccacgcgtcctccgagggcgactcctccggcaccggcaccggccgcgccggcgccggcgccggccacaagcgcgtccgccccgcctagctagcttttagtttttttttgtcttcttctgctgggtctagcttggtgtggcaatcctaggtgttgccattgccactaggaggcgtatttagtctttttctcttgcggttcttcttgttcgccttcttcctttgtgctcgctagctgcgacgaacgccggtgattagtgtatggtaatttagtgac

SEQ ID NO: 2462 - DNA, 322 bp, Zea mays
  Clone ID: PAT_MRT4577_66070C.1
cggacgcatgggcggacgcgtgggcggacgcgtgggtgagaccaactagcaacatagaaggcacagtactgtacgaacaatgggagacaaaatattatgcctccttatgctcccagggctttctggatgcgctggtacggcgaccatattccctaaatgctcgcaagctcctatagcttccattcttacctcgtacactctcaccagcagcgtcttccgcatgcgaaaacccaatttttcaaccctacaggatccaacaggcaatcacagctggcatattacctttatcacgcttgttcctcccacaatcatcagccctatt

SEQ ID NO: 2463 - DNA, 981 bp, Zea mays
  Clone ID: PAT_MRT4577_66146C.1
ttgggaccctcgaggccgggcccgggaccaaggaaattcacaaagagatactagtccctaccaaagcatacttcctgaaacactcttgcaatccactgagtcctgtttgttgagacttgagacgcatagagctagcgtcgacaatgtcgctcgtgaggcgcagcaacgtgttcgaccccttctccatggacctctgggaccccttcgacaccatgttccgctccatcgtcccgtcggcggtctccaccaactccgagaccgccgccttcgccagcgcccgcatcgactggaaggagacgcccgaggcgcacgtgttcaaggccgacctccccggcgtcaagaaggaggaggtcaaggtcgaggtcgaggacggcaacgtgctggtcatcagcggccagcgcagcagggagaaggaggacaaggacgacaagtggcaccgcgtcgagcgcagcagcggccagttcgtcaggcgcttccgtctgccggagaacgccaaggtggaccaggtcaaggctggcctcgagaatggcgtgctcacggtcaccgtgcccaaggcggaggagaagaagcctgaggtgaaggctattgagatctctggttgagcatccaatccaatatggacgtggacggaaggtgtactgctgctggtctgtggctgtcgttgtcctgtgtggatgtttcctgtgtcttctactatatatataatgtacttctgtctgtttcgtttcgtatgtacaatcttccgggtatcgttcatgtatccctttgaataataacaaataaaatcgggtttgtcacggtaatctgaataaaaaaaaaaaaaaaaaaaaaaaaaaaaaaaagaaagttggtcatataatacatacataattgtatgtataactataagaaaaaggaagtgaaattggataagataagaaagattttgggttatacatatagaaaagcaaaagtagaaaaaaaaaaaaaaaaaggccccta

SEQ ID NO: 2464 - DNA, 821 bp, Zea mays
  Clone ID: PAT_MRT4577_66149C.1
ctgtgcggcgctcgaggcggccgtttcgggacaaggaattcacaagcgcctagcaaaagcatacttcccgaagcactcttgcaatccactgagttctgtttgttgagacgcatagagctagctgctagcgtcgacaatgtcgctcgtgaggcgcagcaacgtgttcgaccccttctcgatggacctctgggatcccttcgacaccatgttccgctccatcgtcccgtcggcgacctccaccaactccgagactgccgccttcgccagcgcccgcatcgactggaaggagacgcccgaggcgcacgtcttcaaggccgacctccccggcgtcaagaaggaggaggtcaaggttgaggtcgaagacggcaacgtgctggtcatcagcggccagcgcagcagggagaaggaggacaaggacgacaagtggcaccgcgtcgagcgcagcagtggccagttcatcaggcgcttccgcctgccggagaacgccaaggtggatcaggtcaaggctggcctcgagaacggcgtgctcacggtcaccgtgcctaaggcggaagagaagaagcctgaggtgaaggctattgagatctctggttgagcatccaatccaatatggacgtggatggaaggtgtactgctgctggtccgtggctgtcgctgtcctgtgtggatgtttcctgtatcttctacagtatataatgtacttccgtctgtttcgttttgtatgtacaatctcaatcttgcgggtatcgttcatgtatccctttgaataataacaaataaaatcgggtttgtcacggtaaaaaaaaaaaaaaaggccccta

SEQ ID NO: 2465 - DNA, 841 bp, Zea mays
  Clone ID: PAT_MRT4577_66150C.1
gccggccgggtgcacataaggtgacctatagaaggccgtccggtccgggaccaaggaaattcacaaagcgcctagcaaaagcatacttcccgaagcactcttgcaatccactgagttctgtttgttgagacgcatagagctagctgctagcgtcgacaatgtcgctcgtgaggcgcagcaacgtgttcgaccccttctcgatggacctctgggaccccttcgacaccatgttccgctccatcgtcccgtcggcgacctccaccaactctgagactgccgccttcgccagcgcccgcatcgactggaaggagacgcccgaggcgcatgtgttcaaggccgacctccccggcgtcaagaaggaggaggtcaaggtcgaggtcgaagacggcaacgtgctggtcatcagcggccagcgcagcagggagaaggaggacaaggacgacaagtggcaccgcgtcgagcgcagcagtggccagttcgtcaggcgcttccgcctgccggagaacgccaaggtggatcaggtgaaggctggccttgagaatggcgtgctcacggtcaccgtgcccaaggcggaggagaagaagcctgaggtgaaggctattgagatatctggttgagcatccaatccaatatggacgtggaaggaaggtgtactgctgctgctggtccgtggctgtcgctgtcttgtgggatgtttcctgtgtcttctacgatatataacgtacttctgtttgtttcgtttcgtatgtacaatcttccgggtattgttcatgtatccctttgaataataacaaataaaatcgagttttcacggtaaaaaaaaaaaaaaaaaaggccccta

SEQ ID NO: 2466 - DNA, 480 bp, Zea mays
  Clone ID: PAT_MRT4577_66168C.1
gggggtatagggccatacatttataaaaaaggcacccaagcccaaaggacgggggaggtttttcgagggctttagttttgacaaccttgggggagctatatttccctggattagattacatgcatacatacatatatacccccacgacagaaaaaccaaccaggggaattcctccctgatttctggggcattggggcataaacataaacaggtgggggcgaaaaactatgcaatgggtcccagcaggggaacgagcaaattttttgactggtttccgaattttgaccagtatacacattcagatgcgaagcctaacaaaaatgggcgggtaaagacctgggctggcaaaaaagctaggcttttattttgactggggaccattcgggggactggggacaaagatcctccgaagcaaatatccatagcaaaggggaggtgggggctttaacttggagggggatttaaggggggcattcccct

SEQ ID NO: 2467 - DNA, 407 bp, Zea mays
  Clone ID: PAT_MRT4577_66422C.1
tggtggaggacggtaacgagaccaccaatacaacacgccgggtggcacacaggttcgcatgtgacgccctcaccgtggaattcttccgctcacgagcatctctgcgcaggagcgccctgcccataggcatgcccccaagagggtcaaatccacattgaggcttgacaggacaggataatcccagacggaaatggctgaattcacgacgtactgattttgaacactgggcattggcggacacccaccaaatcgtttgatacgggtcgctattttcaggctgcacgtcatcttaaattaggtacatgcatagatgctggtttcagaatggcactggagacctgggcctcaagggtacaaaaaaaggtggatttaaaccgcacacatgtattgtttcacacatatgagcc

SEQ ID NO: 2468 - DNA, 226 bp, Zea mays
  Clone ID: PAT_MRT4577_66479C.1
cagagcacattaatttctttatttggtttttattttggcaaaaaattttagatgcattatttcttcaccccgcttcccgcgaggtcaccggctttttagagaaaaaccctggtaaaaacaattacaacacgcgcccactccacttttgaaaaacataacaatatgaaaaaagggagagagaaaagaaactccctaaaaagacggtgtcccaaccataccattaaat

SEQ ID NO: 2469 - DNA, 4078 bp, Zea mays
  Clone ID: PAT_MRT4577_66490C.1
cgtagcactgccctcttcctctctgtcctctcccctgctgccgccccctttcccaaatctggccgcacgacgcaccagccaccaaccgcacacaccccaaacttgaaggcacaacccgagcgctcgcccgcctcgcctctgcgccgcgtccggccgccggtagcgggccggtcacttaccgggagggagaggtgctttggttcctggatgagctgtgaaggaactgggagcaagaagaattgatgtttactccgcagggcaaaggatggaccggctggtcgacgccaactccggccaaccagcggagcggtggtggggctcctgctgcgtcggcgccccttggaaagggcaaaggaagggtcgccgagctcgagcaggagttgcatgaatatcagtacaatatggggcttcttttgattgaaaagaaagaatgggcagcaaaatttgaagaaatcagtgaagtgctgacacagaaagaggagatactgaagagggagcaggcggcacatctgaatgctatatcagagtatgaaaggcgggaggagaacatgcggaaagcactaggtgttgagaagcaatgtgtcgctgatcttgaaaaagccttgcgtgatatacgagcagagatagctgaggttaaatttacatctgagaaaaagataacagatgctcagtctcttgaggctagtttggaggaaaaatccttggagatcgagggaaaacttcatgctgcagatgccaaacttgcagaggcaaaccgcaagaagtctcaagctgaccgtgatttagaagaggcggaagctcgtcaacgtagactggagaaggagaaactgtattttgagacagagcggaaggcccgagaaaagcaacttaaggagcaggaggaatcactgcaggaatgggagaaaaagctgaaggaaagtcagaatagacttaatgagttgcagagatctataaatgagcgagaggagagagcaaataagaatgatcaacttttcaagataaaacaggacgaactggaggaggcacgaaggacagtggaggccgctaaagttactctgaaagtcaaagaggatgatattaacaaaagactaaatgaattacatttacaggaaaaggatgctgactcaaagcgcagtgcattggaagagcaggggaaaaaattggatgagagagaggcaaaggtcactaatagagaaaaggaggggctccagaagcttcttgaggatcatcaggtggagcttgaatccaaaagacgggattttgaattagaattagagagggaaaggaaatcttttgatcaaaatatgacacagaagcaagcggatttattgaaaagggagaaagatgttaaatctttggaggctaaactttctaaaagtgagcaggcattgaatgataagaagaaatcaatggaaaacttgcagaatgatcttgatgccaaatctaaggctctgaagagttgggatgaatcattgaaaaatgacgagaaaaggttactgaaagaaaagcagcaaatggatcatgaaagagaacaattggagacatacaaattggagcttgaaaagatcaaatcagcattagaagctgagaaggaaaaaatatcagaagagcagaataatctgaaactcacagcgcaagagaggcaggagcatagcttgttgatagcaaaacttaagaaggagattgaggaatacagaatgcgaagcaactccctatctgaggaaatggaggatttaaggaagcaacggcagaaatttgaagaagagtgggaacaactagacgaaaagagagccctccttgtagaggaggacaaaaggttgaacattgagaggatgaatttagaacggtggcgtgacaacgaagaaaaaaggttaaatgatatgaaactcaaaatggatgaagaatacaagcagcagctggagagtcttgagcgcaaggaaaaggctttgagtgatgatatgaagcacaagcaaatggaaaatgatgaatttctgaagggagaacgtgctgatgttcaacgtaaattgcaactcaaacggcatgaattggagatggagatggagcaaaaacaagccacgaaggagaaggaactggaagaaaaggaaaatgagttaaataagaaaatagattttgtggaaaataaactccgacatgcaattgagttgaatgagtccaagattgagaagttattattggagaaaagggaggtgcagatggaaagagaattactgctggaggaaagaaagaaaacggagactgacaaggcagatattagaagggatattgagagtctgcactcattgagcaagagtttgaaggaacgtcgagaggcatataacagggacaggagcagactcatcgaactatttgaaaagtacaaggcgtgcaaaaactgtgggatttctatttttgagggattggattctctgctgcttaaagacagtgctgaaattgagcatccaagtttggctgttgagggagatgatcatgccttgaccaccgatacatcaggtccagatacaggaacccttgttaattcaggtggtcgtttttctttgttacagaagtgttcaaggcttttcaagttctcccctagaaaaaagggtgagcagtcatcagaacaaccatcagagaggaatatatcttttggtgcaagactcgaggaagcaacacagagcgatggagattatgtgccaactcctgtctatgagatagcccacgattctttcaatgcagaggatgagctcccttctgacggtgaaaccagggagaatgaagagtctgaaaggcatgacatagctgataatgcccagatggagtcttctgttggtgtagcagataacagtatagatattctcggtactaagtcatttgatggtgctaacgacatggcagttgaagcaactattgtctctgttgatcaaaatggcgaggactctgtagttcctgctgaagcaggtgtagagccctgaaacatcagagcaaggtcggcgccagcaaaaccagagaggggggaagaaaaggtggtatgaaaaagaacacggtctgttaatgctgtagttgaagatgctaagatgatacttggcgaggtttttgaggagaagactgatgatcagggagatacagtcaaggtgggtgctacacgaaagcggcggtttgctggagctacaataagtgaacaagatgaagaagggagcgaagcacattcagaaagtgtttcacttggagggcagcgccgtaagaggcggcaaactgctggggcagtgacagatgccccaggagaaagacgttacaatttgagacacagtagagctgcaaatgctggcgctgcaacagcccaagcagacaaaaaaaaatcttcaaaagcaagaaataaacatacagtagaagcttctgctgatgacaccgaaggaacatcaaaggttgttgaggaacctgcccctgagagcaagagggtatctgaatctgcagactacgatgcatcccagttgcatgagttttcccaggttgaagttggtgatgcccatgctgtagacggtgagggtgctggtgaggaagatggtgatattttggatggccaagatgcactgcctgatgtgccaatgacaccttctggaagcgagtttggagcggaacaggaagatgaggacgatgatgattcagagaggcgaaaccaatcaatcagcaagaagctatggtcattcttcactacatgacttgctgaagaggtcgtcatgtaggttatttctagcttttgtggtttcgattcatgataccccattcttggaactgtaggtcgtgtgcttttggtgattatgtactagatctcccacttgattgtgcttctctcccgtgtaattgaaatatatttgtagtggacatagtttgatggcactcacagaagtagctgatgagatgtacaatggcgatgatggtatgccctgtaaggctgtaacaccagtagcttggtttgtaattgttcttttcccccggttcgtgttacttcgttgaccttattccggggaaatattttagtgctgtgatgatggtctaaaaaaaaaaaaaaaaaaggccccta

SEQ ID NO: 2470 - DNA, 1809 bp, Zea mays
  Clone ID: PAT_MRT4577_66518C.1
ctcgcgtccgggccgggggacctgccaaacctccctcacactttgtcagtttgccgtcgctgtcggcgccgccgcctgtcctaatctcctctgagtccagcggccacctcctccaccgggagctccccgtaccataaccgcagtccgcagccattggaatttccgcttcatgcgtggatcctcgtagaccccgacccgcgtgcactcaatccctaggcggcggcctccggcgcgaggctagcgggcggcacccatggcgtccgtggcggagctcaaggagaagcacgccgcagctacggcgtcggtgaactccctgcgcgagcgcctccgccagcgccgggagacgctcctcgacaccgacgtggcgaggtactccaagtcgcaggggagggtgccggtgagcttcaaccctacggatctggtctgctgccgcacgctgcagggccatagcggaaaggtatattctctggattggacccctgaaaagaattggatagtcagtgcctctcaagatggaaggttaattgtgtggaatgcattgacaagccagaaaacacatgccataaagctgcattgcccatgggttatggcgtgtgcttttgcacccaatggccaatctgtcgcctgtggtggtcttgatagtgcgtgctctattttcaatctcaattctcaagcagacagagatgggaacatgccagtatcaagaattcttactggacacaagggctatgtctcatcatgtcaatatgtcccagatcaggaaacacgtcttattactagttcaggtgatcaaacatgtgttctttgggatgttactactggacagaggatatcaatatttggtggtgaattcccatcagggcatacagctgatgttcaaagtgtgtccatcaactcatcaaatacaaatatgtttgtctctggctcatgtgatacaactgtgaggctgtgggatatcagaattgcaagtcgagctgttcgaacctaccatggacatgaggatgatgttaacagtgtgaagtttttccctgatggccataggtttggtactggctcagatgatggcacatgtagattatttgatatgagaacagggcatcaacttcaggtgtacagtagggagcctgatagaaatagtaatgaactacctactgttacatctattgcattttcaatatcaggaaggctactttttgctggttactccaatggtgactgttatgtgtgggacacacttctcgccgaggtggtacttaatttgggaaacctgcaaaactcccatgatggccgtataagttgcctcgggatgtcatctgatgggagtgcattgtgtacaggaagctgggacaaaaatttgaagatttgggccttcagtggacaccggaagatagtttgaaggccaacttttctcccccatgttgtatgttccttgttgccccttaacaacggacagtggtgattggtgaccaactcgacttgttcctgggaatccctttgttgttttgtaagctctgttcgcgctatgtttaatggaaaaatgtgcaatttgtcagtgtcacggcgctacatcttgttgagttggtaactgtttatactgttattacgagaatatcagtaacgtgtgatctgcccttttctttgtacaaccgtttgatcttttcaggttttgtgaagtagcatgtatttccttaatcaatttatcatatcagtttgtccatttgctgaattaagaacaactggttcgaagacaatggaaaaaagcaaaaaaaaaaaaaaaaaaaaaaaaaaaaaaaaaaaaaaaaaaaaaaa

SEQ ID NO: 2471 - DNA, 1945 bp, Zea mays
  Clone ID: PAT_MRT4577_66519C.1
gacaaattgcacatttttccattaaacatagcgcgaacagagcttacaaaacaacaaagggattcccaggaacaagtcgagttggtcaccaatcaccactgtccgttgttaaggggcaacaaggaacatacaacatgggggagaaaagttggccttcaaactatcttccggtgtccactgaaggcccaaatcttcaaatttttgtcccagcttcctgtacacaatgcactcccatcagatgacatcccgaggcaacttatacggccatcatgggagttttgcaggtttcccaaattaagtaccacctcggcgagaagtgtgtcccacacataacagtcaccattggagtaaccagcaaaaagtagccttcctgatattgaaaatgcaatagatgtaacagtaggtagttcattactatttctatcaggctccctactgtacacctgaagttgatgccctgttctcatatcaaataatctacatgtgccatcatctgagccagtaccaaacctatggccatcagggaaaaacttcacactgttaacatcatcctcatgtccatggtaggttcgaacagctcgacttgcaattctgatatcccacagcctcacagttgtatcacatgagccagagacaaacatatttgtatttgatgagttgatggacacactttgaacatcagctgtatgccctgatgggaattcaccaccaaatattgatatcctctgtccagtagtaacatcccaaagaacacatgtttgatcacctgaactagtaataagacgtgtttcctgatctgggacatattgacatgatgagacatagcccttgtgtccagtaagaattcttgatactggcatgttcccatctctgtctgcttgagaattgagattgaaaatagagcacgcactatcaagaccaccacaggcgacagattggccattgggtgcaaaagcacacgccataacccatgggcaatgcagctttatggcatgtgttttctggcttgtcaatgcattccacacaattaaccttccatcttgagaggcactgactatccaattcttttcaggggtccaatccagagaatatacacagatagctgaagtgctgaatttccaagaatcaccgcaaaatccaaatatatgcaattatgcatcttcgaacaggtggaagtccatgtctccaaaagttttcataactttagcaacatgatgaggtgttctgctctagttaaatggccctcacaaaaaaatactctagttaaatggcaataaatctggaagatcctaatttttagcagcagggaggaggcttgcctcggtttatcccttccccaggccccttttatcaaagctagggcaaaagaaggctctagctaccaattatcgaataatatttcagtgacagatccatgcagcgctaagtatctctgcaacagaatgtacatgcagataatcctgtcccacagctcaaacatcaacctcgcaacggtatcattttcttcttcattactctggcagtctttccgctatggccctgcagcgtgcggcagcagaccagatccgtagggttgaagctcaccggcaccctcccctgcgacttggagtacctcgccacgtcggtgtcgaggagcgtctcccggcgctggcggaggcgctcgcgcagggagttcaccgacgccgtagctgcggcgtgcttctccttgagctccgccacggacgccatgggtgccgcccgctagcctcgcgccggaggccgccgcctagggattgagtgcacgcgggtcggggtctacgaggatccacgcatgaagcggaaattccaatggctgcggactgcggttatggtacggggagctcccggtggaggaggtggccgctggactcagaggagattaggacaggcggcggcgccgacagcgacggcaaactgacaaagtgtg

SEQ ID NO: 2472 - DNA, 515 bp, Zea mays
  Clone ID: PAT_MRT4577_665C.1
atgtagcatcaaatcatatcatcgaggaccaattaatatatggttacaggagctgcaatcgggtcaaccaacatgcaggtagtacacacgtacgtacatgagcacaaagactgacgccaaacatgcagtagagagatagcaaacgtgaagaactctgtttctctctgtcttacacacaccacacaatacctatgtatggcagccagctcggcctcgcttattattggtcaaccaccaccacaagctagatagataataatcatatccatggtcgtcgatcgatgtgatcagcagttgcaggggtcgcacttgcagttgccaccgtatctgcagccgtgggcggcctcgccggactccgccgcggcctcgacgaactcgggcgcggacttcttctacggggccactccgaggaccacggtggcctgcgcggaggtgctcgtattctccatgtcagggtacttcttgccgcacttgcagcttgagccgcagccgcagcttgatccgcagttgcaagc

SEQ ID NO: 2473 - DNA, 2537 bp, Zea mays
  Clone ID: PAT_MRT4577_6674C.1
gcacgagcctgactccaatcccattgctgctggaaagcacgaaggagcgatggtaaaagaggatgaaggccatggcgacagagtggccgccgacgctcctttccgtgtagtttaggactgcagattccttcgcgctcctcctgctcccagcgaggaaaagagagcacgaactaaactaggaaccatccctccccggcattcattcccttgccctttttttcaccgaattgtagcggttgttgctttcctgttcaggtgccttgttcttggcctccttcgcacgcaaagaaccgccggtcgtattgctctccgcactcacccaccgcgctgctgctgctcgactgctcgtggaagggttcttattggccgcctgtgcctgctttgcggtttcttgctctgcttttgagtggagccgctgtggagtggacggtgtggtgtggtgtgggtcggcggtgaggtgaaaggcttggtttctttctttcttgcgagggaggataagggaaagggaaggcgaagaggaggatggccggaggaggggcggcgccgccgccgaagcaggaggagctgcagccgcacccggtgaaggaccagcttcccagcgtgtcctactgcatcacaagcccaccgccctggcctgaggctgtcatccttggattccagcactacattgtgatgctgggcacatccgtcatcataccaagtgctcttgttccccagatgggaggaggaaacgaggagaaggccagggtgattcagacgctgctgttcgttgccggcatcaacaccctatgccagtcattctttgggactcgcctcccagcggtgatgggtggatcctacaccatcgtcgcacccaccatttccatcatcatggccggccgttacagcaacgaagcagaccctcgtgagaaattcttgcggaccatgcgaggaacacaaggcgctctcatcatcgcgtcgacaattcagatcgtgcttggtttcagtggcctttggcgcaatgtcgttaaattgctgagcccattgtctgctgtacctttggtttcgctagctggatttgggctatatgagctaggttttccaggggttgctaagtgtgtggaaattgggcttccggaaatcatcctaatgctcatattttctcagtacttacctcatgctgtccatgcggcaaagcctgtgttcgaccggttttctgtgattttcacaattgcgattgtatggctgtatgcgtacattctcacggttagcggtgcctacaagagtgcccgaacaaagacacaactccattgccgtgttgaccgctctgggcttgttggtggagctccttggattagtgtcccatatcctttccaatggggggccccaacatttgatgctggtgaatcatttgcaatgatggtggccgcatttgttgctcttgttgagtcatctggggccttcattgctgtgtcaagatatgcaagtgcgactatgatacctccttcagttcttggtcgtggcattggttggcagggcatcggtactttactgggtgcgttttttgggacagctaatggaactgcagtgtcagttgagaatgctggtctgcttgctttgacacatgttggcagccggagagtagtccagatatctgcaggcttcatgatcttcttctctgtccttgggaaattcggggcgatctttgcttcaatcccactgccgatattcgctgccctgtattgcattctctttgcatacattggtgcttgtggcctgagcttccttcagttctgcaacctgaacagcttcaggaccaagttcatcatggggttctccttgttcatgggcctgtcagtaccccaatacttcaacgagtacacgtccgtggctggctatggccccgtgcacaccggcgcccgatggttcaacgacatgatcaacgtgcccttctcgtcgaagccgttcgtggctgtgctggtggccttcttactggacaacacgatccaggtgcgtgacagcggcgtgaggagggacaggggctaccactggtgggacaagttccggagcttcaagacggacagccgcagcgaggagttctactcgctgcccttcaacctcaacaagtttttcccttccgtctgatcctgcagggtctgcacactcttcctcgcagccgcagtagccctgactggagtcaggcaagaaatgatcctatgcagatgatgctggagcatggactgatggcgttttgtacattcaggggtgaactgaactgtgcaggttgcaggggatagtgctctgggtagcatcagtattccctagtaaccgaaattgaaaaggccgcctgttaaacttctgcaaacactagcatgattacgtctcctagtgctactgttgtttagattggaaaacatggaactcaaccgtaagcatagatttaccttgaagcaacccttttcttttgcttagaaagaatttgtgttggggatttttttttcaccatgtaagaactgagagcacttagattacaagggagggtgaataggtgatcctgc

SEQ ID NO: 2474 - DNA, 669 bp, Zea mays
  Clone ID: PAT_MRT4577_6675C.1
ttgttcccccccccccccccccccccccccctccccccccccctcttctttttttttttttttctctttttttttaaaggaaaaaaaactggcccagttaaaacaaacaaatcacgatgggatttaccataggataaactggacccccggccaaacatttttatcgggcaacccgggggggctacagctaagggaacaagtttctttttgtttacaagcaacgcttccatgttccatttaccctagggaagcctcgtcagtttttccacccttttggacagttcctccagggggacccccatcgccttggacccctcctccattttgctccggttaagggcaaggaaaaactctatcaggcccccggggaggaagttcccaccctcccccgtttttttgtcgttatggaaggacccccattgctcggggctcaggtttcccaccccctttatgtacttcacaaggggcgacgggagcttttccaaaaaaattttttggccgggcgggagggaggcaataatgccaatccccccgtttattgggccaaaaatgaccggggggatctgccctatttccgagtctggaaggcgcatcaccagggaaccgggggggaatttgttcacaaaccccccaagggggtactttcccaccacctaaagccgggccctt

SEQ ID NO: 2475 - DNA, 285 bp, Zea mays
  Clone ID: PAT_MRT4577_66C.1
agcgctcgcccgctcagtcacaaatcctcaggtctcagtcgccttcatcgccgcttcgttcgtgtggaggggagaagacaggaaatggcggcgactgagggcgtgctcttggggatgggcaacacccctcctcgacatctccgccgtcgtcggtgacgccttcctgacaaagtatgacatcaagctgaacaatgctattctcgctgaggaggagcacttgcctatgtatgacgagttggctagctagagcaatgttgaatatattgccggaggagccgcccagaa

SEQ ID NO: 2476 - DNA, 486 bp, Zea mays
  Clone ID: PAT_MRT4577_67053C.1
ccggcaggcgtccggccgggcacaacgtggtgctggttatccaggttatcatcccgtcgactcccgataagcgggggaagtaggcgatgtttaagggcgttctcctcccctacatcgtcgtcgcgctctgctacttccccgttgcgctcatcggctactgggcgttctgaaacagcgttcaggacaacattctcatcacgctcagtaagcccagttggctcatcgcgctcgccaacatgatggtcgttatccacgtcattggcagctaccagatctacgccatgccagtgattgacatgatagacactgtgctggtgaagaagctgcgctttccttccggtctgacacttgtctttcatcgctgggaccgcctatgttgcgttcacaatgtttcatatgttttcatccttccccttcttctgtgggactgctcggctttcttcggcggattcgtctttgccccgaccgaccttattccttccctgc

SEQ ID NO: 2477 - DNA, 345 bp, Zea mays
  Clone ID: PAT_MRT4577_67111C.1
agaaatgtactttcttatttctgggaagccacaaacatcagacaaaaaactttattattgaactataactcataagaaatctaaaagagggccccaccaatgatgggttgttggtagaacgctgatgggtttgtcaaagcaagtaggttgaatggcacaaattgtcgcacttataagagggtgccaacgttaggcccaccgcgctgctacaacggcaccaaccgtggttgcatcacgaaggtaccagggctcacaccagctagctggatgaatggtagcacttgtcgctgctgtaaaataacacgacagtacattgctgccagtccggtcaatggaacaaatcgc

SEQ ID NO: 2478 - DNA, 142 bp, Zea mays
  unsure (1)..(142): unsure at all n locations
  Clone ID: PAT_MRT4577_67166C.1
cggtccgnatccccggtctgttaatccaatanaaaaagacatgagaatacatgtccaatgcaatctaaaaggaaacatggcagaagagattgtcaaacatgcctatgcacaaagctgaactgctgatttgattagctcaata

SEQ ID NO: 2479 - DNA, 418 bp, Zea mays
  Clone ID: PAT_MRT4577_67392C.1
gggagcaccaagaagcaccattttttccttgagggttaacttaaaacaaatcctggcggggggaacagcatccatggggccacaggccatgctgggtgaggcatgggtctgcgggggccgggggtgaacacaggactaacaacgggcacagagggaccttgcaatcaaaaacacaggggggcaacaacaaacggggcgaacgaagataaaccctttggactaggggaaacatcacgggggcgaacaggataacttgggcgggcgggccccaccggtaagtttctccagttcccggcggagttgccgtaaccccccccacgggtgccaccgccgtagccgccaccaccaccaccggaggcaccggcggcaccggaggcggcggcggcaccggcgtagcccccgccggcattaaggggcc

SEQ ID NO: 2480 - DNA, 3299 bp, Zea mays
  Clone ID: PAT_MRT4577_6745C.1
gataaaatttttaaatcctttaacaaaatactgttaaagtttaaaaaagtttatattaaatagtaaagttaacactattgatctcaataatattctcggttagatttgccacgaacggagaaggcctagagcctaggtccgccacatgctcagcagctagaacgcgccaatgctcagctaagcctcgatcatgctgacggacaacagaatcgcgctggcctcgatggctcgatccaatagtggagccatggcccatgggcctctgatgatgccagcaacacacgcacccaagtttcaagcctagccttgagtatgaatagatggccaataagcacgaggctagtgagcccggcacgaagcctgctttttaggtccggtccgagcccggcacggtacgaataagcgggcgggcttggacaggaaactaggcacggcgggctaaatcggtccggcctaagcccgttaagcccgttttttacactaaaacgtgtttacctgcccgtttagcccgcttttcggctcgattttttcgtgctaaacgggccggcccggcctgtttaggcccgctgtgggccggacttggacagaaaattaagcccacgggctcagcaggcctgacccggtttttagccaggcttcaccgggcccgagccgggcggcccgtttggccatctctaatgatagttgataccgggtctactacatgagcctccgttgttgaagatagatactatcgttacgctcttctggattatcaagatttccagatttaaatggaatataagcggccgcatgtcataactgttcatcacattttttcccccaaacggtgagacactgtattgtatttgagtgcttttcatgagaatttctatcatcttgatgtctaatattgaagatctattttttcatcctccttacgtttttttacgttcaaaattatgctctcgtattttatataacttatatttatacgaattaaaaaagcccatgtttagcgactatcggtacgagatcttttatatttcaatatatattgtgttgcatccttttcatatgtaattgggactcatgaatcatgcgtatacaagttaaaaaaactcgcgtttagcaatgatgcagagtctgatttaagtacttatgagttgcaactcacacgaacatggttgctagtatatgcctatataccacatgctgctgcgtctcccgtaggccgtgaatctgatcagtaggacttgaacgggcggtagactttgaggtcggacgcgatgccggcgatggacccggctgcggcggcgatggagatgacgaggcagccgaggctgagcatctgcaggcacacccaccgggagctccaccgcggcaccttcttctgcaccacgtacatctcgacggggaagtagacggtgagcggccagaagccgagcgcgcccaggaagcccaccacgtcgttgaagaagggcagcagcatggacacgaccgtcgtggccacgacgaacgccgtccgccacgtcgcccggaacaggttcaccttgcagcaccgccgccggctcgccgggagcgggagcgggacctcgacctccccggtgatgtacgccgagtccggccaccgctgcgcggcccacttctccacgaaggcgaacagcggctggcagtagacctggtaggcgccgaccaggtggaccacgatggcggcgttggccacgtccaggagccagaagggctcgtagaagccgaagcccgtgaggaggttcccgggcgcgccgtcgccgaacgccgcgtaccccatgcagccgcacagcatgtagaagagcgtggtgaccgccacgctcaccaccgtggcgcgcttcatcaccgtcgactccgacggcggcggcgcccggatggtgtcctggatctcgatcaggatgagggagtaggagtaggcgaaggcgacgtcgccgaacgcctggaggctgcgccacaccttgtccatcggggtcaccacgccgatggtgatgccggtcaggctgccctgcacgcctctgttcgctgcgttgcatcgcactcatggtaagtcctagtggcactgcctgctgatgacctgatgtttgccagagcgaaaaaaaaaggcatcatgcgtcacggcgtgtgcctgcagcgtaccgatgacttggacgacgcccaggccgagcccaatggaggagtaggtgaaggacatgacggcggcgaggatggagagccaggagatctggtcgaagtccgggatctgcgagaagaagatctccgccacgccgaagatgatcatgtagggcgtgctggagatcttgcaggggttgccgtgtcccttctggtggaagcagttggccctcctgatcgcgctgcatgcggttgcggcgcaccaacacgacaccatatgtatatcaagtcacaggaggtacgacattcatgcatcactgtccagatgaaaggctgcgttcactcacagcatgctaatggaggcagcgatggtgtagccgatggccacgcccacgatgttggcgtactgcaggaacccgcagatctggaccttgatgccacctgctcgacgaaattccagtccacgggatgcacagagtaagctctagctaatgggtctccaactctcgcaaagtcgcaatgcagagacgtgggaaggagggggacgaaggcggaggggcacgcactgaggttcgcgttgacggcgtccatgtaggtgtagttccgcttgccggtgctggggtcgccggagcggtagcagtctgcgagcagcgacgaggtgtagtaggtgacgagcgagaagagcagcatgacgacgggtccggccacccagccgagctgcgcgatggcccaccccagcgagagcaccccggagccgatcaccgccgtgatgatgtgcgcgctcgccgtccacatcgtccctgtagcacatgcatgcagcccaatacgtcggaatgcacatcagcactcaacgttaacacggcagcaagcgggaaaaaaaatcatggtccctcccagggcgtgcatccgctagacgcctagacccgagatgatttgctgacacgtcgacggacgttccctcgctagcctacgggccgtgcaatcgagcgagccgattttattaaattggaattgttcggtgtgcgcctgcagcgggaaaatttccatcgtagaatagcggcactccggtctccgttcccgcggggagaaaaaaatttcgtccaatttcgcagaaacactcaagcatgtttaggagcaaaaataccgaagaaatttgatggacaaaatgatgaactacgtac

SEQ ID NO: 2481 - DNA, 1843 bp, Zea mays
  Clone ID: PAT_MRT4577_67667C.1
cagcctccaggcccatgtgaaacggtggatggcccgccctacgcgacccggggtctgcaccctgccgtttcttctccattattcccagcgggcgcgctcgctctctctttctccctcccctcctcgtggcgacgattgggggcagtcgctgccgccgtacgccaggtgcccagatcttcttcatgcccttctccagcgacgagtatcagaagctgtttgtgcttttaaggatgcataagcgtatggcggttttgatggtatccattgtttgaacgatgggaggatagaagaccattctctgcataaataggcttcataagtattattgctttattgctttaatattatcatatgattgagtgcacaatgccatcaaccttacttgatgatctccctaacgaagttgctctccagtgccttgcacgggtaccattcttgttccatccgacgcttcagttggtttgccgctcttggcgagcatcagtttgcagtggcgaacttctcaaaattcgtaaccagattggtacgacagaagagctcttgtgtgtgttggcgtttgaaccagaaaacatgtggcaactttatgagcccctacgagacaagtggataactcttcctgtcatgccatctcagattaggaacatagcccgctttggcgtggcctcagttgctggcaagctctatgtaattggtggtggcagtgatcgagttgatccgcttactggagatcacgacaggatctttgcaagcaatgaggtttggtcttatgatccgctgcaccgtgtgtggtcccagagggctcctatgcttgtggctcgagcgatgtttgcttgttgtgcactggatgggaaaataatcgttgcaggaggcttcactaactgccgcaaatcgatatcaaaggctgagatctatgaccctgaagctggcatatgggagcctcttcctgaccttcgtctggctcatagctctgcatgtactggacttgtcatcaagggtaagatgcatgtattgcataaaggtctatcgacagttcagattctggaagatggtggcagtcattgggctgttgaggatttctcttggttgcaaggcccgatggcgatggtcggtggagagctgtatgtgctgagtaacagctgtattatgaagcaacgtggtgagaacttccctgataagatggtatcgtgtgcatctgagttccagagcaggatcggtttcgggatgattggtgtgggtgacaacatatatttggttggaggagtgattggacctgggccgagaaaccaatgcatcaagctgctctctgatgttgatatcttgaacgtcacaagtgagagaccaacctggagaccagggtcgccgatgacgcattgccgagggagcatctgtggctgcgctttgttgaggatttagcgtcttcccagtgtgatagtgtgagtattccaccattgctgaactgatcggtgacgtcctaagttttattttattttcaaaagggttgttatttacgctttccttttggatcctttgtagcattgagggcatgactcaatgttggattgccaatgagatatatactatattgaccatgaacagtgttccagaacacactatatacttcatcattttcatttggcatttaaatattttggtggttttaaatgacatcttgctggtttgaataagttttattttattttcaaaagggttgttatttacgctttccttttggatcctttgtagcattgagggcatgactcaatgttggattgccaatgagatatatactatattgaccatgaacagtgttccagaacaaaaaaaaaaaaaaaaaaaagggtta

SEQ ID NO: 2482 - DNA, 1374 bp, Zea mays
  unsure (1)..(1374): unsure at all n locations
  Clone ID: PAT_MRT4577_67670C.1
cctcgnagccggccgggcggggccgggaccctgccgtttcttctccattattcccagcgggcgcgctcgctctctctttctccctcccctcctcgtggcgacgattgggggcagtcgctgccgccgtacgccaggtgcccagatcttcttcatgcccttctccagcgacgagtatcagaagtgccttgcacgggtaccattcttgttccatccgacgcttcagttggtttgccgctcttggcgagcatcagtttgcagtggcgaacttctcaaaattcgtaaccagattggtacgacagaagagctcttgtgtgtgttggcgtttgaaccagaaaacatgtggcaactttatgatcccctacgagacaagtggataactcttcctgtcatgccatctcagattaggaacatagcccgctttggcgtggcctcagttgctggcaagctctatgtaattggtggtggcagtgatcgagttgatccgcttactggagatcacgacaggatctttgcaagcaatgaggtttggtcttatgatccgctgcaccgtgtgtggtcccagagggctcctatgcttgtggctcgagcgatgtttgcttgttgtgcactggatgggaaaataatcgttgcaggaggcttcactaactgccgcaaatcgatatcaaaggctgagatctatgaccctgaagctggcatatgggagcctcttcctgaccttcgtctggctcatagctctgcatgtactggacttgtcatcaagggtaagatgcatgtattgcataaaggtctatcgacagttcagattctggaagatggtggcagtcattgggctgttgaggatttctcttggttgcaaggcccgatggcgatggtcggtggagagctgtatgtgctgagtaacagctgtattatgaagcaacgtggtgagaacttccctgataagatggtatcgtgtgcatctgagttccagagcaggatcggtttcgggatgattggtgtgggtgacaacatatatttggttggaggagtgattggacctgggccgagaaaccaatgcatcaagctgctctctgatgttgatatcttgaacgtcacaagtgagagaccaacctggagaccagggtcgccgatgacgcattgccgagggagcatctgtggctgcgctttgttgaggatttagcgtcttcccagtgtgatagtgtgagtattccaccattgctgaactgatcggtgacgtcctaagttttattttattttcaaaagggttgttatttacgctttccttttggatcctttgtagcattgagggcatgactcaatgttggattgccaatgagatatatactatattgaccatgaacagtgttccagaac

SEQ ID NO: 2483 - DNA, 271 bp, Zea mays
  Clone ID: PAT_MRT4577_67676C.1
gcagccccaagaagcaccattttttccttaagattaacttagaataaagcctgacgggggtaacagcatccatcgatccgcagtccatgctgtttgatgcatgggtctgctgaaaccgaggatgaacacagctctcacaactggcacagggcgtccttgccatctaaaacctagacgggccctaccaaacacgacccgaacgcagataaaccccctggaccagggtaaacatcacggtcgcgagccggataacttggcgctgcgggcccca

SEQ ID NO: 2484 - DNA, 956 bp, Zea mays
  Clone ID: PAT_MRT4577_67708C.1
ctcctacgcctacatcctcatcgagatacaggacacgatcaaggcgccgccgccatcggaagtgacggtgatgaagaaggccacgatggtgagcgtggcgacgacgacggtgttctacatgctgtgcggctgcatgggctacgcggcgttcggcgacgacgccccggacaacctcctgaccgggttcggcttctacgagcccttctggctcctggacgtcgccaacgccgccatcgtcgtgcacctcgttggcgcgtaccaggtcttctgccagccgctcttcgccttcgtggagaagcgggcggcagccaggtggcccgacagccggttcatgacccgggagctgaggctggggcccttcgtgctcggcgtgttccgtctcacctggcggacggccttcgtctgcctcaccaccgtcgtcgccatgatgctccctttcttcggcgacgtcgtggggctgctcggcgccgtctccttctggccgctcagcgtctacttccccgtcgagatgtacaaagcgcagcgtcgcgtgcgcaggtggagcacgcgctggctctgcctccagacgctcagcgccgtgtgcctcctcgtttccatcgccggcgccgttggctccacggccggcgtcataaacgcagtcaatttgcaccgaccattcagtggctaagagcgtgtgctctactgctccgtgcatcctcgtcttctctcgctccgtcgcagtcactatctatagcggaccaaattaaccaagcactccattagcgtggctgtttatcaagcctgctcctgttctgtttatgcaggcggagcctgcagcttgtttgcacgcccggggcataaagttggtgtccatcttctacatgtcacggttatattgtatttttttaagatgagcacgcctgatcacaccctaagattcctgtaaggtacactccaatgagaggtagattgaaggc

SEQ ID NO: 2485 - DNA, 591 bp, Zea mays
  unsure (1)..(591): unsure at all n locations
  Clone ID: PAT_MRT4577_67784C.1
aggtgaaaggcaatgcttatgtcccagaagagattggagaaacgatttggtcagtctcctatatttactgcatccacctttatgactcaaggaggcataccaccttcaacaaacccagcttctctactaaaggaagccatccatgtcatcagctgtggatacgaggacaagaccgaatggggaaaagagattggctggatctatggttcagttactgaagatattcttaccgggtttaaaatgcacgcaagagggtggatatcaatctactgcatgccaccccggccttgtttcaagggttctgcgccaatcaatctgtctgaccgtcttaatcaagttctacgatgggcgcttgggtcagttgaaattctgtttagcagacattgtcctatctggtacaattacggtgggcggttgaaacttctggagagggtggcttacatcaacaccattgtttacccattaacatccctccccttatcgcctattgtgtgcttcctgctatctgcctcctcaccaacaaatttatcatccccgagatcagtaataatggctgggatgttcnttcattctcatgtttgcgtccatctt

SEQ ID NO: 2486 - DNA, 2061 bp, Zea mays
  Clone ID: PAT_MRT4577_67810C.1
ccacgcgtccgcctgcccagagcagcgtacacgcgctggcgcgctgagggcggcggcaccttcgcggaccgacacagccggattggtcaattgtggattacgcttatgacacacgcgcggctaaagcgcactgagacagaccctgctccccgcgcagcgctatggctctcgccgtccgcacgcctcgcatccagcctcgaccggcctccgtttctgcgcccacaacacccacatcgacctccctcgccgccgggaacgcgttaccctgctatggcctcgcatactacggctgtgcctagcccttcaccgaggccacctcctcctcgcgctaccgccgcgacgcctggtcatacgccgccgatggctcctccaactccgcatccccgtcctccgctgccgctgctgccgcgggccgtcgggatgacgagatcgcgctgcagctgccggaactgcggaggctcctggacgtgctgagggcgtccagggggaggggcgccgaggagggcggcggacccggggaggtggcactggtgggcacagggcccggggaccccgagctgctcacgctcaaggcggtccgggccatcgaggcggcggacctggtgctctacgacaggctggtgtctaacgacgtgttggacttggtcggggagggcgccaggctgctctatgtcggcaagaccgcgggataccacagccgcacccaggaggagattcacgagctgctgctgagctttgcggaggccggtgccaatgttgtgcgcttgaaaggtggcgatcctctggtttttggaaggggtggagaagagatggatttcttacagcaacagggaattaaagttgaagttatcccaggaattacttctgcttcgggtattgcagcagagctaggcattccgttaacccatagaggtgttgctaccagtgtcagatttttaactggccactccagaaatggtgggacagatccactatatgtagctggaaatgcggctgatccagacactactttggttgtgtatatgggtttgtcaacacttccatcacttgctccaaagttaatgaagcacggcctgccaccagatacccctgctgttgcagtagagcgcgggactacaccccaacaacgaacggtgttcgcctcgttgaaggatcttgtggatgaagtcaagtcagccgatctagtttctccaactctaataattattgggaaagtggtatccttgtcacccttctgggttgagtcatctgaacatgatgcactgaaagttcagagctcgtatgcaaatgaggccagatgacaacagattttcttggtttttagtgactggacaatacttgagaaatgcaagatcccagatatgggagcacaggttcgacctggtgtacacagaaacatctcaggaagcatggatcctgaatggcggatggtagcttaagcttataacagacttggggcagaagcgcacttggactgatcatgcttgattctttggcctaatctacatgagattcacaatttttcgatttagttgagttcgacaatagttgtgtgcttctttgttactagtagccatgtacgtgcggcgcacgcgtgtttacgattctatgccctagcatagtaaggctattccaacgctgccacgttatgattttatgataatgggagtttcgtagcaccatgataatgagaaatagtgctacgaagctcttattatatgacaagtgccataaatcgtagcacttatgattttatgatatggggagcttcgtagagctctttctaaaaaaaaaaaaaaaaaaaaaaaaaagggcgacgctttcaattccgcgtcttcttcaccaaagaatactcggtagatgcatggttttcaattcaataacacctgcaaactactttctcactggaagtccattccgagtgcacggattttacagaaattacacaaaaaaagttctgttttttggggggaattaaaaaaatctctgcttcccaagcgtacataactgggagatttttacctgtcatctttaaaataatccgcattgactttatgcggt

SEQ ID NO: 2487 - DNA, 640 bp, Zea mays
  Clone ID: PAT_MRT4577_67817C.1
tccaaatccccccagcaaatccccaattcctccgagttcgagcgcccatgtcggggcgtggcaagggcgggaagggtttgggcaaaggcggcgccaagggtccccccaaggttttccgcgacaacatccagggcatcccgaaaccgccgatccgaaggctggcaagaaggggcggcgtaaagcgcatctcggggctcatttacgaggagacccccggcgtgctcaagattttcctcgagaacgtcatccgcgaccccgtaacctacccggagcacgccccccccaagaccgtcccccccatggacgtggtttacgcccccaagcgccagggtcgccccctttacggattcggcggctgaaaggccctcccccccctggtggccgtggcaaaagtcttgggtcccggtcaaaaaatcgaaagtattttggatgacgggcttagtttcgtagtattattatccctagtgcttattgttaccggttgttgggttcgccccctttaagcccctgtcaaacagtaatatatgagtcccgcctttccgtgttttgaacttttaaaaaaaaaaaaaaaaaaaaaaaaaaaaaaaaaaaaaaaaaaaaaaaaaaaaaaaaaaagaaaaaaaaaaaaaaaaaagcggcc

SEQ ID NO: 2488 - DNA, 312 bp, Zea mays
  Clone ID: PAT_MRT4577_6783C.1
caatagtgtaccaactatggcagccaaaatattttgcctacttatgctcctgggtctttctgcaagtgctgctacggcgaccatattgccacaatgctcacaagctcctatagcttaccttcttccatcgtacctgtcaccagctgtgtctaacgtatgtgaaaacccaatgcttcatctatataggatccaactggtattcgcagtttgcatcttacctttatcactctagttcctacagcaatcatcagctatattacagcacttacctatggtgcatagattgacccaaaacattaggtctcatcaact

SEQ ID NO: 2489 - DNA, 1504 bp, Zea mays
  Clone ID: PAT_MRT4577_67934C.1
ctcgaggccggccgggacagcatttctatcctactgccggcgttccagagttcgagctgagcagttgcacacagctgctcgtgaagctagctagcgaagccacaggcccccagtgactttgctcccccacaccgtagcggccgtataaaccagctccaaccgatccatcgaaatcgaaccacagtacgtgagcccgtactagagacatatggcctccgcgatcaaggctgcatcgacctcctcccggtggtcttcgtccccggcggcagtccactcgtcgccgttatcgaagcggcggagggcggtcgccgcggtagctccggctgccccggcggcgccggccaagctcaccgccggtgccggcggccgatgcctgccggtgtcgcagaccatgtccaggctcagggcgcagggcaagacggcgttcatcccgtacatcaccgccggcgacccggacctggcgacgacggcggaggcgctgcggctcctggacgcctgcggcgccgacgtcatcgagctcggcgttcccttctcggacccctacgccgacgggccggtcatccaggcgtcggcggcgcgggcgctggcgagcggcacgacgccggacggcgtgctggcgatgctgaaggaggtgacgccggagctgtcctgccccgtggtgctcttctcctacttcaaccccatcgtgcggtggggcctggccgacttcgccgccgccgtcaaggaagccggcgtgcacggcctcatagttcccgacctcccgtatgggaactcgtgcgctctcactctcaggaccgaagccatcaagaacaacctcgagctggtgctgctcacaacaccatctacgccagcggacaggatggaggagataacacgagcttcacgaggattcgtctatctcgcgaccgtcaatggagttacaggtccacgcgcaaacgtgaacacacgtgtccagtctctcattcaggaggttaaacaggtcactgacatacccgtggctgtcgggtttggcatatcgaaacctgagcatgtaaagcagattgcagagtggggtgcagatggtgtgatcattggtagcgcaatggtgagacagttaggcgaagcagcctctcccaaggaaggattgaagaggctagagaaatacgccaggagcatgaagaacgcgctaccatgccagtgaactagtcgtattgacgcgatataggctgtgttagcaagcacgttggagaacaatgttgcagaagtagcacaattaataatgatccattcggcaaggttgcttttttacaaattgcaacaatatgttatcaatataaaatcaacgattcctttgtttaaaaaaaggaagaaatgttacatcattgcatgatgcttcgattcagtggtcactccattcattctaaattacagttcagttcgagtttgtcctggctcagccctttaaagattgtcggtttgtaataataacaataataataatacaaagtggctcattacattcttc

SEQ ID NO: 2490 - DNA, 1005 bp, Zea mays
  Clone ID: PAT_MRT4577_68005C.1
ttcaaattcttcatcgaaaccacctgtccatatgactggtagtggtaggcctaatgctcctccataccgtcttccagttcttccaatggacgatgatgaaatctcatccaaagttcttctagcagttgaactttgctaattgaagctgcaaaaggaacttcgatagatcagcattacgaggcacagcagtgaaagccccatgtttaccttttccacggcttactcctcttggcgaacctccttcaccaagagctgcacatgtagcaactgctgttgaaccatggtggtcattcagggtggaattggtccagctggcttatccgctgaggaccttcatgtcttgatcttaaacaacaacgaccgcgatggcatagagtggtggttcaaggtcctggtccatggtatggatatgtgatggccttggttggtcaacgattcttattgacaattggtggcaatgatggaaaacgacccccggcagatgtatgggcccttgatactgcggccaagccatatgaatggagaaaacttgaaccggaaggtgaagggccaccaccatgcataacatgtgtctgattgaattctacaccagttcttggaagagaaagcctcaccaagtcatcatctccaggaacgatgttagtgaaagtcaatttaatctggtgctgaacattgagttgcaacaaattatcgatggagactgagtcaccgcagctagaaaccactgtctcaaggtgatgaacattgagttgcaacaaatcatcaatggagaccaagtcactacagtcagaaaccactgtctcaattttaggagattttccatctatgtttgttagaaggtataatgcctatttatctcttgtattcgaacatttggcaattaagaaatagaagattacttccccaatatcctttcttcctaatatcaccttttacggcttctggggaacaatcacttggtattaccgactgacatgtccatcatatgtgagatattgggttgat

SEQ ID NO: 2491 - DNA, 330 bp, Zea mays
  Clone ID: PAT_MRT4577_68112C.1
agggatgaagtcatagagaacccaaggggtgtacaccagcgagcgattccatgtgacatgcttacattgaaacggtggggggctctcactggattattgtgtatatactggaccacaaaaggccttcttcttcaaccaagctaaaaagcatttgcggccttttctagcacaaaagtgggcgctgtttattgcgtatgcccgtgcgtttatacgctgcaacttctaccgggcagaaccggcacggtggggcctacttgattaagaggtggcaatctgaccaaggtccttactctggctcgatagcactggacttctgaccgggcgttattg

SEQ ID NO: 2492 - DNA, 2877 bp, Zea mays
  Clone ID: PAT_MRT4577_6821C.1
gtcgcgtatgttctcgtctataccccacagccggccaccccccgcagccaggcaagtgaccgttgcatcctcttccccttccccttccagagcccaattcggcacgagggtaaattcatccgtccatccaccgacccagagccctcgatcccctaaaaaaaacccagagccctccattccacagccatcctcccctctgcagtgcactgctgcttgaccaagcaacaacaagaagctaccagcgcgctacctgcagattgcagcacacgcaagtgagagggcaggcaactccccggacgcaaggagttagagggcaagcatggcttcccttggtgacataggcctcgccgcgggtctcaacgtattgaccgccgttgccttcttgctcgcatttgcattccttcggctgcagccaatcaacgacagggtctactttcctaaatggtacctcaggggaatgagagacaatccaatcgtatctggtgcagctgtgcaaaagtttgttaacttagacgccagatcctacttgaagtttttaaactggatgccagctgctctcaagatgccccaggatgagctcattaaccatgcaggccttgattctgtggtctacctacggatatacgtaacagggctcaagatatttgttccaattacagttctggcttttcttgtactggtcccagtcaattggaccaatgacaccctaggacgcatcaacgtagtctacagtcctattgacaaactttcgatatctaatgtacctaatgggtcgaagaggtttatagctcacttgggcatggcttatgccatcacattttggacctgttatgtactgttgaaggagtatgaaattatttctaacatgaggctgcgctttctagcttcagagaaacgccgaccagatcagttcactgtccttgtgcggagtgtcccaccagatcctgatgaatcaatcagtgagcttgtggaacatttcttccttgtcaatcatcctgatcattatctacaacaccaggtggtttacaacgcaaataaacttgctgatctggttgaaaagaagaagaagatgcgaaattggcttgactattacctactaaagtatgagcgaaattcatcattgaggcctaccacaaagactggctttcttggatgttttggttccaaggtggatgctattgactattacaaatcagagatcgagaaaatcgggaaacaggaagctgaagagcgtaagaatgtcatgaaggatccaaaatcagttgtgccggcagcctttgtctcatttcgctcccgatggggtgcagcagtctgtgctcagacccagcaaacaagcaatccaacactctggttgacagaatgggctccggaacctcgtgatgtttattggaataatctgtccatcccatttgtgtcccttacaattaggagattgatagttgctgtggcattcttcttccttaacttcttttacgtcatcccaataacattcgtacagtctcttgcaaaccttgaaggaatagagaaggcacttccatttctaaaacccttgattgacttgccattcattaaatcattcatccaagggtttcttcctggaattgctttgaagatcttccttatagtgcttccaactatactgatgtttatgtctaaatttgaaggactgatatcgcagtcatctctggagaggcgatctgcatctaagtattacatattcttgttcttcaatgtatttttggggagcgtaattgcaggatctgctctggagcagcttaaaacttatctccatacatcagcaaacgacataccaaggatcattggtgactccatcccaatgaaggcgacttttttcataacatatgtgatggttgatggttggactggaatagctggtgaaatattgagactgaagccgcttatattcttccatctgaagaactttttcttggtcaaaaccgaaaaggacagagaagaagctatggaccctggcagtatctgctttgactcaactgaacctagaatacagttgtacttcttgcttggccttgtttatgctgcagtgacgccgttcttgcttcctttcatattggtgttctttgggttcgcatatgttgtcttccgccaccagataataaatgtctataatcagcaatatgagagcgccgcacagttctggcctagcgttcatgggcgtataatcacagcgttgattgtatcgcaactgctgctcctgggactgatgagcacgaacgactttgagcagacgacacctgtgctccttgttcttcctgtgctgacctttgggttttacaagtactgcaagaaccgctttgagccggcattcgtgaggaacccgctgcaggaggcgatgaagaaggacaccctagaacgcgcccgggagcccaacttggatctgaaggcgtacctggccaactcgtacctgcacccggtgttcaagggggacgaaggcgacgacaggtactcggtgatggacgacgatgggtggatggaggaggaggtgatcgtgccgacgaagcggcattcgaggaggacgacgcccgcgcagagcaagcatgaagggtcggactcgctctctgtgctcgagagttctctacagcggtagtcacagtaggagcttagcctgtacagaatggatgaaaatgatcacggccctgctccattgcttttgctttggttgttggttgttcatgtcacaggggacacacacacacagatagaattcaagagagctgtggggaggactgaggggagagatagtttactgtagcttggacaaagaatctgaatacagcagttacattatctgatgaatctgttagcaccatccaaaaaaaaaaaaaaaaaaaaaaaaaa

SEQ ID NO: 2493 - DNA, 391 bp, Zea mays
  Clone ID: PAT_MRT4577_68294C.1
aaaaaactgggaaggctcttttttatttttgggaacccacaaacatcaacaaaaaaactttattattgaactataactcaataaccaatctaaaagagggcaccaccaatgatgggttgttggtaaaaccctgttgggtttgtcaaaacatgttggttgaatggcaacaattgttgcaattgtaaaaaggtgccaaccttaggcccagcgtgcaggtaaaaccgcaacaactgttgctttgtcaaaaaagcagcagggctcacaacaactaactggctgaatggtaatagttgttgttgtacataaacaggaaagttcaatgctgccagttggttgaatggaaaaaattgctggtggtaggcaacaactagctggctgaatggtaataatt

SEQ ID NO: 2494 - DNA, 648 bp, Zea mays
  Clone ID: PAT_MRT4577_68371C.1
ggagatggagcaaagcttgtccgggatgcattccagcttgcgaaagagaaagctccttgtattatatttattgatgagatagatgccattggcaccaagcgatttgatagtgaagttagcggtgatcgagaagttcagcgaaccatgttggaattactgaatcaactggatggattcagcagtgatgagagaataaaggtcatagctgcaacgaaccgtgctgacatccttgaccctgctctgatgcgatctggacggttggaccgaaagattgagttccctcacccatctgaagaagcaagagctagaatcttgcaaatccattcaagaaaaatgaatgtaaatcccgatgtcaactttgaagaattggctcgctcaacagacgacttcaacggagcacagctaaaggcagtttgtgtagaagctggtatgctcgctctacgccgggatgctacagaggtaacacatgaggacttcaatgaaggaatcgtacaggtccaggcgaagaaaaagtcaagcttgaactactatgcttaagctatactttatgcaaaaatgtggaccacaagttgtttgtaacactactgtatggatgatcgaagctacgtttttacgtttgctttgagagtgcaagtttttaacattatc

SEQ ID NO: 2495 - DNA, 1614 bp, Zea mays
  Clone ID: PAT_MRT4577_68373C.1
cattgggtacctcgaggccggccggggtcgccgtagatacggcgctaggaaggaacaacgcagacaaaccgaactcgcacctcgcacctcgcatcgtcttgtcgacacacctccagctccgaaaccctactccgccggcgatgtcgtcatccggcgccccggccccggcggcggcaatggccgttgacgacgcggaggacgaccagctcgcctccatgtccacggaggatatcatccgggcctcccgccttcttgacaacgagatccgtgtcctcaaggacgagttgcagcggacgaacctggagttggagtcgttcaaggagaagattaaggaaaaccaagagaaaattaagctcaacaagcagctgccctacctcgttggcaacatcgttgagatcttggaaatgaaccctgaggatgaagctgaggaggatggtgctaacattgatttagactcacaaaggaaaggaaaatgtgttgttctgaagacctccacaagacaaactatattccttcctgttgttgggctagtggaccctgacaagctaaagcctggtgatctggttggagtcaataaagatagctaccttatactagatacattgccatcagagtacgattcacgagtgaaggcaatggaagtggatgaaaagcccactgaagattataatgacattgggggtcttgaaaagcagattcaagagcttgtagaggcaattgtactgcccatgacacataaagaccggttccagaagttgggtattcgtcctccaaaaggggttcttttgtacggaccaccaggaactggcaagacactcatggctcgtgcatgtgctgcacagacgaatgcaacgtttcttaaattagctggtccacaacttgtgcagatgtttattggtgatggagcaaagcttgtccgggatgcattccagcttgccaaagagaaagctccttgtattatatttattgatgagatagatgccattggcaccaaacgttttgatagtgaagttagcggtgatagagaagttcagcggacaatgttggaattattgaatcaactggatggattcagcagcgatgagagaataaaggtcatagctgcaactaaccgtgctgacatccttgaccctgctctgatgcgatctggacggttggaccgaaagattgagttccctcacccatccgaagaagcaagagctagaatcttgcaaatccattcaaggaaaatgaatgtaaatcctgatgtcaactttgaagaattggctcgctcaactgatgacttcaacggagcacagctaaaggcagtttgtgtagaagctggtatgcttgccctacggcgggatgctacagaggtaactcacgaggatttcaatgaagggatcgtacaggtccaggcgaagaaaaagtcaagcttgaactactatgcttaagctgtttgtcaaaacatatggaccataaggtgtttgtaacactactgtatgaataatcgaagctatgtttttaatgcaagatttttacagcatataagaccccacgccagcccacccgatttttttttgtattttagctcttttcttgaaaagtattcacgtttagaccgttggatgattt

SEQ ID NO: 2496 - DNA, 413 bp, Zea mays
  Clone ID: PAT_MRT4577_68380C.1
actgtctgatgccgcccaggtgtccctgctcaggccacccagggcgatgccatcaggaactactaccatgacaaccatgtgatccaggacatgctggtgcccctgtacaaggttggagacgccctcgagttcgtccaccacgaaatggaggtgtacccgttgtggctgtgccctcaccggctgttcaagctgccggtgaagacgatgatctacccggagccggggttcgagcaccagcagcggcagggggacacgagctacgcgcagatgttcacggacgtgggggtgtactacacgccggcgtgcatcttccgcggggaggagttcgacggggcggagtcggtgaagcggctggagcagtggctgatcgagaaccacagctaccagccgcagtacgcggtgacggagctgaa

SEQ ID NO: 2497 - DNA, 311 bp, Zea mays
  Clone ID: PAT_MRT4577_68431C.1
ctagccgtcgccgccgccgctcgtttccctgagaggtgccggaaccgaggaactggccgtgtgcgaggtagagaatcggttgttcttgtctcagcccggggtctgctgcgtctggtggaggtgaaggggagaaactcgtgagatctgtcccggatcacgcgtgcttgctcgtgaatcaggggtcccacacatatcttcggctattagaatgtggtgtactaatggagtctaagggtggcaaaaagtctagcagtcgtcattctatgcttgttgaagctccacttggctacagattcgatgtctttcgacct

SEQ ID NO: 2498 - DNA, 806 bp, Zea mays
  Clone ID: PAT_MRT4577_68483C.1
cctcgaggccggccgggccggcaaggcaccaaagcatcagatttgtgcttgaaactcctcctcctcctcctcctccaccaccacctcgccttctcttctttttgtcttgcgtcgcagcatggtgaggaaccccctaaaagccaggccgacgctggtgctcatcagccttcttctaatggcggacctggcaaccgttggctatagccgaagagttgcagaactgggtgcgttagccgtgagcgacagcggcggcggtggcggtggctcgccgccgggcaaaggctgctgcttgcccaaccagtcatcttcttcagcgtcagggcgacacctcggtgacgattgttgcaagcaaatgcgtattgtgtccaagaggctggtgccccaggggccaaaccctctgcacaactgaccagctccgggctccaggtctgcacttgcatgcatcgagagataggcagaggctttttcctttttgtaacgcagccatgcagagtgattagtggagctgcaggtcttcctcttccatgaggtcatgtaaattataggcctacagcttagtttgccgctagctcatacgctctctctgtcacacacttttgtcacttttgattgagagccgctcttcatcggtgacggtgagagactgaaactttgtaataatggatggtcgagggcaaaactcttgcataggctggaattctattttcctttatctagaaactgccttttgatgatgagaattttactgggacctgtggttctgaaaaaaaaaaaaaaaaagcccctaggccctcgagctcagcttt

SEQ ID NO: 2499 - DNA, 261 bp, Zea mays
  unsure (1)..(261): unsure at all n locations
  Clone ID: PAT_MRT4577_6864C.1
ggggcgcgcaccaagaacagggacaagtgggtgtcccagatgccccgcttctactacctgctggtgttggcggccaactggttctcccggccctccctcttctacgagcgggggcgcctcatctggtgcaatttctgtagccggcagtacagtgtgcccgacctgactctttactacttccaacgccntcgcgtggcgcgtggcgctttgcgccatcaaccacctgggagcgcctggcgaaggcgcgttatcgtgcgcatg

SEQ ID NO: 2500 - DNA, 856 bp, Zea mays
  Clone ID: PAT_MRT4577_69309C.1
gacgaatgcaacacctcggcttctacgactaggagtcgaagtcgactgacgactcacgactggcgtagcgtaggaggcggcggttccaagcgaccatccaataatcgccaccctcacgcgagaaatccccggtttcttaaggaactagacttacaaaagagttgtgtgaaacatcaagaccatcagtggattaattgttttcccaagtcttcaacatcactagaatgcttgaatttttcctgcttgactggggaggtgaatgctgttgcactggaggaacttgttgcaaggagtccaaatcttaaaagtttaaggctgaatcttgcagttccatttgatgttttgtccagaatcctttctcgcacacctaagctagaggatttaggcacaggatcctttttacaaggcaatgaccctgctgcatatgccagtttatgtagagctcttgagaactgcacttcactgaagagtatatctggtttttgggatgctccaggcttttatgttcaaggaattttgtcaaattgcaagatcagaaatcttacatgcttgaatctcagctatgctacattgattcagagtacccagcttatcggtattattcgtcattgtaagaagctccatgtcttatgggtgttagatcacattggtgatgagggcttgaaggctgtgtccttttcttgtcctgatcttcaggagttgagggtatatccaagtgttgttgcaccaagaggtactgtgacgggaggaagggttggtagccctatcttcgtgtcgaagttacagcatgtgctcttctcttgtgttcgaatgacaaacacggcgctgatgacaatagcaaggtactgcccacggc

SEQ ID NO: 2501 - DNA, 2848 bp, Zea mays
  unsure (1)..(2848): unsure at all n locations
  Clone ID: PAT_MRT4577_69310C.1
tcgctcggcttctacggcgtaacgtaggaggcggcggttccaggcgaccatgcaataatcgccaccctcacgcgagaaatccccggagggattctttggctgaggttgccctcggattgttccaaaaacgaaaaagttagccctcttcctcaggtccaatttggcagcttttgctacacgatccattaactgctttccgatccgtagttctgagaagtttgccctcttcctcatggccaatttggcattttgtataaacacacacacctcgagccggcggagtagcacggcgcgcggcccgaccggtctcgctctcgcagtccctcgaccgctcgtcccggcagagcagtcgcagcacgatggtgaccaacgtggtggacctccggtcggacacggtcaccaagccgtccgacgccatgcgcgccgccatggccgcggccgacgtcgacgacgacgtcctgggcgctgaccccaccgcgcgccgcttcgaggcggagatggccgcgctcctgggcaaggaggcggcgctgttcgtgccctcgggcaccatggccaacctcgtctccgtcctcgcgcactgcgacgtcctcggcagtgaggtcctcggagacgcctcccacatccacgtctactagccattgatccggggaaagagagacgtaacgtaacaacctcggcttctacggcgtagcgtaggaggcggcggttccaggcgaccatccaataatcgccaccctcacgcgagaaatccccggcaacttttggggaactacacgtgtatggagttttattagtattccaggggcatcacaatggcatactttcctgatgaagtagtagggtatatccttggttatgtaacgtcgcatcaggaccgcaacgcggtgtccttggtctgccgggcatggtacgacattgagcgtcatggccgccattcggtgcttgtaagaaactgttatgcggtgtgcccagagcgtgtacatatgcggtttcccaacatgcgtgcactgagcttgaagggcaaaccgcactttgctgaattcaaccttgtcccggcgggttggggtgccactgcaaatccatgggtggatgcgtgcgcccgtgcatgcccaggtcttgaggagctccggctgaagtttatggttgtgactgatgaatgcctcaagttgctttctctatcctttaccaactttaaatcacttgtccttgtttgttgtgaggggttcagtactaccgggcttgctaatattgccaccaattgcaggtttcttaaggaactagacttacaaaagagttgtgtgaaacatcaagaccatcagtggattaattgttttcccaagtcttcaacatcactagaatgcttgaatttttcctgcttgactggggaggtgaatgctgttgcactggaggaacttgttgcaaggagtccaaatcttaaaagtttaaggctgaatcttgcagttccatttgatgttttgtccagaatcctttctcgcacacctaagctagaggatttaggcacaggatcctttttacaaggcaatgaccctgctgcatatgccagtttatgtagagctcttgagaactgcacttcactgaagagtatatctggtttttgggatgctccaggcttttatgttcaaggaattttgtcaaattgcaagatcagaaatcttacatgcttgaatctcagctatgctacattgattcagagtacccagcttatcggtattattcgtcattgtaagaagctccatgtcttatgggtgttagatcacattggtgatgagggcttgaaggctgtgtccttttcttgtcctgatcttcaggagttgagggtatatccaagtgttgttgcaccaagaggtactgtgacggaggaagggttggtagccctatcttcgtgtcggaagttacagcgtgtgctcttctcttgtgttcgaatgacaaacacggcgctgatgacaatagcaaggtactgcccacggctaacgtccttcagactatgcattcgcaagcccaggtcagcagacgccgtcacaggacagccactggacgaaggctttggggcgatagtgcggtcctgcagaggcctgaggcgtcttgccatgtccggcctcctcacggacagcgtgttcctgtacatcggcatgtacgcggagaagctggagatgctctcggtaacgttcgcgggggacaccgacgacggcatggtctatgtgctcaatggctgcaggaacctcaagaagctggtaatcaaggagagccccttcggtgacgccgctctcctcgcgggcgcgcacaggtacgagtcaatgcgcagtctctggatgtcgtcctgccagatcaccctgggtggctgcaaggcccttgcggccaccatgccaaacatcaatgtcgaggtcatcggtggggcgagctttggtgcgatggatggtggtgtcagcggtgcgaggaaggtggacatgctctacctctaccgtactctggctggacctagatgcgatacgccaggattcgtctcgatattgtgagctgtatctatggctactgttggtggcgttcagggaaacccgatgttcttaaccgtgcctgctgtgggctgtggctgtgctactctgtctggtagtgtttcggaaacacgatgtttatttgcgtaaggtagtgtttggttctggaaccattttaagccttgttcagatattcctatacctcatggattggaagtgattagaaaaaaatatgaataattttgacttaaaaaaaaaaaaaagcccctcgagagctaaaaaaaaaaaaannaannnagggccgcccccggaatagtaactcgtcgacccaggaaaat

SEQ ID NO: 2502 - DNA, 2089 bp, Zea mays
  Clone ID: PAT_MRT4577_69311C.1
gtacgctacctcgaggccggccggagagagacgtaacgtaaaacctcggcttctacgactacccgtaggagtcgatgacgtcgactggcgtagcgtaggaggcggcggttccaggcgaccatccaataatcgccaccctcacgcgagaaatccccggcaacttttggggaactacacgtgtatggagttttattagtattccaggggcgtcacaatggcatactttcctgatgaagtagtagggtatatccttggttatgtaacgtcgcatcaggaccgcaacgcggtgtccttggtctgccgggcatggtacgacattgagcgtcatggccgccattcagtgcttgtaagaaactgttatgcggtgtgcccagagcgtgtacacatgcggtttcccaacatgcgtgcactgagcttgaagggcaaaccgcactttgctgaattcaaccttgtcccggcgggttggggtgccactgcaaatccatgggtggatgcgtgcgcccgtgcatgcccaggtcttgaggagctccggctgaagtttatggttgtgactgatgaatgcctcaagttgctttctctatcctttaccaactttaaatcacttgtccttgtttgttgtgaggggttcagtactaccgggcttgctaatattgccaccaattgcaggtttcttaaggaactagacttacaaaagagttgtgtgaaacatcaagaccatcagtggattaattgttttcccaagtcttcaacatcactagaatgcttgaatttttcctgcttgactggggaggtgaatgctgttgcactggaggaacttgttgcaaggagtccaaatcttaaaagtttaaggctgaatcttgcagttccatttgatgttttgtccagaatcctttctcgcacacctaagctagaggatttaggcacaggatcctttttacaaggcaatgaccctgctgcatatgccagtttatgtagagctcttgagaactgcacttcactgaagagtatatctggtttttgggatgctccaggcttttatgttcaaggaattttgtcaaattgcaagatcagaaatcttacatgcttgaatctcagctatgctacattgattcagagtacccagcttatcggtattattcgtcattgtaagaagctccatgtcttatgggtgttagatcacattggtgatgagggcttgaaggctgtgtccttttcttgtcctgatcttcaggagttgagggtatatccaagtgttgttgcaccaagaggtactgtgacggaggaagggttggtagccctatcttcgtgtcggaagttacagcgtgtgctcttctcttgtgttcgaatgacaaacacggcgctgatgacaatagcaaggtactgcccacggctaacgtccttcagactatgcattcgcaagcccaggtcagcagacgccgtcacaggacagccactggacgaaggctttggggcgatagtgcggtcctgcagaggcctgaggcgtcttgccatgtccggcctcctcacggacagcgtgttcctgtacatcggcatgtacgcggagaagctggagatgctctcggtaacgttcgcgggggacaccgacgacggcatggtctatgtgctcaatggctgcaggaacctcaagaagctggtaatcaaggagagccccttcggtgacgccgctctcctcgcgggcgcgcacaggtacgagtcaatgcgcagtctctggatgtcgtcctgccagatcaccctgggtggctgcaaggcccttgcggccaccatgccaaacatcaatgtcgaggtcatcggtggggcgagctttggtgcgatggatggtggtgtcagcggtgcgaggaaggtggacatgctctacctctaccgtactctggctggacctagatgcgatacgccaggattcgtctcgatattgtgagctgtatctatggctactgttggtggcgttcagggaaacccgatgttcttaaccgtgcctgctgtgggctgtggctgtgctactctgtctggtagtgtttcggaaacacgatgtttatttgcgtaaggtagtgtttggttctggaaccatttt

SEQ ID NO: 2503 - DNA, 1423 bp, Zea mays
  Clone ID: PAT_MRT4577_69313C.1
tcctaatcccggtcgcgacgcgtcctaacggcgcaagccgaatccaccaacgccaaacgaccgcaccagccagtccacttcgccagtgatctgtctcagctcgtcgcgtctccggcgccgacagacacgggcgagtgggcaacgcggctccgagatcggcgggcaggatgatgatgctgatcgactgctcgaggtgccgtaccccgctgcagctgccgcacggggctccctgtatccgatgcgccatctgtggggctatcacgcacgtcgcccccgcccctcctgtcgagcccaaccgcggtgccgtacagccgccgccggggtggggtccaccgccgccgccggtgcacgggcgaaagcgagccgtggtgtgcgggatatcgtatcggcactcgcggtatgagctgaagggctgcatcaacgacgtcaagtgcatgcgccacctcctcatgacgcgcttcaacttccccgacgactccatcattatgctcaacgaagaacaaaccgacccctacaaaatcccaacaaagcataacatagggatggccatgtattggcttgtgcaaggttgtcaacctggagactcattggtgttccattattctgggcatggagcacagcaaagaaactacaatggagatgaggttgatgggtttgatgaaaccctctgcccattggattttgagacacaaggaatgattgtggatgatgacataaatacagcactagttcgaccacttcctcgtggagttaaacttcatgcattcattgatgcttgtcatagtggaactgcacttgatttgccttacctctgcagaatgaacaggagtgggcaatatgtatgggaagatcaccgaccaccatctggtgtctggaaaggcactagtggtggggaggctatttcatttagtggttgtgatgatgatcagacctctgcagatacctctgctttatcaaaggtcacttcgactggtgcaatgacatttggcttcatccaagctattgaacgtggacagggcaccacctacggtagtatcctgaactccatgcgttcgacaatacgcaacacagatgactcagcaggtgtaggtggcggtgctgttacatcactaattacaatgcttcttactggagggagcctatctgctggtggtctgagacaggagccacaactgacggcatgcgagccatttgatgtctatgcgaagcccttctccctatgacgcgttcatggtgctgctgctgcccacccatttcacgttatcaacttatcatcgtgtacatttcaccatcccgattgttaacagcgcgtggaattacaatccgtataaggaagctatgcatatatatcgtttgtttcacaggtacaatccgtatatgcatgaataattttttgtacaaaaaaaaaaaaaaaaaagcggcc

SEQ ID NO: 2504 - DNA, 289 bp, Zea mays
  Clone ID: PAT_MRT4577_69357C.1
tcgccccacgaactggagaccttgcccgcccaatacgaacacctcagatctcagtgaccatcgccgatgcttcctttgtgtagctgcgcgatgaggatatggcgtctagcgagggcgtgctcctggggatgggcctccccctcctcgacatctcctccgttgtccatgacgccttcctagcaacagtatgacatcatacctgaacaatgccattctcgctgatgacatccactcgcctatgtatgacgattcgaccagcatcagcaatgttgcttatatcgtcgctgga

SEQ ID NO: 2505 - DNA, 176 bp, Zea mays
  Clone ID: PAT_MRT4577_69475C.1
gatagaccttctcaatacaatggaccgtgcttcatccaacaatggaacggcttcacatggtgccgtgtccatcacaaaaaaggagcctatattcatgtactagaattattcagattcagttcacattgtgatgtgttatttttactttcgtcgtgctataaccgatagcgctcttc

SEQ ID NO: 2506 - DNA, 191 bp, Zea mays
  Clone ID: PAT_MRT4577_69499C.1
cccacgcgtccgatcgagatggcggcgtcggatagttgagtaccgctgcttcgagggcggcctcgcctgtgccacggactaccactccctccacatcgccttgagcacctacgagcgagggcgtaaagttcaagatcatggtacatggggagacgcaaaggtcccgcggattctgcttcgtcaccttctcc

SEQ ID NO: 2507 - DNA, 1098 bp, Zea mays
  Clone ID: PAT_MRT4577_69510C.1
acctggatctgagacaggcaggcagcaggccttcatcgcagagaggacagcagcacctgagattgacggcggggcagcgcgcgggcccttcccttcggagcactcagcgtgagagatggggaggcagccgtgctgcgacaaggttggcgtgaagaagggcccgtggacggcggaggaggaccagaagctcgtcggcttcctcctcacccacggtcactgctgctggcgcgtcgtccccaagctcgcagggttgctgaggtgcgggaagagctgcaggctgcggtggaccaactacctgaggccggacctcaagaggggcctgctctccgacgacgaggagaggctcgtcatcgacctgcacgcgcagctcgggaacaggtggtccaagatcgcggcgcagctaccgggcaggacggacaacgagatcaagaaccactggaacacacacatccgcaagaagctcgtccggatggggatcgaccccgtcacccacctgccgttgcaggaaccgccggctcctgctcctgctcccgccgagcagcaggagcagagccacaggcagcaagaagaactgcaactgcaagagctgcagaacggccgcgagcttatcatgcaggagggcgcgggggaagacgatatcacgccgatgatccagccgcacgagatcatgccgacggcggcagcggcaagcaactgcggctctgtttcctctgcccacgccggctccgcgtccgtggtctcgccgtcctgctcctcctcggcggtgtccggcgtggagtggccggagcccatgtacctgctcggcatggatggcatcatggacgccgactggggcagcctcttccccgacactggcgctggcggcggcggcggcggcttcgacttgggcgtcgatccgttcgaccagtacccgggcggtggcttcgaccaagaagacgaccacagaatatgacatcggcctagcaatgcacatagattcgccgcttctccttccatctcgctcagcacatcagcgccgtagcctccatgttttcttaatagctctccagggtccagtgctgataaacaagaactgacaaattcgggtgcggaaaaaaa

SEQ ID NO: 2508 - DNA, 410 bp, Zea mays
  Clone ID: PAT_MRT4577_69619C.1
acctaactaccaacatattgctcacaataatgtaccaacaatctcacgtagatattttgcctacttatgctcctctatctttctgcaattgctcctacagcaaccattttcccacaatactcacaagcttctatagctttccttcttcctacctacctctaaccaactgtgtcttctgtatgttaaaacccaattcttcaaccctacaccatccaacaatcaatcacagcttgcatcctacctttatcacccttgttcctccaacaatcatcatacctattacaacagttaccttttgtgcatttattggcacaaaacatcaaggcacaacaactacaacaacttttgctaaccaaccttgctacctactcttagcaacatcaatttctttcattcaaccaactaacttc

SEQ ID NO: 2509 - DNA, 617 bp, Zea mays
  Clone ID: PAT_MRT4577_69631C.1
gttcctctgttccggtctcccgtctcgctgtgcctcctcctgccctccgctcgcctagggttcgctcgctcgctcgtccccaggttcgctcgcgatggaccagggcgacgtcgccgtggccgtgccccccgccgccccctcctcctcctgcggcggcgccggctgcaagaagggcaagcgcttcgagatcaaaaagtggaacgccgtcgcgctctgggcctgggatattgtggtagacaactgcgccatctgccgtaaccacatcatggacctctgcatcgagtgccaggcgaaccaggccagcgccaccagcgaggagtgcaccgtcgcttggggagtttgcaaccatgcattccacttccactgcatcagccgttggctcaagacccgtcaagtgtgccctctagacaacagcgagtgggagttccagaagtatggtcactaagacagtcatggccaggggcgaagttacttaatggttgtttaactttagtgctattagtgataactcctggttaaggatagtggatggttggttgatgtttctggagcttggatttttattaaaccacatgtatccttgttgagtactgttcatcatgtctatggatctctct

SEQ ID NO: 2510 - DNA, 1121 bp, Zea mays
  Clone ID: PAT_MRT4577_69730C.1
ggtgtctcgatccgacttggtacttggcggctccactgctcacgtcacgtgccgcccgcgttctctctccgactcccatgcctctccggtgagctagtctggtatccatcggcgagctagttttgtctccaccggcgagcacgcgtctgtaacctcctccacccccatcgaactcctcctgctctccaatccgctagatctcggctccgtgcagctatgctgattgtgaggaatttggtagcacctctatcagggtttttaaactagagtgctgccgccccagcatacataatatggacgaagaaaatgttgttgagctgctgcaacgttatcgccgtgaccgtcaagtattactcaactacattctttctggcaacttgatcaagaaagttgcaatgccacctggtgcaatctctttggatgatgtagatatagatcaagttagtgttgattatgtcctcaactgtgctaagaaaggtgaacctcttgaccttggagacgccatccgcctttttcatgatagccttgactatccatatgtgaataacactggagctgtggatgagttctatttgcttacaaaaccagaatattcaggaccagctccaacacgagaaccaccacctatcccagccactgcaccatcatcagttgtggtaccaccaccggatgtggaaccagcaccaattattgtgtcatcgccagtcacagctaccaacttgccaaaatcacaaccatttgattctccgaccgagaaggagttaactatagatgacattgaagactttgaggatgatgaagatgaatttgatgggcgaagggcttctagaagacatcaaactgacgccagtgatctatcgttgctgttaccactatttgaaacaggtatcacagataatgatcttcgtgagacagcatatgagatccttgttgctgctgctggtgcttccgggggtcttatagttcctcagaaagaaaagaaaaaagagaagagacacagattgatgaggaaactcggtcgtagtaagagtgaaagtgtggatatcaacactcaacggcaacctggtttagttggtttgcttgaaaccatgcgagctcaacttgggattacagagtccatg

SEQ ID NO: 2511 - DNA, 1454 bp, Zea mays
  Clone ID: PAT_MRT4577_69830C.1
ggcagatgaatgaaggcgttgcctcgtatagacctatccaatgcaacgacggatatcaccgagtggcgaccgcctgacgcgcccgtgtcggcaagccgccgacgacttgacgtggggcgggggaaacaaaacaacgcgggcagcgccacggcaagcgcgtcccgggctccctgccacggcgcggacacagagagtggaaaccggaaggggggaagagagatggattcctccacctcggcggcggcggcaggggaggcggccgtgccgccggaggacgacgtctgctccgtctgccacgaccgcttccggatcccgtgccaggcgaactgctcccattggttctgtggagagtgcatcatccgcgtttggaattatggacctcctgtacaggcttgcaagtgtcccatttgtcgccgccttataaatctactggtgcctgctgcattatcagggcaggaggatggtccacaagctcaacgtattctaggagagattcagcactataactgtatatttggtggagcaccacgcagcctaactcagaggttgcaagacctacccttcttcatccgaagactgttcagagaactaatggacccccagcggaccctcccactcgtgttcagggcgcggatgctgatgatggtcgcactgagtgcaatttatgtgctgagccctgtcgacattcttcccgaaagcatgctgggcctctttggattcgtcgatgacctgctcatcctgctgatcgtgttcctccacctcgccgcggtgtaccggtcgttgctcctgtaccgccacgggggccagtagaagtcgctgtgcataaaccgtttgtttagctggtttccatgtggagttctctgagatcgcagcagcggatttggaagatcgccgactcgccgagtagatggcaacgtcacggacggcttagcctgtccctgctctgtaccattctactacgcctgtttttctgagactctgacacggtgaactgaactttggttggttgatgcaagtgaatttcccttcgttttactcgtcaggaaaagaaagggaaagagtttgcgttgcgtttgtctttgtttctgctctttggaagttggaattgaaactgcactgatgtttgcgtttcaggaactgcattgacgtggatcctgctcagttctcttagcatttacttatgggccaagtttgtagaagtttagtgggctgtagacccattggctgtcatgttgggccaccgcgacgaggaaagaagaggtaggggatcgccctggccgggtagttggctcttgcgggagggatgagatgggaatgggatggcgacgggcgggcgtgtgcggctgcaggcggctcggaaggggcacggtggagacgcagcggagccctcgcctcttctcctgctcctgctgcccggtactcgccgagggagacgctgctgacctgacgagctg

SEQ ID NO: 2512 - DNA, 1121 bp, Zea mays
  Clone ID: PAT_MRT4577_69852C.1
ggtccgcagaatccgagtccaatagctctcctccccagggctttcaacttctccaaaccccatctcgccgccgaggccgagcgagcagagcagaacaccacgtcggcggcttttccctgtctctccgctggatactacacccgccgccgcagcgccgatcctgtccgagtcaagcggagcgggggatcggattggttgcttccttccctccatctcatgttggtgcatcaacaaaatcttgaggagcaggagccattgtcttcaatttttgatggatcatctccagcctctgcaattgttgcagtagacacaaatctggatacttccacacctgacacatatcgagcgccgcctgcacccttgccttatgatgttattttggcagtcccaaataaccctggttttggaaactctgtaggtttggagaagccagacactaagagcaaaactgatgaccaacaagagtccataaatgatcaggagtctttagaggtggatgagtcatgtaagaaaagtgtcactgaagataaggctgatgaggaggatgtttgccctatctgccttgaagaatatgatgaagaaaatccccgttctataactaaatgcgagcatcatttccatctttgctgcattctcgaatggatggagcgaaaagatacttgcccagtttgtgaccagattactttggtggatgagatgttcgaataggtttggtaaccttggtggatcatcactcgaagctgttcgttactgagaaagtgcagcaactaatttacttttgatattgatccattccgggtggctcgcatggtaatgaattgagggggcaaaaattgaaaggatgaatgtcatgaaatgtatttacaacgcctcctttgtcatgcgttgtgtcatgctatatatatgccggcttgcgggttcattcagttcaaagtccaggactatccttttgcttttctgaattcagagtttcagacatctgctggttcttccaggttccggtcagctgtgtatatcatatattaggtggttgcaggtaaaaatggtctagagggtgggggttgctttgtacaatccacatggtatttaagcttcatgtatataatcttttctgtttctag

SEQ ID NO: 2513 - DNA, 1529 bp, Zea mays
  Clone ID: PAT_MRT4577_69855C.1
gggtacctcgacaccggccggggttccgcagaatccgagtccaatagctctcctccccagggctttcaacttctccaaaccccatctcgccgccgaggccgagcgagcagagcagaacaccacgtcggcggcttttccctgtctctccgctggatactacacccgccgccgcagcgccgatcctgtccgagtcaagcggagcgggggatcggattggttgcttccttccctccatctcatgttggtggactgagagatggagttttaatttcaaatagcatctagaggactgccactaagcttttaagttggtatataatgggtggctgttgttgctgttcgtcgagaacatctgaagcagttagagcacgagcaccagttgatatatatcatcaacaaaatcttgaggagcaggagccattgtcttcaatttttgatggatcatctccagcctctgcaattgttgcagtagacacaaatctggatacttccacacctgacacatatcgagcgccgcctgcacccttgccttatgatgttattttggcagtcccaaataaccctggttttggaaactctgtaggtttggagaagccagacactaagagcaaaactgatgaccaacaagagtccataaatgatcaggagtctttaaaggtggatgagtcatgtaagaaaagtgtcactgaagataaggctgatgaggaggatgtttgccctatctgccttgaagaatatgatgaagaaaatccccgttctataactaaatgcgagcatcatttccatctttgctgcattctcgaatggatggagcgaaaagatacttgcccagtttgtgaccagattactttggtggatgagatgttcgaataggtttggtaaccttggtggatcatcactcgaagctgttcgttactgagaaagtgcagcaactaatttacttttgatattgatccattccgggtggctcgcatggtaatgaattgagggggcaaaaattgaaaggatgaatgtcatgaaatgtatttacaacgcctcctttgtcatgcgttgtgtcatgctatatatatgccggcttgcgggttcattcagttcaaagtccaggactatgccatttcgcttttctgaattcagagtttcagacatctgctggttcttccaggtatccggtcagctttttacatggtatattaggtggttgcaggtaaaaatggtctagatggaggtgggggttgctttgtataatccacatggtatttaagcttcatgtatataatcttttctgtttctcttcgttttgttctgctgaatacttgcagatccttactgttctgataaaacttactgactcccaaatctgtgccagacaaaacgtgtttcaggaacataatacatctgatagcacttgttaaaacatcttcggggcctgctaaaatgttcacattatgttccggctatgaaaactcgcagttctctgcgatgctacgagtcgcagacattttctttttttatcagtgttgtaaagtagc

SEQ ID NO: 2514 - DNA, 384 bp, Zea mays
  unsure (1)..(384): unsure at all n locations
  Clone ID: PAT_MRT4577_6991C.1
tttcttatttctgggaagcccaaacatcggacaaaaaactttattattgaactatanctcataagaaatctaaaagaggacaccaccaatgatgggttgttggtngaacactgctgggtttgtcaaagcntgttggttgaatggcngcaattgttgcngttgtntgagggtgccagcgttnggcgcctcgtgctggttgaacggcttcttctgtggttgtgtcctgatggtcgcngggctcacaccagcttgctggctgantggtngtngttgttgctgctgtgctttgctggagagtctcttgctgctggttggttgattgtgtgaaattgctgggggttggctgctggttgctggctgactggtggttgttgttgttgcttg

SEQ ID NO: 2515 - DNA, 742 bp, Zea mays
  Clone ID: PAT_MRT4577_69980C.1
ccctcgaggctcgccgggaagaatacataccgagcgaaccgagaaaccaacacagcaacaagcaaagcagcgatccgacatccgagagatggacgcggtgatgttcgggctggagactcccctgatggcggcgctgcagcacctgctggacgtgcccgacggcgacaacaagacgggcggcggcgccacgcgcacctacgtccgcgacgcgcgcgccatggcggccaccccggccgacgtgaaggagctgcccggcgcgtacgcgttcgtggtggacatgccggggctgggcacgggcgacatccgggtgcaggtggaggacgagcgggtgctggtggtcagcggcgagcggcgccgggaggagcgcgaggacgacgccaagtacctgcgcatggagcggcggatgggcaagttcatgcgcaagttcgtgctgccggacaacgccgacgtcgacaaggtcgccgccgtgtgcagggacggcgtgctcacggtgaccgtcgagaagctgcccccgccggagcccaagaagcccaagaccatcgaggtcaaggtcgcctgagggagcaagcagtagcccgtgcttctgaaactgtgtgttttgtgtttgctttcctttgtgacgcaaagcagaatgccctgatgctttctccacagaataaatctctacatgtctcttgtaacctttctggtgaagatcgtgtcgcgatgaatctagaataaatatcgatccgacttacagttc

SEQ ID NO: 2516 - DNA, 788 bp, Zea mays
  Clone ID: PAT_MRT4577_69981C.1
cctcgagcgcacgggcaccatcacaaaaccattcacacagcgaaccgagaaaccaacacagcaacaagcaaagcagcgatccgacatccgagatatggatgcggtgatgttcgggctggagactcccctgatggcggcgctgcagcacctgctggacgtgcccgacggcgacgccggcgcgggcggcgacagcgacaacaagacgggcagcggcggcagcgccacgcgcacctacgtccgcgacgcgcgcgccatggcggccaccccggccgacgtgaaggagctgcccggcgcgtacgcgttcgtggtggacatgccggggctgggcacgggcgacatccgggtgcaggtggaggacgagcgggtgctggtggtcagcggcgagcggcgccgggaggagcgcgaggacgacgccaagtacctgcgcatggagcggcggatgggcaagttcatgcgcaagttcgtgctgccggacaacgccgacgtcgacaaggtcgccgccgtgtgcagggacggcgtgctcacggtgaccgtcgagaagctgcccccgccggagcccaagaagcccaagaccatcgaggtcaaggtggcctgagggagcaagcagtagcccgtgcttctgaaactttgtgtgttttgtgtttgcttcctttgtgacgcaaagcagaatgccctgatgctttctccatagaataaatctctgttcacctacatgtctcttgtaacattttctggtgaagatcgtgtcgcgatgaatctagaataatatcgatccgacttacaagttt

SEQ ID NO: 2517 - DNA, 701 bp, Zea mays
  Clone ID: PAT_MRT4577_69984C.1
cgaaccgataaaccaacacagcaacaagcaaagcagcgatccgacatccgagagatggacgcggtgatgttcgggctggagactcccctgatggcggcgctgcagcacctgctggacgtgcccgacggcgacgccggcgcgggcggcgacaacaagacgggcggcggcggcgccacgcgcacctacgtccgcgacgcgcgcgccatggcggccaccccggccgacgtgaaggagctgcccggcgcgtacgcgttcgtggtggacatgccggggctgggcacgggcgacatccgggtgcaggtggaggacgagcgggtgctggtggtcagcggcgagcggcgccgggaggagcgcgaggacgacgccaagtacctgcgcatggagcggcggatgggcaagttcatgcgcaagttcgtgctgccggacaacgccgacgtggacaaggtcgccgccgtttgcagggacggcgtgctcacggtgaccgtcgagaagctgcccccgccggagcccaagaagcccaagaccatcgaggtcaaggtcgcctgagggagcaagcagtagcccgtgcttctgaaactttgtgtgttttgtgtttgcttcctttgtgacgcaaagcagaatgccctgatgctttctccatagaataaatctctacatgtctcttgtaaccttttctggtgaacgtcgtgccgcgatgaatc

SEQ ID NO: 2518 - DNA, 823 bp, Zea mays
  unsure (1)..(823): unsure at all n locations
  Clone ID: PAT_MRT4577_69985C.1
agacccaagaatcacatcacaattcacacagcgaaccgagaaaccaacacagcaacaagcaaagcagcgatccgacatccgagatatggatgcggtgatgttcgggctggagactcccctgatggcggcgctgcagcacctgctggacgtgcccgacggcgacgccggcgcgggcggcgacagcgacaacaagacgggcggcggcgccacgcgcacctacgtccgcgacgcgcgcgccatggcggccaccccggccgacgtgaaggagctgcccggcgcgtacgcgttcgtggtggacatgccggggctgggcacgggcgacatccgggtgcaggtggaggacgagcgggtgctggtggtcagcggcgagcggcgccgggaggagcgcgaggacgccaagtacctgcgcatggagcggcggatgggcaagttcatgcgcaagttcgtgctgccgaccaacgccgacgtcgacagggtcgccgccgtttgcagggacggcgtgctcacggtgaccgtcgagaagctgcccccgccggagcccaagaagcccaggaccatcgaggtcaaggtcgcctgagggagcaagcagtagctgtgcttctgaaactttggtggtgtttgtgtttgcttcctttggtatcaccaatcatcctatnctgatatatcggactgggggtttnntcgctgnngtttgaagctnttgtgacgcanagctgaatggccctggatgctgtctccatagaataaatctctacatgtctcttgtaacttttctggtgagaaatcgtgtcgcgatcaatcattaagggattttttttccatt

SEQ ID NO: 2519 - DNA, 1039 bp, Zea mays
  Clone ID: PAT_MRT4577_69986C.1
cggcggcgtgcagaggcgccgttgctagcttggattctgacttagaggcgttcagtcataatccggcacacggtagcttcgcgccactggcttttcaaccaagcgcgatgaccaattgtgtgaatcaacggttcctctcgtactagccacgagtccgcccacgcgtccgatcacaattcacacagcgaaccgagaaaccaacacagcaacaagcaaagcagcgatccgacatccgagagatggacgcggtgatgttcgggctggagactcccctgatggcggcgctgcagcacctgctggacgtgcccgacggcgacgccggcgcgggcggcgacaacaagacgggcagcggcggcagcgccacgcgcacctacgtccgcgacgcgcgcgccatggcggccaccccggccgacgtgaaggagctgcccggcgcgtacgcgttcgtggtggacatgccggggctgggcacgggcgacatccgggtgcaggtggaggacgagcgggtgctggtggtcagcggcgagcggcgccgggaggagcgcgaggacgacgccaagtacctgcgcatggagcggcggatgggcaagttcatgcgcaagttcgtgctgccggacaacgccgacgtcgacaaggtcgccgccgtgtgcagggacggcgtgctcacggtgaccgttgagaagctgcccccgccggagcccaagaagcccaagaccatcgaggtcaaggtcgcctgagggagcaagcagtagctgtgcttctgaaactttgtgtgtttgtgtttgcttcctttggtatcaccaatcatcctatctgatatatcgactggggttttcgctgggtttgaagctttgtgacgcaaagctgaatgccctgatgctgtctccatagaataaatctctacatgtctcttgtaaccttttctagtgaagatcgtgtcgccatgaatctatggtaccgtttgtttccttttaaaaaaaaaaaatggaattagtaatagagtactattttttagcaaaaaaaaaaaaaaaaaaggccccta

SEQ ID NO: 2520 - DNA, 824 bp, Zea mays
  Clone ID: PAT_MRT4577_69987C.1
cctcgaggccggccgggacaccaagaatacatcacacagcgaaccgagaaaccaacacagcaacaagcaaagcagcgatccgacatccgagagatggacgcggtgatgttcgggctggagactcccctgatggcggcgctgcagcacctgctggacgtgcccgacggcgacgccggcgcgggcggcgacaacaagacgggcagcggcggcagcgccacgcgcacctacgtccgcgacgcgcgcgccatggcggccaccccggccgacgtgaaggagctgcccggcgcgtacgcgttcgtggtggacatgccggggctgggcacgggcgacatccgggtgcaggtggaggacgagcgggtgctggtggtcagcggcgagcggcgccgggaggagcgcgaggacgacgccaagtacctgcgcatggagcggcggatgggcaagttcatgcgcaagttcgtgctgccggacaacgccgacgtcgacaaggtcgccgccgtgtgcagggacggcgtgctcacggtgaccgtcgagaagctgcccccgccggagcccaagaagcccaagaccatcgaggtcaaggtcgcctgagggagcaagcagtagctgtgcttctgaaactttgtgtgtttgtgtttgcttccttctttggtatcaccaatcatcctatctgatatatcgactggggtttttgctgtctccatagaataaatctctacatgtctcttgtaaccttttctggtgaagatcgtgtcgcgatgaatctataagttaccgtttgttttcttttaaaaaacaaaacaaacgataggaggaggggggggggg

SEQ ID NO: 2521 - DNA, 917 bp, Zea mays
  Clone ID: PAT_MRT4577_69988C.1
acagagcccgaacgcgggacgcctacgcctcgccgcgcccggggccccgcacactccacagcctttcagaaccttccgtcgccttccagaagaacagaagcccacccgtcaccaccaatataaactgcccctccagatcggcactccgcacaccaagaatcacatcacacagcgaaccgagaaaccaacacaacaagcaaagcagcgatccgacatccgagagatggacgcggtgatgttcgggctggagactcccctgatggcggcgctgcagcacctgctggacgtgcccgacggcgacgccggcgcgggcggcgacagcgacaacaagacgggcggcggcgccacgcgcacctacgtccgcgacgcgcgcgccatggcggccaccccggccgacgtgaaggagctgcccggcgcgtacgcgttcgtggtggacatgccggggctgggcacgggcgacatccgggtgcaggtggaggacgagcgggtgctggtggtcagcggcgagcggcgccgggaggagcgcgaggacgacgccaagtacctgcgcatggagcggcggatgggcaagttcatgcgcaagttcgtgctgccggacaacgccgacgtcgacaaggtcgccgccgtgtgcagggacggcgtgctcacggtgaccgtcgagaagctgcccccgccggagcccaagaagcccaagaccatcgaggtcaaggtcgcctgagggagcaagcagtagctgtgcttctgaaactttgtgtgtttgtgtttgcttccttctttggtatcaccaatcatcctatctgatatatcgactggggtttttgctgtctccatagaataaatctctacatgtctcttgtaaccttttctggtgatgatcgtgtcgcgatgaatctataagttaccgtttgttttcttgc

SEQ ID NO: 2522 - DNA, 373 bp, Zea mays
  Clone ID: PAT_MRT4577_70077C.1
cccacgcgttcggaggtgggttggcttctcctccccctgcggttggggtacggtgtcgtgaggttttccggggttcgggttcgtgggtgagcggatcgagatcgcggcgtcagatgttgaggaccgctgattggtctgtggtctcgcctgggccacggacgaccactccctccacaacgccttcagcacctacggcgaggttctacagttcatgatcatccttggtcgggagacgcagaggttccgcggttttagcttcgccacctttttcacgggggaggcgatgcggaacgccatctagggcatgaacgggctggagcttgacagccgcaacatctccgtgaacgaggcccattcccgcggcggacgctga

SEQ ID NO: 2523 - DNA, 1250 bp, Zea mays
  Clone ID: PAT_MRT4577_70092C.1
tctctttggctatatgctgaatcgtcatgtgctgctcttgttgtggcctcgatctcgtcttttggaatcaaccatcaatttactccaatggtgtatccccttcttgtcagctctgttggtattatagcatgtctcataacaacgttgtttgcaactgatttcttcgagataaaggctgcgaatgaaatagagcctgctctcaagaaacaacttataatatccactgttgtgatgaccattggcattgcgctcatcagttggcttggtcttccatacaccttcaccatttataactttggagcccagaagacagtgcaaagctggcaattgttcttgtgtgtggcggttggtctctgggctggcttagtcattggttttattactgagtactacacaagcaatgcctacagccctgtacaagatgttgctgattcctgcagaactggagctgccactaatgtcatttttgggcttgctctgggttacaaatcagtcattatcccaatttttgctattgcgtttagtatcttccttagcttcagccttgctgccatgtatggtgttgctgtggctgctcttggaatgctgagtaccattgccacaggccttgctattgatgcctatggccctatcagtgataatgctggaggcatagctgaaatggctgggatgagccataggattcgtgagagaactgatgctctagatgctgcaggaaacaccactgctgcaattggaaagggttttgctattggctctgcagccttggtatcccttgcactcttcggtgcctttgtaagccgggctgctatctccactgttgacgttctgactcctaaagtattcattgggcttattgttggtgctatgctcccatactggttctcggcaatgacaatgaaaagtgtaggcagtgctgcactcaagatggtggaggaagtccgccggcagttcaacaccatccctgggctcatggagggcaccacaaagcctgactacgcaacctgtgtcaagatctcaacagatgcatccatcaaggagatgatccccccaggtgctcttgttatgccgacaccactgatcgttgggattttgtttggggttgagaccctcgctggggtccttgctggtgcccttgtctctggtgttcagattgccatttctgcatccaacactggtggtgcctgggacaacgccaagaagtacattgaggctggagcttcagagcatgccaggacccttggcccaaa

SEQ ID NO: 2524 - DNA, 3688 bp, Zea mays
  unsure (1)..(3688): unsure at all n locations
  Clone ID: PAT_MRT4577_70096C.1
aatacaatcatgaaccatcttttattcatatgagaaaaaaatgtaacataagtgattcactgatatataaatgagggatgattctcctttatcaacttatagatgttaatgatgaatagacagagatatactccttggtaacttgtgagatttttgggagtagcttttacgactaggcataagtatctaactatttaagctagacaagtagatatttgttactctaatgcactggttaagattctcttcttaaattgataccaacatctccttaagcttacatacatgtgtttctaaccaatgcagggagtgttttgggaatggaaaactggatccgtatcactttcgccattgattcatcttctcttcttgatggtcttgagaggctgaaatctttctgccaaaggcataagaagaagaatttgcttaatggccattaactatattcgacttcaaagttgttacccacttccatcgttttccactgtatcatcaacaaaagtgtaacattgaaatccctcagaagtaataaagttaatgtttacattatgaggatatgcatgtcagtgtacatttttagtcaccttaatcctctgttttgaaatctttcgattttgcatttgtttcagttttccattacaatgttcttttcttttaatttgacatcacttataagtgtggtgatggtgacacctgttccaatgtactaaaggttacaattggggacaaattattatgtagtatgtcggttgtgaagtttgaagacagccgaaagttcaaaaaaaaaaaaaaaaaaaaaaaaaaaaaaaaaaaaaaaaaaaaaaaaaaaaaatcctcccttccctcccgtaccgtatcagtctcccggattctctccggttcgtgggagggccaaagcttcgagttaggaaaaccctaccgctgtgggagtagcctccggcgatggctgcggcggcgatcctgccggagctggcgacgcaggtgctcatcccggtcgcggcggccgtgggcatcgcgttcgcggtggtgcagtgggtgctggtctccaaggtgcgggtcacccccgagcgccgcgcggacggcggggccgtgaagagcgggcccagcgactacctcatcgaggaggaggagggactcaacgaccacaacgtcgtcgtcaagtgcgccgagatccagaccgccatctctgaaggagctacatctttccttttcactgagtacaagtatgttggattattcatgggcatctttgcaatccttatattcctcttccttgggtctgtcgagggattcagcacgaagagtcaaccttgccactatatcaaggaccagacttgcaagcctgcccttgctaatgccatcttcagtactatagcttttgtgcttggtgcagtcacctcactagtttccggctttcttggaatgaagatcgcaacttatgcgaatgcccggacaactttagaggccagaaagggtgtcggaaaggcatttattactgccttccgagctggtgcagtaatgggcttcctgcttgctgccagcggtcttttggttctttacattgctatcaatttgtttggaatttattacggtgatgactgggaaggtctttttgaagctattactggttatggccttggtggttcttctatggctcttttcggccgcgttggtggtggtatttataccaaggctgctgatgttggtgctgaccttgtggggaaggtagaaagaaacattcctgaggacgatccaagaaacccagctgttattgctgacaatgttggtgataatgttggagatattgctggaatgggatcagatctctttggctcatatgctgaatcatcatgtgctgctcttgttgtggcctctatctcgtcttttggaatcaaccatgaatttactccgatggtgtaccctcttctcgtcagttctgttggtattatagcatgtctcataacaacgctgtttgcaactgatttcttcgagataaaggctgtggatgaaatagagcctgctctcaagaaacagctcataatttccacaattgtgatgaccattggcattgcactaatcagttggcttggtcttccatacactttcactattttcaactttggagtccagaagacagtgcaaagctggcaattgttcttgtgtgtggcggttggtctctgggctggcctagtcattggttttgttactgagtactacacaagcaatgcctacagccctgtacaagatgttgctgattcctgcagaactggagcagctactaatgtcatttttgggcttgctttgggttacaaatcagtcattatcccaatttttgctattgcgtttagtatcttcctcagcttcagccttgctgccatgtatggtgttgctgtggctgctcttggaatgctgagcaccattgccacaggtcttgctattgatgcatatggccctatcagtgataatgctggaggaatagctgaaatggctgggatgagccataggattcgtgagagaactgatgctctagatgctgcaggaaataccacggctgcaattgggaagggttttgccattggctctgcagccttggtttcccttgcactatttggtgcgtttgtaagccgggctgctatctccactgttgatgttctgactcctaaagtattcatcgggcttattgtcggtgctatgctcccgtactggttctcggcaatgaccatgaagagtgtgggcagtgctgcgctcaagatggtggaggaagttcgtcggcagttcaacaacatccctgggctcatggaaggcaccacaaagcctgactacgcaacttgtgtcaagatctcaacggatgcatccatcaaggagatgatccccccaggtgctcttgttatgctcacaccactgatcgttgggattctatttggggttgagaccctctctggagtccttgctggtgcccttgtctctggtgttcagattgccatttctgcatccaacactggtggtgcctgggacaacgccaagaagtacattgaggctggagtttcagagcatgccaggacccttggcccaaaaggttctgaccctcacaaggcggctgtcattggtgacaccattggagatcctctcaaggacacgtctggcccttccctcaacatcctcatcaagcttatggcggttgaatcccttgtcttcgcccccttcttcgccgcccatggtggcattctcttcaaatggctctaagccagcgagagacgcaggataaaggccgtagttttgcaaggcgagtagagcagtatgtcagtaatacagcatctatggcatgtgcttttgctcgtccagttcatgagccccgttgtgtatttggtttccgttttcttggttggagtttttagttccaaggtccgatcatgttttgatcccataaattctcttccagccttcgagcaactgagtccatcttcctaagtcatcagccccagcgagacattgaagcatggggaaacttaaacagtatggtgatgattaatctcagcattttttttcttgcagcaatcaatatggactttgcttaaaatttcgttgtcttttcaaaacgatatgcaagcaaaatggaagtgatgttctttgaaactttgtttcaatgctatagcaaangtttgcattttacaaaaaaaaaaaaaaaaaa

SEQ ID NO: 2525 - DNA, 763 bp, Zea mays
  Clone ID: PAT_MRT4577_70099C.1
atcgccatattatttagacccactagcaacatataaagcacaatagtgtgccaacaatggcagccaaaatattttgcctccttatgctccttggtatttctgcaagtgctgctacggcgaccattttcccgcaatgctcacaagctcctatagcttcccttcttcccccgtacctctcaccagcggtgtcttcggtatgtgaaaacccaattgttcaaccctacaggatccaacaggcaatcgcagctggcatcttacctttatcacccttgttcctgcaacaatcatcagccctattacagcagttacctttggtgcatttattggcacaaaacatcagggcacaacaactacaacaacttgtgctagcaaaccttgctgcctactctcagcaacagcagtttcttccattcaaccaactagctgcattgaactctgcttcttatttgcaacaacaacaactaccattcagccagctacctgttgcctacccccagcaatttcttccattcaaccaactggcagcattgaactctcctgcttatttacagcagcaacaactactaccattcagccagctagctggtgtgagccctgctaccttcttgacacaaccacagttgttggcggtctaccagcacgctgcgcctaacgctggcaccctcttacaactggacaattggtggcattcacccaactggtgttgacaaacctagcaggtggtctaccaacaacccatctttggtgggtgcccctctttaga

SEQ ID NO: 2526 - DNA, 602 bp, Zea mays
  Clone ID: PAT_MRT4577_70100C.1
ctcggggatcacatgctaatatagctgcttgtctttcaccatacctatgaccagcgagcgtattcagaatgcgaaagcccaattcttcaatccctataggatccaacaggcagcctcaggtggcatcatacctttatcacccttgttcctccaacagtcatcagccctattacagcagttacctttggtgcatttattggcacaaaacatcagggcacaacaactacaacaacttgtgctagcaaaccttgctgcctactctcagcaacaacagtttcttccattcaaccaactagctgcatcgaactctgcttcttatttgcaacaacaacaactaccattcagccagctatctgctgcctacccccagcaatttcttccattcaaccaactgacagctttgaactctcctgcttatttacagcagcaacagctactaccattcagccagctagctggtgtgagccctgctaccttcttgacacaaccacaattgttgccgttctaccagcacgctgcgcctaacgctggcaccctcttacaactgcaacaattgctgccattcaaccaacttgctttgacaaaccccacagcattctacc

SEQ ID NO: 2527 - DNA, 692 bp, Zea mays
  unsure (1)..(692): unsure at all n locations
  Clone ID: PAT_MRT4577_70102C.1
ccatcataggccaatcactagccaacaatgagcacnaaaaatatttcggattcttgtgctccttgcccttcttgcatgtgctgctacggtggccattgtgccacaatgctcacaaggttctatagctacccttcttnccccgtacctctcaccaacggtgtcttcggtatgcgaaaacccaatttttcaaacctacaggaaccaacaggcaaacgcaggtgacattttacctttatcacccttgatgctccaacaatcatcagccctataacagcagttacctttggtgcatttattgacacaaaacatcagggcacaacaactacaacaacttgtgctagcaaaccttgctgcctactctcaacaacagcagtttcttccattcaaccaactagctgcattgaactctgcttcttatttgcaacaacaacaactaccattcagccagctatctgctgcctacccccagcaatttcttccattcaaccaactgacagcattgaactctcctgcttatttacagcagcaacaactactaccattcagccagctagctggtgtgagccctgctaccttcttgacacaaccacagttgttgccgttctaccagcacgctgcgcctaacgctggcaccctcttacaactgcaacaattgctggcattcaaccaacttgctttgacaaacccagcag

SEQ ID NO: 2528 - DNA, 718 bp, Zea mays
  Clone ID: PAT_MRT4577_70103C.1
cccatattcattgtgaccaacatagcaacatagatagcacaacagtgtaccaacaatgggagctaaaacattttgcctgcttatgctccttggtctttctgcaagtactgctacggcgtccattttgccacaatgctaacaagctcctatagctaccctcttttccccgtacctgtcaccaacggtgccttcggtatgtgaaaacccaattcttcaaccctacaggatccaacaggcaatcgcagctgccatcttacctttaacacccttgttcctccaacaatgatcagccctattacaatagttacctttggtgcatttattggcacaaaacatcaggccacaacaactacaacaacttgtgctagcaaaccttgctgcctactctcagcaacagcagtttcttccattcaaccaactagctgcattgaactctgctacttatttgcaacaacaacaactaccattcagccagctatctgctgtctacccccagcaatttcttccattcaaccaactgacagcattgaactctactgcttatttacagtaacaacaactactaccattcaaccagctagctggtgtgagccctgctaccttcttgacacaaccacaggtgcttgacgtactaccagcacgctgtacctaacgctggcaccctcttacaactgacacaattggtgccattcaaccaatttgatttgacaaacccagc

SEQ ID NO: 2529 - DNA, 676 bp, Zea mays
  Clone ID: PAT_MRT4577_70107C.1
cgggacatatattgagacacactagcaccatacaaagcacattagaagcaccaacaactggccagcctgaatagttctgcctccttatgctccttggtctttctgcacgtgctgctgcggcgaccatgctcccgaaatgctcacaggctcctatagcttcccttcttcccccgccctatcccagcggggccttcggtatgagaaaacccaattcttcaaccctacaggatccaacaggccatcgcagttggcactctacctttatcacccttgttcctccaacaatcatcaaccctattacagcagacaccttaggtgcatttattggcacagaacatcagggcacagcaactacaacaacttgcgctagcgaaccttgctggctactctccacaacagcagtgtcttccattcaaccaactagctgcattgaactctgcttattattggcaacaacaacaactaccattcagccagctacctgttgactacccccatcagttgcttccattcaaccaactggcagcattgaactctcctgcttattgacaggagcagcaactactaccattcaatcagctagctggagtgagccctgctaccttcttgacacaaccacagttgttgccgttctaccagcacgctgcgcctaacgctggcaccctcttacaactgc

SEQ ID NO: 2530 - DNA, 435 bp, Zea mays
  Clone ID: PAT_MRT4577_70109C.1
ctgactcgttttctgactctttgttctacactttttctgactcgttgtcagcggcgtcttcaatgttgtaaaacccaattgttcaaccctacatgatccaacatgcaatcgcaacatgcatcttaccattatcacccttgttcctccaacaaccgtcatccctattacatcatttacctttggtccatttgttggcacataacatcattgcacaacatcttcaacaacttgtgctagcaaaccttgctgcatactctcaacaacatcagtttcttccattcaaccaacctggcttcatagaactctgctgcttatttgcaacaacaattaccattcatccagctagttgcttcctacccccactaattctttcattcaaccaactaacaacattgaactctgctgcttatttacagcagcaacaacttctaccat

SEQ ID NO: 2531 - DNA, 530 bp, Zea mays
  Clone ID: PAT_MRT4577_70114C.1
ggccgcttttttttttttttttttggaaatgtactttcttatttctgggaagccacaaacatcagacaaaaaactttattattgaactataactcataagaaatctaaaagagggcaccaccaatgatgggttgttggtagaacgctgctgggcttgtcaaagcaagttggttgaatggcagcaattgttgcagatgtaagagggtgccagcgttaggcgcagcgtgctggtagaacggcaacaactgtggttgcatcaagaaggtagcagggctcacaccagctagctggctgaatggtagtaggtgctgctgctgcaaataagcaggagagttcaatgctgacagatggttgaatggaagatattgctgctggtaggcaaaacgtagctggctgaatggtaagacttgttgtagcgcataataagcagagttcaaggcatctagtaaagtgaatggaagagactgctgacgctgaaagtaatgaccaagcaccgttagaacaagctgtcgtacttgtggtgcaaggac

SEQ ID NO: 2532 - DNA, 552 bp, Zea mays
  Clone ID: PAT_MRT4577_70133C.1
actttcttatttctgggaagccacaaacatcagacaaaaaactttattattgaactataactcataacaaatctaaaagagggcaccaccaatgatgggctgttggtagaacgctgctgggtttgtcaaagcaagttggttgaatggcagcaattgttgcagatgtaagagggtgccagcggtaggcgcatcgtgctggtagaacggcaacaactgtggttgtatccagaaagtaacaaggctcacaccagctatctggctgactggtagtagctgatgctgctgtaaataagcatgagagttcaatgctgccagttggttgaatggaagaaattgctgggggtaggcatcaggtagctggctgaatggtagcatgacgctggtgcaaataacaagcatagttcaatgcagctcgttggttgaatggaagaaactgctgatgctgaaagtaggcagcaaggtttgctagcacaagttgttgtaagcctggtgtgcactgatgttatgtgccaataaatgcaccaaacgttactgatgtaatagggccgatga

SEQ ID NO: 2533 - DNA, 435 bp, Zea mays
  Clone ID: PAT_MRT4577_70137C.1
tctcttattaatgggaagccacaaacatgaaaaaaaaaactttattacttgaactataactcactaacaaatataaaaggagggcaccaccaatgaaggcttgttggtagaacactgatgagtttgacaaagcaagttgcctgaatggcatcaattgttgcagatgaaagagggtgccaacgttaggcgcaacgtgctggtagaacggcaacaactgtggttgtgtcaagaaggtagcagggctcacaccagctagctggctgaatggtagtagttgttgctgctgtaaataagcaggagagttcaatgctgctagttggttgaatggaagaaattgctgctggtaggcagcaggtagctggctgaatggtagttattgttgatgcaaataacaagcagacatcaatgaacctagctggttgaatggaagaaact

SEQ ID NO: 2534 - DNA, 754 bp, Zea mays
  unsure (1)..(754): unsure at all n locations
  Clone ID: PAT_MRT4577_70138C.1
ggtaccctccgggtcggccgggnatccacatattattaagaccaactagcaacatagaaagcacaatagtgtaccaacaatggcagccaaaatattttgcttccttatgctccttggtctttctgcaagtgctgctaccgcgaccattttcccgcaatgctcacaagctcctatagcttcccttcttcccccatacctctcatcagcggtgtcttcagtatgtgaaaacccaattcttcaaccctacaggatccaacaggcaatcgcagcaggcatattacctttatcacccttgctcctccaacaaccgtcattcctactacagcagccacctttgcagcatttggtgccacacaacatgacgccacaacaactacaacaactggtgctagaccaccttgccgactactatcaacagcagcagcttccatcataccaacaaccggcagtgaacaacgctgctgattagcaacaacaacaactaccattcagccagctatctgctgcctacccccagcaatttcttccattcaaccaactgacagcattgaactctgctgcttatttacagcagcaacaactactaccattcagccagctagctggtgtgagccctgctaccttcttgacacaaccacagttgttgccgttctaccagcacgctgcgcctaacgctggcaccctcttacaactgcaacaattgctggcattcaaccaacttgctttgacaaacccagcagcattctaccaacaa

SEQ ID NO: 2535 - DNA, 467 bp, Zea mays
  Clone ID: PAT_MRT4577_70140C.1
catctagcatcataaaaagcacaatattagttccagcaatggccgctaaaatatcatgcctccttatgctccttggtcttcctgcaagagctgctacggcgaccatcatcccacattgctcacaagctgatatagcttgccttcttccaacgtacctctcaccaacggtgtcttctgtatgtgaaaacacaatgcttcaaccctacaggatccaacatgcaataacagctggcatcttacctttatcaccattgttcctccaacaatacatcagccctattacaacaggtacctttggtgcatttattgacacaaaacatcagggcacaacaactactacaactatgtgctaacataccttgctgcctactctcagcaacagcagttacttccattcaaccaactagctgcattgaactctgcttcttatttgcaacaacaacaactaccattcatccagctatctg

SEQ ID NO: 2536 - DNA, 623 bp, Zea mays
  Clone ID: PAT_MRT4577_70141C.1
ttgagcggccgcccgtacaggtactttcttatttctgggaagccacaaacatcagacaaaaactttattattgaactgtaactcataagaaatctaaaagagggcaccaccaatgatgggttgttggtataacactgctgggtttgtacaaagcaagtcggactgaatggcaacaattgttgcatttgtaagagggtgccagcgttaggcgcagcgtgctggtataacggaaacaactgtggttgtgtcaagaaggcagcagggctcacaccagctacctggctaaatggtagtagatgttgctgctgtaaataagcaggagagttcaatgctgccagttggttgaatggaagaaactgctgcgggtatgcagcaactagctggatgaatggtaattgatgatgttgcaaataagaagcagagttcaatgcaactagttggttgaatggaagaaactgatgttgctgagagtacgcagcaaggtttgctatcacaagttgttgcacttgttgagccctgatgatatgtgccaataaatgcaccaaacgtaactgctgtaatatggctgatgactgttggacgaacataggtgataaatgtaagatgccagctgcgattgcctg

SEQ ID NO: 2537 - DNA, 622 bp, Zea mays
  unsure (1)..(622): unsure at all n locations
  Clone ID: PAT_MRT4577_70142C.1
gggtaccntccgngggctcggcccgggccgggnaaaaaaaaaaaaaaaaaaaaaaaaaaaaaaaaaaaaaaaaaaaaaaaaaaaaaaaaaaaaaaaaaaaaaaaaatcacacattttattaagaccaactagcaacatagaaggcacaatagggtcccaacaagggcagccaaaatatttggcttccttaggctcctgggtctttttgaaagggctgctaccgggaccattttcccgaaaggctaacaagctcctatagcttccttttttcccccatacctttaataaggggggttttaagtatgggaaaacccaatttttaaaccttacaggatccaacaggcaatcgcagcaggcatcttacctttatcacccttgttcctccaacaaccgtcatccctattacagaagttacctttggggcatttgtgggcacaaaacataagggcacaacaactacaacaacttgggctagcaaaccttgctgcctacttttagaaacagcagttttttccattcaaccaactggctgcattgacctctgctgcttatttgcaacaacaactaccattcagccagttagttgttgcctacccccagcaattacttccattcaaccaac

SEQ ID NO: 2538 - DNA, 386 bp, Zea mays
  Clone ID: PAT_MRT4577_70145C.1
gtcgcccgtacaggtactaacattggttttcaaaatattttgccttcttatgcggggtggtctttctgcaagtgctgctacggcaaccattatcccgcaatgctcacaagctcctatagcttcccttcttcccccatacctctcaccagtggtgtcttcggtatgttgaaaacccaattcttcaatcccacaagatccaacaaggcaatcgcagctggcatattacctttatcaccctagttcctccaacaatcataagtcctattacagcagatacctttggtgcatttattggcacataacattatggctcaacatcttcaacatcttgtgctagcaaaccttgctgcctactctcagaaacataagtatcttccattcaacca

SEQ ID NO: 2539 - DNA, 533 bp, Zea mays
  unsure (1)..(533): unsure at all n locations
  Clone ID: PAT_MRT4577_70162C.1
ccgcacagtagtgtaccaacaatggcagccaaaatattgtgcctccttatgctccttggtctttctgcaagngctgttacggcgaccattttcccgcaatgctcgcaagctcctatagctntctttttttctgcgtacctatcaccagccgtgtcttgggtgtgtgaaaacccaattcttcagccctacaggatccaacaggcaatnacagctggcatctgacctttatcacctttgttnctccatcaatcatgagccctattacatcagttacctttggtgcatttattggcncaaaacattagggcacaacaactacaacaacttgtgctagcaaaccttgctgnctactttcagcaacagnagtttnttctctncaaccaactagctgcnntgaactctgcttcttatttgcagcaacaacaactaccattaagccagntacctgctgcctacccccagnaatttcttccattataccaactgnnagcatgnaactcttctgcttatntacagcatcaacaactactacc

SEQ ID NO: 2540 - DNA, 418 bp, Zea mays
  Clone ID: PAT_MRT4577_70166C.1
ctaaaaatgtactttcttatttctgggaagccacaaacatcacacaaaaaactttattattgaactataactcataagatatttaaatgagggcaccacccatgatgggttgttggtagaatgctgctgggtttgtacaaaacaagttgggtgaatggcaccaattgttgcaattgaaagagggagccatcgctaggcgcaccgtgctggtagaacggcaacaattgtggctgtgtcaagaaggtaacacggctcacaccagctagctggctgaatggtagtacctgatgctgctgtaaataaccaagatagttcaaagctgacagctggttgaatggaagaaattgctggcggtaggcagcagatagctggctgaatggtacctgctgcttgatgaaataacaagcatagttcattg

SEQ ID NO: 2541 - DNA, 422 bp, Zea mays
  unsure (1)..(422): unsure at all n locations
  Clone ID: PAT_MRT4577_70175C.1
gcctgcggtgccggtaccgaatcgcagtttcggcccaggcctacgagaccaactgggagacatacaaagcacatgtagtgtaccaacaatggcagccaaaatatttcgcttccttatgctccttggtctttctgcaagcgatgctaccgcaaccattttcccacaatgctcacaagctcctatagctttcctttttcccccatacctctcaccagcggtgtnttcagtgtgtgaaaacccaattgttcaaccctacaggatccaacaggcaatcgcaacaggcatcttaccattatcacccttgttcctccaacaaccgtcagccctaatacaagagttaccttgggtccattggggggcccaaaacttaagggaccaacacctccaacaactggggctagcaaaccttgctgttactttaa

SEQ ID NO: 2542 - DNA, 424 bp, Zea mays
  Clone ID: PAT_MRT4577_70190C.1
cccacgcgtgggttaacacaactagcaacatatcaaagccacaatgatgcgtcaccacacaatggcagccaaaatatctttgcctccttatgctccttggtatttactgcaagtgctgctacggcgaccattttcccgcaatgctcacaagctcctatagcttcccttcttcccccgtacctctcaccagcggcgtcttcggtatgtgaaaaacccaattcttcaaccctacaggatccaacaggcaatcgcaactggcatgttacctttatcacccttgttactccaacaatcatgaaccctattacagcatttaccttgggtgcattgattggcacaaaacatcagggcacaacaactacaacaacttgtgctatctaaccgtgctgcctactgtcagcatcaaaagtgacttccatttaac

SEQ ID NO: 2543 - DNA, 773 bp, Zea mays
  Clone ID: PAT_MRT4577_70195C.1
agaaatgtactttcttatttctgggaagccacaaacatcatccaaaaaacttcattattgaactataactcataagcaatctaaaagagggcaccaccaatgatgggttgttggtagaacgctgttgggtttgtcaaagcaagttggtcgaatggcagcaattgttgcagttgtaagacggtgccagcgttaggcgcagcgtgcaggtagaatggcaacaactgttgctgtgtcaagaaggcagcagggctcacatcagctagctggctgaatggtggtagctgttgctgttgtaaataagcagcagagttcaatgctgccagttgattgaatggaagaaattgctgggggtaggcagcagctagctggctgaatggtagttgttgttgcaaataagcagcagagttcaatgcagccagttggttgaatggaagaaactgatgttgctgagagtatgcagcaaggtttcctagcacaagttgttgtagttgttgtgccctaatgttttgtgccaacaaatgcaccaaaggtaactgttgtaatagggctgacggttgttggaggaacaagggtgataaaggtaagatgcctgctgcgattgcctgttggatcctgtagggttgaagaattgggttttcacacactgaagacactgctggtgagaggtatgggggaagaagggaagttataggagcttgtgagcattgcgggaaaatggtcgcggtagcagcacttgcagaaagaccaaggagcataaggaagcaaaatatttt

SEQ ID NO: 2544 - DNA, 357 bp, Zea mays
  Clone ID: PAT_MRT4577_70196C.1
tcggcacaatagtgtaccaacaatggcagctaaaatattttgcctccttatgctccttggtctttctgcaagtgctgctaccgcgaccattttcccacaatgctcacaagctcctatagcttcccttctttccccgtacctttcaccaacggggtcttcggtatgggaaaacccaattcttcaacccttcaggatccaaccggcaatcgcagcttgcattttacctttattacccttggtccttcaacaatcattaggcctattacagcaggtacctttggggcatttattggcacaaaacattaagggacaacaacttccacaacctgggcttgcaaaccctggttgcctacttta

SEQ ID NO: 2545 - DNA, 638 bp, Zea mays
  Clone ID: PAT_MRT4577_70202C.1
gcacgcctgcatgtaccgggctcctcttacacggtcgacctagtcgttcgattgataccaactagcacatattaaacacaataatgttccaacagtggctatcccaaatatttagcctacttatgctccctgccctttctggcagtgctgctacaacacaccatttttccgcaatgctcgcaagctcctatagcttaccttcttcccccgtacctgtcaccaacggtgtgttccatctgtcaaaaccaacttcttcaaccgtacatgatccaacaaggaatcacagctgacatcttaccttttcacactgtgttcctccaacagttattagacatattacaacaattaccttctgtgcatttattgacacaaaacattaggtcacaacaactacaacaacttgtgctagcaaaccttgctgcctactctcaacaacaacagtttcttacattcaaccaactaggttcattgaactctgcttcttatgtgcaacaacaacaactaccattcagccagctacctgctgcctacccccaccaatgtcttccattcaaccaactagcaacattgaactctcctgcttatttacagcagcaacaactactaccattcatacagctagcatgcgtgagccctgc

SEQ ID NO: 2546 - DNA, 826 bp, Zea mays
  Clone ID: PAT_MRT4577_70203C.1
acaccattatccggacctctagcagcatacaaagctcaatagtgggccagcagtggccggcaaaatatgcctgcctgcttatgctccttggtgctttctgcaagcgctggtacggggaccacttttcccacaactgctcacaagctcctatagcttccctaatgcccccgtacctctcaccagaggagcatagggtatgcgaaaacccaatgcttcagaccctataggatccaacaggcaggtcgcagctggcatcttacctttatgaccctcgttcctccatcaatcatcagccctattacagcagctacctttggtgcatttattggctcagaacatcagggcacgacaactacaagcaactcgtgctagcagaccttgctgcctactgtcaggaacaacagattcttccattgaaccaactagctgcattgaactctgcttcttatttgcagcaacaacaactaccattcagccagctacctgctgcctacccccagcaagtttcttccattcaaccaactggcagcattgaactctgctgcttatttacagcagcaacaactactaccattcagccagctagctggtgtgagccctgctaccttcttgatacaaccacaggtgttgccggtctaccagcacgctgcgcctaacgctggcaccctcttacaactgcaacaattgctgccattcaaccaacttgctttgacaaacccagcagcgttctaccaacaacccatcattgggtggtgccctcttttagatttcttatgagttatagctcaatcataaagttttttgtctgatgtttgtggcttcccag

SEQ ID NO: 2547 - DNA, 358 bp, Zea mays
  Clone ID: PAT_MRT4577_70204C.1
tcgagaccaacttgcaacatagaaagcacaatagtgtaccaacaatggcagccaaaatattttgccttcttatgctccttggtctttctgcaagggctggtaccgcgaccatttttccgaaatgctcgcaagcttctatagctttccttctttccccgtacctttcaccagcggggtcttcggtatgtgaaaacccaattctttaaccctacaggatccaacaggcaatcacaggtggcatcttacctttatcacccttggtccttcaacaatcatcaggcctattacatcaggtacctttggtgcatttattggcacaaaacattaaggcacaacaactacaacaacttgtgctagc

SEQ ID NO: 2548 - DNA, 348 bp, Zea mays
  Clone ID: PAT_MRT4577_70229C.1
agcagctagggttccgtcctcgatccgatccgccgagtgcacaccacctttccgcactccgatcgaatcgatggccgctgagggcgagaagctgatgatcaccctcaaaagctccgatggcgaggagttcgatatggaagatgcggtggcgatggagtcgcagaccatccgccacatgatcgacgattactgcgtcgacaacggcatagcctcttcctaacgtgaactcgatgatcgtatccacggtactcgagtactgcaacaagcacgtacatggcgccgcagccgcagctgacgtctcgacagccggttccgatgacgtgggtgacgagtccggcaacagcaccg

SEQ ID NO: 2549 - DNA, 459 bp, Zea mays
  Clone ID: PAT_MRT4577_70230C.1
gaacgggccttacttatttgggaacccctcatacaagaagatttttttgactatcctcatataaacttaaagaggcaccaccaatgatgggttgttggtagaaacgctgctgggtttgtcaaagcacgttggttgaatggcagccattgttgcccttgtaagagggtgccagcgctaggcgcagcgtgctggtagaacggaaacaactgtgcgttgcatcaagaaggtagcagggctcacaccagctagctggctgaatggaactagttgttgctgctgaaaataagcaggagagttcaatgctgccagttggttgaatggaagaaattgctgggggtaggcagcaagtagctggctgaatggtacttgttgttgttgcaaattacaagtagtattcagtgcaactagctgcttgaatggaagaaactgctgttgctgagagtctgctacatggtttgt

SEQ ID NO: 2550 - DNA, 501 bp, Zea mays
  Clone ID: PAT_MRT4577_70234C.1
cggccgccgggtgctggaaacgcccttcagcggacgaccgaccaggttttgtgggcacaaaacatcaaggaacaacactacaggagcttttttagcaaaccttgctgcctactctcagcaacatcagtttcttccattcaaccaactagctgcattgaactctgcttcttatttgcaacaacaacaacttccattcaaccagctagctgctgcctacccccagcagtttcttccattcaaccaactggcagcattgaactctcctgcttattaacagcagcaacaacttctaccatttagccagctagctggtgtgagccctgctgccttcttgacacaaccacagtagatgccgttctaccagctcgctgagcctaacgctggcaccctcttacaactgcaacaattgttgccatacaaccaacttgcatagacaaacccagcatagatataccaacaacccatcattggtggtgcccctctttagatttcttatgagtt

SEQ ID NO: 2551 - DNA, 762 bp, Zea mays
  Clone ID: PAT_MRT4577_70239C.1
gaggtctcggcctgggatcgcacatacttagttgacgacacaactagtcgacatagaaaagcacaataagcgcaccaacaatggcagcgcaaaatattgggcctccttatgctccttggtctttcctgaagcgctgttacagcgaccacttttcccgcactgctcgcaagctgcctatagcttcccttcttcccccgtacactctacaccagcggggtgttcgggatgcgaaaacccaattcttcaaccctacaggatccaacaggcaatcgcagctggcatcttacctttatcacccttgttcctccaacaatgatcagccctattacaacagctacctttggagcatttattggtacaaaacatcagggcacaacaacaacaacttgtgctagcaaaccttgctgcctactctcagcaacagcagtttcttccattcaaccaactaggttcattgaactctgcttcttatttgcaacaacaacaactaccattcagccagctacctgctgcctacccacagcaatattgttccattcaaccaactagcagcattgaactctcctgcttatttacagcagcaacaactactaccattcagccagctagctggtgtgagccctgctaccttcttgacacaaccacagatgttgccgttctaccagcacgttgcgcctaacgctggcaccctgttacaactgcaacaattgctggcattcaaccaacttgctttgacaaacccagcagtgttgtaccaacaac

SEQ ID NO: 2552 - DNA, 430 bp, Zea mays
  Clone ID: PAT_MRT4577_70242C.1
attgagaccaactagcaacatagaaagcacattattgtaccaataatggcagccaaaggagtgtgcctcattatgctccttggtctttctgcaagtgctgctacggctagcattttcccgcaatgctcacaagctcctatagcttcccttcttcccccatacctctcaccagcgatgtcttcagtatgtgaaaatccaattcttctaccctacatgatccaacaggcaatcgcagcaggcatcttacctttatcacccttgttcctccaacaatcatcatccctattacagcaagtacctttgaggcatttatttggacaaatcatcatggcacaacatctacaacaactcgcgctatcaaaccttgcttcctactcttagcacagtcagtaccttttgtgcaattgttgcatcaaaacattatggctca

SEQ ID NO: 2553 - DNA, 430 bp, Zea mays
  Clone ID: PAT_MRT4577_70245C.1
aacatataaagcacaatcatataccttcaatttcaaccaaaatattttgcttccttgtctcgttaaactttatgcaagtgctgctaccgcaaccattttcccacaatgctcacaagctcctatagcttcctttcttcccccatacctctcaccagctgtgtcttcactatgtgaaaacccaattcttcaaccctacaagatccaacatgcaatcgcagcatgcatcttacctttatcacccttgttcctccaacaaccgtcagccctattacagcacttacctttcgtgcattttttggcacaaaacatcaatgcacaacaactacaacaactttttctatgaaaccttgctacctactctcatcaacagcactttcttccattcaaccaacttgcttcatttaactctactgcttattttcaacaacaa

SEQ ID NO: 2554 - DNA, 437 bp, Zea mays
  Clone ID: PAT_MRT4577_70261C.1
gctacatagaaagcacattagtgtaccaacaatggcggccaaaatattttgcctccttatgctccttggaattactgcaagtgctgctacggcgaccattctcccgcaatgctcacaagctgctatagattccctttttcccccgtacctttcaccagcggagtcttcggtttgcgaaaacccaattcttcaaccctacaggatccaacaggcaatcgcagctggcatcttacctttatcacccttgttcctgcaacaatcatcagccctattacaggagttacctatggtgcatttattggcacaaaacatcagggcacaacagctacatcaacttgcgctagcaaccttgctgtctactctcaggaacagcagttttttccatttaaccaactagccgcattgaactttgcttctatttgcaacaccaacaacta

SEQ ID NO: 2555 - DNA, 591 bp, Zea mays
  Clone ID: PAT_MRT4577_70267C.1
atttcaccaacggtgtcttcggtatgtgataaacacaattcttcatcccaacaggatacaacaggcaatagcagttggcatgttacctttatagcacttgttgcctgcaacaataatgatgcctattacagaagatacctttggagcatttattggcacaaaacatcagggcacaacgactacaacaacttgtgctagcaaaccttgctgcctactctcagcaacagcagtttcttccattcaaccaactagctgcattgaactctgcttcttatttgcaacaacaacaactaccattcagacagctatctgctgcctacccccagcaatttcttccattcaaccaactgacagcattgaactctcctgcttatttacagcagcaacaactactaccattcagccagctagcttggtgtgagccctgctacacttcttgacacaaccacagttgttgccgttctaccaacacgctgcgcctaacgctggcaccctcttacaactgcaacaattgctgccattcaaccaacttgctttgacaaacccagcagcattctaccaacaacccatcattgagtggtgacctctttt

SEQ ID NO: 2556 - DNA, 415 bp, Zea mays
  Clone ID: PAT_MRT4577_70268C.1
tttcttatttctgggaagccacaaacattaaacaaaaaactttattattgaactataactcataagaaatctaataagagggcaccaccaatgatgggttggtggtagaacgctgctgagtttggcaaatcaagcaggttgaatggcagtaatagttgcagctgtaagagggtgccagcgttaggcgcatcgtgctggtagaacggcaacaactgtggttgtatcaagaaggtagcagggctcacaccagctagctggctgaatggtagtagttgttgctgctgtaaataagcaggagagttcaatgctgccagttggttgaatggaagaaattgctgggggttagcagcaggtatctgtctgaatggcacaagtggctgttgcgaactataatgataatttacagcagctacat

SEQ ID NO: 2557 - DNA, 391 bp, Zea mays
  Clone ID: PAT_MRT4577_70270C.1
aagaatctagaaatgtactttcttatttctgggacgccacaaacatcatacaaaaaacttgattattgaactataactcataagcaatataaaagagggcaccaccaatgatgggttgatggtagaacactgttgggtttgtcaaagcaagaaggttgaatggcagcaattgttgcagatgtaagagggtgccagcgttaggcatagcgtgcacgtagaacagcaacaactgttgttgagtgaagaaggcatcacgcctcacatcagctagctggctgaatggtagtagttgttgctgctgaaataaacagcagagctcaatgctgctagtaggttagatggaacaaattgctggaggtaggcagcaactagctggctgaagggtaattgt

SEQ ID NO: 2558 - DNA, 510 bp, Zea mays
  unsure (1)..(510): unsure at all n locations
  Clone ID: PAT_MRT4577_70275C.1
nccacctcaccatttttttcttctgaatgtgaaaacccgggggggtatttctacaagatccaacacgcattcacagctgacatgttacctttatcacccttggtactacaacaatcatcacccctattacatccgtcacctttggtgcatttattggcacaaaacatcatggcacaacaactaccacaacttgtgctagcaaaccttgctgtctactctcagcaacagcagtttcttccattcaaccaactagctgcattgaactctgcttcttatttgcaacaacaacaactaccattcagccagctacctgctgcctacccccagcaatttctttcattcaaacaactggcagcattgaactctcctgcttatttacagcaacaacaactactaccattcaagcagctagctggtgtgagccctgctaccttcttgatacaaccacaatttgtgccgttctaacaacacgctgcgcctaacgcttgcccccttttacaactggaacaa

SEQ ID NO: 2559 - DNA, 447 bp, Zea mays
  Clone ID: PAT_MRT4577_70277C.1
atgtcgagaacgcaggccttagcttatttctgggcagcgccacacatcagacaaaaactttattattgagctatcactcatcagaacctaaaagaggcaccaccaatgatgggttggaggttgacactgctaggtttgtcaaagcaagttggttgaatggcagaaattgttgcacttgtaagagggtgccagcgttaggcgcagcgtgctggtagaacggcaacaactgtggttgtgtcaagaaggtagcagggctcacaccagctagctggctgaatggtagtagttgctgctgctgaaaataagcaggagaggtcaacgctgccagttgcatgaatggaagaaattgctgggggtacgcaacaagtagctggctgaatggtagttgctgttgttgcaaataacaagcagagtacaatgcaactagctgcttgaatggaagaaact

SEQ ID NO: 2560 - DNA, 1143 bp, Zea mays
  Clone ID: PAT_MRT4577_7027C.1
ccgggaaaaaaaaaaaaaaaaaaaaaaccgcatcatcctttccctcgcgccgccgccaacgcaagccttgcagccccaatccctcacagcaaccatggctggcgcgcaggagtccctctctctggtgggcacgatgcgcggccacaacggcgaggtgacggcgatcgcgaccccgatcgacaactcgccgttcatcgtctcctcctcccgcgacaagtccctgctggtgtgggacctgaccaacccggtccactccaccccggaatccggcgccaccgccgactacggcgtccccttccgccgcctcaccggccactcccacttcgtccaggacgtcgtcctcagttccgacggccagttcgccctttccggctcctgggatggagagctccgcctctgggacctctccaccggcctcaccacccgccgcttcgtcggccacgagaaggatgtcctctccgttgccttctccgttgacaaccgccagatcgtctccgcgtcccgcgacaagaccatcaagctctggaataccctcggtgagtgcaagtacaccatcggaggtgacctcggcggcggcgagggccacaacgggtgggtctcctgcgtcaggttctccccaaacacatttcagcccaccattgtctccggttcctgggaccgcaccgtcaaggtctggaaccttacgaactgcaagctgcgctgcactctcgatggtcatggcggatatgttaacgccgtcgccgtgagccccgatggatcgctctgcgcctccggcgggaaggacggtgttactctgctgtgggatttggctgaggggaagaggctgtactcgctggatgcgggctccatcatccactccctctgcttctcgcccaaccagatcctgtactgcacaagcttgagctggagcgccgatggaagcaccctctacactggctacaccgatgggtctatcagggtctggaagatctctggatatggctacgcaggctagatgtcgaaatccagtcgagggtctaggaggtcttgttctgcgaaacattgcaatgcggaacatagttttttttatgtgagttacatcgtctgcttggtactttatggtcgcccaactatctaagcttagctttgttaatgaagtttatt

SEQ ID NO: 2561 - DNA, 776 bp, Zea mays
  unsure (1)..(776): unsure at all n locations
  Clone ID: PAT_MRT4577_7028C.1
atttcctctcccctccctcaccccctcgccgccgccgccgccacccccgccccccaatctccccgcggcagccatggcgaacatgcaggagtcgctcggcctggtgggcacgatgcgcggccacaacgacgtggtgacggcgatcgccgcgccgatcgacaactcgccctacatcgtgtccggctcccgcgacaagtcgctgctggtctgggacctcaccaacccggtccagtccctcggcgacggcaccgtcggcaccgactacgccgtgcccttccgccgcctcaccggccacggccacttcgtccaggacgtggtcatcagctccgacggccagttcgcgctctcgggctcctgggacggcgagctccgcctctgggacctctccaccggcctcaccacccgccgcttcgtcggccactccaaggacgtcatctcggtcgccttctccgtcgacaaccgccagatcgtctccgcttcccgcgacaacaccatcaagctctggaacaccctcggcgagtgcaagtacaccatcggcggcgacatgggcggcggcgagggccacaccggctgggtctcgtgcgtcaggttctcccccaacatccagcagcccaccatcgtctccggctcctgggacaagaccgtcaaggtctggaacctcaccaactgcaagctccgctccaccctcngccggcacggtggctatgtcaatgccgtcgccgtcagccccgatggctcgctctgcgcctccgggcggcaaggacggcgtcactctg

SEQ ID NO: 2562 - DNA, 410 bp, Zea mays
  Clone ID: PAT_MRT4577_70292C.1
cccacgcgtccgtagcaacatagaatgcactttaatgtaccaacaatggcagccaaaaggtcagggctccttatgctccttggtctgtctgcaagtgctgctaccgcgaccattttcccgcaatgctcgcaagctactatagcttccattcttaccccgtacctctaaccagcggtgtattcggtatgtgaaaacccaattcttcaaccgtacaggatccaactggcaatcacagatggcatcttacctttatcacccttgttcctccaacaatcatcagccctattacatcagttacctcaggtgcatttattggcacaaaacatcatggcacatcaactgcaacaacttgtgctaacataccttgctgcctactctcagcaacatcattatgttgcattcaaccaact

SEQ ID NO: 2563 - DNA, 411 bp, Zea mays
  Clone ID: PAT_MRT4577_70294C.1
ttatttctgggaagccacactcatcatacaaaaaattcattattgaactatcactcatatgcaatctaaaagaggcaccaccaatgatgggttgctggtagaacgctgcagggttggtcaaagcacgttggttgaatggcagcaattgttgcagttgtaagagggtgccagcgctaggcgcagcgggcaagtagaacggcaacaactggtgctgtgtacaagaaggcaatagggctcacatcagctagctggctgaatggtggtagttgttgctgttgtaaataagcagcatagttcaatgctgccagctggttgaatggaagaaattgctgtcggtaggcagcagctagctgactgaacgagtggtgttgttgaactatgctggttaagtacaacgcaaacagctaccac

SEQ ID NO: 2564 - DNA, 409 bp, Zea mays
  unsure (1)..(409): unsure at all n locations
  Clone ID: PAT_MRT4577_70296C.1
atgaaccaactagcacatataaagctcatattgtaccaataatggcagccaaaatatttgactcatagctccttgtctttctgcaagtgctgctcgggagcatttaccgcaatgctcacaagctgctatagcttcccttcttcccccgatacctctcccaacgagtcttcagtatgagaaaatccaattcttctaccctacaggatccaacaggcaatcgcagcaggcatcttacctttatcacccttgttcctacaacaatcatcagccctattacagcagttacctatggtgcattgattggcacaaaacatcagggcacaacaactacaacaactcgtgctagtgcaccttgctgcctactctcagcatcagcttttacctatggtgcatttggaagcacanaaca

SEQ ID NO: 2565 - DNA, 542 bp, Zea mays
  unsure (1)..(542): unsure at all n locations
  Clone ID: PAT_MRT4577_70299C.1
tctctatacttcagagaagcccaaacatcatccaaaaaacttcatctattgaactataactcattaagctatctaaaagaggacaccaccaatgatgggttgatggtagaacgctgctgagtattgtacaaaacaaagttggtctgaatggcagcaattgttgcagatgtaagagggtgccagcgttaggcgcagcgtgcgaatagaacgacaacaactgttgctgagtcaagaaggcagcagggctcacatcagctagctgactgaatggtggtagctgatgttgttgtaaataagcagcacagatcaatgctgccagttggatgaatggaagtaattgctggaggtaggcagcagctagctggctgaatggtagttcgatggtgcaaataagcagcacagttcaatgcagccagtctggatgaatggaagaaactgctgttgctgatagtacgcagcaaggcttgctagcacaagctgttgtaggttgttgcgccctgatgnttttgcgccaacaaatgcaccaaagggtaactgctgta

SEQ ID NO: 2566 - DNA, 448 bp, Zea mays
  unsure (1)..(448): unsure at all n locations
  Clone ID: PAT_MRT4577_70303C.1
cgggnacacatattattganaccaactangcaacatatgaaagcacaatagtgtaccaacaatggcagctaaaatattttgcctccttatgctccttggtctttctgcaagtgctgctacggcgaccattttcccacaatgctcacaagctcctatagcttcccttcttgccccgtacctctcaccaacggtgtcttcggtatgtgaaaacccgggtgttgaaccctacaggatccaacaggcaatcgcagctggcatcctacctttatcacccttgtttctacaacaatgatcaggcctattacagcagtgacctttgctgcatttattggcacaaaacatctgggcacatcaactacatcaacttgtgtctacaacccgctgctgactacttttatcaacagtagtttttttctttcaaccaactaactgcattgaaccctgtttc

SEQ ID NO: 2567 - DNA, 600 bp, Zea mays
  Clone ID: PAT_MRT4577_70306C.1
gtaccctcccagtctctgtccgggcatcgcacatattattgcggaccaactagcaacataggaagcacaatattgtaccaacaatggcagacaaaaaattctgcctacttatgctccttggctctttctgcatgtgctgctacggcgaccattttcccacaatgctcgcaagctgctatagcttcccttcttcccccgtacctctcaccagcgttgtcctctgtatgcgaaaacccaattcttcagccctacaggatccaacaggcaatcgcagctggcatcttacctttatcacccttgttcctgcaacaatcatcagccctattacaacagttacctttggcgcatttatatggcacaacaacatgcagggcacaacagctacaacaacttgtgctatcaatccttgctgcctactctcagcaacagcagtttcttccattcatgcaactaggatcatcgaactctgcttcttatttgcaacgacaacaactaccattcagccagctacctgctgcctacccccagcaatgtcttccattcaaccaactagcagtatggaactattgtgcttattttctgcatcaacaactactacca

SEQ ID NO: 2568 - DNA, 567 bp, Zea mays
  Clone ID: PAT_MRT4577_70307C.1
tacgacggccgggcgggcgggcatcacccttgatcctccaacagccgacagccctatgacagtaacacctttggggcatttgtaggaacaaaacatcaagggacaacagctacaacaacttgtgctaagaaaccttgctgtctactctcagcaacagcagtgtgttggatgcaaccaactggctgcatcgaactctgctgcttatttacaacaacaactaccattcagtcagctagctgctgcctacccccagcaatttcttccattcaaccaactggcagaaatgaactctgctgcttatttacaacagcaacaagtaccaccatttaggcagctagctgatgtgagccctattgccttattgacacagcaacagttgttgtcggactacctgcacgctgcgcctaacgctagcaccctgttacaactgcaacaattgctgccattcaaccaacttgttttgacaaacccaacagcgttctaccaacaacgcatcataggtggcgccctcttttagattgatgatgagttatagctcaataatgaagatatttgaatgatgtttga

SEQ ID NO: 2569 - DNA, 423 bp, Zea mays
  Clone ID: PAT_MRT4577_70308C.1
aactagcaacatacaaagcacaatactgtaccaacaatggcagccaaaatattgtgcgtacttatgctccttggtctttctgcatgtgttgctaccgcaactcattttcctacaatgctcacaagctcatatagcttcccttcttcccccatacctctcaccagcgccgtcttcaatgtctcaaaccccaattgttcaaccttacaagatccaacaggcaatcgcaacacgcatcttaccattatcacccttgttcctccaacaactcgcacccctattacagcagctacctctggtccatttgatggcacaaaacatcagggcacagcaactacaacaactcgtgctagcaaaccttgttgcatactctcatgaacatcagtgtcttccattcaaccaaatggctgcattgaactctgctgc

SEQ ID NO: 2570 - DNA, 1443 bp, Zea mays
  Clone ID: PAT_MRT4577_7030C.1
aaaaaaaaaacggaaaaaaaaaaaaaaaaaaaaaaatataaaaaaaaaaaaaaaaaaaaaaaaaaaaaaaaaaccgcataatcctttccctcgcgccgccgccaacgcaacccttgcagccccaatccctcacagcaaccatgggtggcgcgcaggagtccctctctctggggggcacgatgcgcggccacaacggcgaggggacggcaatcgcgaccccgatcgacaactcgccgttaatcgtctcctcctcccgcgacaagtccctgctggggggggacctgaccaacccgggccactccaccccggaatccggcgccaccgccgactacggggtccccttccgccgcctaaccggccactcccacttcgcccaggacgtcgtcctcagttccgacggccagttcgccctttccggctcctgggatggagagctccgcctttgggacctctccaccggcctcaccacccgccgcttcgtcggccacgagaaggatgtcctctccgttgccttctccgttgacaaccgccagatcgtctccgcgtcccgcgacaagaccattaagctctggaacaccctcggtgagtgcaagtacaccatcggaggtgacctcggtggcggcgagggccacaacgggtgggtctcctgcgtcaggttctccccaaacacatttcagcccaccattgtctccggttcctgggaccgcaccgtcaaggtctggaaccttacgaactgcaagctgcgctgcactctcgatggtcatggcggatatgttaacgccgtcgccgtgagccccgatggatcgctctgcgcctccggcgggaaggacggtgttactctgctgtgggatttggctgaggggaagaggctgtactcgctggatgcgggctccatcatccactccctctgcttctcgcccaaccgctactggctctgcgctgcgacccaggactctgttaagatctgggaccttgagtcgaagcacgtcgtgcaggacctcaagcctgacatccagatctccaagaaccagatcctgtactgcacaagcttgagctggagcgccgatggaagcaccctctacactggctacaccgatgggtctatcagggtctggaagatctctggatatggctacgcaggctagatgtcgaaatccactcgagggtctaggaggtctcgttcggcgaaacattgcaatgttccgcatagttttttttttatgtgagttacatcgtctgcttggtactttatggtcgcccaactatctaagcttagctttgttaatgaagtttattaaatttgcttgtttggttttaccttgtgaaagggggtgtttgtctgagtttataatctgtttaccttatagtgttttttttggcgaagttaactgcggaaatggttacttcctcagctggcaaaaaaaaaaaaaaaaaactcgagag

SEQ ID NO: 2571 - DNA, 502 bp, Zea mays
  Clone ID: PAT_MRT4577_70311C.1
acgcccttgacaatctcggggagggggggcttagcttatttctgggcaagccacaaacatcatccaaaaacttcattattgaactataactcataagcaatctaaaagaggcaccaccaatgatgggttgttggtagaacgctgtagggtttgtcaaagcaagttggttgggggggggcaattgttgcagttgtaagagggtgccagcgttaggcgcagcgggcaggtagaacggcaacaactgttgctgtgtcacagaaggcaatagggctcacatcagctagctggctgaatggtggtagttgttgctgttgtaaataagcagcagagttcaatgctgccagttggttgaatggaagaaattgctgtgggtaggcagtagctagctgactgaatggtaggtgttgttgaaaataagcggtaaagtacaatgcaaacagttagttgaatggaagaaactggttgaggtgagagttgtagcctggtttactagcacaagttg

SEQ ID NO: 2572 - DNA, 2309 bp, Zea mays
  Clone ID: PAT_MRT4577_7031C.1
cattgggtacctcgaggccggccgggctaactggtcagactacgacgtctacgacctcgaactcacggcggtcaacaacaacaccgacctgcggaagctattcatcgagaccaccgggaaatccatcatcgtcgtcgaggacatcgactgctccgtcgacctcaccggcaagcgcaaggacaagaaatccgaacgcgaggccgacgacaagcccaagctgccgatggagcctgaaaaggacgaaggcagcaagattacgctttcagggatgctcaacttcatcgacggcctgtggtcggcatgcggcggcgagcgcatcatcatcttcaccaccaaccataaggacaagctggaaccggcgctgatacggcgaggcaggatggacaggcacatcgagatgtcctactgccgcttcccggccttcaaggtgctcgccaagaactacctggacgtcgaggagcacgagctattcgaccagatagggcagctgctcgaggagaccgacatgtcgccggcagatgtggcagagaacctgatgtccatgtccaagaagaagaagagggacgccaacgcgtgcttggagagtcttgcgaaggctctgaagcaggccaaggaggaggaggccaaggcgaaggtggaagcagaggcaaagaagaaggtagaggcggcggccgaggcagcaaagtccaaagaggaagacgaggcaaaggaaggcagcggataagacgaagcaggcgacaaaacttcagaatcgatgagcaacgtacgaacacacatcaaaagagatgacgacaagtctaggctcgtgattctaataggagtcatcattaaaataaaggcttaaattgtagaatcgttgaaattagggaacaatgtacactgtctctggaaatttgttgcaactcttccacttgcctatagattggtaatggctataaaaaaaaaaaaaaaaaaccgcatcatcctttccctcgcgccgccgccaacgcaacccttgcagccccaatccctcacagcaaccatggctggcgcgcaggagtccctctctctggtgggcacgatgcgcggccacaacggcgaggtgacggcgatcgcgaccccgatcgacaactcgccgttcatcgtctcctcctcccgcgacaagtccctgctggtgtgggacctgaccaacccggtccactccaccccggaatccggcgccaccgccgactacggcgtccccttccgccgcctcaccggccactcccacttcgtccaggacgtcgtcctcagttccgacggccagttcgccctttccggctcctgggatggagagctccgcctctgggacctctccaccggcctcaccacccgccgcttcgtcggccacgagaaggatgtcctctccgttgccttctccgttgacaaccgccagatcgtctccgcgtcccgcgacaagaccattaagctctggaacaccctcggtgagtgcaagtacaccatcggaggtgacctcggtggcggcgagggccacaacgggtgggtctcctgcgtcaggttctccccaaacacatttcagcccaccattgtctccggttcctgggaccgcaccgtcaaggtctggaaccttacgaactgcaagctgcgctgcactctcgatggtcatggcggatatgttaacgccgtcgccgtgagccccgatggatcgctctgcgcctccggcgggaaggacggtgttactctgctgtgggatttggctgaggggaagaggctgtactcgctggatgcgggctccatcatccactccctctgcttctcgcccaaccgctactggctctgcgctgcgacccaggactctgttaagatctgggaccttgagtcgaagcacgtcgtgcaggacctcaagcctgacatccagatctccaagaaccagatcctgtactgcacaagcttgagctggagcgccgatggaagcaccctctacactggctacaccgatgggtctatcagggtctggaagatctctggatatggctacgcaggctagatgtcgaaatccagtcgagggtctaggaggtcttgttctgcgaaacattgcaatgcggaacatagttttttttatgtgagttacatcgtctgcttggtactttatggtcgcccaactatctaagcttagctttgttaatgaagtttattaaatttgcttgtttggttttaccttgtgaaagggggtgtttgtctgagtttataatctgtttacttatagtgttttttggcgaagttaactgcggaaatggttacttcctcagcgtgcaaaaaaaaaaaaaaaa

SEQ ID NO: 2573 - DNA, 733 bp, Zea mays
  unsure (1)..(733): unsure at all n locations
  Clone ID: PAT_MRT4577_70330C.1
gactttcttatttctgggaagccacaaacatcataccaaaaaacttcattatctgaactataactcataagcaatctaaaagagggcaccaccaatgatgggttgttggtagaacgctgttgggtttgtcaaagcaagttggttgaatggcatcaattgttgcagttgttttattcttctagcgttaggcgcagcgtgcaggtagaacggcaacaactgttgctgtgtcaagaaggcagtagggctcacatcagctagctggctgaatggtggtagttgttgctgttgtaaataagcagcagagttcaatgctgccagttggttgaatggaagaaattgctgggggtaggcagcagctagctgactgaatggtagttgttgttgcaaataagcagcacatttcaatgcagccagttggttgaatggaagaaactgctgttgctgagagtacgcagcaaggtttcctagcacaagttgctgtagctgaagcgccttgatgttttgcgccaacaaatgcaccaaacgttactgctgtaatatggctgacgagctgttggaggaacaagggcgataaaggtaagatgcctgctgcgattgcctgttggatcctgtatggttgaagaattgagttttcacatactgaagacaccgctggcgagaggtatggaaggaagaaaggaagctatacgagtctgtgagcattgtgnagatatggntgcggtagcagcacttg

SEQ ID NO: 2574 - DNA, 590 bp, Zea mays
  Clone ID: PAT_MRT4577_70334C.1
tgaaaacaccaatatctttaacacctacacgatccaacaggcaatagcagatggagtcttacctttatcatgcttgtgcctgcaacactcatcagccctattacaacagtgacctttggagcatttattgggacaaaacatgaagacacaacaactacaacaacttgtgctagcaaaccttgctgcctactctcagcaacagcagattcttccattcaaccaactaggttcattgaactctgcttcttatttgcaacaacaacaactaccattcaaccagctacctgctgcctacccccagcaattacttccattcaaccaactagcagcattgaactctactgcttatttacagcagcaacaactactaccattcatacagctagctggtgtgagacctgataaactgttgacacaaacacaagtgatgacgttttaccagcacaatgcgcctaacgctggcaccctgttacaactgcgacaattgctgacattcaaccaacttggtttgacaaacccagaatggttctaccaacaacccatcattggtggtgcgctcttttagatttcttatgagttatagttcaata

SEQ ID NO: 2575 - DNA, 514 bp, Zea mays
  Clone ID: PAT_MRT4577_70337C.1
gccggggattttgaccttcttatgctcgttggtctcttctgcagtgctggtacggcgaccacttttcccgcaatgctcgcaagctcctatagcttcccttcttcccccgtacctctcaccagcggcgtcttcggtatgctgaaaacccaattcttcaaccctacaggatccaacaggcaatcgcagctgacatcttacctttatcacccttgtgtcctgcaacaatcatcacgccctattacaacagttacctttggtgcattgattggcacaaaacatcagggcacaacaactacaacaacttgtgctagcaaaccttgctgcctactctcagcaacagcaggttcttccattcgaccaactggggtcattgaactctggtgcttatttggaacaacaacagctacgatgcagacagctgcctgctggctacccgcagcaatttctttcattgaaccaactagcaggattgcactctgctggttgtttacaggaggagcaactactaccatgc

SEQ ID NO: 2576 - DNA, 1416 bp, Zea mays
  Clone ID: PAT_MRT4577_7033C.1
ccggccgggttataaaaaaaaaaaaaaaaaaaaaaaaaaaaaaaaaaaaaaaaaaaaaaaaaaaaaaaaaaaaaaaaaaaaaaaggacgaaaaaggagaaatcctacgcctcgcgccgccgccacagcaacccttgcagccccaatcccccacggcgaccatggccggcgcgcaggagtccctctccctggtgggcacgatgcgcggccataacggcgaggtgacggcgatcgcgaccccgatcgacaactcgcctttcatcgtctcctcctcccgggacaagtccgtgctggtgtgggacctgaccaacccggtccactccaccccggaatccggcgtcaccgccgactacggcgtccccttccgccgcctcaccggccactcccacttcgtccaggacgtcgtccttagttccgacggccagttcgcactctctggctcctgggacggcgagctccgcctttgggacctctccaccggcctcaccacccgccgcttcgtcggccacgagaaggacgtcatctccgtcgccttctccgtcgacaaccgccagatcgtctccgcgtcccgcgacaagaccatcaagctctggaacactctcggcgagtgcaagtacaccatcggcggcgacctcggcggcggcgagggccacaacgggtgggtctcctgcgttaggttctccccaaacaccttccagcccaccattgtctccggatcctgggaccgcaccgtcaaggtctggaaccttaccaactgcaagctgcgctgcactctggatgggcacggtggctatgttaacgccgtcgctgtgagccccgacgggtcgctgtgcgcctccggcgggaaggacggtgttactctgctgtgggatttggctgaggggaagaggctgtactcgctggacgcgggctccatcatccactctctctgcttctcacccaaccgctactggctctgcgctgcgacgcaggactctgtcaagatctgggacctcgagtcgaagcacgttgtgcaggacctcaagcccgacatccaggtctccaagaaccagatcctgtactgtacaagcttgagctggagtgcggacggaagcaccctctacactggctacaccgatgggtctatcagggtttggaagatctccgggtacggctacgcaggctagatgttgaaatcagcttggaggtctaggcagtctttcgggggaaaacattgtaatgtttgtcaagtttttgatgtcgtgagctatattgtctcttcgctactttccggtcgcccaaccattttaatcttactatggaagaatcttgttttgcactatgattcggttttattacttgtactttatattatgttatgtgcttcggccatgcaaccaattgaacgactgcggcggaaagacgttctggtttggct

SEQ ID NO: 2577 - DNA, 746 bp, Zea mays
  unsure (1)..(746): unsure at all n locations
  Clone ID: PAT_MRT4577_70342C.1
cgggnatcgcaccatattattgagnaccaactagcaatcatagaaagcacaatagtgtaccaacaatggcagccaaaatattttgcttccttatgctccttggtctttctgcaagtgttgctaccgcaaccattttcccacaatgctcacaagctcctatagcttcccttcttcccccatacctctcaccagcggtgtcttcaatgtgtgaaaacccaattgttcaaccctacaggatccaacaggcaatcgcaacaggcatcttaccattatcacccttgttcctccaacaaccgtcagccctattacagcagttacctttggtccatttggtggcacaaaacatcagggcacaacaactacaacaacttgtgctagcaaaccttgctgcatactctcagcaacatcagtttcttccattcaaccaactggctgcattgaactctgctgcttatttgcaacaacaattaccattcagccagctagttgctgcctacccccagcaatttcttccattcaaccaactagcagcattgaactctgctgcttatttacagtagcaacaactactaccattcagccagctagctgatgtgagccctgctgccttcttgacacacaacagttgttgccgttatacctgcacgctatgcctaacgctggaacccttttacaactgcaacaatttgctgccatatcacccaacttggcttttacaaaccttaacagtgtttctacccaacaac

SEQ ID NO: 2578 - DNA, 675 bp, Zea mays
  Clone ID: PAT_MRT4577_70343C.1
atgaaggagaggctcgttggcgtctccgaggaaaccaccaccggcgtcaagaggctctaccagatgcaggagtccggcaccctcctcttccccgccatcaacgtcaacgactccgtcaccaagagcaagtttgacaacctttacggttgccgccactcgctccctgatggtcttatgagggcgactgatgttatgatcgctggcaaggttgctgtggtctgcggttatggtgatgttggcaagggctgtgctgccgcactcaagcaggctggtgcccgtgtgattgtgacagagattgaccccatctgtgcccttcaggccctgatggagggcatccagatcctcaccttggaggacgttgtctctgatgctgacatctttgtgaccaccactggaaacaaggacatcatcatggttgaccacatgaggaagatgaagaacaatgccattgtctgcaacattggtcactttgacaacgagatcgacatgaacggcctggagacctaccctggtgtcaagcgcatcaccatcaagcctcagactgaccgttgggtcttccctgagaccaacactggcatcattgttcttgctgagggccgtctgatgaaccttggctgtgccactggccaccccagctttgtcatgtcttgctcattcactaaccaggttattgct

SEQ ID NO: 2579 - DNA, 407 bp, Zea mays
  Clone ID: PAT_MRT4577_70345C.1
tcgctaccttcggtgcatccattggcatcatacatcaagccacatcatctaccactacttgagctaccaaacacttgatgcctactctcaggaacagcaggttcttccattcatccaactatctgcattgaactctgcttgttatttgcaacaacaacaactaccattcagccagctacctgctgcctacccccatcaattacttccattcaaccaactggcagcattgaactctcctgcttatttacagcagcatcaactactaccattcagccagctagctggagtgagccctgctaccttcttgatacaaccacaggtgttggcgatctaccaggacgctgcgcctaacgctggcacccttttaccactggaaccaattggtggcattcaaccaacttggtttg

SEQ ID NO: 2580 - DNA, 660 bp, Zea mays
  unsure (1)..(660): unsure at all n locations
  Clone ID: PAT_MRT4577_7035C.1
aattcggcacgaggcaacatacatcgacatggcggttctcaacctcctcgccttgatcattgccacgctactgctacttttcagaagaacctccggcgccggcatttcgccggcggacacgctcaacagcgggggcaacgtcaccgatggcgagacgctggtctcggccggtggcacattcaccctgggcttcttctccccgtcgaccacggtgctgaccaagaggtacctcgggatctggttcacggcgtctggtacggacgccgtcttgtgggtggccaaccgcgaaaccccgctaaacaacacctccggcgtcctggtgatgagcagccgggtgggccttcgccttctcgacggctctggccggaccgcctggtcctcaaacacgaccggcgcccccacctcttcggtggcacagctgctcgggtccggcaaccntcgtcgtgcgcgagaagagcagcaacgccgtcttccagtggncagtcgttcgaccatccgcagaacaccttgctcgccggcatgaggttcggcaagaacctaaagaccggcatggnagtggtccctttgacgtcgtggcgggcgcaggacgaccccgcgacgggggactacccggtcgtgtcatggacacgaagggccttccggacatcgttacttggcacg

SEQ ID NO: 2581 - DNA, 706 bp, Zea mays
  Clone ID: PAT_MRT4577_70364C.1
gccggccgggccggggcacatattattgagaccaactagcaacatagaaagacaatagtgtaccaacaatggcagccaaaatattttgcttccttatgctccttggtctttctgcaagtgttgctaccgcaaccattttcccacaatgctcacaagctcctatagcttcccttcttcccccatacctctcaccagcggtgtcttcaatgtgtgaaaacccaattgttcaaccctacaggatccaacaggcaatcgcaacaggcatcttaccattatcacccttgttcctccaacaaccgtcagccctattacagcagttacctttggtccatttggtggcacaaaacatcagggaacaacaactacaacaacttgtgctagcaaaccttgctgcatactctcagaaacatcagattcttccattcaaccaactggatgaattgaactctgctgcttatttgcaacaacaattaccattcagccaggtagatgatgactacccccagcaatttcttccattcaaccaactagcagaattgaactctgctgcttatttacagcagcaacaactactaccattcaaacagctacatgatgtgagacctgatgacttcttgacaaaacaaacaaatgatgacgatatacctgaacaatatgcataacgatggaaccctcttacaaatgaaaaaattgatgaaattaaaca

SEQ ID NO: 2582 - DNA, 862 bp, Zea mays
  Clone ID: PAT_MRT4577_70368C.1
gctaatatatcgcacatattattgagaccaactagcaatatagaaagcacaatattgtaccaataatggcagccaaaatattttgcctcattatgctccttggtctttctgcaagtgctgctacggcgagcattttcccgcaatgctcacaagctcctatagcttcccttcttcccccatacctctcaccagcgatgtcttcagtatgtgaaaatccaattcttctaccctacaggatccaacaggcaatcgcagcaggcatcttacctttatcacccttgttcctccaacaatcatcagccctattacaacagttacctttggtgcatttgttggcacaaaacatcagggcacaacaactacaacaactcgtgctagcaaaccttgctgcctactctcagcaacaacagtttctgccattcaaccaactagctgcattgaactctgctgcttatttgcagcaacaacaactactaccattcagccagctagctgctgcctacccccggcaatttcttccattcaaccaactggcagcattgaactctcatgcttatgtacaacaacaacaactactaccattcagccagctagctgctgtgagccctgctgccttcttgacacagcaacagttgttgccgttctacctgcacactgcgcctaacgttggcaccctcttacaactgcaacaattgctgccattcgaccaacttgctttgacaaacccagcagcgttctaccaacaacccatcattggtggtgccctcttttagattgcttatgagttatagttcaataataaagtttttttgctgatatttgtggcttcccagaaataagaaagtacatttctagattctta

SEQ ID NO: 2583 - DNA, 763 bp, Zea mays
  Clone ID: PAT_MRT4577_70372C.1
accgcacatatcttgtgacctgctaccccatagaaagcacaatagtcgtccaacattggcagccaaaatatatcgcttccttatgctcctgggtctttatgcaggggatgctaccgcaatcattaggccacagatgctcacaggctcctatagcttcccttcttcccccatacctctcacgcagcggcgttttgaatgtgcgaaaacccaattgttcaaccctacaggatccaacaggcaatcgcaacaggcagtctaaccatgatcagccctaggtcctacaacatccgccagccctattacagcagtgacctttggaccatttggtggcacaaaacatcagggcacaacaactacagcaacttgtgctagcaaaccttgctgcatactctcagcaacatgaggttcttccattcaaccaactggctgcattgaactctgctgcttatttgcaacaacaattaccattcagccagctaggtgctgcctacccccagcaatttcttccattcaaccaactagcagcattgaactctgctgcttatttacagcagcaacaactactaccattcagccagctagctgatgagagccctgctgccttcttgacacaacaacagttgttgccgttctacctgcacgctatgcctaacgctggcaccctcttacaactgcaacaattgctgccattcaaccaacttgctctgacagactcatcagtggtctaccaacaacccatcattggtgggcgccctcttttaga

SEQ ID NO: 2584 - DNA, 543 bp, Zea mays
  Clone ID: PAT_MRT4577_70374C.1
ctagaaatgtactttcttatttctgggaagccacaaacatcagacaaaaaactttattattgaactataactcataagaaatctaaaagagggcaccaccaatgatgggttgttggtggaatgctgctgggtttgtcaaagcaggttggttgaatggcagcaattgttgcagttgtaagagggtgccagcgttaggcgcagcgtgctggtagaacggcaacaactgtggttgtgtcaagaaggtggcagggctcacaccagctagctggctgaatggtagtagttgttgctgctgtcaataagcaggagagttcaatgctgtcagttggttgaatggaagaaattgctgggggtatgcagcagatagctggctgaatggtagttgttgtcgttgccaattatatgctgagtccaatgcagcttcttggttgaatggaagaaactgctgttgctgagagttggccagcaggtttgctcgcccaagttggtgtagttggtgtgccctgctgttttgcgccccttccatgccccaaaggtaactgc

SEQ ID NO: 2585 - DNA, 435 bp, Zea mays
  Clone ID: PAT_MRT4577_70375C.1
ctaccattagacctttatcaccctttttgtttcaacactcatcagccctaatgcaggagttacctatggcggatttattgccacaaaacattatgacacatcaactacaacatcctatgctagcaaaccttgttgcctactctcagcaacatcagtttctgtcattcaaccaactagctgcattgaactctgcttcttatttgcaacaacaacaactaccattcagccagatacctgctgtctacccccaacaattccttccattcaaccaactgtcagcattgaactctcctgcttatttacagcagcaacaactactaccattcagccagctagctggtgtgagccctgctaccttcttgatacaaccacagtttttgtcgttctaccagcacgcttttgcctaacgctggcaccctcttacaactgcaacaa

SEQ ID NO: 2586 - DNA, 577 bp, Zea mays
  unsure (1)..(577): unsure at all n locations
  Clone ID: PAT_MRT4577_70376C.1
gggccgggatcgccatnttatttagacacactagcacatagaaagccaatagtgtaccaacaatggcagccaaaatattctgcctccttatgctccttggtatttctgcaagtgctgctacggcgaccattttcccgcaatgctcacaagctcctatagcttcccttcttcccccgcacctctcaccagcggtgtcttcggtatgtgaaaacccaattcttcaaccctacatgtatccaacaggcaatcgcaggtggcatcttacctttatcacccttgttcctccaacaatcatgagccctattacagcagttacctttggtgcatttattggcacaaaacatgagggcacaacaactacaacaacttgtgctagcaaaccttgctgcctactctaagcaacagcgggtgcttccattcaaccaactaagtgaattgaactctgcttgttatttggaacaacaacaactaccattcagccagctacctgttgcctacccccaggaattggttgcattgaaccaactggggagatggaactctgctgcttattgacagggaggacaactgctgcgat

SEQ ID NO: 2587 - DNA, 484 bp, Zea mays
  Clone ID: PAT_MRT4577_70378C.1
aacttgcaacatacaaagcacaatagtgctccaacaatggcagctaaaatattatgcctccttatgcgtccttggtctacatgcaagtgctgctacagacaccatttttccacaatgctaacaagctcctatagcatcccttcttcccccgtacctctcaccaacagtgtcttcggtatgtgaaaacccaatatcttcaaccctacaggatccaacaagcgatcgcagctggcatcttacctatatcacccttgttcctccaacaatcatcagccctattacagcagttacctctggtgcatttattggcacaaaacatcagggcacaacaactacaacaacttgtgctagcaaaccttgctgcctactctcagcaacagcattttcttacattcaaccaactagcctgcattgactctgcatcttatttgcaacaacaacaactaccattcagccagctatctgcttgccacccccaacaatt

SEQ ID NO: 2588 - DNA, 853 bp, Zea mays
  Clone ID: PAT_MRT4577_70465C.1
gggtacctcgaggccgacgcgtccggcctatgtttttctttgaaaggatgtcggaaagaatgtgcattttatctggtcagcttgcctgtgtcttatcgctatgaatacctgatggcggagaccatattttcacagctactattgttgccgaatccaccattcaagccaatttactatacactggttatcattgatctttgcaaggcattaccaggtgcattcccttcagttgtggtaggagcagtgcatgctctttttgacagaattagtaacatggatatggagtgccgcaccagacttatactatggttttcacaccacttgtcaaactttcaattcatttggccttggcaggagtggtcttatgtcaaggacctcccaaaatgggctccacaacgggtttttgtccaggaagtactggaaagggaagttcgcttgtcgtactttgaaaaaatcaagcagagtatcgaggatgctgctgagttagaagaactgctacccccaaaagctgggcctaatttcaaattccatagcgatgaaagcaacgaaagcactgatggcctgaagttatccaaggaacttattggcttgattagaggaaagaagtctacatatgatattattttatgggttgaggaacaaataattccaaaaaatggtactgaatttgcacttgatgttgttagccagacgcttcttgacatgggttcaaaaagtttcacccatcttgtcactattttggagagatataataagataatctctaagctatgtccaaatgaggaaatgcagctactgttaatgaatggagtcagtgcttattggaaggacaagtaccagatgactgctatag

SEQ ID NO: 2589 - DNA, 2472 bp, Zea mays
  Clone ID: PAT_MRT4577_70528C.1
agacgacgccaccgtcacgccccgcgaccgccaacctatcccccaccgcgtcacgcgcctccacctccccagatcggcggcgaaccggggggcccggacaggcggcggagagctcgaggcgtcatggcgaagtcgagcgcggacgacgccgagctgcggcgcgcgtgcgctgcggccgtggcggcgtcaggcgcgcgcggggaggaggtggccttctccatccgcgtcgccaagggccgcggcatcttcgagaagctcggcaggctcgccaagccccgtgtcctcgctctcaccgttaaacaatcatcaagaggcgaggcgaacaaagcttttcttcgagtattaaaatattcatctggggcagtgctcgagccagccaaactttacaagctgaaacatctaacaaaggttgaggttatttccaatgatcccagtggttgtacatttgttctgggatttgataaccttaggagtcagagtgttgccccaccacaatggacgatgcgtaacattgatgacagaaatcgtctacttttttgtattctgaatatgtgcaaggagatactcagttatcttccaaaagttgttggaattgatattgtggagctagctctttgggcaaaggaaaacacactgaccatagataatcaagtgagtacccaagatggtcaagaaacatcagttgctactcaaaccgagaggaaagtaacagtaactgttgcttatggaataattgcttgagcgtctgcggatccacaagccctttgttatttacagactgcatctccaagccattgttacgtgattcagtctgtaaataacaaagggcttatggaagagctagataaattgcttgagcgtctgcggattccacaggagtttgcagcatcattaactggaggctcatttgaagagtcacggatgctgaaaaatgttgaggcatgtgaatggttgacaggggccattcgcagtcttgaagttcctaatttggacccatgctatgtcaacatgcgcgctgttagagagaaaaacagatcgggagaaactgaaaacaacttttgttcgacgagcatcagagtttttgcggaactacttctccagtttggtagacttcatgatcagtgacaaaagctacttttcacagcgtggacaattgaagcggcctgatcatgcagaccttaggtataaatgcaggacatatgcccgacttctgcagcacttaaagagtctggacaagagctgcttaggtcccttaaggaaggcatactgtcattcccttaatttactactacgacgagaggcacgtgaatttgccaatgaacttcgtgcaagtacaaaagcaccgaagaatcctgctgtttggcttgaaggttctggcggctctggtcataatggaagcagttctgatacttcacaggtctcagatgcatactcaaagatgcttacaatatttatcccgcttcttgtggatgagagttccttttttgcacattttatgtgctttgaagtacctgcacttgttccagctggttctcctaatgctaataagagcaaatccggaggaaatgacccggatgatgatctgggtcttatggatccagatggcaacgatctgaaacctgatagtacctctgctgaactgggtacattgaatgaagctcttcaagaattactcgatggaatccaggaagacttctatgcggtcgtagattgggcttataaaattgaccccttgcgttgcatctcaatgcatgggattacagagcgttacctttctggacagaaagctgatgctgcaggatttgttcgcaaactacttgatgacttggaatcaagaatatcagtacagttcagccggtttattgatgaagcatgccatcaaattgagcgtaacgaaagaaatgtgcggcaaactggaattctagcctacattccaagatttgctgtccttgcatcacgtatggaacaatatatccaagggcagtccagggatttaattgataaagcatacacaaagctagttagcacaatgttcgcaactttggagaaaattgcacagagtgatcctaaaactgctgatattgtgttgattgagaattatgctgctttccagaacagtctttatgacttggctaatgttgtgccaacgcttgcaaagttctaccatcaagccagtgaatcatatgaactagcttgcactcgccatatcagctcactcatttatctgcaatttgagaggttatttcaattcaaccggaaagttgacgaattgacttacactattgctgctgaggagataccgtttcagctgggattatcaaaaactgacctaaggagggtactgaaatccagcttatctgggattgataagtcgattagcgccatgtacaggaggttgcagaagacacttacctccgatgagttgtttccttcgctgtgggacaagtgcaagaaggagtttttggacaaata

SEQ ID NO: 2590 - DNA, 374 bp, Zea mays
  Clone ID: PAT_MRT4577_70616C.1
acgttcatgcccattgggggagacccagctgaccacctaaagctggatacttacttattcaaactgacccagcatggggcaacatcggaaggtcaaatgcttacaaacaaaaaattttaaaaaaaaaagcctgggttgggtggttcacaaaataaccaaacgacaaccacgaaattgggacgatttaaaaaaaacaactcaaaagcaaatcgaccccaaaagcccgttttactaaaaaaacactcccgccttttcctccatgggatccgcttcctcctcccaaaaaaaaaaaataaccagcttggaatcctttttaaaaagaggaggagcactctccacgttctcgccgtaaaaacaggggaaaacaaatttgg

SEQ ID NO: 2591 - DNA, 2142 bp, Zea mays
  Clone ID: PAT_MRT4577_70810C.1
gtctctactcctcttcctcctctctctactctccaagttctcttctccgtcgaccgctctacacgtctcttgtcgacctggacaccgaggtggaagaaggaagcagtcagcagatggatccatggatcagcagccagccttctctgagccttgacctgcgcgtcggcctgccgccgctcagcctccaccaccaggcgccggtggccgtcgccttgcccaggcccaagctgctcgtcgaggagaacttcctcctgccgcctccaaagaaagaaccagaggtacgcatatatacactacactccgatcctatgtgcgacgcaagcatgcacccaccccacctggactggacggagacggcgggcgtgacgacgagcaaagactctaacggactgtccccttgatttgatcccaggtcgcggctctcgagacggagctgcagcggatgggcgaggagaaccggcgcctggcggaggcgctggccgaggtggcctccaagtacgaggcgctgcgggggcagtacacggagatggtggccgcggcggccacggcctgcgggaaccacccgtcgtccacgtcggagggcgggtccgtgtcgccgtcgcggaagcgcaagagcgagagcacggacaccgcgccgcccgcgcagcagctactgcaccagcactacccggcggtggcgccggaccagacggagtgcacctcgggcgagccgtgcaagcgcatccgggaggcggagtgcaagcccagggtgtcgaagctgcacgtgcacgccgacccggccgacctcagcctggtggtcaaggacgggtaccagtggcgcaagtacgggcagaaggttaccaaggacaacccctgcccgcgggcctacttccgctgctccttcgccccggcctgcccagtcaagaagaaggtgcagcgcagcgccgacgaccccaccatcctggtcgccacgtacgagggcgaccacaaccacggccagcccccgccacaggcgcaggcgccgcacgacggctccagccctggcgccagcaagaagccgccgtcgccgccgaggccggtcgccgccgctccggcgccgctccaccaccagcaggtccagcagcaccagcagcagcaggcggttggcgcggtgaaatgcgagccgcccgtggccgcggcggcgtcggagctcatccggcggaacctcgcggagcagatggccatgacgctgacgcgggaccccagcttcaaggcggcgttcgtcaccgcgctgtccggccggctcttcgagatgtcgccgaccaaggactgacggaacggatcggatggattgggagattggcatcgcaggagattctggatcagattgtcttcgagcgcacgccgcaatggtcaactgcgcagcgctggcttggctgtcagagcgaaacagcggtaacagagcaagacacgaggggtctgcactctgcagttgtgcaggaggaggaacagacacaaggggaggacggcgcgcggccggacatggcgtggaacagagatcgtcgtcaccgccggcgggggtgtggtcgacgacgcgacatgcgaaacactacgtgctagctagcataggaaaaaacaacatgaaatcgtacaaccaaccaatccctcgcactgttttagttgttagctgtaggcgaaactgttcatccaattgatcaaatgaaacttattttttccctagcactatgtttcatgagaatgagaccaggaatgaaccaacttgagtttgaaaatttccataggggagtaataataacagaggtatactatagcctaataatagacgaacacgacgattaattgatacagacatttttatttcaccctgctctgttggccagtgccattgaagctgtcaattattcaagctagctctagcacgtacgccattatcatccaagtttcaagctacatgatgatagatgcctggagatgatatgattaacggcgtgcatatatgtcgccggatgcctggattgctgaagagaacaaggttgaggatgaccgagtttgtaccgctccaggcggtgtgcgggtacgtagaacatcgatattatcatcgcatgcgcatatatgtatgctagatgtaacagtaagctagcgacaaattaaacaagttcgtgc

SEQ ID NO: 2592 - DNA, 1644 bp, Zea mays
  Clone ID: PAT_MRT4577_70811C.1
cgtctctactcctcttcctcctctctctactctccaagttctcttctccgtcgaccgctctacacgtctcttgtcgatctggacaccgaggtggaagaaggaagcagtcagcagatggatccatggatcagcagccagccttctctgagccttgacctgcgcgtcggcctgccgccgcttagcctccaccaccaggcgccggtggccgtcgccttgcccaggtccaagctgctcgtcgaggagaacttcctcctgccgcctccaaagaaagaaccagaggtcgcggctctcgagacggagctgcagcggatgggcgaggagaaccggcgcctggcggaggcgctggccgaggtggcctccaagtacgaggcgctgcgggggcagtacacggagatggtggccgcggcggccacggcctgcgggaaccacccgtcgtccacgtcggagggcgggtccgtgtcgccgtcgcggaagcgcaagagcgagagcacggacaccgcgccgcccgcgcagcagctactgcaccagcactacccggcggtggcgccggaccagacggagtgcacctcgggcgagccgtgcaagcgcatccgggaggcggagtgcaagcccagggtgtcgaagctgcacgtgcacgccgacccggccgacctcagcctggtggtcaaggacgggtaccagtggcgcaagtacgggcagaaggtcaccaaggacaacccctgcccgcgggcctacttccgctgctccttcgccccggcctgcccagtcaagaagaaggtgcagcgcagcgccgacgaccccaccatcctggtcgccacgtacgagggcgaccacaaccacggccagcccccgccacaggcgcaggcgccgcacgacggctccagccctggcgccagcaagaagccgccgtcgccgccgaggccggtcgccgccgctccggcgccgctccaccaccagcaggtccagcagcaccagcagcagcaggcggttggcgcggtgaaatgcgagccgcccgtggccgcggcggcgtcggagctcatccggcggaacctcgcggagcagatggccatgacgctgacgcgggaccccagcttcaaggcggcgttcgtcaccgcgctgtccggccggctcttcgagatgtcgccgaccaaggactgacggaacggatcggatggattgggcgattggcatcgcaggagattctggatcagattgtcttcgagcgcacgccgcaatggtcaactgcgcagcgctggcttggctgctgcctccgttcactcttcgctgtcagagcgaaacagcggtaacagagcaagacacgaggggtctgcactctgcagttgtgcaggaggaggaacagacacagggagaggagggcgcgcggccggacatggcgtggaacagagatcgtcgtcaccgccggcgggggtgtggtcgacgacgcgacatgcgaaacactacgtgctagctagcataggaaaaaacaacatgaaatcgtacaaccaaccaatccctcgcactgttttagttgttagctgtaggcgaaactgttcatccaattgatcaaatgaaaattatttttccctagcactatgtttcatgagaatgagaccaggaatgaaccaacttgagtttgaaattttc

SEQ ID NO: 2593 - DNA, 668 bp, Zea mays
  Clone ID: PAT_MRT4577_70834C.1
gtcggtcggtccggaatccttattatcctattccgcatctctctccatctcgctgctcctctcgcctccttgttgatgcagcaagccagggatcgccatgtcggactcgaaggagcaccacttccaatcgaaggtcgacgccggagcgtccaagatctacccgcaacaggctggcaccgtccggaagaacggtttcatcgacatctagaaccgcccctgcgaggttgccgcaggtttctacctcgaagactggtatgtatgaccatgccaaatgccactttgttgccatagacatattcaacgagatagaagctcgaagatattgttccttcgacaacacaactgcgtatattccgcatgtgaaccgtactgagtaccacttgattgatatatcagaggatggatttgtgagccttcttacttcagatggcaacactaaggatgatcttacactcccaaatgatgatactcgtgaggcccagatcaaagaaagctttgaaagcgacaaggatcttgctgtgactgtacaatctgctatgtcgaatgagtaaatctgcacgctgaaggatggtgtgcccaagcaacttccctgtcttggaatactgcatctcacaatctaaatcgataaaagaagtgtatcacggattgctacagagacatctatctgg

SEQ ID NO: 2594 - DNA, 842 bp, Zea mays
  Clone ID: PAT_MRT4577_70875C.1
gaggcttgtgacggacaccagaatacacaacagcagctcaaaaaacccaacacacctcaacaagcagagcaaagatcccgggattcgccggcgcggtagcgagagcgagagatggacgggaggatgttcggtctcgagacccccctgatggtggcgctgcagcactttctggacgtgcccgacggcgacgccggcgcgggcggcgacaaggcgggcggcggcgggccgacgcgcacctacgtccgcgacgcgcgcgccatggcggccaccccggccgacgtcaaggagctcccgggcgcgtacgcgttcgtggtggacatgccggggctgggcacgggcgacatcaaggtgcaggtggaggacgagcgggtgctggtgatcagcggcgagcggcgccgggaggagcgcgaggacgccaagtacctgcgcatggagcggcggatgggcaagttcatgcgcaagttcgtgctgccggacaacgccgacatggacaagatctcggcggtgtgcagggacggcgtgctcaccgtgaccgtcgagaagctgcccccgcccgagcccaagaagcccaagaccatcgaggtcaaggtcgcctgaggtgggactaggtcgaccgatcgtggctctgaagatgtgggagcagtgccagcgagttgtgaggacctctacctgtgtgggatgtggcgaggaataatcgtagtctgtagtgggggtgcttctggtgtgcgtgtttgcttccttcggtcgcggtgtctgtctaccaattcctatctgatgtatgggcttcggtttcgtatgaaccatgccggatgctttcagtatgttcatctaaaaaaaaaaaa

SEQ ID NO: 2595 - DNA, 1089 bp, Zea mays
  Clone ID: PAT_MRT4577_70877C.1
ccggccgggaaagggaggcggcgcctaagaatcgaggcaaaagccagcccgagcacactccaccacctttcagaaccttcgacagccttccagaagcccatccctcaccacgcatgcaaagcgccccctccggccacgtcccgccccacaccaagaaagaatcacacaacagcagctcaaaaacctaacacacctcaacaagcagagcaaagacccgggattcgccggcgcggtagcgagagcgagagatggacgggaggatgttcggtctcgagacccccctgatggtggcgctgcagcaccttctggacgtgcccgacggcgacgccggcgcgggcggcgacaaggcgagtggtgccgcggcgggcggcgggcccacgcgcacctacgtccgcgacgcgcgcgccatggcggccaccccggccgacgtcaaggagctcccgggcgcgtacgcgttcgtggtggacatgccggggctgggcacgggcgacatcaaggtgcaggtggaggacgagcgggtgctggtgatcagcggcgagcggcgccgggaggagcgcgaggacgccaagtacctgcgcatggagcggcggatgggcaagttcatgcgcaagttcgtgctgccggacaacgccgacatggacaagatctcggcggtgtgcagggacggcgtgctcaccgtgaccgtcgagaagctgcccccgcccgagcccaagaaacccaagaccatcgaggtcaaggtcgcctgaggtgggactaggtcgaccgatcgtggctctgaagatgtgggagcagtgccagcgagttgtgaggacctctacctgtgtggaatgtggcgaggaataatcgtagtctgtagtgggggtgcttctggtgtgcgtgtttgcgttccttcggtctcggtgtctgtctaccaattcctatctgatgtatcggcttcggtttcgtatgaaccatgccggatgctttcagtatgttcatctaccaaaatattttgtctaaataatccgtagtcttcattgacagaaagactacacacgttatcctgacaagacacgaaatcccaataaagtttaaattcaggctactacc

SEQ ID NO: 2596 - DNA, 1093 bp, Zea mays
  Clone ID: PAT_MRT4577_70979C.1
gtgcggcgtcaggcggcgggtccgacctccgtcattccaactcccccctccggacgcaccttccccgctatataaggcacgcgccccgagcacaggcgaagagcgtgcagagcgagacgcgtcgcctcctcccttcccccaccccgccgccgccctcgcgtccgtccgtccgtccgtccgttattagggttcggtcgccgccatggcgatcctctcggcgctcgccaccgaggtgctcatccccgtcgccgccgtcatcggcatcgccttcgccgtcgtgcagtgggtggtcgtgtcgcgcgtgaagctctccccggccgcgtccggcggcagcggcggcaaggccggctacgccgactccctcatcgaggaggaggaggggctcaacgaccacaacgtcgtcgtcaagtgcgccgagatccagaacgccatctccgaagggacaggagcaacatcgtttcttttcaccgagtaccaatatgttggtatcttcatggctatcttcgctgttgtgatcttcctcttccttggttcggttgagggattcagcacgaagagccagccctgcacatatagcaaggacaagtactgcaagcctgcgctgttcactgcactctttagcactgtgtccttcttgcttggagccatcacctctctggtctctggtttccttggcatgaagattgccacatatgcgaatgccagaactaccctggaagctaggaagggtgttggcaaggcttttatcactgctttccgctctggcgctgttatgggtttcctgcttgcatcaagtgggcttgtggttctgtacatcacaattaatgtatttaagttgtattacggtgatgactgggagggtctttttgagtccatcactggctatggtcttggtgggtcgtccatggctctcttcggaagaagttggtggaggtatctacacaaaggctgctgatgttggtgccgatcttgttggaaaggtcgagaggaacattcctgaggatgatcctaggaacccagctgtgattgctgataatgtcggtgacaatgttggtgacattgctgggatgggatctgatctctttgggtcata

SEQ ID NO: 2597 - DNA, 259 bp, Zea mays
  Clone ID: PAT_MRT4577_71035C.1
gcgagcggccggcccttttttttttttttaaagtaaatcagagttgcataaattttttcggtccccgtaccacgatcatacacaagcacatgcatacacacacgtatacatacgatagattacgtagccacgcttattcgtgcatcacacgagcgcatacatacgtacgcgcgcaaaacacggtaggcgctcaatatcactctcaaacgcacgcgtagaccacggggagggacgacgatacgggaggatcaatcacccg

SEQ ID NO: 2598 - DNA, 1786 bp, Zea mays
  Clone ID: PAT_MRT4577_71053C.1
gacgaggccagccacgcgcaaaccgaatccaccaacgtcaaacgaccgcaccaaccaatccacttcgccggcgatccgtctcatctcgtcgcgtctccggcgccggcagacacgggtaacgcggctccgagatcggcgggcaggatgatgatgctgatcgattgctcggggtgccgtaccccgttgcagctgccgcacggggcgccctgcatccgatgcgccatctgtggggccgtcacgcacatcgcccccgcccctcccgccgagcccaaccgcggcgccgtacaaccggcgccggggtgggcgccgccgccgccgccggtgcacggacggaagcgcgccgtggtgtgcgggatttcgtatcggtactcgcggcatgagctgaagggctgcatcaacgacgccaagtgcatgcgccacctgctcatgacgcgcttcaacttccccgacgactccatcatcatgctcaacgaagaacaaacggacccctacaaaatcccaacaaagcataacataaggatggccatgtattggcttgtgcaaggttgtcaacctggagattcattggtgttccattattctgggcatggatcacaacaaagaaattacagtggagatgaggttgatgggttcgatgaaaccctctgcccgttggattttgagacacaagggatgattttggatgatgagataaatacagcattagttcgaccacttcctcatggagttaaacttcatgcactcattgatgcttgtcatagtgggactgcacttgatttgccttatctctgcagaatgaacaggagtgggcaatatgtatgggaagatcaccgaccgcgatctggtgtctggaaaggcactagtggtggggaagctatttcctttagtggttgtgatgatgatcagacctctgcagatacctctgctttatcaaagatcacttcgactggtgcaatgacattctgcttcatccaagctattgaacgtggacagggcaccacctacggtagtatcctgaactctatgcgttccacaatacgcaacacaggtgactcagcgggtgtaggtggcggtgctgttacatcactaattacaatgcttcttactggagggagcctttctgctggtggtctgagacaggagccacaactgacggcgtgcgagccatttgatgtctatgcgaagcccttctccctatgacgtgttcatagtattgcccaatgtactatggggttgtttgtttcggcttctggcagcttctggccaccaaaagctgctgcggactgccaaactctcagcttttcagccagcttctataaaattcgttagggcaaaaaccatccaaaatcaacataaacacataatctgttgagtcgttgtaatagtaggaatctgtcactttctagatcgtaagccctatgaacaactttatcttcctccacatgtaatcataataatactcagattctccccacagccagattctcagaaaagctggttagaaaaaagctgaaccaaacagcccctatatatctcctcccatttcacgttatcattatgtacatttcggtattaaaccttgttcgtttgtgtcggattgcacctggaatcgttccagctaatcaaaatttatataaattagagaagcaatccggtacaaacgaacaagaccttagaagtcctccatccatccagattgttaacaacgcgtggaattgccctttatttccatgccctcacaatgttcagtgcacagttgttaaaggagagtacaatttgatgcctc

SEQ ID NO: 2599 - DNA, 550 bp, Zea mays
  Clone ID: PAT_MRT4577_7151C.1
tgggtacctcgagggcgggcggggacgtttcctccctgagtctagagtcatgttccgcatcctcccatatccaattcgcgtagttctccctcgtctgccgccatggcgctctctgtggagaagacctcggctgaacgggggtacaaggtcaaggatctctcgcaggcggacttcggccgcctcgagattgagctggccgaggtcgagatgcccggtctcatggcgtgccgcgccgagttcggcccgccaaaccccttcgctggtgctaggatctcgaggtctctccacatgaccatccagaccgccgtcctcattgagagcctcaccgcgctcggcggcgagggccgctgaggatcctgtttattttttctccacgcaggaccacgccgagcggcgccatcgcgcgcgactcagccgccatgttcgactggaatgatcataccctctagcagtactgggggcgcaccgagcgctacctggactgaaacgagaggggcgagcccgacctcgtcgtctaggacgtcggcgacaccacgctgctcgaacacga

SEQ ID NO: 2600 - DNA, 821 bp, Zea mays
  Clone ID: PAT_MRT4577_71648C.1
actcctatgggcgattgggaccctcgaggccggccgggccaaaatcatcccctttaaattggttgtccttctgttttgatactgcttcctttcttcctcgacattcgatttccatctcatcacataaaaccggaataatgtctactgctggcaagactattacctgtaaggccgccgtcgcctgggaggccggcaagcctctgtccattgaggatatcgaggttgctcctccaaaggccaacgaggtccgaatccagatctactacactggtgtttgccacacagatgcctacacactctctggcaaggaccccgagggtgctttccccattgtccttggacacgagggtgccggtattgtcgagtccattggtgagggcgtcaccaacgtcaaggttggtgaccacgtcgtcgctctctacacccccgaatgcaaggagtgcaagttctgcaagtccggaaagaccaacctttgcggtaagatccgagccacccagggcaagggtctgatgcccgacggcacctctcgattcaagtgcaagggcaaggatctgcttcacttcatgggcacttccaccttctcccagtacaccgtcgtcgccgatatctccgtcgttgccattgagcacgacgctcccatggaccgaacctgtctgctcggctgcggtatcaccaccggttacggtgctgccaccatcaccgccaacgtccaggctggcgacaacgttgccatcttcggtgccggctgtgtcggtctctcagttgtccagggtgctgccgctcgcaaggctggcaagatcatcgttgtgacgtcacccttc

SEQ ID NO: 2601 - DNA, 375 bp, Zea mays
  Clone ID: PAT_MRT4577_7168C.1
tacaaaactctatagtgagtcgtattaccttgcagtcatcccatcagtcacggcaacacatccggccatgtcaaggaaaatgtctcgcgccatagttgaggtcctcttcgacatcgtcgtcatcgctgccctcagagcggcagaggcaccggcagaatgaacgcatgcaagcagtcctgccaaggcaccggacgaatgaactcatgcaggtagtgctgcagctcctgccactgcagccaagtctgctgccacgagaactgcacctgctaaggcatctaaagccgccgttaccgccgccgtagccgctgcgtcatcgacgtcgtcgtctacgaagtctggtccaactgccgcgccgaccacagcctcctctacaac

SEQ ID NO: 2602 - DNA, 272 bp, Zea mays
  Clone ID: PAT_MRT4577_71725C.1
gccgtccgccttgcccttcacgaaggcttggtcctcctccttgtatctccactccccccttcacagatccgttcctccagctagggttagcgttcctctgcagcgatggcgatcaagcggaccaaggcggcgaagaagatcgcttacgataagatgctatgcagcctgctccgatgagtacaccaatgtgctcatcgcccttcccgacaacgtcggttgcacgcagctccaggacatccgccggggcctcaagggcgactcggtggtgctca

SEQ ID NO: 2603 - DNA, 1449 bp, Zea mays
  Clone ID: PAT_MRT4577_71847C.1
aaggcaggcaggcaggcagaggcaagaggcccctcaccctcaggtgatcaggtcgctagctcccggcttaactagtaggcagccatgaatttcggtgggaatggcaacgcgacgatccggtgcaagtactgcagggcgagcctgagcgtgatccccggcgagcgcgccatccagtgcgcgcaatgcaactgcgtgacccgcatccggcgggccgaccgcatcccgctggcgcggccggcgcacgtgccgccggcgttccagcgcgcccggggcaagaagcgcgccgtcctggtcggcatcacgtacgccggcgcgcgccggggctgcggcgacctgaggggccccgtcaacgacgtcaagtgcatgaggaacctcctctgccagcgcttcggcttccccggcgagtgcatcatcatgctcactgacgaccagagggacccgttcaggctgcccacgaaggagaacatccggatggcgatgcactggctggtgcagggctgcagctacggcgactccctggtgttccacttctcgggcatcggcgcgcaggtggcggacgacgacggcgacgaggcggacgggtacgacgaggccatctgcccgctggacgcgttccagagcgggcccatcctggacgacgagatcaacgaggtcatcgtgcgcccgctggtgcacggcgccaggctgcacgccgtggtggacgcctgctacagcgccacggtcctggacctcccctaccagtgccgcatgtccaggaacgggttctggcagtgggaggacgagagcccgccgtcgggcgcctggaagggcaccagcggaggccacgccgtgctcatcagcggatacagcgagggcaaaggcaacttcgccatgatgcccgacgcccacgcgtcggtcgtcggggccatgacgcacagcttcgtccggacgctggagtgccagccgcgcggggtcacctacggccacctgctcagctccatgagggccatcatgaagaaccgcggcgggggctgcgatctgcagggggccatcggcgcacccatccgcaccgtcgccaacttcagcggcgtgcaggagcctaacctgtcctcttcggagacgtttgacatttaccgcaagcagttcgtcctgtagacaccaccacaccagggtttgcccctgccggccggccgcttgtaatgaattgccgtcgtatcagaataagaaattatctatcgaccatgatatgatatgatatatcaggaaagaaggaactattacccctcaatgtaataactaagcatgttcaatgtcctctttttattagagagagagacagagagaaaacgcggaatttgagacgtgtgcatgcagtttacgtgatcaataaagttacatagaaattattttatccctctttttattaagagagacagggagaaaaccctgttaatgtggagactgcgcaat

SEQ ID NO: 2604 - DNA, 1661 bp, Zea mays
  Clone ID: PAT_MRT4577_71852C.1
cgcccgggtcgacgcaagactctaaactggcaggcagaggcaagaggcccctcaccctcaggtgatcaggtcgctagctcccggcttaactagtaggcagccatgaatttcggtgggaatggcaacgcgacgatccggtgcaagtactgcagggcgagcctgagcgtgatccccggcgagcgcgccatccagtgcgcgcaatgcaactgcgtgacccgcatccggcgggccgaccgcatcccgctggcgcggccggcgcacgtgccgccggcgttccagcgcgcccggggcaagaagcgcgccgtcctggtcggcatcacgtacgccggcgcgcgccggggctgcggcgacctgagaggccccgtcaacgacgtcaagtgcatgaggaacctcctctgccagcgcttcggcttccccggcgagtgcatcatcatgctcactgacgaccagagggacccgttcaggctgcccacgaaggagaacatccggatggcgatgcactggctggtgcagggctgcagctacggcgactccctggtgttccacttctcgggcatcggcgcgcaggtggcggacgacgacggcgacgaggcggacgggtacgacgaggccatctgcccgctggacgcgttccagagcgggcccatcctggacgacgagatcaacgagaccatcgtgcgcccgctggtgcacggcgccaggctgcacgccgtggtggacgcctgctacagcgccacggtcctggacctcccctaccagtgccgcatgtccaggaacgggttctggcagtgggaggacgagagcccgccgtcgggcgcctggaagggcaccagcggaggccacgccgtgctcatcagcggatacagcgagggcaaaggcaacttcgccatggtcagggacatgatacatacatacatactgctgatcgagctctgctgccttgcatctatctatatacctaacatgcatatgctgctgcttggacgacgcgcggcgtgcagatgcccgacgcccacgcgtcggtcgtcggggccatgacgcacagcttcgtccggacgctggagtgccagccgcgcggggtcacctacggccacctgctcagctccatgagggccatcatgaagaaccgcggcgggggctgcgatctgcagggggccatcggcgcacccatccgcaccgtcgccaacttcagcggcgtgcaggtatccatgtcgaatctctctgtctctgtcaacaacaacatccttggctagctgctgtgctcctctcaccaattaaactctcacttgtttgctttggtttgatctttttgcaggagcctaacctgtcctcttcggagacgtttgacatttaccgcaagcagttcgtcctgtagacaccaccacaccagggtttgcccctgccggccggccgcttgtaatgaattgccgtcgtatcagaataagaaattatctatcgaccatgatatgatatgatatatcaggaaagaaggagctattacccctcaatgtaataactaagcatgttcaatgtcctctttttattagagagagagacagagagaaaacgcggaatttgagacgtgtgcatgcagtttacgtgatcaataaagttacatagaaattattttatccacgtgcgatgcaagtggagcttctact

SEQ ID NO: 2605 - DNA, 2335 bp, Zea mays
  Clone ID: PAT_MRT4577_71853C.1
accgcgtatcgactcctatgggcgattggtaccctcgaggccggccgggaaggcaggcaggcagccaagaggcaagaggcaagaggtccctcagtcgctaggcgctagctcccggcttaactagtaggcagccatgaatttcggtgggaatggcaacgcgacgatccggtgcaagtactgcagggcgagcctgagcgtgatccccggcgagcgcgccatccagtgcgcgcaatgcaactgcgtgacgcgcatccggcgggccgaccgcatcccgctggcgcggccggcgcacgtgccgccggcgttccagcgcgcccggggcaagaagcgcgccgtcctggtcggcatcacgtacgccggcatgcgccaaggctgtggcgacctgaggggccccgtcaacgacgtcaagtgcatgaggaacctcctctgccagcgcttcggcttccccggcgaatgcatcatcatgctcactgacgaccagagggacccgttcaggctgcccacgaaggagaacatccggatggcgatgcactggctggtgcagggctgcagctacggcgactccctggtgttccacttctcgggcatcggcgcgcaggtggcggacgacgacggcgacgaggcggacgggtacgacgaggccatctgcccgctggacgcgttccagagcgggcccatcctggacgacgagatcaacgaggtcatcgtgcgcccgctggtgcacggcgccaggctgcacgccgtggtggacgcctgctacagcgccacggtcctggacctcccctacctgtgccgcatgtccaggaacgggttctggcagtgggaggacgagtgcccgccgtcgggcgcctggaagggcaccagcggaggccacgccgtgctcatcagcggatacagcgagggcaaaggcaacttcgccatgatgcccgacgcccacgcgtcggtcgtcggggccatgacgcacagcttcgtccggacgctggagtgccagccgcgcggggtcacctacggccacctgctcagctccatgagggccatcatgaagaaccgcggcgggggctgcgatctgcagggggccatcggcgcacccatccgcaccgtcgccaacttcagcggcgtgcaggagcctaacctgtcctcttcggagacgtttgacatttaccgcaagcagttcgtcctgtagacaccacgccacaccagtgtttgccccgccggccgcttgtaatgaattgccgtcgtagtatcagaataatcaattatctatcggccatgatatgatatgatatatcaagaaagaaggaactaatacctagagtacttcgttcatctgtattagcagtgaacctctcaatgaaataactaagcatgttcaaaaaaaaaaaagcagcagagacctagggtacctcgaggccggccgggagtattgtaagagattgaagggtaattttcttcatcttgaatgctcttatatggggggagaagtcgtctggtgctgttcctttcaccacaatgtttgccttggtcctcctttggtttggcatctcagtaccccttgtcttcgttgggagttaccttgggttcaagaaacctgccatggaacctccagtcaagacaaacaagattccacggcagatccctgagcaggcttggtacatgaatccacttcaccattctgattggcggtgtccttccatttggagcagttttcattgaactcttcttcatcctcacctccatctggctgcaccagttctactacatctttggcttcctcttccttgtgtttgtgatcctgatcatcacctgcgccgagatcacaatcgtgctctgctatttccagctctgcagtgaggactatatgtggtggtggaggtcttaccttacctcaggatcctccgccctgtatctcttcctgtacgctggtttctacttcttcacgaaactgcagatcactaagctggtgtctggcatcttgtacttcggctacatgcttctcgcctcatatgccttcttcgtgctgactggcacaattggtttctgcgcctgcttctggttcactaggttgatttactcttcagtgaagatcgattaggtgccaagatgacagaacaacacatgtttcaatgatggagtcaagataattgtatgattaatgtggattggggaattacccccctcctttttttgaaggttttcaggaaaaatttactgtttaggatttagtttacggatggtttatgttttgttattgtcaggttatacactttagtgatctggaactgaaaaaatataagggtaaacatattagacgaaaaaaaaaaaaaaaaaagcggcc

SEQ ID NO: 2606 - DNA, 2567 bp, Zea mays
  Clone ID: PAT_MRT4577_71970C.1
ccggccgggaaaaaaaaactacccgctccctgtccagcgtccgcgtgcaccaacacctcccacgagtccgcgacgcgtcagcgtcaccgtccgtcgtcgcaaacgagcccagtggcgattcgctttcgaaccgcactcgccctcctctgttctcttctctccctcctatagttggcttctcgccaccctctgctttcgatcagctttctccgctccccgtttccctctccaactccaatccatggcctccacggatcgctccacgccggcggaggacgagcaacagcagaagcgcccgtctctcttctcgccgtaccagatgccccgcttccgcctcgcccaccgggtggtgctggcgccgatgaccaggtgcagggcgcccgacgcggtcccaggccccgcgctcgcggagtactacgcgcagcggtccacggagggcggcttgctcatctccgagggcaccatcatctcgccgtccggccctgggttccctcgtgtccctgggatatacaatcaagaacagactgatgcatggagaaaggtggttgatgctgttcatgccaagggagctatctttttctgccaactatggcatgtaggccgagcttctcaccaagtatatcagccgggtgctgctgctccgatatcctcaactgataagccaatatcatcaagatggaggatactgatgcccgatggatcctatggcaagtatccaactccgaggcgcctagccacatccgagataccagaaattgttgagcaataccgtcaagcagccataaacgccatcaaagcaggtttcgatggcatcgagatccatggcgcccatggctacctcatcgatcagttcctcaagggcggtatcaacgaccggactgacgagtacggtggctcactctccaaccgttgccggttcctcctggaggtgacccgagccgtggtctctgcgataggggcagaccgcgtcgcggtccgagtgtccccggccatcgaccatctcgacgcctacgactccaaccccctgcagctcggcctggccgtggtggagcgtctcaacgctctccagcaggaggccgggcggctggcctacctccacgtgacgcagccacggtacacggcgtacgggcagacagagtctggccagcacgggagtgccgaggaggagagccggctgatgcgtgccgtgcgaggtgcctaccgtggcacgttcatgtgcagcggtgggtacacgcgggagctcggggtcgaggccatcgagtccggggacgctgacctggtgtcctacgggcggctgttcatcgctaatcccgacctggtggagcggtttcggcgcgacgccccgctgaacaaatacgtgcgcaagacgttctacacgccggaccccgtcgtcggttacacggactacacattcctcggccagcctaaggcgcgcatgtgattattagtaggttgccgtaattataagaggcggagtgttgtttgtgtgttgtgacttgagaaaacaagcaaacatctgggtaatgccgcgattgttacgtgttcctactgtatacgtgttaccaatattcgggcctacagattgtatcttgataatcagtggcagatctagaattttactatgtgtaaaaaaaaaaaaaaaaaaaaaaaaaaaaacttgccgccagccagcccattaaccctcgttcctgtcgcgcagccacgacctccacttccgcatcttccccggcggcggcgcggtcagttgaaccatggcggactccaaggccacctcggcggtcaccctccgcacccgcaagttcatgaccaaccgcctcctggcccgcaagcaattcgtgcttgaggtgatccaccccggccgcgccaacgtctccaaggcggagttgaaggagaggcttgccaaggcgtacgaggtgaaggaccccaacaccatctttgtcttcaagttccgcacccacttcggaggaggaaagtccactggtttcggcctcatctacgacaacctcgaggctgccaagaagttcgagccgaaataccgcctcatcaggaatggtcttgctactaaggttgagaagtcccgcaagcaaatgaaggagcggaagaacagggccaagaagatccgtggtgtcaagaagaccaaagctggtgacgccaagaagaagtaaacgttcgtttacatttgtattactgttctgggctctgggtggtctagctgcaatgtcataattatggtcgtgttaggttttgttccacctttggcactgaagtgattttttttgtaattcctcggcactgaagtgaagttttgtcagaatattgcctcgtaacataattgcccggtccctgttctagttgtggcgcagtctggtttgttttgacatttgttttcaaggttcatccttatttgcattgcatttgtttatggcttgacgttaacatttggaacaagtatttgtcaccgctcatgtcgatggtgtaaaacatgatagttatgttgtcttctgtgggctgtgtaaaataggggatttgcaatatgacattatttcagagtaaaaaaaaaaaaaaaa

SEQ ID NO: 2607 - DNA, 372 bp, Zea mays
  Clone ID: PAT_MRT4577_72073C.1
tctccatcttgtttccatttcgcgtaacttttcgcggaattttacatcaactttaaaccaacccactttctatcatcatgactggacgcggcaagggcggcaagggcctcggcaagggcggtgccaagcgtcaccgtaagattcttcgtgacaacatccagggtattaccaagcccgctatccgacgtctcgctcgtcgcggtggtgtcaagcgtatttctgccatgatctacgaggagacccgtggtgttctcaagtccttcctcgagggtgtcatccgtgatgccgtcacatacactgagcacgccaagcgaaagaccgtcacattactagacgttgtctatgccctgaaacgacagggccgcaccctgt

SEQ ID NO: 2608 - DNA, 1308 bp, Zea mays
  Clone ID: PAT_MRT4577_72153C.1
gtgccgccgaacaccctcacaagagtcggcctcttcggcacgcagtccagcctcagcagtccccttccctccctccatcaggtgttgcctcccgcagatccaaatcggaattcggtccttcgtccccaaaccaccaatccgggaagtgaagtgatgggggagtgcgaggacggcaaggagtacaggtgctgggaggagctgctgccggacgcgctgggcctcatcttccgcaacctgccgctgcaggaggtgctcaccgtcctgccgcgggtgtgcaagtcctgggggcgggtggtggccggcccctactgctggcaggagatcgacatcgaggagtggagccagcagcagggcaagccggagcagatcgcccgcatggtcgagctactcgtgggccgcagcgccggctcgtgccgccggatcagcgtctccggcctgccctgcgatccgcgcttctccttcatcggagacaacgcacgagctctccggaccttggagatccccaggagcgagatcagcgactccatggtggaatccgtggcgccgcggctgccgaacgtcactttcctcgacatcagcagctgcacgaagatgggggcccgcggcctggaggcgttcggcaagcactgcaagtccctggcggggctgcggcgggtgatgcacccgatcgacctggcggacagggcgtgccagcacgacgaggcgcacgccatcgcgtgcagcatgcccaggctgcggcacctggagatggggtacatgctggtggcgacggaggcggtggcggagatcctggggcggtgccgcgagctcaggttcctggacctgcgcggctgctgggcggtggacgacaagctcctgccgcgcgaccgccacccggggctgcgcgtcctgggaccccgcgtcgacgactgctacgagaacagctactgggaggagtgctccgacgactactcggacgactcctccatctactcgtgggagctcatggacgacgtcgacgacgactacgactacgccgccggcagcgacgacgacgacgacgaggccgtctgggacgacgacggccagggcctggagaacctggaggtcaggttctacggcggtggcttcggcgagaccttcgccggcttcgactggccgccgtcgccgtgacatgacacctgctgcctgcgcttgcgttgcttgcgtgggtgggtgagcctttgtgtgttgtccccaagctttggaagcttgctgtgctgctgtagtactgtgcctgcgacatcactcgatcttcctctacctcgcagatatgccatatgtgaagcg

SEQ ID NO: 2609 - DNA, 1678 bp, Zea mays
  Clone ID: PAT_MRT4577_72159C.1
gccactagctctccgcagtccgctctcgcctctcggccttctccttgtgccgccgaacaccctcacaagagtcggcctctcgatttctcagtccagcctcagcagtccccttccctccctccatcaggtgttgcctcccgcacatccaaatcggaattcggtccttcgtccccaaaccaccaatccggttgcattctttgggtttgctcacagcgcacacaaagccattttactgctgggaatggtggctggcactattagcgtctccggctcttgagtgatctccaagtcctttggaatgctacagggaagtgaagtgatgggggagtgcgaggacggcaaggagtacaggtgctgggaggagctgctgccggacgcgctggggctcatcttccgcaacctgccgctgcaggaggtgctcaccgtcctgccgcgggtgtgcaagtcctgggggcgggtggtcgccggcccctactgctggcaggagatcgacatcgaggagtggagccagcagcagggcaagccggagcagatcgcccgcatggtcgagctactcgtgggccgcagcgccggctcgtgccgccggatcagcgtctccggcctgccctgcgatccgcgcttctccttcatcggagacaacgcacgagctctccggaccttggagatccccaggagcgagatcagcgactccatggtggaatccgtggcgccgcggctgccgaacgtcactttcctcgacatcagcagctgcacgaagatgggggcccgcgggctggaggcgttcggcaagcactgcaagtccctggcggggctgcggcgggtgatgcacccgatcgacctggcggacagggcgtgccagcacgacgaggcgcacgccatcgcgtgcagcatgcccaggctgcggcacctggagatggggtacatgctggtggcgacggaggcggtggcggagatcctggggcggtgccgcgagctcaggttcctggacctgcgcggctgctgggcggtggacgacaagctcctgccgcgcgaccgccacccggggctgcgcgtcctgggaccccgcgtcgacgactgctacgagaacagctactgggaggagtgctccgacgactactcggacgactcctccatctactcgtgggagctcatggacgacgtcgacgacgactacgactacgccgccggcagcgacgacgacgacgacgaggccgtctgggacgacgacggccagggcctggagaacctggaggtcaggttctacggcggtggcttcggcgagaccttcgccggcttcgactggccgccgtcgccgtgacatgacacctgctgcctgcgcttgcgttgcttgcgtgggtgggtgagcctttgtgtgttgtccccaagctttggaagcttgctgtgctgctgtagtactgtgcctgcgacatcactcgatcttcctctacctcgcagatatgccatatgtgaagcgaactgctagtggtgcaatctaaaatgtagacgctggtgtttacatgaagcaatccccatcagcatgcaccggtgagattccaccggtgccaatccccaaacatcctacctactactagtcatagagagcggggcagggtacccctgtctcctgatggcttctttaatgtcatgcgagcaaacatggcagtgcaagggtctcctg

SEQ ID NO: 2610 - DNA, 320 bp, Zea mays
  Clone ID: PAT_MRT4577_72196C.1
gttcgtgggtgagcggatcgagatggcggcgtaggatgttgagtaccgctgcttcgtcggcggtctcacctgggccacggacgaccactctctgcacaacgcctttagtacctacggcgaggatctcgagtacaagatcatgctcgatcgggagactcagaggtcccgagggttacgctatgtccccttctccacggaggaggcgatgcggaacgccattaagggcatgaacggtaaggagctgtacggctcgaacatgaccgtgaacgatgcccagtcctgaggcggacgtggatgcggaagcggcgggtacggtggtg

SEQ ID NO: 2611 - DNA, 1293 bp, Zea mays
  Clone ID: PAT_MRT4577_72198C.1
gaacctcgccggcggccgcagccgcatagaccggaagagaaaggaagcagagatcggaggcaggcgaagatggggcgcggcaaggtgcagctgaagcggatagagaacaagataaaccggcaggtgaccttctccaagcgccggaacgggctgctgaagaaggcgcacgagatctccgtcctctgcgacgccgaggtcgccgtcatcgtcttctcccccaagggcaagctctacgagtacgcctccgactcccgcatggacaaaattctagaacgttatgagcgatattcctatgctgaaaaggctcttatttcagctgaatctgaaagtgagggaaattggtgccacgaatacaggaaactgaaggccaaaattgagaccatacaaagatgccacaagcacctgatgggagaggatctggagtctttgaatccaaaagagctccaacaactagagcagcagctggagagctcactgaagcacatcagatcaagaaagagccaccttatggccgagtcaatttctgagctacagaagaaggagaggtcactgcaggaggagaacaaggctctacagaaggaactttcagagaggcagaaggcggtcgctagccggcagcagcagcagcagcaggtgcagtgggaccagcagacacaggtccaggtccagacaagctcatcgtcttcttccttcatgatgaggcaggatcaacagggactgccacctccacaaaacatctgcttcccgccgttgagcatcggagagagaggcgaagaggtggctgcggcggcgcagcagcagctgcctcctccggggcaggcgcaaccacagctccgcatcgcaggtctgccgccatggatgctgagccacctcaacgcataaggagggcgagcaaatggcgtgcgaagtgattgattgctcaccgttgattgaacgatagcctaagttcatggcggcagcaaactaagctaaaactattgttatgtttgcaaggaagggtagggtaacccgctgtgtaatctttgtccagctagcatgtaccaactgagatgcatgcatgcttattattgtccaattacccgtgaatctagcggtgcttttggtgagaggccggccgggcgggtgcagtttacttcaaatatggtttgtgattttgtgtaaatagtattaactaggagtcctatggtaagtaaattaattaatgggaggatgcatgaataaaacctctcttgtgctgcaaaaaaaaaaaaaaaaatactagaagaaaacggaaacagccatactaaagaatac

SEQ ID NO: 2612 - DNA, 486 bp, Zea mays
  unsure (1)..(486): unsure at all n locations
  Clone ID: PAT_MRT4577_72272C.1
cggacgcgtgggcggacgcgtggggcgccaccgcatggtgctccgggataacatccagggggtcaccaagccggcgatccggcgtctcgctcggcgcggcggcgtgaagaggatcagcggcctcatctacgaggagacccgcggggtgctcaagatctttcttgagaacgtcatccgtgatgctgtgacctacaccgagcatgcccgccggaagacggtgacggcgatggatgttgtgtatgcactcaagcgccaggggcgaactctgtacggctttggcggctgaagggccgagcgtttggtccaggactaggcgtttctgctttggcttagtagttcgtgggctgtcttcggagtatggagggctttgngggaacgtagacttgtanggatnggcagatatcttatctgatatggtaatggaggaaagtttgagttaatgttttcttgcgttatctgatatgtgattaaatgtatattctgaaa

SEQ ID NO: 2613 - DNA, 248 bp, Zea mays
  Clone ID: PAT_MRT4577_72299C.1
gtctaccaccacccgcctcctctcgagttcgatctgtttgctcccccaaacatgttcggccgcggcaagggaagcaagggcctgggtaagggcggcgccaaacgccaccgcaaggtgctccgcgacaaccttccagtgcatcaccaaaccggccatcccgaagcttgcgcccaagggcggcgtgaagcgcatctccgggctcatctacgaggagacccgcggcgtgctcaagatctttctcgagaacg

SEQ ID NO: 2614 - DNA, 316 bp, Zea mays
  Clone ID: PAT_MRT4577_72350C.1
gaccaccggtgtcttcagtatgtgaaaacccaatttttaaaccctacaggatccaacaggcattggcagcatgctttttaccttaatcacccttggtcctccaacacccgtcatgccctattacagcagttacctttgcagcatttgttggcccaaaacttcaaggcccaacatctacatcaactcgggctaggaaaccttgctgcctactttagacaccagaagtttcttccattcaaccaactggctgattagaactctggtgcttattggcaacagaacttaccattaagtcagttagctgctgcctaccccc

SEQ ID NO: 2615 - DNA, 372 bp, Zea mays
  Clone ID: PAT_MRT4577_72434C.1
ctgccgcgtggggctcaggcacaagcaccgccgttgttgctgacggttccagaaggggggtttcgtgaagactcataaaaccaatgcgttatttcaaacgttatccaagtgcaaattcaagagaaggcgggctgggcagacacactacatggccaggataaggctggttaaccaagacaaaaacaagtccaacacacccaaatacagatttgttgtgcgatttaccaacaaggacatcattggcccaatcatatatggtagtatagcgggcgatatggttcttgcttctgcctactaggatgaggtgccacgacatggtcttgaagatggtctgaccaactattcagatgcctactgcactggccttttgtt

SEQ ID NO: 2616 - DNA, 388 bp, Zea mays
  Clone ID: PAT_MRT4577_72545C.1
attcggctcgaggggttggctgctacactccctgcggctcgggtacgggttcgagagggtctccggagtccggtttcgtgggtgagcggaccgagacagcggcgtcggactgcgagtaccgctgcttcgccggcggactcggctgggccacggacgaccactgcctccacaacgcctacagcacctactgagaggtcctctggtccaagatcatcctcgatcgggagacgcacaggtcccgcggctacggcttcgtcaccttctccacggatgaggcgatgcagaacgccatcgagggcatgaacggcaaggagctggacggactcaacatcaccgtcaacgaggcccacacccgcagcagacgtcgaagcggcagcagcagctgcta

SEQ ID NO: 2617 - DNA, 643 bp, Zea mays
  Clone ID: PAT_MRT4577_72561C.1
cctcgaggccggccggggtcgtctcttccctcactctcggtccttttccccatctcccagatctaattcgagagctctccctcctctgtcgctatggggctctctgtggacaacacctcgtctggacggcagcactaggtcaaggagctctcgcacgaggacttcgtccgcctcgagattgagctgctcgcaagccgaaatgcccggcctcatggcgtgccgagccgagttcggcccgtcgaaccccttcgctggagctaggatgtcggtcgctctccacatgaccatccagaccgccgtcctcatcaagaccctcaccgcggtcggcgccgaggtccgctggtgctcctgcaagatattttccacgcaggaccacggcgtcgccgtcatcgcgcgcgactcgggcgccgagttcgcctggaaggcggagaccctcgacgaggactgcggtggcaaccatcgctgcctcgactgaggcaaggagggaggcccctatctcatcatagacgacggcggcaagtccacgctgctcatccacaaagatgacaaggccaaagacgattacgagaataccggacagagaccccatccggagaacatcgacaacgctgagttcaagaccgcggtcaccatcatacgggac

SEQ ID NO: 2618 - DNA, 695 bp, Zea mays
  Clone ID: PAT_MRT4577_7259C.1
actttctgctgctgatgcttccacggtatatgctatcacggtcgagggctatcgagagacgtcttgggatcacatgtctctgaggcacctgtctttatggaccctcatgggagcggtatgcgtgccctctccaggtcccttattgtactctgttctggatcttggacggtgcacaattgtgtccagacctctccaacatggatttcgagtcatatgtcctttctgagtcaagctcgcttatttatcctctggagatcgtcgtcacggacctgtggcactacgaagctgctgttcacgattccaagaatccttgagcttgctcaatagttgtttataccagtcgctgatatgaagtactcccgtgtgaccgtgatctttcctaccgaacagtcatccccccagatgagcttatctgacgaagttgctgcacttaaccgctactttggcgaactcaaatctgatggtgatgcttatgtgataagggatccacctacagctggacagaagtggcacgtcttctacgcctctgagtacccagagatagcaatgtggaaccttgaaatgcgcatgactgtgctggacgagatgacagcttctgtccttttcaagactaatgctgatgggaactcaatatgtgtcaaagatatgacaaagatctctggaatctctgaaatgatcctcgggatggagatctg

SEQ ID NO: 2619 - DNA, 375 bp, Zea mays
  Clone ID: PAT_MRT4577_72622C.1
actttcttatttgtggaaagcacacacacatcataacaaaaaactttattattgaactataactcataataaatctaaaagaaggcaccaccaatgatgggctgttggtagaacgctgctgggtttgtaaaagcaagttggttgaatggctagcaattgttgcagttggatgagggtgccaaacgataggcgcatcgtgctgttatgaacggaaacaactgatggctgtatcaaaaacgtagtgttgactcacaccatctaactggctgaatggcagtacctgttgtttatgtaaataaacaagagagatcaatgctgccgaggtgcttgaatggaataaattgcgttctggtcagcagcacgtatctacatgaa

SEQ ID NO: 2620 - DNA, 633 bp, Zea mays
  Clone ID: PAT_MRT4577_7264C.1
gggtacacggcgcccctcctcgagtttttttttttttttttttttttttttttttttttttttttttttttttttttttttttttttttttttttttggaaacaaaaaccttgtttattttttttttgtttcgtttaatagggggagcaaacaaagggaacaacaggggtcccaacccctaatccaaagggaaaacggaccttaacccggggacaaaagcgaacggtaaccccattttttagatagataaaataactcggccgaagccaggatgggcccacaaattattcctttcaaccgccgccgccgccgccgtaaccgccaccaccacctttgggccgaccggcgtaaccgccaccgtttttgtagccggcgccaccacctttgggccgaccggggtaaccgccaccgccgccataaccgccgtcacggggcccgccaccataaccgccgccgccggaaccgccgccgtaaccaccggcgccaccggcaccggaaagggactgggcctggttaacggggatgttacggccggcgagctccttgccgtttattttttcaatagcgtcaaacatggagttttcggaggaaaaggtaacgaaacccaacccgggagacctccccgtttcccgg

SEQ ID NO: 2621 - DNA, 260 bp, Zea mays
  Clone ID: PAT_MRT4577_72741C.1
aggtatcttaagattgagggagaataaagcctggcggggggatcagtatccatagatccgtaatccatgctttttaattcatgatttctgttgaatcttatgatgaacacagcactaacaactgacacaaatctaccttgcaatcaataacacaaattgtcagcatacaaacacgacacgaacgaagataaaccctttggactagggtaaacatcacgtgtagcgaacaggataacttggccgcgcgggccccacagctc

SEQ ID NO: 2622 - DNA, 826 bp, Zea mays
  unsure (1)..(826): unsure at all n locations
  Clone ID: PAT_MRT4577_72742C.1
aaatctcatggtccaaagagagatgatggccctgttatcttggttgtgaatgcttgtgccagccgggaccttcatgatgatgttgttggggtgtgctttgtagcccaagatatgactgtccataagttggtgatggacaagtttactcgggttgagggagactacatggcgatcattcacaacccaaacccactcattcctcctatatttggtgctgatgaatttggatggtgttgtgagtggaatgctgcaatgaccaagctgactgggtggcacagagaggaagtgctcgataagatgcttctcggtgaagtgtttgacagtagaaatgcctcctgccttttgaagaacaaagatgcatttgtaagcctttgtgttgttatcaacagcgcgttagccggcgaagaaacggaaaaggctccatttggcttcttcgaccgaagcgggaagtacactgagtgtcttctgtcagtgaacagaaggcaaaatgagggtggtctcatcactggggtattctgttttattcatattcctagtcatgagctgcaacaagcactgcaggtgcagcaagcctcggagcagaagtcactaaaaaggctgaaagctttctcctacatgagacatgcaatcaacaaccctctctcaggcatgctttactccagaaaagcactaaagaacacagatttgaatgaagaacagatgaggcagatccatgttgcagataattgtcatcaccagctaaacaagatacttgccgacttggatcacataacatcatggaaaaatctagntgcttggatttggagatggctgaaattgtgttgca

SEQ ID NO: 2623 - DNA, 750 bp, Zea mays
  Clone ID: PAT_MRT4577_72813C.1
aagtcgcattcacctccgaattcggtcgcccatggcaccgcggctgctctgatcctacccacctaccccctccccctcccctcccctcccctcccagctgctctcccttcccctctcgtttgaaaatggcaatgctggtggatcctccgaatggcatgggaaaccaagggaagcactattactcaatgtggcaaaccttgtttgagattgacaccaagtatgtgcctatcaaacccataggccgaggagcttctggaatagtttgctcatccataaaccgtgagacaaacgagaaagtagcgataaagaagatacataatgtattcgacaaccgtgtggatgcactaaggaccttgcgggagctgaaactcctccggcatctccgccatgagaatgttatttctttgaaggatataatgatgcctgtacaaaggaggagctttaaggatgtgtacttggtttatgagctcatggatactgacctgcatcagataatcaaatcgcctcaggggctttccaacgaccactgccaatattttctttttcagttgcttcgaggactgaaatacctccattcagcagagatactccacagagacctaaaacctgggaacctactggtgaatgcaaactgtgatctgaagatatgcgattttggtcttgcacgcacaaacagtagtaaaggccagtttatgactgaatatgtcgtcacacgctggtatagggctcctgagttgctgcttttgctgc

SEQ ID NO: 2624 - DNA, 197 bp, Zea mays
  Clone ID: PAT_MRT4577_72949C.1
gggcttattcaaaaatggttcccgaacaaaaggtggtaaaaaaggccccggcggggcttcccggcggggccggccccaaaaaaaacccggtctctcgctccttgaaggccggcctcaatttccccttaggccttatcggccgcaacctcaaccaggttcgctagtccaaccttgtcggaaccggggcccccttcaac

SEQ ID NO: 2625 - DNA, 352 bp, Zea mays
  Clone ID: PAT_MRT4577_72974C.1
ggtggcttctcctccccctccggtcgggttcggttcgcgaggttctccgggttcggtttcggggtgagcgatcgagatggcggcgtggatgttgagtaccgctgttcggggcggctccctgggccacggactaccactccctcacaacgccttagcacctacgggaggtcctcgagtccaagatcatccttatcggagagacgcataggcccgcggcttggcttctcaccttatgacggaggatgcgatgcggaacgccatcagggcatgaacggaaggagctggacggccgcatcatcacctgcaacgggcgaatcccgggctgccgggaggcggtgcagggaggtacggg

SEQ ID NO: 2626 - DNA, 560 bp, Zea mays
  Clone ID: PAT_MRT4577_73333C.1
cactacgctcacagcgactcccatctcccctgttagactgcttccatctcatctccggcgatgtctgggcgtggcaagggcggcaaggggctcggcaagggcggcgccaagcgccaccggaaggtgctccgcgacaacatccagggcatcaccaagccggcgatccggaggctggccaggaggggcggtgtgaagcgcatctcggggctcatctacgaggagacccgcggcgtcctcaagatcttcctcgagaacgtcatccgcgacgccgtcacctacaccgagcacgcccgtcgcaagaccgtcaccgccatggacgtcgtgtacgccctcaagcgccagggccgcaccctctacggctttggcggctgagcgccatcagcgcgctgccgctggctgacactgctgtttcctgcgttgctctgtagtcgtatcccccctgtcgtgaatctagtgcgctggctatgcttgtttctgtagtttgtctagtgaaatccaacttctagttgtaactcctatcgtttcctttcgttgcaatgacaagttaattccaatctcag

SEQ ID NO: 2627 - DNA, 517 bp, Zea mays
  Clone ID: PAT_MRT4577_73338C.1
acgcgcgagatcgcacaaatcctcttgctcgagttctcctcaaccaaattcaagtcacagtggtgaaactctcggcgatgtatggcgcgtggcaagggcgtataagggtctgggcaagggcggagccaagcgccaccgcaaggtgctgcgtgacaacatccagggcatcaccaatccggcgatccgcaggttggcgaggaggggcggcgacaagcgcatctccgggctcatctacgaggagacccgcggtgtgctcaagatcttcctcgagaacgtcatgcgcgacgccgtcacctacaccgagcacgcccgccggaagactgtcaccgtcatggacgctgtctacgcgcccaagcgccagggccgcaccctctacggtttcggcggctaggtcggtccatctcccggcggcgaattacctggcggctgtggactgtggaggtcgagttgtgtgtttcgtctagtgtagtctgagatgtctactattggtgctgatttctgtggcggctgaacacta

SEQ ID NO: 2628 - DNA, 333 bp, Zea mays
  Clone ID: PAT_MRT4577_73341C.1
aattatttggccttcgtcagagaggggagaaagacccgttcgaggcggcagcaatgggggggcgcattaagggcggcaagggtctacgcaaggctggagccaatcgccaccggaaggtgctccgcgacaacatacagggcatcaccaagccggcgatccggaggctggatcggaggggcggcgtgaagcgcatctcggtgctcatctacgacgagacccgcagcgtgctcaagatcttccttgagaacgtaatacgcgacgccgatacctacaccgagcacgcgcgccgtaagaccgtcaccgccatggatgtcagttacgcactcaagcgcc

SEQ ID NO: 2629 - DNA, 354 bp, Zea mays
  unsure (1)..(354): unsure at all n locations
  Clone ID: PAT_MRT4577_73343C.1
gagccggccgggccgggaatgtaccatcatctctccaaatccaccagcaatcccncaatcctccgagttcgagcgaccatgtcggggcgtggcaagggcgggaagggtctgggcaaaggcggcgccaagcgtcaccgcaaggttctccgcgacaacatccagggcatcacgaagccagcgatccggaggctggcgaggaggggcggcgtgaagcgcatctcggggctcatctacgaggagacccgcggcgtgctcaagatcttcctcgagaacgtcctccgtgacgccgttgcctacacgaatcatgatcgccgtaagagcgatgcagccatgcatgtagtttttttttttttc

SEQ ID NO: 2630 - DNA, 650 bp, Zea mays
  Clone ID: PAT_MRT4577_73345C.1
tcgaggccggccgggatctcttcctaatcccaccagcaaatccccaattcctccgagttcgagcgaccatgtcggggcgtggcaagggcgggaagggtctgggcaaaggcggcgccaagcgtcaccgcaaggttctccgcgacaacatccagggcatcacgaagccggcgatccggaggctggcgaggaggggcggcgtgaagcgcatctcggggctcatctacgaggagacccgcggcgtgctcaagatcttcctcgagaacgtcatccgcgacgccgtaacctacacggagcacgcccgccgcaagaccgtcaccgccatggacgtcgtctacgccctcaagcgccagggtcgcaccctctacggattcggcggctgaggggtcaggggtgtcccccagctgctgctggtcgttgcagaagtcttgggtcgcggtcacgaaatggagtgaggcgagagtattcttgcccatgtgcttagtttcgtaggcttatcactctagactctagtgccttggtccagtagtagcatacgacttgtactgcatttccttgttctgaacctctaaatatgatgagatgtggattcacttgatctcacaaacaaccagttaattcggatcaaatttgtactgaaaaaaaaaaaaaaa

SEQ ID NO: 2631 - DNA, 1958 bp, Zea mays
  unsure (1)..(1958): unsure at all n locations
  Clone ID: PAT_MRT4577_73424C.1
actcctatgggcgattgggaccctcgaggccggccgggattaataattacatccgtctccaaaaggtctcctccctcggtctccctcgggctaggctagctagctaggttaccactctggtacaacatggctggtgatggcatggaggtatctgccagcgggggtggcggcggcaacaagcagccgcagatcagccttttggggctgttcctcgcatgcatggtcgccggcggcgtgcagtacggatgggcgctgcagctctcccttctcaccccctacgtccagacactggggattcctcatgctcttacatcagtcatgtggctctgtggacctattgctggcttacttgtacaaccctgcgtcggcctctatagtgacaaatgcacttctaagcttgggagacggaggccattcatctttacaggatgcatcatcatctgtatatctgtgatagtcatcggtttctcctcagacatcggttacgctctcggtgacacgacggaagactgcaatgtttacacggggaagcggctgcacgcggccttgttcttcgtgatgggattctggctgctggacttttccaacaacacggtgcagggccccgcacgcgcgctgatggcggacctcgcaggcagccacggacccagcacggcgaacgccatcttcgtgtcgtggatggcgatcgggaacatcctgggctactcgtcggggtccaccgacaagtggcacacctggttcccgttcctgcagacgagggcatgctgcgaggcgtgcgccaacctcaaggccgccttcctggtgtcggtggtgttcctgggcctgtccacggtggtgaccatgatcttcgcccgcgaggtgccgctggacccggcggcggcggcgaagcaggacgaggccggggagtcgtcgggcccgttcgccgttttcaagggcatgaagaacatgccccccggcatgccgcaggtgctcatcgtcacgggcctcacctggctctcctggttccccttcatcctcttcgacaccgactggatgggccgcgagatgtaccacggcaggcccgacggcagccccgaggaggtggccaggttccaggagggcgtccggcagggcgccttcggcctgctcctcaactccgtcgtcctcggagccagctccttcctcatcgagcccatgtgccgcaagctcaccgccaaggtcgtgtgggtcatgagcagcttcctcgtctgcgtcgccatggccttggtcaccgtcctcagctcctggtcgctcggcgacatcgggggcaacgtgcaggacgccgccgccgtggataagggcctcaagaccaccgcgctcgccatcttcgtcttcctcggcttcccattcgcggtcctatgcagcgttccgttcgccgtgacggcacagctggcggcggccaagggcggcgggcaggggctgtgcacgggggtcctcaacatctccatcgtggtgccacagatggtcatcgccattggctctgggccgtgggacgagctgttcggcaagggcaacatcccggcgttcggccttgccgccgtcttcgccttcaccgctgccgtcgcagggatcatcatgctgccaaagcagcccaagaccagcttccggtccgtctccatgggaggaggccattgatgatcacaactctaggatgcatggtccactgtggttcacgattcttttacctttgggagttggacggccaggtgtttgttctcaaggccgcttccgaggcctaaaccggtgggtttatttctaggccggatcatgacgaacaatctgtttcgctgggttgtaaaggaaaagttttacacgaacacacaacgtgtcggctatttaacttttggaaaaaaaagtgtagtacctagcaatactacattaaaaaaaattggacggaaaaaaaaaaaaaaaaaaggggcggccnnnnnnnnnnnnnnccg

SEQ ID NO: 2632 - DNA, 390 bp, Zea mays
  Clone ID: PAT_MRT4577_73505C.1
tgtcacttgctctccctccaacaagctaattaaggacggtcatccctcttctagctcgtgtgattatccatggcggaggagaagcaccaccaccaccacctgttgcacctctatttggacgaggagcaggatgagcaggtcgccggcggcgggtacggcgagtccgccgagtacacggagggcacggagactgaggtactgtccacgggcgagaacgagtaccacgagcacaagaaggaggataagcaggacaagcacaagcagcacctctgagatggcggcgacatcggcgccggcggctgtcgcactgttcgagtagcacgaggcaatcatggacccggagctctcgcaccggcacaagatctacgtcgaggtcgcaggggcggcggc

SEQ ID NO: 2633 - DNA, 1024 bp, Zea mays
  unsure (1)..(1024): unsure at all n locations
  Clone ID: PAT_MRT4577_73523C.1
cattgggtacctcgaggccggacggggcctccttgttccgggtcctactcccgccgccttcgcctaaagaggcctcgccctcccccctccggcgaaaaccgattcccttccccgattccctccggcgtttcctgaaagatgattaatcttttcaaaataaagggtcaaaagaaagaagaggcagcaagtgctgctggaaaggcccctgttaagaaacagtctgctggggagctccgtcttcataaagatattagtgagctcaacctgccgaagaccacatcaatttcttttcccaatggcaaggatgatctgatgaattttgagaccaccatccgacctgatgaaggatattacatgggcggcactttcgttttcacctttcaagtgtccccatcttatcctcatgatcctccgaaggtcaaatgcaagaccaaggtgtaccatccaaatattgatctggaaggcaatgtctgtctgaacattctgcgcgaagattggaagcctgttctcaacatcaacactgttatttatggcctgaatcttctttttacgcaaccaaacgacgaggatcctctgaaccacgaagctgcagttgtccttcgcgacaatccaaagatgtttgaggcaaatgtgagaagagccatggctggaggctacgtcggccaacactatttccaaagatgtgcttgacttgatgtggtggtggcttgaaaacgatcaacagagcccctccccctgtatcagcaccagcgcgcccagctttgtgtgcggaaagtgcttctggaagcaaaatccaaaccgttcatggtgtgacatctgtttgcccgcctttgtgatgtgtggtatagtggtggtgcataatgacagggaaatgcttctctaactgtatcattcattccataaatcctaaacgaggaatgggaagtggattgttaagcaaaaaaaaaaaaaaaaaagcggcctcgtattcggcgtgtattcattgtcgcatcttccagntcgacgttgacatgcacgtctagct

SEQ ID NO: 2634 - DNA, 1361 bp, Zea mays
  Clone ID: PAT_MRT4577_73526C.1
cctcgaggccggccgggctcctttctccgggtcctactcccgccgccttcgcctaaagaggcctcgccctcccccctccggcggacaccgattcccttccccgattccctccggcgtttcctggtgagtttacgccagcgccgacttctccgatcaggtcccatcggttttgggtgcgcgcacctcgtttggcttcgcgtcgttcttcggtgcgcgcacgcgattcgtggatccggcggtcggatcccgcgccgtccgcagcgatggctgctccccaacccttgcttctttgcgcgcaccccttccccacggccttttagtttttacatgggagaggggcgaccctcgctagccgcagggtccctctccatcctcaccgctttcttcctctgcaggtcccttagtgcaagcaaggacaccgctcctctagcgagctctgttctgaagcggcaagaaagatgattaatcttttcaaaataaagggtcaaaagaaagaagaggcagcaagtgctgctggaaaggcccctgttaccaaacagtctgctggggagctccgtcttcataaagatattagtgagctcaacctgccgaagaccacatcaatttcttttcccaatggcaaggatgatctgatgaattttgagaccaccatccgacctgatgaaggatattacatgggcggcactttcgttttcacctttcaagtgtccccatcttatcctcatgatcctccgaaggtcaaatgcaagaccaaggtgtaccatccaaatattgatctggaaggcaatgtctgtctgaacattctgcgcgaagattggaagcctgttctcaacatcaacactgttatttatggcctgaatcttctttttacgcaaccaaacgacgaggatcctctgaaccacgaagctgcagttgtccttcgtgacaatccaaagatgtttgaggcaaatgtgagaagagccatggctggaggctacgtcggccaacactatttccaaagatgtgcttgacttgatgtggtggtggcttgaaaacgatcaacagagcccctccccctgtatcagcaccagcgcgcccagctttgtgtgcggaaagtacttctggaagcaaaatccaaaccgttcatggtgtgatactgtgatgcatctgtttgcccgcctttgtgatgtgtggtatagtggtggtgcataatgacatggaaatgcttctctaactgtatcattcattccataaatcctaaacgaggaatgggaagtggattgttaagcagattccttctgcagatgttgatgtcgtattcggcgtgtattcattgtcgcatcttccaggtcgagaaaaaaaaaaaaaaaaaaggggcggcc

SEQ ID NO: 2635 - DNA, 323 bp, Zea mays
  Clone ID: PAT_MRT4577_73530C.1
gctaggcttctcctccccctgttaccaagtgctcttcgggatatggttacttacggttttgtggaggggcgatggcggcagctgatgtggagtaccgttgcttgaaaagctaggcttgcctgtgccaccagcaacgagtcggtggagaatgccttcgacttctacggagagatcctggactccaaggtcatcaccgaccgggagacggggaggcttcgcgggttcggattaataaccttctcctgcgagaactccatgctcgacgctatcgagaacatgaacaggaaggagatctatggccgttacatcaccgttaaccaggc

SEQ ID NO: 2636 - DNA, 277 bp, Zea mays
  Clone ID: PAT_MRT4577_73591C.1
attggacttgagaatggaaattacacggtcacacttcaatttgcagaggttgactttccagacatgcagtcttggagaagccgagggaggagggttttcgatatctatgtccagggagagcgcaaggagcagaactttgacattagaaaggcagctggagggaaatctttcactgctgttaagaagcagtatgttgttccagtaaccaaaaacttccttgagattcatctcttctgggctggcaagggcacttgttgcattccttataagggatact

SEQ ID NO: 2637 - DNA, 535 bp, Zea mays
  Clone ID: PAT_MRT4577_73654C.1
acgggaatgcccgcttaccggcgcgagaatcctttatagcggccgcgcggatgtactaccgcgtaaatattgggaattctggtctctcgttactggatagcgggcgcaggcaaagggaacagccgggggtccaacacctaattcaaaggtcgaacggacactaacccggtgacagaagccaacggctacacggtgctatagatagataagataactcggccgaagccaggatgggcccacacatcaattcctccagccgccgtcgccgccgacggaggcgtcaccaccacccttgtgccgaccgtcgtatccgccaccggctccggagccgtcgtcaccaccctcgtgccgaccgccgtaggcgacaccgtcgacaaaaccggcgtcacggtgcccgccaccatatgcgtcgccgccgagaccgtcggcgtagtcaccgtcggcaccgccaccgtcacgggactgggcctggttaacggtgatgttaccgccgtcgagctccttgccgttcatgttctcaatagcgtacagcatg

SEQ ID NO: 2638 - DNA, 1513 bp, Zea mays
  Clone ID: PAT_MRT4577_73837C.1
cattgggtacctcgaggccggggccgccctgtttcctttcctttttgcattcccacccacccatcccctcaaaattcgcagcgtgtctcttcctccatcgcagcgtgtctcgtgctccccccaggctcctcttcctcgctttccctccaccccgggcgcaaaccctaaccctaccgtcgctcgccccgcggcgtctgccaatggcgcgccccgtgtgagtgtgcgcgagagaggggtagaccttgaggccgctacccggggaggagagcgagagatgtataaacaggggggagcggggggaggggctgggctggaccggaagcggatcaacgacgcgctggataagcatctcgagaaggcggtcgcgtcgccgtccacgtcgagggggtcggcgggcggcgggcgcgaccaccaccgcctcgtcgtgccgtcctccgtgtcgtccatccccaagggccgctgctccgaaggggagtctgattctgatagtgaagcatcggatgttagcggctctgatggagaagacacctcatggatttcatggtattgcaacttaagagggaatgagttcttctgtgaagtcgacgatgattatattcaagacgacttcaacctttgtggtctcagcagccaagttccttattatgattatgctctcgatctcattttagatatcgagtcatctcatggtgatatgttcactgaggaacaaaatgagctcgtagaatcagctgcagagatgctttatggtctgatacatgcacgatacattctgaccagtaaaggactggctgcaatgctggagaagtataagaactatgactttgggcggtgcccgcgtgtttactgctgtggtcaaccatgcctgccagttggacaatcagacatccatcgatctagtaccgtgaagatatactgccccaagtgtgaagacatctactacccacggtccaagtaccaaggcaacatcgacggcgcatactttgggacaacgttccctcatctgttcctgatgacatacgagcacctcaagccacagaagctctcgcagcgctatgttcctcgtgtctttggcttcaagctccacaagccatgaacctcatgtatttgtcttttaaactcctcaagacgtggcactgggggcatgcgggagttttgcaatccttgaagacttgcatataagagcgccattggcaggtcagtggattggtaaaattctatcatgctgcagcgtgcttgtaccttagctggctggcacctatccaacatttgaatgtagctctaaggatatcaatgttgtaacctaactgctattgttctttgattagtaaaccaggagccccccctacaatgtagaatatggcaattatttatggctttgcagaaaataacaacccttcatctgcttggttctcgtaatattttagatcaattacctacttggttatcgtaaaatgggaaatgagatttgcaaaggtgcgtcatctcaaaaaaaccaaaaaaaataataaaa

SEQ ID NO: 2639 - DNA, 212 bp, Zea mays
  Clone ID: PAT_MRT4577_73990C.1
tttcgagtccgcccgcatctgcgacggcatcctggcgctggtcgactcccacctcgtcccatccgccggcggcgccgagtccaaggtcttctacctcaagatgaagggtgactaccacaggttccttgctgagttcaagtcaggtgcagagaggaaggatgctgtggatagctccatgaatgtcttcaaagctgatcaggttattgttcttg

SEQ ID NO: 2640 - DNA, 516 bp, Zea mays
  unsure (1)..(516): unsure at all n locations
  Clone ID: PAT_MRT4577_74051C.1
ggcggacccaaaaacaccatttttttctttaaatataaactaaaataaaacctggcggggggaacaagattcattggtccccaatccatgctgtttgaagcctggggctgctgaaaccgcgggtggacacaggacttacaactggcacaaagggacctttcaattaaaaacacagatggggggcaacaaacacgacacgaacgaagataaaccctctgggctagggggaacatcacgggggcgaacaagataaattgggcgcgcgggccccaccgctcagttcctccagttcccgtcggagttgccgtagccgccgccacggttgccaccgccgtagccgccgccaccaccaccgtagacgccgccgccaccgtagccgtcgccaccgccgtagccgccaccgccatcacggtgcccgccaccgccgtagccgncgcctccacggtcaccaccgtacccaccgccgccgccttcacggtcgtcgggggactggccctcgtgacggggatgttgggg

SEQ ID NO: 2641 - DNA, 523 bp, Zea mays
  Clone ID: PAT_MRT4577_74152C.1
ccctcgcacacggagcggagaagccttactagggcaggattggttaggccggcttggaccccaacatgcctaagagggctaccaacgctttcttcgagttcatggaggaatgtcgcttggagttcaatgataagaaccctaacaacaaggctgccgctgcggtgtcgaaagctgctggcgacaggtgtaaatccctgagcgagtcagtcaaggctccctatgtagccaacgctaacaagctcaagctcgagtacaacaaggccatctctgcctacatcaagggcgagagcactgcagctaacaaggctgctgccaaggaggatgaggaggacgatgacgaggactccgacacgtcctagtcggacgtcaacgacgaggatgatgaagagggtatcgaggacgatgcagatgttgacaagtgatgcagctcatcatgacaatgtaccgtgcttcattcaacattggatcggctacacaaagccacgccgtgatcacaataacggagcctatattcctgtactag

SEQ ID NO: 2642 - DNA, 240 bp, Zea mays
  Clone ID: PAT_MRT4577_7455C.1
cgcgcacgcacgcaacgcacacactcaacttcaacagctaatcctctcccacaagacaggacatggctggggaggaggccaagaaggtggaggtggaggtcaccaaggagcccgaggcggcggctaaggaggacgtagccgatgacaaggccgtcatcccctctaccgacccgcctccgtcgccgccgtcggccgacgactccaaggccctggccattgtctagaaagttgcatatgatc

SEQ ID NO: 2643 - DNA, 211 bp, Zea mays
  Clone ID: PAT_MRT4577_74610C.1
attgagaccaacttgcgacatagaaagcacaatattgtacccataatggcagccaaaatattttgcctcaatatgctccctgggctttctgcaaatgctgctacagcgagcatttttccgcaatgctcacaaactcctatagctttccttttttccccatacctctcaccagcgatgtgtttagtatgtgaaaatacaattcttttaccct

SEQ ID NO: 2644 - DNA, 3381 bp, Zea mays
  Clone ID: PAT_MRT4577_7471C.1
caccgagcacaactaccttattcgcctcgtttcctctctctcctctccactttcttctccccctcacggagtgcaagtgcgagtgggagagtgagcggcggcggcagcggcagcgcagcggcagtacagtagccacggcccctgtcgccgcgtggtgtgccgtgcccgtgccccctctcagcctctctctcccccttccctaccaggctacccacccaaaaccacagagaaaagcaggcctgggcaccaccaccgctgcctcgccccgagccaagaggaagccccaccccaaatgccttcctcttccccctgctaccgccacagcttcctcttcctggcccttctctcggcgtgcttctcgacaccgggggcagcggacggcaccgggggagccggcgacggcggggatgccgcggcaatgcaggcgctgcggcgggacctggcgccgccaggctggggcccgggtgcggaccactgcgcgtggcgcggcgtcacctgcgcagcgcgcaacgagatatccgggcagatcccgatcgagatgagagggatgcttcgcttgatcgaggtcaatctgtcgaacaaccggctcgcgctggcgcgcctcgacctctccgccaactcgctcagcggcggcctctcgccggcgttcggcgcgctcacccgcctcgagtacctcgacctctcaatgaacgcgctcaccggcgccgtgccggccgcgctcgctggcgcgtccgcgctccggttcctgaacctctccaacaacgcgctctccggcgccatccccgacgatctcaggggcctcaagaagctccaggagctgcagatttcgggcaacaacctcaccggctccctccccggctggctcgcgcggctcccgggcttgcgcgtgctgtccgcctacgagaacgcgctctccggcccgatcccgccggggctcgggctctcgtcggagctccaggttctcaacctccactccaacgccctcgaggggagcatccccagcagcctcttcgagctcggcaacctgcaagttctcatcctcaccatgaaccggctcaacggcaccatccccgacaccatcggccggtgccgcggcctctccaacgtccgcatcggcgacaacctcctctccggcgccatcccggcgtcgatcggggacgccaccggcctcacgtacttcgaggccaacacaaacgacctgtccggcgggatccccacgcagttcgcgcggtgcgccaacctgactctgctcaatctggcgtacaaccgccttgccggcgaggtgccggatgttctcggagagctcaggagcctgcaggagctcatcgtgtctggcaacggcctctgcggcgagttcccgaaatccatcctgcggtgcaggaacctgagcaagctggacttgagctacaatgcgttccgcggtggcctgccggagagcatctgcaacggctcacggatgcagttccttttgctcgaccacaatgagttctctggaggcattccagcaggaatcgggggctgtacccggctgctcgagctgcatctcggtagcaacaacctcagtggtgaaattccagctgagataggcaaggtgaaaagcctgcagattgtgctgaaccttagcttcaatcactttactgggccgctgccccacgagcttgggcggcttgataagctggtcatgctggaccgtgtcgttcgcgtggcgccgggcagatgctggccgtgctcagggtcgccatgctgtgcacggagcgcgcccccgcgaagcggccccggatgaagaaggtggtggaaatgctgcaggaggccagggacagctgagtggtctggttcctctgctcaatgatgtgtggttggctgccttggaacttggaacgttggaagtcgaggcgagaaactctgaactgatcatcgttggagttcgagtatggagtccatccggtagcgtttgatttgcgtgctcatcttctcactggtgtcgttgctggtggcgttgttcatgtggcgcgagaggcaggagaaggaggaggaggaggcgaagaagaaggcggcggaggtggcggtggcggcagcagccccacaggtggtggcctcggccgtgttcgtcgagagcctgcagcaggccatcgatttccagagctgcgtgaaggcgacgttcaaagacgagaacgaggtgggcaacggaacattcagcaccacctacaaagctgtcatgccctctggcatggtggtgtgtgtcaagaaactgaagtctgtcgaccgtgcggtcatccaccagcagacgaagatgatccgagagctcgagcgtcttgcccacatcaaccacaagaacctggtccggcccgttgggtatgtcatctatgacgacgtcgcgctgctgctgcaccaacatatgctgaatggaaccctgcttcagttgctgcacagcagcggcggcgatactgacggcaagaagcagaaacctgactggccgaggctgctctcgattgccattgatgtcgccgaagggctcgcattcctccatcaggttgccaccattcaccttgacatctgttcagggaacgtcttccttgactcgcactacaatgcgcttctcggcgaagtcgaaatctccaagctactggacccttcaaagggcacagccagcatcagcacggttgctggctcatttggttacattcctccagagtatgcctacacgatgcaggtgacggtgcccggcaatgtgtacagctacggcgtggtcctgctggagatcctgacatccaagctacccgtggacgacgtgttcggcgagggcgtggacctcgtcaagtgggtgcacaccgcaccagcaaggggtgagacgccagagcagatcatggacccccggctgagcaccgtgtcgttcgcgtggcgcaggcagatgctcgccgtgctcaaggtcgcgatgctgtgcacggagcgcgccccggccaagcgacccaggatgaggaaggtggtggagatgctgcaagaggccaagaacagctgagttgatgtgtttctctgctgaatcctgaatgctgcggttgcctgcttggaagtcgagccgagcctctagaaaaaaatctggtcattggttcggttcgagtatgaaatccatccagtagtgtttaattctctgtatatattcggtaattagtaccccgattatgcgccatttatggatattggatcttgaagcatcaaactagaaatcttgcttgcagtgctgctacctgcaacttgcaagtgaagaaatgtctcatccataggagtaaatctggatcgtttttagcaaaaccaaaaaaaaaaagggcgccccccgagtagaaagcgcgtggacaccgggatatattctggggcggggcccgcacg

SEQ ID NO: 2645 - DNA, 1358 bp, Zea mays
  Clone ID: PAT_MRT4577_74755C.1
aggcccagccaaatttccgttcacctggcttcacccacccgcgtgccctcgccgacaactgagccaccgccgccgccgccctacccccaggtgcccaggtcgtttcggtccctttgccaggtcttcgccggcgacgagcaccagccaccagccagggaatataactttgacctgtaaaatgaggccagttttttgcgggaaccttgactatgatgttcgcatctctgaggtcgagcgccttttcgggaagtatggaagggtggaacgagtggatctgaagacagggtttgcattcatctacatggaagacgaacgtgacgctgaagatgctatcagtagacttgatggaattgattttggcagaaaaggaaggagaatcaaagttgagtggaccaaggaggatcgcactgctgatcgaagaggcaactcaaggaggtctccaaccaatgcaaaaccgaccaaaaccttgttcgtgatcaactttgacccgatcaacacgagaattcgagatctggagaggcactttgataaatatggcagggtcgcgaatgtaaggatcaaaaagaacttcgcctttatacagtttgaggcgcaggaggatgctactagagcattggagggtgctaatgggagccatttcatggacagggtcatctcagttgagtatgcgctccgtgacgacgatgaaaaaggtgaaagggcgacgaacggatacagcccagacaggagaggccgcgaaagatccccaggtgcaagacggtctcctagtccttacggcagaggtcgggagagaggtagcccagactatgggagaggcaaggagaggggcagcccagactacggcaggggaggccgcagccctgataatggcaggggaggccgcccagccggcggtggcggcggcggcagaggtgatcacgccaggggaggaggacgacgacgcagccctgactattatgaccgcgagcgccgagaagctagtcctggctatgacaggccccccagctgctcacctggaactgggagggacgcgagagactagaaaagcgccccatgcctgtgttgtagaattcaagcatcaaagcctcccgcgtcagatgaagttagagttggtgatgttagccagcaggaaactcgtttacttatgtgcgttagctcgtgctgactttgcaagttagcttaccatttcccatttgcgactccagaatgtaactcgtatggtctggaatggtagctttcaggactcgtttgaacctttcttggagttttttttttttttccggctcccttgattgccctgtgcatgcgctgatgaatctacagattgtttcgtcaaaaaaaaaaaaaaaaaagccagt

SEQ ID NO: 2646 - DNA, 617 bp, Zea mays
  Clone ID: PAT_MRT4577_74826C.1
gtcttttatctcatccatcacagctagctagagtaatgacgaataatctcttcttcacctcactagctaacaccagctagcaggtcgatcgctctgacctggaataatggccgctcgctcctcctcccagcagctggtcgcggcgtcggacctggcatcgtggctgctgctgctggcggcgggagccggtacggcgtcggcagctgcgagctgcggacaggtgacgtcgtccctggcctcgtgcctcggatacgcaatgggcagcgcgccgtcgccctccgctgcgtgctgcagcgctgtgtgctcgctcaacagccgcgcgtcgtcgacggcgaaccgacatgccacctgcaactgactcaaaagcatgacggtccggctcggctgaggattcacaatggccaacgcctccaacatccccgggaagtgcggcgtctccggcggagtgcccatcaggcccaccgtagactgaaccaatatcaactgatcgatggaaccatagaggacgtatctcgctcgttggatgacagcgtacttggccatcagcagcatgcagtcgacgacatatgacatatgtactagctactcgtgtgtcatgcatcagactggtacataat

SEQ ID NO: 2647 - DNA, 1991 bp, Zea mays
  Clone ID: PAT_MRT4577_74831C.1
cctcgtcggcaccctccatatacacaggggtaacgctccgcctcgcagccagcaggacaccactcatcttccttcccccccgcctcgtttccatcgccgccactctcttgctcccccgtaccatccctcgccaccgccaccgccgtcgctatgcagagcctcctcatgcccactgctgcatcggccccggtggcggctccgcgggctcggcggaatctccctatgcgcctctccgtccgcgcctccgcgacggcggcagcggcaccgcggcgggagacggatcccaagaagcgggtggtgatcacggggatggggctggtctccgtgttcgggaacgacgtagacgcttactacgaccgcctgctagccggggagagcggcatcgggcccatcgaccgcttcgacgcctctaagttccccacccgcttcgccggccagatccggggcttctcgtccgagggctacatcgacggaaagaacgaccgccgcctcgacgactgcctccgatactgcatcgtcagtggcaagaaggctctcgaggctgccggtattgcccacggctccaagcccatggaaaagattgacaaaacccgggctggtgtgcttgtgggcactggtatgggtggcctcacggtgttttctgatggtgttcagaatctcattgagaagggctacagaaaaataactcctttcttcatcccatatgctataacaaacatgggttctgccctgcttggaatggatattggtttcatgggtccaaactactccatctcaactgcctgtgctacctcgaactactgtttctatgctgcagcaaaccatatccgtagaggcgaagcggatataatgatagctggaggcactgaagctgcaattattccaattggtgttggtggctttgttgcatgtagagcactgtcacagaggaatgatgaccctaaaacagcatccaggccttgggacaaggatcgtgatggttttgtcatgggtgaaggagctggagtcctggtcatggagagcctagagcatgcaattaaacgtgatgcaccaataattgcggagtatttaggaggtgctgtgaactgtgatgcttaccatatgactgacccgagatctgatggtcttggtgtttcatcttgcatcaagcaaagtcttaaagatgctggtgtggctcctgaggaggtcaactatattaatgctcatgcaacatcaacccttgctggtgatctggcagaggtgaatgccatcaagcaagtcttcaaggacccatctgggatcaaaataaatgcaaccaagtccatgataggacattgccttggtgcagcaggtggtttggaagccattgctactgtcaaagcgataactactggatgggtgcatccaagcataaaccaatttaacccagaggaagcggttgaattcgacacagtacctaatgtaaaaaagcagcatgaagtgaacgttggcatctcaaattcttttggatttggaggtcacaattctgtcgtagtatttgcgccatttaagccataaggtgttcctggcctcacaaaccttggtcagaacaacgaggatctttaggagtttctgcgttcaattttcatgtgttctctttaggggaagttatgtcagatctgagccggcaacgttacaaatgaactaaagctgagatacattgctttttagataactccaggttcacttaggttgtgcgcggctgtacaacgttgctttgaatcatttgtaattgattgtactgttttttcatgtaatggaagaggggttctgtagatgcacatttggaccttctagagttctagttaaatagcatacaaatgaatttggagggcaggaattgtgtccctgctgctggatctggacgctttatggaaacttttttttttgaaatggcaatatatataatttacacgcgcgcttgagagaaacgtgcgctatctcaaaaaaaaaaaaaaaaaaaaaaaaaaaaa

SEQ ID NO: 2648 - DNA, 2300 bp, Zea mays
  Clone ID: PAT_MRT4577_74832C.1
gccgccgttgggtgccttgaggccggccggggctcgcagccagcaggacaccactcatcttcttctcccccgcctcgtttccatcgccaccaccctcttctcctgcggtcctcccccgtcccactcccacccccctcgcctccgcctccactgcagctgccgccatgcagagcctcctcctgcccaccgctgccgtggccccggtggcgcctccgtgcggaaggcggaatctcccgggacgcctctccgtccgcgcctccgcgacggtggtagcggcaccgcggcgggagacggatcccaagaagcgggtggtgatcacggggatggggctggtctccgttttcgggaacgatgtagacgcttactacgaccgcctgctagtcggggagagcggcatcgggcccatcgaccgcttcgacgcttctaagttccccacccgctttgccggtcagatccggggcttctcctccgagggatacatcgacggaaagaacgaccgccgccttgatgattgcctccgatactgcatcgtcagtggcaagaaggctctcgaggcctccggtatcgcccacggctccaagcccatggaaaagattgacaagacccgggccggtgtgcttgtgggcactggtatgggtggcctcacggtgttttcggatggtgtccagaatctcattgagaagggatacagaaagataactcctttcttcatcccatatgctatcacaaacatgggttctgccctgcttggaatggacattggtttcatgggtccaaactactccatctcaactgcctgtgctacctcgaactactgtttctatgctgcagcaaaccatatccgtagaggcgaagctgatataatgatagctggtggcactgaagctgcaattattccaattggtgttggtggctttgttgcatgtagagcactgtcacagaggaatgatgaccctaaaacagcatccaggccttgggacaaggatcgtgatggttttgtcatgggtgaaggagctggagtcctggtcatggagagcctagagcatgcaatgaaacgtgatgcaccaataattgcggagtatttaggaggtgctgtgaactgtgatgcttaccatatgactgatccgagatctgatggtcttggtgtttcatcttgcatcaagcaaagtcttaaagatgctggtgtggcacctgaggaggtcaactatattaatgctcatgcaacatcaacccttgctggtgatctggcagaggtgaatgccatcaagcaagtcttcaaggacccatctgggatcaaaataaatgcaaccaagtccatgataggacattgccttggcgcagcaggcggtttggaagccattgctactattaaagcgataactactggatgggtgcatccaagcataaaccaatttaacccagaggaagcagttgaatttgacactgtacctaatgtaaaaaagcagcatgaagtgaatgttggtatctcaaattcctttggatttggaggtcacaattctgtcgtagtatttgcaccatttaagccataaggtgttccttgcctcacaaatcttggtcagaacagtgagatctgatttctgcgttcaattttcatgtgttctcttcggggtgaagtaatgtcagatttgaaccagcaacgttaaaaatgaactaaagatgagatacattgcgttttagatgactccatgttcacttagattgagcgcggctgtacaacattcctttgaatcatttgtaattgattgtactgtttttcatgtaatggaagaggagtcttgtagatgcacatctggaccttctagttaaatagcatacaaatgaatttggagggcaaaaaaaaaaaaaaaaaaaaaaaaaaaaaaaaaaaaaaaaaaaaaaaaaaaaaaaaaaaaaaaaaaaaaaaaaaaaaaaaaaaaaaaaaaattaaaaaaaaaaaaaaaaaaaaaaaaaaaagtttttccctcccgggggggcccctcaaagggcaaattttgaaaatttccataaaacgggggggcgttcgaccttccttttaaggggcccaattccccctataggggggcgtttaaaaattaatgggccgggttttaaaaacgagagagtgggaaaaaccctggggttccccaattaaaccgcttggaaaaaaatccccttttccccgggtgggctaaaacgaaaaaggccccacccaactccctttcccaaatgttgccccccctgattggaatggaacccccccttttaccggccattaaaccccgggggttttggggttttcc

SEQ ID NO: 2649 - DNA, 260 bp, Zea mays
  Clone ID: PAT_MRT4577_7483C.1
cctatagtgagtcgtattatagtgtctaccagaccatgcgtcctgaaagactcctgccggcgacagacttcggtgtgtggagacgcgaggatcttgagtcgaggaaggtcgcacgggaggcgcagtaacatgttcgagcccggcacgatggacctctgggacgcctgtcgacagcatgttgcgctccaacatcacgtcggcgacctcgatgaagtccgctactggcgccttcgggagacgccggcagctgctggaaggaa

SEQ ID NO: 2650 - DNA, 693 bp, Zea mays
  unsure (1)..(693): unsure at all n locations
  Clone ID: PAT_MRT4577_74969C.1
gaaaataagaagacgttttcaactttcaagaaactaggaatttcttgtactgggaattaaagataacatactacaagaccggttaatctccatccacacccatctacaacacatcactggtaatacgacggtaaacatcagataagcatagacacccttctatgccttcttgggggacttagcggccttcttgggcgacttggcctccttgctcccaccggggggacgccttctccgccgtcttcttgggcagcagaaccgggttgatgttgggcaacacaccgccgtgggcaatggtgacaccggacagcagcttcccgagctcctcgtcgttgcggatcgcgagcagcacgtggcgggggatgatgcgcgtcttcttgttgtccctggcggcgttcccggcgagctccagaacctcagcggcgaggtactcgaggacggcggcgaggtagacgggagcgccggtgccgacgcgctgcgcgtagcggcccttcttcaggtagcgcccgatgcggccgacggggaactggagcccggccttcaccgacctcgacactgacttcttcctcggcccgccggccttgcgtccggccgctcccttcttcgccttccctcccgctccggcggcggtggagtccatggccgcggctgtgctgcgagttgcttctcgggacagaggacaaagggctntgg

SEQ ID NO: 2651 - DNA, 225 bp, Zea mays
  Clone ID: PAT_MRT4577_75055C.1
agaagctgtgtttccgtccctaccgtgagcttctgctagcggggtgcctgcggaggagagactgggatgccatagacagtggtggcattgtgaacacgggcggagtcaatgactaccccgggaagcttaccctcttcatggagatcacctgcatcgtcgacgacaccgggggtctcattttcggatatgacatcggtatcttaagcggtgtgacgtgcatgaacc

SEQ ID NO: 2652 - DNA, 398 bp, Zea mays
  Clone ID: PAT_MRT4577_75338C.1
cccacgcgttcgctcacacgtccgcacacgcgtccgcccactcgttcgcccacacggccgatctttccatttccctatctgccactatacaattcgcgagttcttccttctctgccgccatggcgctctatgtggacaacacctcgtatggacgggagtacaacgtccaggatctctagcaagcgcacttagctcgccttgagattgatctggcccaggtcgaaatgcccgaactcatggcctgccccgcccagtttggcccgtccaagccctttgccggcgctaggatctccgcgtctcttcacatgaccattcacaccggcgaactgatcgagacccttaccgcgctcgatgccgaggtccgttggtgctcctgcaacatcttcttcacacaggac

SEQ ID NO: 2653 - DNA, 230 bp, Zea mays
  Clone ID: PAT_MRT4577_75455C.1
ctaggcataagcattgcaaccacagacagcgcgcgcttcaaggccttttttttttgagataacaaggacgagaggaggagatggctgtcacgatcacatgggttaaggccaggcatatcttgtacaggcggaggaaccccaccgtgtaggaggacttgtgccttaacgactgcagctactcgaggagggcgcgacccagcatcgcatccactggaatatatgaagccttg

SEQ ID NO: 2654 - DNA, 363 bp, Zea mays
  Clone ID: PAT_MRT4577_75495C.1
actgaagaagccactctatagcgggttctactactagtagctagcctgctgatctgggctgttgatcagttcgctaagccttctgtttctgcgaccatggtggatgagaggaacacccagcatcaccagtgcggtcaggtccagcaggacaccgatcgatcaggtggacgtgaatgatatggagctcctgaacagccttctcggcaggaataaccacgactacgaccagcacaagaagaagctcacggataaactggcgaccagcatggacaaggtcactgtgtccgagcccgataagcacggtcacaaggatgatgagcacgatgtcatcggcgataataatgagggccttattgacaatct

SEQ ID NO: 2655 - DNA, 1455 bp, Zea mays
  Clone ID: PAT_MRT4577_75511C.1
agggaaaagctgaccagcatcccgtaggaacaggatgcagagccatgaactctcaaacaaaaccatataataaagctcaacaaaacacgattaaagattgtataaatggcagccacgccatcagcctcacacctataggaagcacgaccaccaccaccaccacaaaacattgggtacctcgaggccggccgggccggggcggacctctctgccttttccttttccttcccccgctttctccttccttcctcctcctcccggctcccctcacccagccaccggccatgtcggtggagacggagcggagctccaccgagtcctccggggcttccgggctcgacttcgaggacaccgcgctcacgctcaccctccgcctcccgggctccgcgccttccgccgccgccgccgccgcggcttccctgtccctctcctcctcgtcgtcctccgccttccccgaccccgaccgcaagcgcgcctcctccgacgctgaccccggccgctcctccccgctcgccgcgtcctccgacgctgcaccggcacccaaggctcgtgtggtgggctggccgccggtgaggtcgtaccgcaagaacgcgctcgccgacgccgcgggctccagcaaggccgccaagttcgtcaaggtggccgtcgacggcgcgccctacctgcggaaggtggacctgcaggcgtacgccggctacgaccagctgctccgcgcgctccaggacaagttcttctcccacttcaccatcaggaagttcgccgacgacgagaggaagctggtggacgcggtgaacgggacggagtacgtgcccacgtacgaggacaaggatggcgactggatgctcgtcggcgacgtcccctggaagatgttcgtggaaacctgccagcgccttcgtctgatgaaaggttcagaggccgtgaacttggcaccaagagccgcccgatgaggcacactccgttgggcgttggcacgcacgcacgcactggcgtcttgaaggaaagggggaactctgctggtcttgatgaggatcttcacgtgagataggaacgtgtgtacagttgtcgccttatggtattgagttgaggaaacttggaagttccattacttgtctgtagtctctactttatatagatgcgaagaagcttgagatacacattgcctacaatgtcttttgatgaataagaccagacagcaccgaaccgaactcgtcctccacacggttgctttgccatctcggtggttttgtggtggtggtggtggtcgtgcttcctataggtgtgaggctgatggcgtggctgccatttatacaatctttaatcgtgttttgttgagctttattatatggttttgtttgagagttcaaaaaaaaaaaaaaaaaaaaaaaaaaaaaaaaaactcactctatcagcgtcgtcgacccggaaaattaattccgggcgcggtaccagcgaggc

SEQ ID NO: 2656 - DNA, 290 bp, Zea mays
  Clone ID: PAT_MRT4577_75526C.1
ggttggcttctcctcgccctccggttcgggttcggtttcgttaggttctccggtgttcggtttcgtgggtgggcggatcgagatgtcggcgtcggtatttttagtaccgctgcttcgtcgtcgtactcgtctgtaccactgacgaccattctctccacaacgccttcagcagtgacggcgatgtcctctagtccaagatcatccgcgatcgtgagaatcataggtccctcggcttcgtcttcttcacctgctccacggattatgctattcgtaacgccatcgaagtcatg

SEQ ID NO: 2657 - DNA, 405 bp, Zea mays
  Clone ID: PAT_MRT4577_75536C.1
acgaggcccagtcccgcagcggccgtggatgcttcggcggtgggtacggtggtggccgtgagtggggctgctacggctgtggcgggcgccgtgatggcagcggcggctacggcggtggcggcagctaccgtggcggctgcggctaccgtggtggtggcagcggctactgcggtggcaaccgtggcggcagctacggcaactcccacgggaactggaggaactgagcggtggggcccgcgcggccaagttatcctgttcgctgccgcgatgtttaccctagtgcatagggtttatcttcgatcgtctcgtgtttgttgttcccatctggggttttgacttgcaagtcgctctgtgacagatgctaatgctgtgttcattcttcgcttcagcagacccatgcattaa

SEQ ID NO: 2658 - DNA, 412 bp, Zea mays
  Clone ID: PAT_MRT4577_75564C.1
cctccttttttttttttttttttttttttttttttttttttttttttttttttttttttttttttttttttttttgggaaaaccccgctcacatttctgaaagaaaatgtgtgactagatagaaatattggtggcatcacaggtcaaataacaaccggctttgaaaaccggctaaaaaacaaacgggtggttgaaacaagcaaacataaaaaaggctagcgaaggtgaaaatcggcttccattgccactttccctaaagcaagcaataggcaaacccggataaaggagcctttgtgcacttggaaaactcctttgggggtggacgcaaggcgaccccttcgaactggtcgatggaatacttcttgaatacaaccctcagcttgctctcaggggcagtcatgtgcgcgaacac

SEQ ID NO: 2659 - DNA, 1819 bp, Zea mays
  Clone ID: PAT_MRT4577_75661C.1
gggaccctcgaggccggccatgaccccatttcatttctctacctctccagctgcccacttctctgtgagcgcgcgcgagtgtggagagaagggagggaattcccccctttctgttcggcgccgtgctcgcgcgcacccacccgcacgccccagtacccccacgctgcacagtgcacgccgccttttcctccgccttgctgctgcaagtccgcaaccactggaggaaaaatcttttccttcacttttcttccctttccccccgcgcatgcacgggctctgattgacgccatgggggacgccgcagccgccgcggcctccacgtccgctcccaccacgcccacctccatcctcatctgcctggaagacggcagcgaccttctcgccgatgccgacgatggcgccggcactgacctcgttgtcgcccgcgacgaacgtctgcttgtcgtggaccaggacgaggagtatgtagcgctgctcctgtccaaggagagcgcgtcaggcggcggcggcccggtggaggaaatggaggactggatgaaggccgcgcgctccggatgcgtccgctggatcatcaagaccacggcgatgttccggttcggcgggaagaccgcttacgtcgcggtgaattacctcgatcgcttcctggcgcaacggcgagtcaatagggagcatgcgtggggtctgcagctgctcatggtggcgtgcatgtcgctggcgaccaagctggaggagcaccacgctccgcggctgtcggagttgccgctggacgcgtgcgagttcgcgttcgaccgcgcgtccgtgctgcggatggagctcctcgtcctgggcaccctcgagtggcggatggtcgccgtcacccccttcccctacatcagctgcttcgcggcgcggttccggcaggacgagcgccgggcggtcctcgtgcgcgccgtggagtgcgtcttcgcggcgatcagagcgatgagctcggtggagtaccagccgtcgaccatcgccgtagcatccatcctcgtcgctcgcggcagggagacgcccgccggcaatctggacgcgctcaaggcgatcctgggctcatcatttccgcagctagacaccgggcatgtgtactcctgctacagcgcaatgattcgggaggacgacaagtcgccgacgcagtcgacgtcgacgtcgacgggggtggcgtcctcgggcgtctctgtcgccgcgcacgccggggggagcgggagtcccagccccccgggcgcttccgtgtccgtgggcgccaataatgccgctggcaccgccccgccggcaaccacggacaaccgcaacaagaggagacggttgcgctcacctcagcgacagtaggagcagctcagctgctggcagtgcattgcagtgcagtgcagtccagctgcgttttcttttttcagctcaccatttccttttgctgccgattgtttcttcaggggtggccgtagagtgatttggtaatttagtgccggaaagattagtgcggtgtcgcagagtgatttggtaatttagtgccggaaagatttctttgttttgaggagatctttcgcgggaccaaagggaggggggcagtgtaaagacgacagaacaagcgtgaaggcctcgagagtcgagacctcacagggtaccgcctagcgcctactggggtgaaagtgaagtcaaggagtcgggagggtgtgtgtgaataccgtttgtagcagctagtgcgtccgtctgtctttttttttttctttctgtttattaattattaatagcctgctagatttcatttaaaaaaaaaaaaaaaaaaaaaaaaaaaaaaaaaaaa

SEQ ID NO: 2660 - DNA, 1497 bp, Zea mays
  Clone ID: PAT_MRT4577_75907C.1
atacatactatcaggctagaccgggactgagtatagtacctctcttcccgctctcctctcgaggcggccggacgcctgcggcctgcctgcctgcctgcctgagtcctgacaccatactatacctccccctccccggccctgtcctactagccgtcagaggtttgccgcctcctcgctcctcgtcttcatcaccctctctctctctcttccttcgtcctcgacctgtggccacctgtggcgtcacgctttataagagcacgcggccggcaaccatctcccttgccacccacaagtagagaagaatcttttgttgctgacgcctgagacgctggcactgccgccgcgccgtctggagagaaagagcagagggacactgaagcagaggagccgaggggtagcgacgagagacgagcgagagcggccgacggagatggaagcaggaggagcaggagcggagggggtgatgagggtgctgctggtggacgactcccccgtcgaccgccgcgtggcgcagctgctcctcagcagcaactcctgcgccggctcattccacgtcatcgccgtcgacagcgccaagaaggcgatggagttcctcggcctcaaggacggcggcaaggagcaggccatcgacatggtgctcacggactactgcatgccagagatgaccggctacgacctgctcaaggccatcaaggcgctgaacccgctgaagccgatccctgtcatcgtcatgtcgtcagaagacgagccccagaggatcagccgatgcctgaacgccggcgccgaggacttcatcgtgaagcccctgcagagcaaggacgtgcagcgcctccggaactgctccacggtcgggaggcccagcaacaagggcggcgccacgttgccgtgcgaggagaacgccgtggccaagtggagtaacaacaagctgccgccctccgccggcgccggcgccggcgccagcgccacgtcgccgtcggggcggcgggcgaacctcgccggagtcgccatgcgccaggtgctgcactcgtcgagagtggagatctcgcagtacctgccgctcctgctcaagctcgtcgtgctggcgtacgccgcgctgtgcctgggcgagctcctgcacagatggtcgtcgggtggcagctgctcgctctccccgtggtgcgcctgatcaggaaggagcaagcagcgcaaaaggccagcaacggtgcaagagcccccctgggcaccgacgacaggagactgctgatgcaccaagcattatttcagaggctccaatagccctagtcttttaatttaggtagatgagattgtctgctctgagatcctaaccggggtttcgaccgatgatgagtccccccgtggcttttgttcgttgatttgaggggccggggccgtagacgtaggaaggagaggaacggaacgaaccccttgtatcctctgctctgtatagaatgaatgaatgaacgaatgaatcagaatgcaacgcgtcaaaaaaaaaaa

SEQ ID NO: 2661 - DNA, 2130 bp, Zea mays
  Clone ID: PAT_MRT4577_75935C.1
ctcgaggccggccggaaacccgggtctgggtggcgtcgcctttcatcattcccccctcgtgctctctctcgaaccttcttccaaagcacccgaaccctagtgatctcggaaccctagccgcgcgcggatctcggcttttccccttcctccacgccagccatggacggggacttcgagatgcctcccgccggcgccgatgacatgatgggcgacgacgagatgggcgacttcggcggcgacgagggcccggtgatgaaggtgggcgaggagaaggaggtcggcaaggaggggctcaagaagaagctgctcaaggagggcgagggctgggagactcccgaggtcggcgacgaggttgaagtgcattacacgggcacgctccttgatgggacaaaattcgactcaagccgtgatcgtggagaacccttcaagttcaagcttggacaaggtcaagtgataaagggttgggatcaaggaatcaagaccatgaagaaaggagaaaatgctatttttaccattcctccagagctggcttatggagcatctggttcacctccaactatcccacccaatgcaaccctgcagtttgatgttgagctgctttcatggaccagtgtcaaagacatttgcaaagatggcggcatattcaagaagatccttaaagagggagagaaatgggagaacccaaaggatcctgatgaagtacttgtgaaatacgaggcctgtctggaagatggtactgttgtatccaagtctgagggggttgagtttactgtgaaagatggctacttttgtcctgccctggctaaagctgtcaaaaccatgaaaaaggcagagaaggtgctccttacagtaaagccacaatatggatttggtgagaagggtagaccagcagctggagaggaaggtgctgtgccgccaaatgcttcgctgctcattgaccttgagttgatttcatggaagactgtcacagaaattggggatgataagaaaatccttaagaaggttctcaaggagggagaaggttatgagcgtcccaatgagggtgctgttgttgaagtcaaaattatcggaaagcttctggatggcgcggtgtttacaaagaaggggcatgacgaagagctatttaaattcaagaccgatgaagaggaagttattgccggtcttgatcgtgctgtgttgaacatgaagaagggcgaggttgctcttgtcacaattcctcctgaatatgcatttggttcgcctgcgtcaacgcaggatcttgctgttgttccacctaacagcacagtgatatatgaagttgagcttatttcatttgtgaaggacaaggagtcgtgggacttgaacaatgaagagaagattgaggctgctggtaagaagaaagaggaagggaatgcattgttcaaatcaggcaaatatactagagcttccaagcgatacgagaaggctgccaagtacattgagtacgacacttcgttcagtgaagatgagaagaagcaatccaagcaactgaagatcagctgcaacctaaacaatgctgcctgcaaactgaagttgaaggattacaaggaagctgcgaagctttgcaccaaggttctggaacttgacagccaaaatgtcaaagctctctacaggagggtgcaagcttacattcaacttgctgacctagagctagcagaggccgatatcaaaaaggcactggaaatcgatcctgacaacagggatgtcaagttggaatataagatcctgaaggagaagatcaaggagtacaacaagaaggacgccaaattctacagcaacatgttcgccaagatgacaaagtaactgtcactgccctaagtcagcgtagcttttggggtggaggatgttgtggtgaagcaaagggattaaaaacaccgatttctgctgccaaaggacttcgcccgttgcttaacttctcgcttttcgcatactttgtagtcaactagtgtgcacggatgcttggatatgtgaaactgaggaacatgtacttcgaggattattattggttctgaatttttatgttttctggttcttgttaggaccattgaatgttctctatataattttcggacgccaaaaaaaaaaaaaccacgggagcaaaagttggatgcg

SEQ ID NO: 2662 - DNA, 2187 bp, Zea mays
  Clone ID: PAT_MRT4577_75937C.1
ccggccggactcggggggattaaacccgggtctgggcggcgccggccgggatcatttcccccctcgtgctctctctcgaaccttcttccaaagcacccgaaccctagtgatctcggaaccctagccgcgcgcggatctcggcttttccccttcctccacgccagccatggacgaggacttcgagatgcctcccgccggcgccgatgagatgatgggcgacgacgagatgggcgacttcggcggcgacgagggcccggtgatgaaggtgggcgaggagaaggaggtcggcaaggaggggctcaagaagaagctgctcaaggagggcgagggctgggagactcccgaggtcggcgacgaggttgaagtgcattacacgggcacgctccttgatgggacaaaattcgactcaagccgtgatcgtggagaacccttcaagttcaagcttggacaaggtcaagtgataaagggttgggatcaaggaatcaagaccatgaagaaaggagaaaatgctatttttaccattcctccagagctggcttatggagcatctggttcacctccaactatcccacccaatgcaaccctgcagtttgatgttgagctgctttcatggaccagtgtcaaagacatttgcaaagatggcggcatattcaagaagatccttaaagagggagagaaatgggagaacccaaaggatcctgatgaagtacttgtgaaatatgaggcccgtctggaagatggtactgttgtatccaagtctgagggggttgagtttactgtgaaagatggctacttttgtcctgccctggccaaagctgtcaaaaccatgaaaaaggcagagaaggtgctccttacagtaaagccacaatgtgagattccatttcaagatggatttggtgagaagggtagaccagcagctggagaggaaggtgctgtgccgccaaatgcttcgctgctcattgaccttgagttgatttcatggaagactgtcacagaaattggggatgataagaaaatccttaagaaggttctcaaggagggagaaggttatgagcgtcccaacgagggtgctgttgttgaagtcaaaattatcggaaagcttcaggatggcgcggtgtttacaaagaaggggcatgacgaagagccatttaaattcaagaccgatgaagaggaagttattgccggtcttgatcgtgctgtgttgaacatgaagaagggcgaggttgctcttgtcacaattcctcctgaatatgcatttggttcaactgagtcaaagcaggatcttgctgttgttccacctaacagcacagtaatatatgaagttgagcttatttcatttgtgaaggacaaggagtcgtgggacttgaacaatgaagagaagattgaggctgctggtaagaagaaagaggaagggaatgcattgttcaaatcgggcaaatatgctagagcttccaagcgatatgagaaggctgccaagtacattgagtacgacacttcgttcagtgaagatgagaagaagcaatccaagcaactgaagatcagctgcaacctaaacaatgctgcctgcaaactgaagttgaaggattacaaggaagctgcgaagctttgcaccaaggttctggaactagacagccaaaatgtcaaggctctctacaggagggtgcaagcttacattcaacttgctgacctagagctagcagaggccgatatcaaaaaggcactggaaatcgatcctgacaacagggatgtcaagttggaatataagatcctgaaggagaagatcaaggagtacaacaagaaggacgccaaattctacagcaacatgttcgccaagatgacaaagtagcttttggggtggaggatgttgtggtgaagcgaagggattaaaaacaccgatttctgctgccgaaggacttcgcccgttgcttaacttctcgcttttcgcatactttgtagtcaattagtgtgcacggatgcttggatatgtgaaactgaggaacatgtacttcgaggattattattggttctgaatttttatgttttctggttcttgttaggaccattgaatgttctctctatataattttcggacacatgttcttaataaaccacgggagcaaaagtttatgctaaaaaaaaaaaaaaaaaaggcccctagggcccacccctgggggagagtttttctct

SEQ ID NO: 2663 - DNA, 301 bp, Zea mays
  Clone ID: PAT_MRT4577_75952C.1
gaacgaacgacctgccccatatgacctttgtttccagcagggatgatgtgggaaagtgcatggccttttattttgctcaggggatcctccaacatgaccccttcaaggtcctggaccaaaggggagtggccgacctgttaaattttgctacagaaaggggcctcaatgctagccctaacttgaaggtggccatttgtggaaaacacggtggaaagccttcctctgtggccttcttcacaaaggctgggctgaattacttatcttgcccccctttcagggttcctattgctaggctaacttc

SEQ ID NO: 2664 - DNA, 885 bp, Zea mays
  Clone ID: PAT_MRT4577_7601C.1
taattcggcacgaggttcccctcctccaagcaaatccgaggcccacccacgggccgctcgaacatctgtcaccgccaagtggccccaccccacccctcccctccattgccccttcttctacaaataccccggccggccgcggccgttcccgaatcgagcggtgactggcgaggcaaaagcgcaaacgcgaccacagacagagcgcgcttcaaggccttttttttttttttttgagataacaaggaggagaggaggagatggcggtcacgatcacctgggtgaaggcgaggcagatcttcgacagccgcggcaaccccaccgtcgaggtggacgtgggcctcagcgacggcagctacgcgaggggggccgtacccagcggcgcatccactggaatatatgaggccttggagttgagggatggaggatctgattatcttggcaagggtgttcttaaggctgtcagcaacgtaaacaacattattggaccagcgattgttggaaaggaccccactgagcaggttgagattgacaacttcatggtccaacagcttgatggaacctccaatgagtggggctggtgcaaacagaagcttggagcaaatgccatccttgcggtttcacttgctgtgtgcaaagctggagctatggtgaagaagattcctctttaccagcacatcgcaaatcttgctgggaacaaaactctggtgctccctgtacctgcctttaatgtgattaatggagggtcacatgctggaaacaagcttgccatgcaggagttcatgatcctcccaactggtgcctcctcgttcaaggagccatgaagatgggaagttgaggtgtaccacaacctgaagagcataatcaagaagaagtacggtcaggatg

SEQ ID NO: 2665 - DNA, 202 bp, Zea mays
  Clone ID: PAT_MRT4577_76050C.1
ccaattctctatagtgagtcgtattacctgagcctccagcgaccggctccaccaccatctgcgcgcttcgcgcgcgcgcaagggaccggtgtggcatctgaggctccattgacctcttagcgggtgtattagcaatagtgacagccctggtgcctgtgtgcgccgatgcccatggccattgtctctatacatcctctagctc

SEQ ID NO: 2666 - DNA, 371 bp, Zea mays
  Clone ID: PAT_MRT4577_76057C.1
gtcattcattacggtttttttttcaaaacactgggggacatacaataaacgactggcaggcaaaatcggacatttccaatagaatggaaacgaattgtttgtatcgcatatacggattggccatttttttctcagttactttccataaataacaaaataaatcgcacttggggtcatactgtgggtataccaagtctttgttgcatagcaaacctgttgtaaccacggttaaatccctaaattgcaaagatatttgagctataaatatcaacaacattctgtaaagggttcctttttatccttatggatcctattggcaggagcgttgtatccacccttaaggattactgctttgtgaaaaccttacaaac

SEQ ID NO: 2667 - DNA, 384 bp, Zea mays
  Clone ID: PAT_MRT4577_7607C.1
cccgtacctctcaccagcggtgtcttctgtatgtgcaaacccaattcttggaccctggaggatccaacaggcaagcgcagctggcatcttacctttatcacccatgttcctccaacaattatcatccttattacaacagtcacctttggtgcatctattggcacaaaacatcatggcacatcaactaccacaacttgtactagcataccttgctgcctactatcagcatcagcagcatatttcattcaaccaactaggttcattgaactctggttcttatttgcaacaactgcaactaccattcaatcagctacctgcttgcctacgcttagcaatctactccattcaaccaactagcatcattcaactcttttgcttatttac

SEQ ID NO: 2668 - DNA, 817 bp, Zea mays
  Clone ID: PAT_MRT4577_76608C.1
atctcccacagcgccacctctcccttccagtcatctgacatctgctcccgtcctctcctcttctcttccccccgaagcagcagcgtccctcctctccgcccggatcgcgatggccgccgccgccgtcgccgccgactccaagatcgacaacctccgcgacgccgtcgccaagctcggcgagatcagcgagaacgagaaggccgggttcatcagcctcgtctcgcgctacctcagcggcgaggcggagcagatcgagtggagcaagatccagacccccaccgatgaggtggtggtgccctacgacaccctcgcgccccctcccgaagatctcgacgccatgaaggccctgctcgacaagctcgtggtgctcaagctcaacggaggcctcggcaccaccatgggctgcaccggccccaagtctgtcattgaagttcgcaatgggtttacatttcttgaccttattgtgattcagattgagtccctgaacaagaagtatggatgcagtgttcctttgcttctaatgaactctttcaacactcatgatgacacacagaagattgttgagaagtactccaactccaacattgaaattcacactttcaaccagagccaataccctcgcattgttactgaagacttcttgccacttccaagcaaagggcagacagggaaggatggctggtaccccccaggccacggtgatgtgttcccctctttgaacaacaggggaaaactcgataccttgctgtcacaggggaaaggagtatgtcttcgtggcgaactcagacacttgggtgctattgttgacatcaagata

(The sequence listing continues in the following parts.)

1) A recombinant DNA construct comprising a polynucleotide selected from the group consisting of a polynucleotide comprising a nucleic acid sequence selected from the group consisting of SEQ ID NO: 1-3549.

2) A recombinant DNA construct comprising a polynucleotide selected from the group consisting of a polynucleotide encoding a polypeptide having an amino acid sequence selected from the group consisting of SEQ ID NO: 3550-7098.

3) A method of producing a plant having an improved property, wherein said method comprises transforming a plant with a recombinant construct comprising a promoter region functional in a plant cell operably joined to a polynucleotide comprising coding sequence for a polypeptide associated with said property, and growing said transformed plant, wherein said polypeptide is selected from the group consisting of:
a) a polypeptide useful for improving plant cold tolerance, wherein said polypeptide comprises a sequence identified as such in Table 1;
b) a polypeptide useful for manipulating growth rate in plant cells by modification of the cell cycle pathway, wherein said polypeptide comprises a sequence identified as such in Table 1;
c) a polypeptide useful for improving plant drought tolerance, wherein said polypeptide comprises a sequence identified as such in Table 1;
d) a polypeptide useful for providing increased resistance to plant disease, wherein said polypeptide comprises a sequence identified as such in Table 1;
e) a polypeptide useful for galactomannan production, wherein said polynucleotide comprises a sequence identified as such in Table 1;
f) a polypeptide useful for production of plant growth regulators, wherein said polypeptide comprises a sequence identified as such in Table 1;
g) a polypeptide useful for improving plant heat tolerance, wherein said polypeptide comprises a sequence identified as such in Table 1;
h) a polypeptide useful for improving plant tolerance to herbicides, wherein said polypeptide comprises a sequence identified as such in Table 1;
i) a polypeptide useful for increasing the rate of homologous recombination in plants, wherein said polypeptide comprises a sequence identified as such in Table 1;
j) a polypeptide useful for lignin production, wherein said polypeptide comprises a sequence identified as such in Table 1;
k) a polypeptide useful for improving plant tolerance to extreme osmotic conditions, wherein said polypeptide comprises a sequence identified as such in Table 1;
l) a polypeptide useful for improving plant tolerance to pathogens or pests, wherein said polypeptide comprises a sequence identified as such in Table 1;
m) a polypeptide useful for yield improvement by modification of photosynthesis, wherein said polynucleotide comprises a sequence identified as such in Table 1;
n) a polypeptide useful for modifying seed oil yield and/or content, wherein said polypeptide comprises a sequence identified as such in Table 1;
o) a polypeptide useful for modifying seed protein yield and/or content, wherein said polypeptide comprises a sequence identified as such in Table 1;
p) a polypeptide encoding a plant transcription factor, wherein said polypeptide comprises a sequence identified as such in Table 1;
q) a polypeptide useful for yield improvement by modification of carbohydrate use and/or uptake, wherein said polypeptide comprises a sequence identified as such in Table 1;
r) a polypeptide useful for yield improvement by modification of nitrogen use and/or uptake, wherein said polypeptide comprises a sequence identified as such in Table 1;
s) a polypeptide useful for yield improvement by modification of phosphorus use and/or uptake, wherein said polypeptide comprises a sequence identified as such in Table 1; and
t) a polypeptide useful for yield improvement by providing improved plant growth and development under at least one stress condition, wherein said polypeptide comprises a sequence identified as such in Table 1.
